United States Patent Application Publication US 2022/0090207 A1 - sequence listing, part 24

SEQ ID NO: 328930 - DNA, 299 bp, Homo sapiens; identical to SEQ ID NO: 276289
  chr21:45768770-45769069
  hypo

SEQ ID NO: 328931 - DNA, 256 bp, Homo sapiens
  chr21:45790610-45790866
  hypo
atgaatgtgtccggcggggtcggactggaccagctgttgggctttgtttgctctttttacgaattgaaaaactgaagccaggagcggctgggtgacgtcccaggtcactccttactttcctccccacgctgagctcagacgacttcccgtgacaccactgttggtggcggaatgggactgtggctgcttccgctcagccacgctccctctctgtggacggcggagggtgtgtgtcccagcccggctgccgccctcc

SEQ ID NO: 328932 - DNA, 66 bp, Homo sapiens; identical to SEQ ID NO: 220481
  chr21:45791167-45791233
  hypo

SEQ ID NO: 328933 - DNA, 223 bp, Homo sapiens
  chr21:45819156-45819379
  hypo
gggctctcatatctccgcccaggggtcttcaccgagtgctaccggaaggacgaagagagagcccagaaactgctcacccgcgtgtccgaggcctgggggaagaccacctgcctgcagctcgccctggaggccaaggacatgaagtttgtgtctcacgggggcatccaggtgacctcccaagagccccttccagaaacagacgcctgtggtgcctgcagggcgg

SEQ ID NO: 328934 - DNA, 339 bp, Homo sapiens; identical to SEQ ID NO: 220483
  chr21:45819409-45819748
  hypo

SEQ ID NO: 328935 - DNA, 267 bp, Homo sapiens; identical to SEQ ID NO: 276292
  chr21:45834112-45834379
  hypo

SEQ ID NO: 328936 - DNA, 160 bp, Homo sapiens
  chr21:45847672-45847832
  hypo
cctctgcctggagccggaggttgagtaaggaggtggtaggaggcgatggggcctgagagcagaggtcctggccaggtggctgcagctgcaggcggcccgctctggtgttgggggtatgtgggacgggcaagggcgggtgtttagggaggtgcatccggtg

SEQ ID NO: 328937 - DNA, 60 bp, Homo sapiens; identical to SEQ ID NO: 220485
  chr21:45847973-45848033
  hypo

SEQ ID NO: 328938 - DNA, 142 bp, Homo sapiens; identical to SEQ ID NO: 276294
  chr21:45871121-45871263
  hypo

SEQ ID NO: 328939 - DNA, 153 bp, Homo sapiens; identical to SEQ ID NO: 276295
  chr21:45895239-45895392
  hypo

SEQ ID NO: 328940 - DNA, 38 bp, Homo sapiens; identical to SEQ ID NO: 276296
  chr21:45895655-45895693
  hypo

SEQ ID NO: 328941 - DNA, 105 bp, Homo sapiens
  chr21:45919228-45919333
  hypo
caataaataggtggcggcaatggcgggacggcaccacacctgctcaggcggccggacgcacactgcaggagtggctggcgagaggccagccgcagggacatgaac

SEQ ID NO: 328942 - DNA, 218 bp, Homo sapiens; identical to SEQ ID NO: 276298
  chr21:45922476-45922694
  hypo

SEQ ID NO: 328943 - DNA, 336 bp, Homo sapiens
  chr21:45939229-45939565
  hypo
agccactgtccccgcgtatcgagccctccttgggagtcccaatttccagcccatatcacgctcttggccccagcttgcagctgctttcgcatctcaacctcaccagcctcaagtccaactccaggtcaatgattactggtcagaggggccattcctgctgagccctgtggtcaggctaacccatgaccgaaggctcctgaaccctccttcaggtccgctgtccgcacaccagcacgtggccaccagcccaggacacccttgtagtttcccagagtcttagcagcatgcgtgttgtggtgagaggactgtgcagggaccagtaagacaaggaactta

SEQ ID NO: 328944 - DNA, 176 bp, Homo sapiens
  chr21:45939814-45939990
  hypo
cctcctgaggctgttaccaaggccaatggctggaaggaatcttgctcacccccaatcccagtgcactgagcctcactctgcccccgtggcaggaggctcatcccgcctcttcctggctcccaggcacgctcacctgttccatccacagcactagcgagctcaaggtgtgttccttc

SEQ ID NO: 328945 - DNA, 180 bp, Homo sapiens
  chr21:45940260-45940440
  hypo
tccctgacatctgctctcctcgtgccctgaacatccacgtaaagctgcccttccccactggaccatgagtgcccgaagggtggggcggtggtcacctggatgacgctgtgccccagcctgccagagggctgagcacgtgggagtcccggagcaattctctgcacgcattaaggcgtgtga

SEQ ID NO: 328946 - DNA, 56 bp, Homo sapiens
  chr21:45940470-45940526
  hypo
ggcccctgcgggcttctcaaggtggtcacactcccggtttcctaagctgctcttac

SEQ ID NO: 328947 - DNA, 496 bp, Homo sapiens; identical to SEQ ID NO: 276302
  chr21:45941788-45942284
  hypo

SEQ ID NO: 328948 - DNA, 91 bp, Homo sapiens; identical to SEQ ID NO: 276303
  chr21:45951200-45951291
  hypo

SEQ ID NO: 328949 - DNA, 88 bp, Homo sapiens; identical to SEQ ID NO: 276304
  chr21:45951689-45951777
  hypo

SEQ ID NO: 328950 - DNA, 104 bp, Homo sapiens
  chr21:46035054-46035158
  hypo
tgctgaaaaatctccggcgcatgtacgtaagcggcactgtttgttaccatgaaaaattagaaacaacctaaatatccatccacgagggaatggaggcgaatgga

SEQ ID NO: 328951 - DNA, 34 bp, Homo sapiens; identical to SEQ ID NO: 220486
  chr21:46036538-46036572
  hypo

SEQ ID NO: 328952 - DNA, 44 bp, Homo sapiens
  chr21:46068601-46068645
  hypo
gacgcacccagggccgcagcctccagggcaccagagactttcag

SEQ ID NO: 328953 - DNA, 120 bp, Homo sapiens
  chr21:46068703-46068823
  hypo
acacccgggcccctgtgctctctgtggcagctgacatgcaggtctgctggtggccgtgtgtccatgcaactgtccaagcccacgcggtcaagctgccgtgccagacgcagaggagaaact

SEQ ID NO: 328954 - DNA, 196 bp, Homo sapiens; identical to SEQ ID NO: 276309
  chr21:46144852-46145048
  hypo

SEQ ID NO: 328955 - DNA, 293 bp, Homo sapiens; identical to SEQ ID NO: 276310
  chr21:46155037-46155330
  hypo

SEQ ID NO: 328956 - DNA, 238 bp, Homo sapiens
  chr21:46173353-46173591
  hypo
accctcagaggctcctgggggaggcccggttctgtccagcagcatgggagagagatggtgctgatgaagaggacaacacggggctgtctgcagagcacctgccacgcgccaggctctgtgtccacaagcacggcggctgctcccacatgacggagctcgtgcggcagctccaggactgtctggtgccagagccccagctctccgccagccccaggccactgtgcgaggccctcagtga

SEQ ID NO: 328957 - DNA, 192 bp, Homo sapiens
  chr21:46183769-46183961
  hypo
acacccagcacacccggggcaccctgcacacccaggcacccagcacactcaggcaccctgcacacccaggacacccagcacacccggggcacctacacacccggggcacctacacacccggggcacctacacacctggggcaccctgcacatccgggcacccagcacacccaggcaccctgcacacccagga

SEQ ID NO: 328958 - DNA, 150 bp, Homo sapiens
  chr21:46184287-46184437
  hypo
ggcacctacacacccggggcatccagcacacccaggacaccctgcacacctggggcacctacacacccagggcacccagcatacccgggcatccagcacaactggcacaactggggcacccgggacacctggcgcactcggggcacccac

SEQ ID NO: 328959 - DNA, 38 bp, Homo sapiens; identical to SEQ ID NO: 276314
  chr21:46186208-46186246
  hypo

SEQ ID NO: 328960 - DNA, 190 bp, Homo sapiens; identical to SEQ ID NO: 276315
  chr21:46187770-46187960
  hypo

SEQ ID NO: 328961 - DNA, 41 bp, Homo sapiens; identical to SEQ ID NO: 220487
  chr21:46193373-46193414
  hypo

SEQ ID NO: 328962 - DNA, 43 bp, Homo sapiens; identical to SEQ ID NO: 220488
  chr21:46193542-46193585
  hypo

SEQ ID NO: 328963 - DNA, 167 bp, Homo sapiens; identical to SEQ ID NO: 276317
  chr21:46199322-46199489
  hypo

SEQ ID NO: 328964 - DNA, 110 bp, Homo sapiens; identical to SEQ ID NO: 276318
  chr21:46200862-46200972
  hypo

SEQ ID NO: 328965 - DNA, 34 bp, Homo sapiens; identical to SEQ ID NO: 220489
  chr21:46206038-46206072
  hypo

SEQ ID NO: 328966 - DNA, 111 bp, Homo sapiens; identical to SEQ ID NO: 220490
  chr21:46206226-46206337
  hypo

SEQ ID NO: 328967 - DNA, 197 bp, Homo sapiens; identical to SEQ ID NO: 220491
  chr21:46270477-46270674
  hypo

SEQ ID NO: 328968 - DNA, 184 bp, Homo sapiens; identical to SEQ ID NO: 220492
  chr21:46277397-46277581
  hypo

SEQ ID NO: 328969 - DNA, 59 bp, Homo sapiens
  chr21:46277614-46277673
  hypo
ggctcccgcagcctcacccctctgctgccccggacgctgagatccgcatttcttagttt

SEQ ID NO: 328970 - DNA, 42 bp, Homo sapiens; identical to SEQ ID NO: 276325
  chr21:46278609-46278651
  hypo

SEQ ID NO: 328971 - DNA, 403 bp, Homo sapiens; identical to SEQ ID NO: 276326
  chr21:46306497-46306900
  hypo

SEQ ID NO: 328972 - DNA, 502 bp, Homo sapiens
  chr21:46309404-46309906
  hypo
ccctccctggaagacggggcagcacggctaagctcctgcttggcctgggaaccgagacccgcccgaaaccccactgcggttgctccctccggcccgcctgcctcctccagcctgggggatgttcctgagcaaaaggcatggggccactagccaggcccttctgcccccgccagccacgtggccgcctcctggccagtctggacctcccctgccctgctgtgaatgggacctcaatagggctatgaccgttcctcctgtgggccctccccacaaggacgccttgtcctcatggacacagaaactgaggcagggcggggtgcagggccatccaagttcctgctgacgcccggtggctgggcgagacttgcactgtctgtcctcaggatcccccctttctgttccactcgttgaatggtccagaacgcaccccccaacaccaagtctgtgccgcaggacggccgttgtccagcagggacccacgggctcacccgggccgccgcag

SEQ ID NO: 328973 - DNA, 36 bp, Homo sapiens
  chr21:46309961-46309997
  hypo
atatcagcttgccggggacgtcgctggtgtggcaca

SEQ ID NO: 328974 - DNA, 56 bp, Homo sapiens
  chr21:46311697-46311753
  hypo
tcaacagggacctgcgcccgcctcacctgcagatgccgcactccaagaagcccttg

SEQ ID NO: 328975 - DNA, 62 bp, Homo sapiens
  chr21:46315933-46315995
  hypo
agtgatcccgcctgcggtgtgagtgctcccgcctgcggtgtgagtgatcccgcctgcagtgt

SEQ ID NO: 328976 - DNA, 175 bp, Homo sapiens
  chr21:46316855-46317030
  hypo
tggtgaggaggggaccgtcatggccacctacagatgggacacagggctgtgacatcctgaccagcaggtggtctctgtggatgtccggccccagccctgccctgcgctgacccactgtcccggcagcctgaccagctctgggtgcccactcggagggtcccccagacacctgccc

SEQ ID NO: 328977 - DNA, 189 bp, Homo sapiens; identical to SEQ ID NO: 220493
  chr21:46317252-46317441
  hypo

SEQ ID NO: 328978 - DNA, 339 bp, Homo sapiens
  chr21:46319505-46319844
  hypo
ttgtatctctaaagtcctttgcggcccccagagcctacaacgtcaggctgcaagagcgtcgcactacggccagcgaggacaagccccttgtgaccagtggttgcctctcggcccacggctgatcccagccagaagtcctggcccctctgagccattgagatgcctccgcagagaggctcatcctaacccgtgcatcctgggctccttctcgcctctgtccctccctgcatgttcctcatggtccccgcagccgctcacccagctcaggcaatgggggcagggaggggccacactggaggaggcggactcaggggcagcagggaacgtacagtggaggcc

SEQ ID NO: 328979 - DNA, 654 bp, Homo sapiens; identical to SEQ ID NO: 276333
  chr21:46320219-46320873
  hypo

SEQ ID NO: 328980 - DNA, 130 bp, Homo sapiens
  chr21:46321383-46321513
  hypo
ccaagcaggggcagcggcctcaccgggcaggcggcgacctgcatcatggcgtccagcccaccctcgggtgcatccaggtttccggaaatcagctgcttcccgacctcggtctgaaactggttggagttgt

SEQ ID NO: 328981 - DNA, 659 bp, Homo sapiens; identical to SEQ ID NO: 276335
  chr21:46323289-46323948
  hypo

SEQ ID NO: 328982 - DNA, 88 bp, Homo sapiens; identical to SEQ ID NO: 276336
  chr21:46324432-46324520
  hypo

SEQ ID NO: 328983 - DNA, 242 bp, Homo sapiens; identical to SEQ ID NO: 276337
  chr21:46324928-46325170
  hypo

SEQ ID NO: 328984 - DNA, 37 bp, Homo sapiens; identical to SEQ ID NO: 276338
  chr21:46325576-46325613
  hypo

SEQ ID NO: 328985 - DNA, 447 bp, Homo sapiens; identical to SEQ ID NO: 220496
  chr21:46326563-46327010
  hypo

SEQ ID NO: 328986 - DNA, 178 bp, Homo sapiens; identical to SEQ ID NO: 220497
  chr21:46328823-46329001
  hypo

SEQ ID NO: 328987 - DNA, 417 bp, Homo sapiens
  chr21:46329031-46329448
  hypo
atgctgagcctgcgggtgcgatttgatgagggcagaacctcaccagcccacagtggctgcgaggggatcatgcagcgggatggggaggccggggggatgccgtctcagcagagccgtccacgctgacctcatcaagactgggacggggccacagcagtgcctctcatgggcacttaggacaccgtcactgaggggctcctgccaaagcacacctgagtccaggcagaggaaactccagacaagacccccgagggtcatgctacaaagctgctctcctgacttcctcagaaacgcccaaggacaggaaagacaaagaaagctgaggacttgtccagattcaagaagcccaaggagacggctgagcgtagggcgagcctgggtgaggagattcagagcgttagacggctgagcgcagtg

SEQ ID NO: 328988 - DNA, 468 bp, Homo sapiens; identical to SEQ ID NO: 276341
  chr21:46330230-46330698
  hypo

SEQ ID NO: 328989 - DNA, 216 bp, Homo sapiens; identical to SEQ ID NO: 295181
  chr21:46351437-46351653
  hypo

SEQ ID NO: 328990 - DNA, 394 bp, Homo sapiens; identical to SEQ ID NO: 295182
  chr21:46352279-46352673
  hypo

SEQ ID NO: 328991 - DNA, 170 bp, Homo sapiens; identical to SEQ ID NO: 220500
  chr21:46353949-46354119
  hypo

SEQ ID NO: 328992 - DNA, 96 bp, Homo sapiens; identical to SEQ ID NO: 220501
  chr21:46368232-46368328
  hypo

SEQ ID NO: 328993 - DNA, 511 bp, Homo sapiens; identical to SEQ ID NO: 276345
  chr21:46373000-46373511
  hypo

SEQ ID NO: 328994 - DNA, 36 bp, Homo sapiens; identical to SEQ ID NO: 276346
  chr21:46383298-46383334
  hypo

SEQ ID NO: 328995 - DNA, 200 bp, Homo sapiens; identical to SEQ ID NO: 220503
  chr21:46392162-46392362
  hypo

SEQ ID NO: 328996 - DNA, 290 bp, Homo sapiens; identical to SEQ ID NO: 276348
  chr21:46397987-46398277
  hypo

SEQ ID NO: 328997 - DNA, 334 bp, Homo sapiens; identical to SEQ ID NO: 276349
  chr21:46411918-46412252
  hypo

SEQ ID NO: 328998 - DNA, 57 bp, Homo sapiens
  chr21:46424403-46424460
  hypo
gtccacccccactgcggtgcagtgccagggtgagccagccacccccggcgggagaaa

SEQ ID NO: 328999 - DNA, 374 bp, Homo sapiens
  chr21:46424520-46424894
  hypo
tctgtgcgtttcccatggatgaggtcatagagcgcgtggccttccgtgcctgcctcttccgggcagcagcatggtgggtgtttctgaggctcctccgtgtcgctccacccgtcagcacttcatgcctctcggggctgggccacatttcgttgcagggatgggccacgtttttaacctgtccatcagcggacggacgtttgggctgattttatcttttggctatgatgaataacgcggtgatcaacattgattcacaagttttgtgcggacccgttttcagttgtcctgagtatcagcccgggcctagacttcccgggttatatggtgatacagtttaaacgcatgtccttgccaagcctcgtgttgaactgtca

SEQ ID NO: 329000 - DNA, 186 bp, Homo sapiens
  chr21:46452572-46452758
  hypo
gtgatggacatgggtagcacatgggccccatgtgtccgggagcctggggcctggtgcaccaggtctcagctccttcccaccgtgggttctgggccagttgcaggcagagaacagagcgggtgcctggctcaagccggccagtgtctcccccatgtctcagctccttcccaccgtgggttctgggcc

SEQ ID NO: 329001 - DNA, 57 bp, Homo sapiens
  chr21:46462853-46462910
  hypo
ctgtgggtgctccccgaggctgcccaagggcagcctggaggaggggaaggccccgct

SEQ ID NO: 329002 - DNA, 77 bp, Homo sapiens
  chr21:46462940-46463017
  hypo
cttgcacaaaccccacagcgcacacaggtaacacatcacggcatgcacgagtcacacaaacacggccgcaatgctgg

SEQ ID NO: 329003 - DNA, 234 bp, Homo sapiens
  chr21:46492081-46492315
  hypo
tcacaatagaaaccgtctctgtggagaggatggcacctgaagccatggaataggaagggagcatcagaggctgctggctggtcctgcagagccgcctgagaggcctgtgggagcagcagagggtcccggccttgggcgccatccgctctctgctgctctggagggagaaaaaggacaagttgaaacttgcacaagcagcctccattctggggagttcccttgtattccccacac

SEQ ID NO: 329004 - DNA, 785 bp, Homo sapiens
  chr21:46492439-46493224
  hypo
cctggggagatggagggaagcaccatggggatttgctttttcttgctgccgacggagcccagccaccacgggagggaggcccggccagcctgcggtgggtgggtgacatgtggcccggatctgcccggggcgcctgcctgtaagtgggcccagcagacaccccatggagccgaggcaagccgtcccagctgaaccggcttaagctgcaggcccacagagtcatgagcagtgaagagaggttttcgccctctgaggtttggggtggcctgttacacagaaatacacacaacgtcctcaggcacgtatctctttaagaatgtgtcccgagaaggcgtcccaggagtcttgatttttatttagccgtccacggttgcccctttgggtgcttcgccttcagatggggtgaagggctcacttgttagctggctggccccaaagacaggcttgttttccaccaggcagtgactgaagccggcagcctgctgcataccgcgggccttcccctgacctgtccgggactgcgggctggcggctgacacctgcggagtgcttaccgcataccaggctcccaaacttccatctgtgttcgtcttttaagttttgttgttttccagagtcggagtctcagtgttgcccgggccagagcgcagcggccatttataggcgcggacctcggcctcgcacaccacagctccagctctgagacacaagcgacccgcacccccccaccgcccagccccagcctccagactggctgagatcacagtgtgcgccaccccatccct

SEQ ID NO: 329005 - DNA, 49 bp, Homo sapiens
  chr21:46549426-46549475
  hypo
ctctgtggatactgacgagcgcccactgggcctcagatgccctctgggc

SEQ ID NO: 329006 - DNA, 51 bp, Homo sapiens; identical to SEQ ID NO: 100440
  chr21:46549556-46549607
  hypo

SEQ ID NO: 329007 - DNA, 165 bp, Homo sapiens; identical to SEQ ID NO: 276355
  chr21:46645777-46645942
  hypo

SEQ ID NO: 329008 - DNA, 246 bp, Homo sapiens; identical to SEQ ID NO: 276356
  chr21:46673896-46674142
  hypo

SEQ ID NO: 329009 - DNA, 117 bp, Homo sapiens; identical to SEQ ID NO: 226304
  chr21:46686339-46686456
  hypo

SEQ ID NO: 329010 - DNA, 120 bp, Homo sapiens
  chr21:46723184-46723304
  hypo
gtgtgtgggaggcccgggcctcgagccatgtcttggtgcgtgtcggggggacgtgttctgtgaagatgccgcagctgcctcacctcctttccatgtgcggggatgggtgggcagcgtcct

SEQ ID NO: 329011 - DNA, 91 bp, Homo sapiens
  chr21:46723334-46723425
  hypo
agcatcacccttgggccaacaccgccaccagcagcggccggaccatggagctgagcatcagctggacccagggcagcgaggggctgtgggc

SEQ ID NO: 329012 - DNA, 171 bp, Homo sapiens; identical to SEQ ID NO: 276359
  chr21:46726342-46726513
  hypo

SEQ ID NO: 329013 - DNA, 354 bp, Homo sapiens; identical to SEQ ID NO: 276360
  chr21:46727437-46727791
  hypo

SEQ ID NO: 329014 - DNA, 286 bp, Homo sapiens; identical to SEQ ID NO: 220505
  chr21:46748050-46748336
  hypo

SEQ ID NO: 329015 - DNA, 70 bp, Homo sapiens; identical to SEQ ID NO: 276362
  chr21:46756061-46756131
  hypo

SEQ ID NO: 329016 - DNA, 255 bp, Homo sapiens; identical to SEQ ID NO: 220506
  chr21:46763204-46763459
  hypo

SEQ ID NO: 329017 - DNA, 82 bp, Homo sapiens; identical to SEQ ID NO: 276364
  chr21:46763922-46764004
  hypo

SEQ ID NO: 329018 - DNA, 500 bp, Homo sapiens; identical to SEQ ID NO: 276365
  chr21:46771045-46771545
  hypo

SEQ ID NO: 329019 - DNA, 411 bp, Homo sapiens; identical to SEQ ID NO: 220507
  chr21:46772699-46773110
  hypo

SEQ ID NO: 329020 - DNA, 651 bp, Homo sapiens; identical to SEQ ID NO: 276367
  chr21:46779376-46780027
  hypo

SEQ ID NO: 329021 - DNA, 164 bp, Homo sapiens; identical to SEQ ID NO: 276368
  chr21:46785896-46786060
  hypo

SEQ ID NO: 329022 - DNA, 199 bp, Homo sapiens; identical to SEQ ID NO: 220508
  chr21:46799933-46800132
  hypo

SEQ ID NO: 329023 - DNA, 344 bp, Homo sapiens; identical to SEQ ID NO: 206038
  chr21:46800406-46800750
  hypo

SEQ ID NO: 329024 - DNA, 318 bp, Homo sapiens; identical to SEQ ID NO: 295187
  chr21:46800780-46801098
  hypo

SEQ ID NO: 329025 - DNA, 242 bp, Homo sapiens; identical to SEQ ID NO: 226307
  chr21:46801324-46801566
  hypo

SEQ ID NO: 329026 - DNA, 589 bp, Homo sapiens; identical to SEQ ID NO: 220511
  chr21:46801820-46802409
  hypo

SEQ ID NO: 329027 - DNA, 218 bp, Homo sapiens; identical to SEQ ID NO: 220512
  chr21:46802648-46802866
  hypo

SEQ ID NO: 329028 - DNA, 87 bp, Homo sapiens; identical to SEQ ID NO: 220513
  chr21:46804103-46804190
  hypo

SEQ ID NO: 329029 - DNA, 288 bp, Homo sapiens; identical to SEQ ID NO: 220514
  chr21:46804430-46804718
  hypo

SEQ ID NO: 329030 - DNA, 141 bp, Homo sapiens
  chr21:46808693-46808834
  hypo
gcgcagggcgaggtcgggggaatggactcccctgggtttctccctgccgatcgctgtagtggttgagtcctccactgagcacagccactcctgtaggcttaccccgctgcagctcgctctcggatcctaataaacaagtga

SEQ ID NO: 329031 - DNA, 142 bp, Homo sapiens; identical to SEQ ID NO: 276378
  chr21:46808897-46809039
  hypo

SEQ ID NO: 329032 - DNA, 105 bp, Homo sapiens; identical to SEQ ID NO: 276379
  chr21:46810057-46810162
  hypo

SEQ ID NO: 329033 - DNA, 343 bp, Homo sapiens; identical to SEQ ID NO: 276380
  chr21:46811012-46811355
  hypo

SEQ ID NO: 329034 - DNA, 163 bp, Homo sapiens; identical to SEQ ID NO: 276381
  chr21:46811415-46811578
  hypo

SEQ ID NO: 329035 - DNA, 352 bp, Homo sapiens; identical to SEQ ID NO: 220515
  chr21:46812000-46812352
  hypo

SEQ ID NO: 329036 - DNA, 94 bp, Homo sapiens; identical to SEQ ID NO: 220516
  chr21:46812982-46813076
  hypo

SEQ ID NO: 329037 - DNA, 207 bp, Homo sapiens
  chr21:46813106-46813313
  hypo
agacctcaacacggccagcacggtgtgcatggtgtgcacgcctcctgcgccggggccaccagagtgggctctcaccggaggagaaagacagtcggggagagcagcgctgtctgtcacgctttgtcacgctttgccggtgtcatctgagaagtggtgcaggggacaaggggggcgtgacaggactggtcctgcggtagagaccctctg

SEQ ID NO: 329038 - DNA, 281 bp, Homo sapiens; identical to SEQ ID NO: 276384
  chr21:46813680-46813961
  hypo

SEQ ID NO: 329039 - DNA, 138 bp, Homo sapiens; identical to SEQ ID NO: 220518
  chr21:46827462-46827600
  hypo

SEQ ID NO: 329040 - DNA, 417 bp, Homo sapiens; identical to SEQ ID NO: 276386
  chr21:46834412-46834829
  hypo

SEQ ID NO: 329041 - DNA, 45 bp, Homo sapiens; identical to SEQ ID NO: 220519
  chr21:46835035-46835080
  hypo

SEQ ID NO: 329042 - DNA, 521 bp, Homo sapiens; identical to SEQ ID NO: 220520
  chr21:46835359-46835880
  hypo

SEQ ID NO: 329043 - DNA, 113 bp, Homo sapiens; identical to SEQ ID NO: 220521
  chr21:46835910-46836023
  hypo

SEQ ID NO: 329044 - DNA, 218 bp, Homo sapiens; identical to SEQ ID NO: 276390
  chr21:46837282-46837500
  hypo

SEQ ID NO: 329045 - DNA, 275 bp, Homo sapiens; identical to SEQ ID NO: 276391
  chr21:46837961-46838236
  hypo

SEQ ID NO: 329046 - DNA, 190 bp, Homo sapiens; identical to SEQ ID NO: 276392
  chr21:46838494-46838684
  hypo

SEQ ID NO: 329047 - DNA, 51 bp, Homo sapiens; identical to SEQ ID NO: 276393
  chr21:46838714-46838765
  hypo

SEQ ID NO: 329048 - DNA, 275 bp, Homo sapiens; identical to SEQ ID NO: 220523
  chr21:46839249-46839524
  hypo

SEQ ID NO: 329049 - DNA, 439 bp, Homo sapiens; identical to SEQ ID NO: 276395
  chr21:46841007-46841446
  hypo

SEQ ID NO: 329050 - DNA, 56 bp, Homo sapiens; identical to SEQ ID NO: 276396
  chr21:46841890-46841946
  hypo

SEQ ID NO: 329051 - DNA, 150 bp, Homo sapiens; identical to SEQ ID NO: 276397
  chr21:46842390-46842540
  hypo

SEQ ID NO: 329052 - DNA, 38 bp, Homo sapiens; identical to SEQ ID NO: 276398
  chr21:46844058-46844096
  hypo

SEQ ID NO: 329053 - DNA, 329 bp, Homo sapiens
  chr21:46844299-46844628
  hypo
aaacacgcctggagcgcagctctgctgtgggttagccgtgggtctctgggcgagggttcccgggatacagacacctgccccaaggtgccccacagaggatgacccccagggcagccgtgcctgagcctgcgtggtcacctcccacagtgccaaggcgctcccccaaggcccctgcggcccacctgaccagtggagaactcgcgagcactcggccagtggtgcctccaatttgcagcctccaatccctggtcagaggtgtgacctgaccctggaccagagcgctgggccaggtcctggtggcttctgcccttcagcttggaagctcctga

SEQ ID NO: 329054 - DNA, 448 bp, Homo sapiens; identical to SEQ ID NO: 220526
  chr21:46844763-46845211
  hypo

SEQ ID NO: 329055 - DNA, 322 bp, Homo sapiens; identical to SEQ ID NO: 276400
  chr21:46846292-46846614
  hypo

SEQ ID NO: 329056 - DNA, 81 bp, Homo sapiens; identical to SEQ ID NO: 220527
  chr21:46848491-46848572
  hypo

SEQ ID NO: 329057 - DNA, 52 bp, Homo sapiens; identical to SEQ ID NO: 220528
  chr21:46848762-46848814
  hypo

SEQ ID NO: 329058 - DNA, 686 bp, Homo sapiens; identical to SEQ ID NO: 220529
  chr21:46849579-46850265
  hypo

SEQ ID NO: 329059 - DNA, 32 bp, Homo sapiens; identical to SEQ ID NO: 276406
  chr21:46855682-46855714
  hypo

SEQ ID NO: 329060 - DNA, 820 bp, Homo sapiens; identical to SEQ ID NO: 220530
  chr21:46861363-46862183
  hypo

SEQ ID NO: 329061 - DNA, 117 bp, Homo sapiens; identical to SEQ ID NO: 220531
  chr21:46862421-46862538
  hypo

SEQ ID NO: 329062 - DNA, 302 bp, Homo sapiens; identical to SEQ ID NO: 220532
  chr21:46863356-46863658
  hypo

SEQ ID NO: 329063 - DNA, 44 bp, Homo sapiens; identical to SEQ ID NO: 220533
  chr21:46863708-46863752
  hypo

SEQ ID NO: 329064 - DNA, 68 bp, Homo sapiens; identical to SEQ ID NO: 220534
  chr21:46864062-46864130
  hypo

SEQ ID NO: 329065 - DNA, 172 bp, Homo sapiens; identical to SEQ ID NO: 276411
  chr21:46866054-46866226
  hypo

SEQ ID NO: 329066 - DNA, 312 bp, Homo sapiens; identical to SEQ ID NO: 276412
  chr21:46870763-46871075
  hypo

SEQ ID NO: 329067 - DNA, 65 bp, Homo sapiens; identical to SEQ ID NO: 276413
  chr21:46885376-46885441
  hypo

SEQ ID NO: 329068 - DNA, 348 bp, Homo sapiens; identical to SEQ ID NO: 276414
  chr21:46885701-46886049
  hypo

SEQ ID NO: 329069 - DNA, 285 bp, Homo sapiens; identical to SEQ ID NO: 220536
  chr21:46886369-46886654
  hypo

SEQ ID NO: 329070 - DNA, 324 bp, Homo sapiens; identical to SEQ ID NO: 276416
  chr21:46888080-46888404
  hypo

SEQ ID NO: 329071 - DNA, 241 bp, Homo sapiens; identical to SEQ ID NO: 276417
  chr21:46893644-46893885
  hypo

SEQ ID NO: 329072 - DNA, 291 bp, Homo sapiens
  chr21:46894480-46894771
  hypo
tgtgtgttgtgtggcgtgtgtgttggtggggtgtgtggaatcacgtggtacccaaggggagaatcccccagccccaggtgtgaggaacagcagggaattctcactcaggggcccagatcacaacatgccccacgtgaacatggacccacagcctcgctcctgggggcgtgggcaggagacgccgtggacgtggacccacagcctcgctcctgggggcgtgggcaggagacaccgtggctggactgtgggcagtgtgtgaacatccatgttactttcatgctttttctttat

SEQ ID NO: 329073 - DNA, 257 bp, Homo sapiens; identical to SEQ ID NO: 220538
  chr21:46894910-46895167
  hypo

SEQ ID NO: 329074 - DNA, 215 bp, Homo sapiens; identical to SEQ ID NO: 220539
  chr21:46895491-46895706
  hypo

SEQ ID NO: 329075 - DNA, 589 bp, Homo sapiens; identical to SEQ ID NO: 220540
  chr21:46895736-46896325
  hypo

SEQ ID NO: 329076 - DNA, 894 bp, Homo sapiens; identical to SEQ ID NO: 220541
  chr21:46900277-46901171
  hypo

SEQ ID NO: 329077 - DNA, 264 bp, Homo sapiens; identical to SEQ ID NO: 276420
  chr21:46901444-46901708
  hypo

SEQ ID NO: 329078 - DNA, 182 bp, Homo sapiens; identical to SEQ ID NO: 276421
  chr21:46905927-46906109
  hypo

SEQ ID NO: 329079 - DNA, 1262 bp, Homo sapiens; identical to SEQ ID NO: 220543
  chr21:46906441-46907703
  hypo

SEQ ID NO: 329080 - DNA, 323 bp, Homo sapiens; identical to SEQ ID NO: 276424
  chr21:46910338-46910661
  hypo

SEQ ID NO: 329081 - DNA, 635 bp, Homo sapiens; identical to SEQ ID NO: 220544
  chr21:46911012-46911647
  hypo

SEQ ID NO: 329082 - DNA, 755 bp, Homo sapiens; identical to SEQ ID NO: 220545
  chr21:46912528-46913283
  hypo

SEQ ID NO: 329083 - DNA, 322 bp, Homo sapiens; identical to SEQ ID NO: 220546
  chr21:46913360-46913682
  hypo

SEQ ID NO: 329084 - DNA, 476 bp, Homo sapiens; identical to SEQ ID NO: 220547
  chr21:46914469-46914945
  hypo

SEQ ID NO: 329085 - DNA, 138 bp, Homo sapiens; identical to SEQ ID NO: 276428
  chr21:46915151-46915289
  hypo

SEQ ID NO: 329086 - DNA, 132 bp, Homo sapiens; identical to SEQ ID NO: 276429
  chr21:46915604-46915736
  hypo

SEQ ID NO: 329087 - DNA, 48 bp, Homo sapiens; identical to SEQ ID NO: 276430
  chr21:46916179-46916227
  hypo

SEQ ID NO: 329088 - DNA, 101 bp, Homo sapiens; identical to SEQ ID NO: 276431
  chr21:46917527-46917628
  hypo

SEQ ID NO: 329089 - DNA, 411 bp, Homo sapiens; identical to SEQ ID NO: 220548
  chr21:46918204-46918615
  hypo

SEQ ID NO: 329090 - DNA, 227 bp, Homo sapiens; identical to SEQ ID NO: 220549
  chr21:46918886-46919113
  hypo

SEQ ID NO: 329091 - DNA, 229 bp, Homo sapiens
  chr21:46919143-46919372
  hypo
ggccagccactccagacccgagctgtgtcggcagtggagggtatttcagggggaagacaaggccaagggaaaggagtgcagagatggggagagacaacgctggcaggaaccggcgtcccagcgacagggaggtcagaggctccctcgggaaccagcgtgggctgccccacatggcatcccaggaacagtggggtcagaggctcccgcgggaacccgtgtgggctgcccc

SEQ ID NO: 329092 - DNA, 306 bp, Homo sapiens; identical to SEQ ID NO: 276434
  chr21:46924377-46924683
  hypo

SEQ ID NO: 329093 - DNA, 40 bp, Homo sapiens
  chr21:46925925-46925965
  hypo
gccgcctcctggggcttaaggaaggcgagaggctcaggcc

SEQ ID NO: 329094 - DNA, 255 bp, Homo sapiens
  chr21:46926184-46926439
  hypo
gacaaggcgcctgacgggacgaggcggcaggggggctcaggccctccagggccacgtgacgtccacagcacggccccggctggggggcaggctgtcccgtggctctgcaccccgcgttataaacaccaaggtgggatgaaatgcatcctctctgcttagcacgggccttgctcaccagcctggctcctcagacacacctgggattgccccttccaggacaggccagcccctttcctgctttcccaaaatggtctg

SEQ ID NO: 329095 - DNA, 247 bp, Homo sapiens; identical to SEQ ID NO: 220550
  chr21:46929727-46929974
  hypo

SEQ ID NO: 329096 - DNA, 33 bp, Homo sapiens; identical to SEQ ID NO: 276438
  chr21:46933738-46933771
  hypo

SEQ ID NO: 329097 - DNA, 73 bp, Homo sapiens
  chr21:46933998-46934071
  hypo
cagtgagcaggctgcggagggagcaggccctcaggttggggaggcgctgggaggaggattctgatggcggtgt

SEQ ID NO: 329098 - DNA, 404 bp, Homo sapiens; identical to SEQ ID NO: 220551
  chr21:46935335-46935739
  hypo

SEQ ID NO: 329099 - DNA, 50 bp, Homo sapiens; identical to SEQ ID NO: 220552
  chr21:46937010-46937060
  hypo

SEQ ID NO: 329100 - DNA, 78 bp, Homo sapiens; identical to SEQ ID NO: 276442
  chr21:46942255-46942333
  hypo

SEQ ID NO: 329101 - DNA, 104 bp, Homo sapiens; identical to SEQ ID NO: 206041
  chr21:46950778-46950882
  hypo

SEQ ID NO: 329102 - DNA, 136 bp, Homo sapiens; identical to SEQ ID NO: 276443
  chr21:46958787-46958923
  hypo

SEQ ID NO: 329103 - DNA, 88 bp, Homo sapiens; identical to SEQ ID NO: 220554
  chr21:46998316-46998404
  hypo

SEQ ID NO: 329104 - DNA, 163 bp, Homo sapiens
  chr21:47026083-47026246
  hypo
acagtcgcctgcggtattcagtgcagtcacactctgcacgggcgtttagatacacaagtgccaccgcattacagtggcctgcagtattcagtgcagtcccacgctgcatgggcgtttagctacacaaatgccaccgcgttacagtcgcctgcagtattcagtg

SEQ ID NO: 329105 - DNA, 173 bp, Homo sapiens; identical to SEQ ID NO: 226309
  chr21:47050917-47051090
  hypo

SEQ ID NO: 329106 - DNA, 54 bp, Homo sapiens; identical to SEQ ID NO: 206042
  chr21:47062898-47062952
  hypo

SEQ ID NO: 329107 - DNA, 139 bp, Homo sapiens; identical to SEQ ID NO: 206043
  chr21:47063293-47063432
  hypo

SEQ ID NO: 329108 - DNA, 46 bp, Homo sapiens; identical to SEQ ID NO: 220557
  chr21:47167569-47167615
  hypo

SEQ ID NO: 329109 - DNA, 170 bp, Homo sapiens; identical to SEQ ID NO: 276450
  chr21:47209072-47209242
  hypo

SEQ ID NO: 329110 - DNA, 63 bp, Homo sapiens
  chr21:47254672-47254735
  hypo
taaaaggacaaagcagacttcggagctgcctctagaggagagcagcaggtgagttccgagttc

SEQ ID NO: 329111 - DNA, 227 bp, Homo sapiens
  chr21:47254765-47254992
  hypo
atgcccacttctgagcgctgagtgcacaacccagctcgggaggcctgcggcagcaggaatggggaggcaccgtgagtccctcaaagcgctgctggaaatgtcactctgcgcggtgtccacccgtgctcggggtgggcagcgccactgaatgacgcgggcagcttgggaggccggttcgcgaacgccgcagcagcctctgctgacacgggggctgctccccactcaca

SEQ ID NO: 329112 - DNA, 421 bp, Homo sapiens; identical to SEQ ID NO: 276452
  chr21:47285213-47285634
  hypo

SEQ ID NO: 329113 - DNA, 85 bp, Homo sapiens; identical to SEQ ID NO: 220558
  chr21:47286941-47287026
  hypo

SEQ ID NO: 329114 - DNA, 112 bp, Homo sapiens; identical to SEQ ID NO: 220559
  chr21:47287439-47287551
  hypo

SEQ ID NO: 329115 - DNA, 206 bp, Homo sapiens; identical to SEQ ID NO: 276454
  chr21:47287811-47288017
  hypo

SEQ ID NO: 329116 - DNA, 118 bp, Homo sapiens; identical to SEQ ID NO: 276455
  chr21:47316477-47316595
  hypo

SEQ ID NO: 329117 - DNA, 209 bp, Homo sapiens; identical to SEQ ID NO: 220560
  chr21:47330900-47331109
  hypo

SEQ ID NO: 329118 - DNA, 306 bp, Homo sapiens; identical to SEQ ID NO: 276458
  chr21:47367321-47367627
  hypo

SEQ ID NO: 329119 - DNA, 572 bp, Homo sapiens; identical to SEQ ID NO: 276459
  chr21:47369847-47370419
  hypo

SEQ ID NO: 329120 - DNA, 127 bp, Homo sapiens; identical to SEQ ID NO: 276460
  chr21:47403601-47403728
  hypo

SEQ ID NO: 329121 - DNA, 293 bp, Homo sapiens; identical to SEQ ID NO: 276462
  chr21:47407169-47407462
  hypo

SEQ ID NO: 329122 - DNA, 87 bp, Homo sapiens; identical to SEQ ID NO: 276463
  chr21:47412237-47412324
  hypo

SEQ ID NO: 329123 - DNA, 75 bp, Homo sapiens; identical to SEQ ID NO: 276464
  chr21:47412919-47412994
  hypo

SEQ ID NO: 329124 - DNA, 139 bp, Homo sapiens; identical to SEQ ID NO: 276465
  chr21:47413400-47413539
  hypo

SEQ ID NO: 329125 - DNA, 518 bp, Homo sapiens
  chr21:47413777-47414295
  hypo
ctacaaacacttgccgggtccacggagcttgctggagaagcagggatgcacgcagggacgcctctggggccccaggaggagctgccggcctcctgaatgaagatagccatagccagccacgccgatggccacgcacgtgggccgaggaaacgcttggcgaggccaggaaggggctgtgcggggagggaaggccggaacagcccagtgaccacctggacagcatgctgtggctcccagcgtgcccgggcagccatcctccccaaggatggcccagctccacactcacggctcgtttctcttcagggtgaagctggcccgcagggtgatcagggaagagaaggccccgttggtgtccctggagacccggtaggaagcgctgtggggttggggggcgttggccaatttgggttttgggggtagaagtgctccagcagctcacgcactgggggtctgttcatttccgtttgagggcctctgtgtttccgtagatctcgggggtgtccctgcgtgggagccgg

SEQ ID NO: 329126 - DNA, 47 bp, Homo sapiens
  chr21:47414327-47414374
  hypo
tggtgtggattgttgagagcaggcccagcgcccgggggcctgacgct

SEQ ID NO: 329127 - DNA, 221 bp, Homo sapiens; identical to SEQ ID NO: 276467
  chr21:47414704-47414925
  hypo

SEQ ID NO: 329128 - DNA, 141 bp, Homo sapiens; identical to SEQ ID NO: 220563
  chr21:47417619-47417760
  hypo

SEQ ID NO: 329129 - DNA, 318 bp, Homo sapiens; identical to SEQ ID NO: 220564
  chr21:47418109-47418427
  hypo

SEQ ID NO: 329130 - DNA, 226 bp, Homo sapiens; identical to SEQ ID NO: 276470
  chr21:47421947-47422173
  hypo

SEQ ID NO: 329131 - DNA, 139 bp, Homo sapiens; identical to SEQ ID NO: 220565
  chr21:47422523-47422662
  hypo

SEQ ID NO: 329132 - DNA, 219 bp, Homo sapiens
  chr21:47423177-47423396
  hypo
ggctcactccggtggctgagcaccaccgtgccgtgccctctctggggagcttagacgctctctggccggcccactgcggctgcatcaccagggcctcatgctaacggctgcccaccccgccccgcagtcacgttctcctccccggctgacatcaccatcctgctggacggctccgccagcgtgggcagccacaactttgacaccaccaagcgcttcgcc

SEQ ID NO: 329133 - DNA, 338 bp, Homo sapiens
  chr21:47423426-47423764
  hypo
ggcaggacggaccccgcccacgacgtgcgggtggcggtggtgcagtacagcggcacgggccagcagcgcccagagcgggcgtcgctgcagttcctgcagaactacacggccctggccagtgccgtcgatgccatggactttatcaacgacgccaccgacgtcaacgatgccctgggctatgtgacccgcttctaccgcgaggcctcgtccggcgctgccaagaagaggctgctgctcttctcagatggcaactcgcagggcgccacgcccgctgccatcgagaaggccgtgcaggaagcccagcgggcaggcatcgagatcttcgtggtggtcgtggg

SEQ ID NO: 329134 - DNA, 137 bp, Homo sapiens
  chr21:47426310-47426447
  hypo
cggtgggcggggcccggggcagacgcagtgaggcagttgccagcctctctcagctgcctcatgggattcgcactgcagctgcggccctggcgcgacaagggctggacttggccagcgggacggtccctcacggcgct

SEQ ID NO: 329135 - DNA, 188 bp, Homo sapiens
  chr21:47453063-47453251
  hypo
acacccccagtcccgggcctcggagggggcggctgacacccccagtcccgggcctcggagggggcggctgacacccccagtcccgggcctcggagggggcggctgacacccccagtccctttggcaaaccgcttcgcagtatccactgacgctaagtacccctctgacgatgacgcagtcccatgtct

SEQ ID NO: 329136 - DNA, 202 bp, Homo sapiens
  chr21:47457188-47457390
  hypo
gccctacatccacactgtgggcaccatgacctcacatgcggagcggagcagggccggcgcccggagagccaggctggtcacgaacgaggcctagagggcgtcaggccccaaagcactcacaggcttctcctctgtcctcggggccttcagacacctgcatgcgccgattcagccacccgcgcgcgccgattcccctggccat

SEQ ID NO: 329137 - DNA, 114 bp, Homo sapiens; identical to SEQ ID NO: 220567
  chr21:47459901-47460015
  hypo

SEQ ID NO: 329138 - DNA, 318 bp, Homo sapiens; identical to SEQ ID NO: 276478
  chr21:47475686-47476004
  hypo

SEQ ID NO: 329139 - DNA, 200 bp, Homo sapiens; identical to SEQ ID NO: 276479
  chr21:47484113-47484313
  hypo

SEQ ID NO: 329140 - DNA, 99 bp, Homo sapiens; identical to SEQ ID NO: 276480
  chr21:47489507-47489606
  hypo

SEQ ID NO: 329141 - DNA, 129 bp, Homo sapiens
  chr21:47489807-47489936
  hypo
cctcagaccctcagcgatggcactttctgtaggccgcagaggtaggggccgcagagccaagcttgctagcatccatgggacgctgaggccccaaataatagagaccagatggcagcgcttacccccagg

SEQ ID NO: 329142 - DNA, 182 bp, Homo sapiens; identical to SEQ ID NO: 276482
  chr21:47497764-47497946
  hypo

SEQ ID NO: 329143 - DNA, 84 bp, Homo sapiens; identical to SEQ ID NO: 276483
  chr21:47501022-47501106
  hypo

SEQ ID NO: 329144 - DNA, 483 bp, Homo sapiens; identical to SEQ ID NO: 276484
  chr21:47503500-47503983
  hypo

SEQ ID NO: 329145 - DNA, 48 bp, Homo sapiens
  chr21:47532134-47532182
  hypo
aagaacctgcagggcatcagctccttccgccgcggcaccttcaccgac

SEQ ID NO: 329146 - DNA, 157 bp, Homo sapiens; identical to SEQ ID NO: 220568
  chr21:47538429-47538586
  hypo

SEQ ID NO: 329147 - DNA, 65 bp, Homo sapiens; identical to SEQ ID NO: 276487
  chr21:47545574-47545639
  hypo

SEQ ID NO: 329148 - DNA, 110 bp, Homo sapiens
  chr21:47565066-47565176
  hypo
cctgttcccttgtaccggctgccatggcctgtgaatgtggggtcaccctggccgaaccctcaaaccctgctgggcccaagcacttgccggggtgagggcggtgctggtgg

SEQ ID NO: 329149 - DNA, 345 bp, Homo sapiens
  chr21:47565270-47565615
  hypo
ccccagctgggggttcgctgttggtggggcccggggagccctgctgtggccgccactcaccaggtaggcggtgaaggcctcggcgtcggcatccaccagcgtggttagcttggccgaagcctcgcggaagggcgggatcaggcgccgcatcgtcgtgtccagggactggaattggcgccgcccgtaggtcatgaggcccaccatggagcccagcgccgcaccctgcgagaggggtggatgtgggggtcgcagggaccccagacggcccgggaccgaccccaggaagagccaggggcccgggtgatccctgcgggggtcccacccgtgtggcccccacgtctccac

SEQ ID NO: 329150 - DNA, 398 bp, Homo sapiens
  chr21:47602705-47603103
  hypo
tcatcagctcgccgccttcagccatggcgggtgcgtccctccttgtccctcacggctcctgcagccccatggaggtgggagcccagagcccgcaggcaccacagaaacagcccaggcacggagttccgtagccaccaccgccttccacgccttgtgatgtcactgccctagtgatgaggtgcccagcaccctgcctgcccccgcgatggctcatggccccgttgaggcagtgaagctggaggcccgtggcgtgcacaggcagccactcccacattatgaccagggcccgagaatgccaaggacattaggcagctacgggatgtagcgactgtactccaagaggggcgtccaagccactccccattgagcggcccagccagggtcgggtgtccaccctg

SEQ ID NO: 329151 - DNA, 171 bp, Homo sapiens; identical to SEQ ID NO: 220569
  chr21:47627575-47627746
  hypo

SEQ ID NO: 329152 - DNA, 107 bp, Homo sapiens; identical to SEQ ID NO: 276491
  chr21:47634460-47634567
  hypo

SEQ ID NO: 329153 - DNA, 317 bp, Homo sapiens; identical to SEQ ID NO: 276492
  chr21:47640130-47640447
  hypo

SEQ ID NO: 329154 - DNA, 281 bp, Homo sapiens; identical to SEQ ID NO: 226312
  chr21:47649462-47649743
  hypo

SEQ ID NO: 329155 - DNA, 87 bp, Homo sapiens; identical to SEQ ID NO: 220570
  chr21:47689551-47689638
  hypo

SEQ ID NO: 329156 - DNA, 143 bp, Homo sapiens; identical to SEQ ID NO: 220571
  chr21:47689700-47689843
  hypo

SEQ ID NO: 329157 - DNA, 81 bp, Homo sapiens; identical to SEQ ID NO: 276494
  chr21:47710424-47710505
  hypo

SEQ ID NO: 329158 - DNA, 110 bp, Homo sapiens; identical to SEQ ID NO: 206045
  chr21:47717450-47717560
  hypo

SEQ ID NO: 329159 - DNA, 84 bp, Homo sapiens; identical to SEQ ID NO: 206046
  chr21:47717589-47717673
  hypo

SEQ ID NO: 329160 - DNA, 116 bp, Homo sapiens; identical to SEQ ID NO: 206047
  chr21:47717748-47717864
  hypo

SEQ ID NO: 329161 - DNA, 45 bp, Homo sapiens; identical to SEQ ID NO: 295203
  chr21:47717865-47717910
  hypo

SEQ ID NO: 329162 - DNA, 58 bp, Homo sapiens
  chr21:47737837-47737895
  hypo
ctgcacctgcagggctgtctcgaagagtccctccaacgccacagcctgcgagttgtta

SEQ ID NO: 329163 - DNA, 103 bp, Homo sapiens
  chr21:47771657-47771760
  hypo
tcagtgcagcagtgacgtgcacctgtgtgtccctcaaggccaagagcaacacttgcagggggtgccttcatgtctaaggaaagcttaccagtggtgctgagcg

SEQ ID NO: 329164 - DNA, 98 bp, Homo sapiens; identical to SEQ ID NO: 220575
  chr21:47773781-47773879
  hypo

SEQ ID NO: 329165 - DNA, 1238 bp, Homo sapiens; identical to SEQ ID NO: 276499
  chr21:47774497-47775735
  hypo

SEQ ID NO: 329166 - DNA, 128 bp, Homo sapiens; identical to SEQ ID NO: 220578
  chr21:47797823-47797951
  hypo

SEQ ID NO: 329167 - DNA, 266 bp, Homo sapiens; identical to SEQ ID NO: 276501
  chr21:47798303-47798569
  hypo

SEQ ID NO: 329168 - DNA, 44 bp, Homo sapiens; identical to SEQ ID NO: 206048
  chr21:47799137-47799181
  hypo

SEQ ID NO: 329169 - DNA, 52 bp, Homo sapiens; identical to SEQ ID NO: 206049
  chr21:47799225-47799277
  hypo

SEQ ID NO: 329170 - DNA, 202 bp, Homo sapiens
  chr21:47799606-47799808
  hypo
gtcttctgcctgctcgagtctgctgccgaacccctctctagtgaatttttttttctgtgattgtatttttcagctccagatgtcaagggagctctatttcagtctttctctctgctgagggccctgcgtgcattgtgccctcagggctctggcgggcggtggacagcctggccctggccttcacccctgctgtgccaagcca

SEQ ID NO: 329171 - DNA, 130 bp, Homo sapiens; identical to SEQ ID NO: 276503
  chr21:47805829-47805959
  hypo

SEQ ID NO: 329172 - DNA, 264 bp, Homo sapiens; identical to SEQ ID NO: 220581
  chr21:47811198-47811462
  hypo

SEQ ID NO: 329173 - DNA, 224 bp, Homo sapiens; identical to SEQ ID NO: 276505
  chr21:47819671-47819895
  hypo

SEQ ID NO: 329174 - DNA, 753 bp, Homo sapiens; identical to SEQ ID NO: 220582
  chr21:47832836-47833589
  hypo

SEQ ID NO: 329175 - DNA, 301 bp, Homo sapiens; identical to SEQ ID NO: 276507
  chr21:47851456-47851757
  hypo

SEQ ID NO: 329176 - DNA, 224 bp, Homo sapiens; identical to SEQ ID NO: 276508
  chr21:47856006-47856230
  hypo

SEQ ID NO: 329177 - DNA, 249 bp, Homo sapiens; identical to SEQ ID NO: 276509
  chr21:47872856-47873105
  hypo

SEQ ID NO: 329178 - DNA, 114 bp, Homo sapiens; identical to SEQ ID NO: 276510
  chr21:47897027-47897141
  hypo

SEQ ID NO: 329179 - DNA, 67 bp, Homo sapiens; identical to SEQ ID NO: 276511
  chr21:47918528-47918595
  hypo

SEQ ID NO: 329180 - DNA, 336 bp, Homo sapiens; identical to SEQ ID NO: 220583
  chr21:47965680-47966016
  hypo

SEQ ID NO: 329181 - DNA, 93 bp, Homo sapiens; identical to SEQ ID NO: 276513
  chr21:47979412-47979505
  hypo

SEQ ID NO: 329182 - DNA, 72 bp, Homo sapiens; identical to SEQ ID NO: 276514
  chr21:48083839-48083911
  hypo

SEQ ID NO: 329183 - DNA, 133 bp, Homo sapiens; identical to SEQ ID NO: 276515
  chr21:48084396-48084529
  hypo

SEQ ID NO: 329184 - DNA, 110 bp, Homo sapiens; identical to SEQ ID NO: 206050
  chr21:48087089-48087199
  hypo

SEQ ID NO: 329185 - DNA, 78 bp, Homo sapiens; identical to SEQ ID NO: 276516
  chr22:16216478-16216556
  hypo

SEQ ID NO: 329186 - DNA, 285 bp, Homo sapiens; identical to SEQ ID NO: 295209
  chr22:17601506-17601791
  hypo

SEQ ID NO: 329187 - DNA, 32 bp, Homo sapiens; identical to SEQ ID NO: 276517
  chr22:17674261-17674293
  hypo

SEQ ID NO: 329188 - DNA, 41 bp, Homo sapiens; identical to SEQ ID NO: 276518
  chr22:17735250-17735291
  hypo

SEQ ID NO: 329189 - DNA, 267 bp, Homo sapiens; identical to SEQ ID NO: 276519
  chr22:17828553-17828820
  hypo

SEQ ID NO: 329190 - DNA, 82 bp, Homo sapiens; identical to SEQ ID NO: 276520
  chr22:17882962-17883044
  hypo

SEQ ID NO: 329191 - DNA, 81 bp, Homo sapiens; identical to SEQ ID NO: 276521
  chr22:17891760-17891841
  hypo

SEQ ID NO: 329192 - DNA, 461 bp, Homo sapiens; identical to SEQ ID NO: 276522
  chr22:17897911-17898372
  hypo

SEQ ID NO: 329193 - DNA, 78 bp, Homo sapiens; identical to SEQ ID NO: 276523
  chr22:17932151-17932229
  hypo

SEQ ID NO: 329194 - DNA, 33 bp, Homo sapiens; identical to SEQ ID NO: 276524
  chr22:18038127-18038160
  hypo

SEQ ID NO: 329195 - DNA, 91 bp, Homo sapiens; identical to SEQ ID NO: 276525
  chr22:18070745-18070836
  hypo

SEQ ID NO: 329196 - DNA, 35 bp, Homo sapiens; identical to SEQ ID NO: 220586
  chr22:18074668-18074703
  hypo

SEQ ID NO: 329197 - DNA, 161 bp, Homo sapiens; identical to SEQ ID NO: 220587
  chr22:18081585-18081746
  hypo

SEQ ID NO: 329198 - DNA, 135 bp, Homo sapiens; identical to SEQ ID NO: 276528
  chr22:18084142-18084277
  hypo

SEQ ID NO: 329199 - DNA, 85 bp, Homo sapiens; identical to SEQ ID NO: 276530
  chr22:18220796-18220881
  hypo

SEQ ID NO: 329200 - DNA, 293 bp, Homo sapiens; identical to SEQ ID NO: 276531
  chr22:18232881-18233174
  hypo

SEQ ID NO: 329201 - DNA, 132 bp, Homo sapiens; identical to SEQ ID NO: 220588
  chr22:18265344-18265476
  hypo

SEQ ID NO: 329202 - DNA, 217 bp, Homo sapiens
  chr22:18265523-18265740
  hypo
ggaagagatgcctgtatgggaccaactcaggcagccacagagggatggcccagcaccccacaaaacccaaagtgctcagcgtctaggatctgtttacggggcagagaagtggatgttcttttcctggttcaaaggtagaaacaggcttggagagccgcacccggcatcagccagccaggcagacgcctggtctagcgcttggttctcacaggcatgt

SEQ ID NO: 329203 - DNA, 329 bp, Homo sapiens; identical to SEQ ID NO: 220590
  chr22:18286547-18286876
  hypo

SEQ ID NO: 329204 - DNA, 157 bp, Homo sapiens; identical to SEQ ID NO: 276534
  chr22:18287373-18287530
  hypo

SEQ ID NO: 329205 - DNA, 91 bp, Homo sapiens; identical to SEQ ID NO: 276535
  chr22:18287771-18287862
  hypo

SEQ ID NO: 329206 - DNA, 96 bp, Homo sapiens; identical to SEQ ID NO: 220591
  chr22:18291185-18291281
  hypo

SEQ ID NO: 329207 - DNA, 315 bp, Homo sapiens; identical to SEQ ID NO: 220592
  chr22:18291533-18291848
  hypo

SEQ ID NO: 329208 - DNA, 163 bp, Homo sapiens; identical to SEQ ID NO: 276538
  chr22:18295061-18295224
  hypo

SEQ ID NO: 329209 - DNA, 263 bp, Homo sapiens; identical to SEQ ID NO: 276539
  chr22:18295543-18295806
  hypo

SEQ ID NO: 329210 - DNA, 64 bp, Homo sapiens; identical to SEQ ID NO: 220594
  chr22:18328029-18328093
  hypo

SEQ ID NO: 329211 - DNA, 98 bp, Homo sapiens; identical to SEQ ID NO: 220595
  chr22:18329915-18330013
  hypo

SEQ ID NO: 329212 - DNA, 558 bp, Homo sapiens; identical to SEQ ID NO: 220596
  chr22:18340868-18341426
  hypo

SEQ ID NO: 329213 - DNA, 44 bp, Homo sapiens; identical to SEQ ID NO: 276543
  chr22:18345292-18345336
  hypo

SEQ ID NO: 329214 - DNA, 299 bp, Homo sapiens; identical to SEQ ID NO: 276544
  chr22:18348548-18348847
  hypo

SEQ ID NO: 329215 - DNA, 54 bp, Homo sapiens; identical to SEQ ID NO: 276545
  chr22:18349167-18349221
  hypo

SEQ ID NO: 329216 - DNA, 151 bp, Homo sapiens; identical to SEQ ID NO: 276546
  chr22:18349528-18349679
  hypo

SEQ ID NO: 329217 - DNA, 751 bp, Homo sapiens; identical to SEQ ID NO: 276547
  chr22:18352969-18353720
  hypo

SEQ ID NO: 329218 - DNA, 410 bp, Homo sapiens; identical to SEQ ID NO: 276548
  chr22:18354732-18355142
  hypo

SEQ ID NO: 329219 - DNA, 154 bp, Homo sapiens; identical to SEQ ID NO: 220600
  chr22:18355710-18355864
  hypo

SEQ ID NO: 329220 - DNA, 82 bp, Homo sapiens; identical to SEQ ID NO: 220601
  chr22:18358159-18358241
  hypo

SEQ ID NO: 329221 - DNA, 146 bp, Homo sapiens; identical to SEQ ID NO: 220602
  chr22:18363713-18363859
  hypo

SEQ ID NO: 329222 - DNA, 348 bp, Homo sapiens; identical to SEQ ID NO: 276552
  chr22:18367813-18368161
  hypo

SEQ ID NO: 329223 - DNA, 62 bp, Homo sapiens; identical to SEQ ID NO: 220603
  chr22:18371272-18371334
  hypo

SEQ ID NO: 329224 - DNA, 265 bp, Homo sapiens; identical to SEQ ID NO: 276554
  chr22:18376242-18376507
  hypo

SEQ ID NO: 329225 - DNA, 105 bp, Homo sapiens; identical to SEQ ID NO: 220604
  chr22:18400898-18401003
  hypo

SEQ ID NO: 329226 - DNA, 180 bp, Homo sapiens; identical to SEQ ID NO: 220605
  chr22:18427241-18427421
  hypo

SEQ ID NO: 329227 - DNA, 134 bp, Homo sapiens; identical to SEQ ID NO: 276557
  chr22:18442886-18443020
  hypo

SEQ ID NO: 329228 - DNA, 565 bp, Homo sapiens; identical to SEQ ID NO: 276558
  chr22:18443245-18443810
  hypo

SEQ ID NO: 329229 - DNA, 262 bp, Homo sapiens; identical to SEQ ID NO: 276559
  chr22:18451007-18451269
  hypo

SEQ ID NO: 329230 - DNA, 206 bp, Homo sapiens
  chr22:18553623-18553829
  hypo
tgtgtggagtctacctgtaatatatttccactgtcccgctacatttcagaaccagatgcacaaagaacaaacaagtttcccagcaggactcaaaatagaagggatggtgactgcatgccttaccattcgggatcctcttcttcccggagaactccgcgcaggcaggtctgtacctgcttagaggcagcctgtctgttgagcagccc

SEQ ID NO: 329231 - DNA, 135 bp, Homo sapiens; identical to SEQ ID NO: 276561
  chr22:18616597-18616732
  hypo

SEQ ID NO: 329232 - DNA, 450 bp, Homo sapiens; identical to SEQ ID NO: 220608
  chr22:18619403-18619853
  hypo

SEQ ID NO: 329233 - DNA, 38 bp, Homo sapiens; identical to SEQ ID NO: 276563
  chr22:18641801-18641839
  hypo

SEQ ID NO: 329234 - DNA, 97 bp, Homo sapiens; identical to SEQ ID NO: 276564
  chr22:18951683-18951780
  hypo

SEQ ID NO: 329235 - DNA, 271 bp, Homo sapiens; identical to SEQ ID NO: 276565
  chr22:18973383-18973654
  hypo

SEQ ID NO: 329236 - DNA, 75 bp, Homo sapiens; identical to SEQ ID NO: 220609
  chr22:19039218-19039293
  hypo

SEQ ID NO: 329237 - DNA, 36 bp, Homo sapiens; identical to SEQ ID NO: 276568
  chr22:19048114-19048150
  hypo

SEQ ID NO: 329238 - DNA, 40 bp, Homo sapiens
  chr22:19048389-19048429
  hypo
aacttcaaatgtgtgtgcagggtaccgacacatgggcata

SEQ ID NO: 329239 - DNA, 193 bp, Homo sapiens; identical to SEQ ID NO: 220610
  chr22:19053069-19053262
  hypo

SEQ ID NO: 329240 - DNA, 61 bp, Homo sapiens; identical to SEQ ID NO: 276571
  chr22:19120094-19120155
  hypo

SEQ ID NO: 329241 - DNA, 33 bp, Homo sapiens; identical to SEQ ID NO: 220611
  chr22:19130728-19130761
  hypo

SEQ ID NO: 329242 - DNA, 36 bp, Homo sapiens; identical to SEQ ID NO: 276573
  chr22:19584223-19584259
  hypo

SEQ ID NO: 329243 - DNA, 108 bp, Homo sapiens; identical to SEQ ID NO: 276574
  chr22:19605268-19605376
  hypo

SEQ ID NO: 329244 - DNA, 219 bp, Homo sapiens; identical to SEQ ID NO: 220612
  chr22:19620238-19620457
  hypo

SEQ ID NO: 329245 - DNA, 67 bp, Homo sapiens; identical to SEQ ID NO: 220613
  chr22:19621109-19621176
  hypo

SEQ ID NO: 329246 - DNA, 231 bp, Homo sapiens; identical to SEQ ID NO: 276577
  chr22:19644023-19644254
  hypo

SEQ ID NO: 329247 - DNA, 128 bp, Homo sapiens; identical to SEQ ID NO: 206056
  chr22:19706043-19706171
  hypo

SEQ ID NO: 329248 - DNA, 120 bp, Homo sapiens; identical to SEQ ID NO: 276578
  chr22:19713942-19714062
  hypo

SEQ ID NO: 329249 - DNA, 120 bp, Homo sapiens; identical to SEQ ID NO: 276579
  chr22:19714362-19714482
  hypo

SEQ ID NO: 329250 - DNA, 36 bp, Homo sapiens; identical to SEQ ID NO: 276580
  chr22:19725676-19725712
  hypo

SEQ ID NO: 329251 - DNA, 288 bp, Homo sapiens; identical to SEQ ID NO: 295228
  chr22:19748301-19748589
  hypo

SEQ ID NO: 329252 - DNA, 40 bp, Homo sapiens; identical to SEQ ID NO: 133782
  chr22:19749084-19749124
  hypo

SEQ ID NO: 329253 - DNA, 169 bp, Homo sapiens; identical to SEQ ID NO: 295230
  chr22:19753518-19753687
  hypo

SEQ ID NO: 329254 - DNA, 105 bp, Homo sapiens; identical to SEQ ID NO: 133785
  chr22:19753869-19753974
  hypo

SEQ ID NO: 329255 - DNA, 189 bp, Homo sapiens
  chr22:19771481-19771670
  hypo
gaaggttgagaccccgaggagaggcaggcctgggggaccgtgcagcagctgtgcccacctaggaccacagggctggtggggctggcagcttggtagagggcaggtgcacagcaaagttttcaccggtgccggcttgttgtcttccacgctgggatttcacatgaagttctagctaattgagtataagca

SEQ ID NO: 329256 - DNA, 230 bp, Homo sapiens
  chr22:19771889-19772119
  hypo
gcatcggctgacccctcggtgtctacgtgccaagcccaatctgcctgcagggacacccactgccagaggcggaggcaggttctcctggtcccagacccagggccgtctgttggcctgcaggtaacacgcagggaggaaggaaaaggctctaggcacagctgcttgtctaagagggaccctgttggcggcgcaacgctgggtgagtgctgcccgcccgcggatggggtgct

SEQ ID NO: 329257 - DNA, 355 bp, Homo sapiens; identical to SEQ ID NO: 276582
  chr22:19787001-19787356
  hypo

SEQ ID NO: 329258 - DNA, 160 bp, Homo sapiens; identical to SEQ ID NO: 276583
  chr22:19789604-19789764
  hypo

SEQ ID NO: 329259 - DNA, 170 bp, Homo sapiens; identical to SEQ ID NO: 220617
  chr22:19798779-19798949
  hypo

SEQ ID NO: 329260 - DNA, 213 bp, Homo sapiens; identical to SEQ ID NO: 276585
  chr22:19799719-19799932
  hypo

SEQ ID NO: 329261 - DNA, 92 bp, Homo sapiens; identical to SEQ ID NO: 276586
  chr22:19827948-19828040
  hypo

SEQ ID NO: 329262 - DNA, 427 bp, Homo sapiens; identical to SEQ ID NO: 276587
  chr22:19830502-19830929
  hypo

SEQ ID NO: 329263 - DNA, 75 bp, Homo sapiens; identical to SEQ ID NO: 276588
  chr22:19839318-19839393
  hypo

SEQ ID NO: 329264 - DNA, 381 bp, Homo sapiens
  chr22:19839604-19839985
  hypo
cgttcgcacacacacggtgtccccacagcagggccgctcaatccagggatccacaaggggggtgtatgccaccccaggagacgccttgtccatctgctgccatggatgtgcgttggcataattggcggctgcccagatgggaatgcgagggccctgctgacggcaccggccacgaggcatgctgggagcacaggggagaagagaggagagccagcactggtgggtggtgggggtgtggacagatgtggcttgcacgacacaacaggacagggatggctgaacagggcgtggcagacccgcactggtccaggcaagtgctgaggatcagggagctgacagctgcagcctcaggagagctgagaagagctgagagactgtcag

SEQ ID NO: 329265 - DNA, 84 bp, Homo sapiens; identical to SEQ ID NO: 220618
  chr22:19856498-19856582
  hypo

SEQ ID NO: 329266 - DNA, 123 bp, Homo sapiens; identical to SEQ ID NO: 276591
  chr22:19866816-19866939
  hypo

SEQ ID NO: 329267 - DNA, 132 bp, Homo sapiens; identical to SEQ ID NO: 276592
  chr22:19870367-19870499
  hypo

SEQ ID NO: 329268 - DNA, 55 bp, Homo sapiens; identical to SEQ ID NO: 276593
  chr22:19870815-19870870
  hypo

SEQ ID NO: 329269 - DNA, 419 bp, Homo sapiens; identical to SEQ ID NO: 220619
  chr22:19872851-19873270
  hypo

SEQ ID NO: 329270 - DNA, 159 bp, Homo sapiens; identical to SEQ ID NO: 220620
  chr22:19882774-19882933
  hypo

SEQ ID NO: 329271 - DNA, 114 bp, Homo sapiens; identical to SEQ ID NO: 220621
  chr22:19891185-19891299
  hypo

SEQ ID NO: 329272 - DNA, 496 bp, Homo sapiens; identical to SEQ ID NO: 276597
  chr22:19892195-19892691
  hypo

SEQ ID NO: 329273 - DNA, 177 bp, Homo sapiens; identical to SEQ ID NO: 276598
  chr22:19892921-19893098
  hypo

SEQ ID NO: 329274 - DNA, 370 bp, Homo sapiens; identical to SEQ ID NO: 276599
  chr22:19899690-19900060
  hypo

SEQ ID NO: 329275 - DNA, 74 bp, Homo sapiens; identical to SEQ ID NO: 276600
  chr22:19903251-19903325
  hypo

SEQ ID NO: 329276 - DNA, 102 bp, Homo sapiens; identical to SEQ ID NO: 220623
  chr22:19924379-19924481
  hypo

SEQ ID NO: 329277 - DNA, 157 bp, Homo sapiens; identical to SEQ ID NO: 276602
  chr22:19938443-19938600
  hypo

SEQ ID NO: 329278 - DNA, 142 bp, Homo sapiens; identical to SEQ ID NO: 276603
  chr22:19945258-19945400
  hypo

SEQ ID NO: 329279 - DNA, 257 bp, Homo sapiens; identical to SEQ ID NO: 276604
  chr22:19960818-19961075
  hypo

SEQ ID NO: 329280 - DNA, 213 bp, Homo sapiens
  chr22:19961470-19961683
  hypo
ccgtccagggtgcacgcattgcccgcagcccatacacctcttggatcctggggtggtggtgtggcccctcctttccccgccagccgaggcaggagctgcaccagtgaggtgcctgggattccctctctcaggacttgcccaccctgcccgacctggtccctcaccatccagttgccggcactgaggttctgcagagcgccggcggcagcctcc

SEQ ID NO: 329281 - DNA, 81 bp, Homo sapiens
  chr22:19961721-19961802
  hypo
gtagagacgtaccacctcgggctggtacagcagctcaaagcctaggtgcagggcaaccgccacccacggtcacccagaatc

SEQ ID NO: 329282 - DNA, 57 bp, Homo sapiens; identical to SEQ ID NO: 220624
  chr22:19965520-19965577
  hypo

SEQ ID NO: 329283 - DNA, 300 bp, Homo sapiens; identical to SEQ ID NO: 220625
  chr22:19966359-19966659
  hypo

SEQ ID NO: 329284 - DNA, 310 bp, Homo sapiens; identical to SEQ ID NO: 276609
  chr22:19967264-19967574
  hypo

SEQ ID NO: 329285 - DNA, 416 bp, Homo sapiens; identical to SEQ ID NO: 276610
  chr22:19968734-19969150
  hypo

SEQ ID NO: 329286 - DNA, 38 bp, Homo sapiens; identical to SEQ ID NO: 220627
  chr22:19971874-19971912
  hypo

SEQ ID NO: 329287 - DNA, 156 bp, Homo sapiens; identical to SEQ ID NO: 220628
  chr22:19972131-19972287
  hypo

SEQ ID NO: 329288 - DNA, 75 bp, Homo sapiens; identical to SEQ ID NO: 276613
  chr22:19978174-19978249
  hypo

SEQ ID NO: 329289 - DNA, 81 bp, Homo sapiens; identical to SEQ ID NO: 276614
  chr22:20050530-20050611
  hypo

SEQ ID NO: 329290 - DNA, 321 bp, Homo sapiens; identical to SEQ ID NO: 276615
  chr22:20050671-20050992
  hypo

SEQ ID NO: 329291 - DNA, 272 bp, Homo sapiens; identical to SEQ ID NO: 220629
  chr22:20073379-20073651
  hypo

SEQ ID NO: 329292 - DNA, 202 bp, Homo sapiens; identical to SEQ ID NO: 276617
  chr22:20079436-20079638
  hypo

SEQ ID NO: 329293 - DNA, 42 bp, Homo sapiens; identical to SEQ ID NO: 276618
  chr22:20120590-20120632
  hypo

SEQ ID NO: 329294 - DNA, 174 bp, Homo sapiens; identical to SEQ ID NO: 220630
  chr22:20123202-20123376
  hypo

SEQ ID NO: 329295 - DNA, 344 bp, Homo sapiens; identical to SEQ ID NO: 276620
  chr22:20123633-20123977
  hypo

SEQ ID NO: 329296 - DNA, 190 bp, Homo sapiens; identical to SEQ ID NO: 220632
  chr22:20126324-20126514
  hypo

SEQ ID NO: 329297 - DNA, 248 bp, Homo sapiens; identical to SEQ ID NO: 276622
  chr22:20130992-20131240
  hypo

SEQ ID NO: 329298 - DNA, 132 bp, Homo sapiens; identical to SEQ ID NO: 220633
  chr22:20228947-20229079
  hypo

SEQ ID NO: 329299 - DNA, 154 bp, Homo sapiens
  chr22:20229239-20229393
  hypo
gggcccaagcactgtccacagcaccagcgccaggcccaggggggtgaggctgcaggtgaggctgggtagggcacctgagccttctgagtcaccagtcccgccacccccgctgcctgcctggcccagacggcagtggctgcgggtgcggttcttg

SEQ ID NO: 329300 - DNA, 161 bp, Homo sapiens; identical to SEQ ID NO: 220634
  chr22:20248011-20248172
  hypo

SEQ ID NO: 329301 - DNA, 433 bp, Homo sapiens; identical to SEQ ID NO: 206059
  chr22:20255237-20255670
  hypo

SEQ ID NO: 329302 - DNA, 146 bp, Homo sapiens; identical to SEQ ID NO: 276625
  chr22:20302965-20303111
  hypo

SEQ ID NO: 329303 - DNA, 50 bp, Homo sapiens
  chr22:20308710-20308760
  hypo
gtgaataatgacaagcgctcaggccactgccgtggagggcggtccacaac

SEQ ID NO: 329304 - DNA, 208 bp, Homo sapiens; identical to SEQ ID NO: 220636
  chr22:20760013-20760221
  hypo

SEQ ID NO: 329305 - DNA, 45 bp, Homo sapiens
  chr22:20765421-20765466
  hypo
gccaccgtgcccggccaaaaaggactcttaaaactcaacaataag

SEQ ID NO: 329306 - DNA, 120 bp, Homo sapiens; identical to SEQ ID NO: 276629
  chr22:20857254-20857374
  hypo

SEQ ID NO: 329307 - DNA, 131 bp, Homo sapiens; identical to SEQ ID NO: 220637
  chr22:20908750-20908881
  hypo

SEQ ID NO: 329308 - DNA, 111 bp, Homo sapiens; identical to SEQ ID NO: 276632
  chr22:20921973-20922084
  hypo

SEQ ID NO: 329309 - DNA, 223 bp, Homo sapiens; identical to SEQ ID NO: 276633
  chr22:20929349-20929572
  hypo

SEQ ID NO: 329310 - DNA, 614 bp, Homo sapiens; identical to SEQ ID NO: 276634
  chr22:20945800-20946414
  hypo

SEQ ID NO: 329311 - DNA, 112 bp, Homo sapiens; identical to SEQ ID NO: 276635
  chr22:20958608-20958720
  hypo

SEQ ID NO: 329312 - DNA, 228 bp, Homo sapiens; identical to SEQ ID NO: 276636
  chr22:21011032-21011260
  hypo

SEQ ID NO: 329313 - DNA, 77 bp, Homo sapiens
  chr22:21024825-21024902
  hypo
gtagccggagtagtcgtagatgatgttgcagtggaggcgggagttcagcccagtatagaagctgctcatctggccca

SEQ ID NO: 329314 - DNA, 53 bp, Homo sapiens
  chr22:21024948-21025001
  hypo
aggcacgcagcgaacatacatgcaggagacgcggttgccgtgggcgctcttag

SEQ ID NO: 329315 - DNA, 60 bp, Homo sapiens; identical to SEQ ID NO: 276638
  chr22:21099331-21099391
  hypo

SEQ ID NO: 329316 - DNA, 344 bp, Homo sapiens; identical to SEQ ID NO: 276639
  chr22:21101701-21102045
  hypo

SEQ ID NO: 329317 - DNA, 174 bp, Homo sapiens; identical to SEQ ID NO: 276640
  chr22:21102482-21102656
  hypo

SEQ ID NO: 329318 - DNA, 246 bp, Homo sapiens
  chr22:21105393-21105639
  hypo
cagctccccttgcactcggtggagcctggcaatggcttggtctcctcactgggggatggggccagcaccacccacacctcaaattgctggggactgggtgagctcatgcaggttgaccatctcgtggaaatactcagggaattgtggtaaagatggcccttagtgcaggggatcgtgtcgggcctacctcacgggcttcgtacgtgtcaggaaccgtgatccggtagggggcgtcggggatgtcat

SEQ ID NO: 329319 - DNA, 117 bp, Homo sapiens
  chr22:21150558-21150675
  hypo
ccgcgatgttggccagggcattaatcactgccagggagcaatgcctgaagaagaaggagtgaaataacagccactgccaggccctcaaccgtccccaagggacggcactgcaggggt

SEQ ID NO: 329320 - DNA, 164 bp, Homo sapiens; identical to SEQ ID NO: 220639
  chr22:21354050-21354214
  hypo

SEQ ID NO: 329321 - DNA, 43 bp, Homo sapiens
  chr22:21354474-21354517
  hypo
tggccgtggttcgagaggggagggctgccgctctggtgaaggc

SEQ ID NO: 329322 - DNA, 149 bp, Homo sapiens; identical to SEQ ID NO: 220640
  chr22:21380146-21380295
  hypo

SEQ ID NO: 329323 - DNA, 102 bp, Homo sapiens; identical to SEQ ID NO: 220641
  chr22:21380358-21380460
  hypo

SEQ ID NO: 329324 - DNA, 179 bp, Homo sapiens; identical to SEQ ID NO: 276647
  chr22:21385183-21385362
  hypo

SEQ ID NO: 329325 - DNA, 251 bp, Homo sapiens; identical to SEQ ID NO: 295243
  chr22:21385764-21386015
  hypo

SEQ ID NO: 329326 - DNA, 78 bp, Homo sapiens; identical to SEQ ID NO: 295244
  chr22:21386501-21386579
  hypo

SEQ ID NO: 329327 - DNA, 296 bp, Homo sapiens; identical to SEQ ID NO: 220643
  chr22:21803347-21803643
  hypo

SEQ ID NO: 329328 - DNA, 31 bp, Homo sapiens; identical to SEQ ID NO: 220644
  chr22:21970644-21970675
  hypo

SEQ ID NO: 329329 - DNA, 223 bp, Homo sapiens; identical to SEQ ID NO: 220645
  chr22:21977476-21977699
  hypo

SEQ ID NO: 329330 - DNA, 67 bp, Homo sapiens; identical to SEQ ID NO: 220646
  chr22:21983041-21983108
  hypo

SEQ ID NO: 329331 - DNA, 33 bp, Homo sapiens; identical to SEQ ID NO: 276653
  chr22:21993228-21993261
  hypo

SEQ ID NO: 329332 - DNA, 147 bp, Homo sapiens; identical to SEQ ID NO: 220647
  chr22:22007501-22007648
  hypo

SEQ ID NO: 329333 - DNA, 81 bp, Homo sapiens; identical to SEQ ID NO: 276655
  chr22:22029110-22029191
  hypo

SEQ ID NO: 329334 - DNA, 33 bp, Homo sapiens
  chr22:22036110-22036143
  hypo
agaggggagacagccgtgttcacacatgggtcc

SEQ ID NO: 329335 - DNA, 226 bp, Homo sapiens
  chr22:22036173-22036399
  hypo
atggcgggaaagccgacctttgcgccgttgtcaatcctgcacctggacgtttgtggggtgtaggtggccagcgctgctccaggggccttgggagccacttcttgccagaagcctgcacaaactggcatggtcagtcctcgttagtggagtgagggctctgctagaccgcaccgcaggagtgcaggcatcttgtgtgcacagcccctgcccacgggggcctggcacc

SEQ ID NO: 329336 - DNA, 192 bp, Homo sapiens; identical to SEQ ID NO: 276657
  chr22:22037090-22037282
  hypo

SEQ ID NO: 329337 - DNA, 41 bp, Homo sapiens; identical to SEQ ID NO: 220648
  chr22:22044381-22044422
  hypo

SEQ ID NO: 329338 - DNA, 111 bp, Homo sapiens; identical to SEQ ID NO: 220649
  chr22:22057965-22058076
  hypo

SEQ ID NO: 329339 - DNA, 147 bp, Homo sapiens; identical to SEQ ID NO: 276660
  chr22:22062353-22062500
  hypo

SEQ ID NO: 329340 - DNA, 292 bp, Homo sapiens; identical to SEQ ID NO: 276661
  chr22:22068420-22068712
  hypo

SEQ ID NO: 329341 - DNA, 42 bp, Homo sapiens; identical to SEQ ID NO: 295252
  chr22:22090486-22090528
  hypo

SEQ ID NO: 329342 - DNA, 42 bp, Homo sapiens; identical to SEQ ID NO: 276662
  chr22:22108627-22108669
  hypo

SEQ ID NO: 329343 - DNA, 35 bp, Homo sapiens; identical to SEQ ID NO: 220650
  chr22:22201294-22201329
  hypo

SEQ ID NO: 329344 - DNA, 331 bp, Homo sapiens; identical to SEQ ID NO: 295253
  chr22:22220990-22221321
  hypo

SEQ ID NO: 329345 - DNA, 372 bp, Homo sapiens; identical to SEQ ID NO: 226332
  chr22:22292760-22293132
  hypo

SEQ ID NO: 329346 - DNA, 216 bp, Homo sapiens; identical to SEQ ID NO: 226333
  chr22:22306476-22306692
  hypo

SEQ ID NO: 329347 - DNA, 311 bp, Homo sapiens; identical to SEQ ID NO: 295256
  chr22:22307056-22307367
  hypo

SEQ ID NO: 329348 - DNA, 233 bp, Homo sapiens; identical to SEQ ID NO: 220652
  chr22:22324545-22324778
  hypo

SEQ ID NO: 329349 - DNA, 150 bp, Homo sapiens; identical to SEQ ID NO: 206068
  chr22:22862458-22862608
  hypo

SEQ ID NO: 329350 - DNA, 33 bp, Homo sapiens; identical to SEQ ID NO: 220654
  chr22:22899308-22899341
  hypo

SEQ ID NO: 329351 - DNA, 37 bp, Homo sapiens; identical to SEQ ID NO: 220655
  chr22:22899562-22899599
  hypo

SEQ ID NO: 329352 - DNA, 155 bp, Homo sapiens; identical to SEQ ID NO: 220656
  chr22:22899978-22900133
  hypo

SEQ ID NO: 329353 - DNA, 49 bp, Homo sapiens; identical to SEQ ID NO: 220657
  chr22:22901056-22901105
  hypo

SEQ ID NO: 329354 - DNA, 56 bp, Homo sapiens; identical to SEQ ID NO: 220658
  chr22:22901455-22901511
  hypo

SEQ ID NO: 329355 - DNA, 36 bp, Homo sapiens; identical to SEQ ID NO: 276669
  chr22:22939290-22939326
  hypo

SEQ ID NO: 329356 - DNA, 165 bp, Homo sapiens; identical to SEQ ID NO: 276670
  chr22:23230279-23230444
  hypo

SEQ ID NO: 329357 - DNA, 129 bp, Homo sapiens; identical to SEQ ID NO: 220659
  chr22:23437447-23437576
  hypo

SEQ ID NO: 329358 - DNA, 80 bp, Homo sapiens; identical to SEQ ID NO: 220660
  chr22:23437631-23437711
  hypo

SEQ ID NO: 329359 - DNA, 215 bp, Homo sapiens; identical to SEQ ID NO: 276672
  chr22:23437916-23438131
  hypo

SEQ ID NO: 329360 - DNA, 106 bp, Homo sapiens; identical to SEQ ID NO: 220662
  chr22:23438416-23438522
  hypo

SEQ ID NO: 329361 - DNA, 103 bp, Homo sapiens; identical to SEQ ID NO: 276674
  chr22:23449790-23449893
  hypo

SEQ ID NO: 329362 - DNA, 101 bp, Homo sapiens; identical to SEQ ID NO: 276675
  chr22:23453480-23453581
  hypo

SEQ ID NO: 329363 - DNA, 208 bp, Homo sapiens; identical to SEQ ID NO: 276676
  chr22:23456377-23456585
  hypo

SEQ ID NO: 329364 - DNA, 441 bp, Homo sapiens; identical to SEQ ID NO: 295262
  chr22:23523110-23523551
  hypo

SEQ ID NO: 329365 - DNA, 42 bp, Homo sapiens; identical to SEQ ID NO: 276677
  chr22:23593618-23593660
  hypo

SEQ ID NO: 329366 - DNA, 295 bp, Homo sapiens; identical to SEQ ID NO: 276678
  chr22:23607403-23607698
  hypo

SEQ ID NO: 329367 - DNA, 113 bp, Homo sapiens; identical to SEQ ID NO: 276679
  chr22:23610355-23610468
  hypo

SEQ ID NO: 329368 - DNA, 85 bp, Homo sapiens; identical to SEQ ID NO: 276680
  chr22:23624725-23624810
  hypo

SEQ ID NO: 329369 - DNA, 364 bp, Homo sapiens; identical to SEQ ID NO: 276681
  chr22:23626214-23626578
  hypo

SEQ ID NO: 329370 - DNA, 99 bp, Homo sapiens; identical to SEQ ID NO: 220664
  chr22:23737249-23737348
  hypo

SEQ ID NO: 329371 - DNA, 126 bp, Homo sapiens; identical to SEQ ID NO: 276683
  chr22:23779039-23779165
  hypo

SEQ ID NO: 329372 - DNA, 496 bp, Homo sapiens; identical to SEQ ID NO: 220665
  chr22:23800963-23801459
  hypo

SEQ ID NO: 329373 - DNA, 39 bp, Homo sapiens; identical to SEQ ID NO: 220666
  chr22:23801610-23801649
  hypo

SEQ ID NO: 329374 - DNA, 92 bp, Homo sapiens; identical to SEQ ID NO: 276685
  chr22:23877156-23877248
  hypo

SEQ ID NO: 329375 - DNA, 141 bp, Homo sapiens; identical to SEQ ID NO: 276686
  chr22:24016561-24016702
  hypo

SEQ ID NO: 329376 - DNA, 153 bp, Homo sapiens; identical to SEQ ID NO: 220667
  chr22:24054816-24054969
  hypo

SEQ ID NO: 329377 - DNA, 35 bp, Homo sapiens; identical to SEQ ID NO: 220668
  chr22:24061196-24061231
  hypo

SEQ ID NO: 329378 - DNA, 35 bp, Homo sapiens; identical to SEQ ID NO: 276689
  chr22:24061531-24061566
  hypo

SEQ ID NO: 329379 - DNA, 718 bp, Homo sapiens; identical to SEQ ID NO: 295264
  chr22:24110159-24110877
  hypo

SEQ ID NO: 329380 - DNA, 218 bp, Homo sapiens; identical to SEQ ID NO: 276690
  chr22:24159810-24160028
  hypo

SEQ ID NO: 329381 - DNA, 171 bp, Homo sapiens
  chr22:24179769-24179940
  hypo
gggccccagggcataagcagcgtgtcctgaggggagtggccagcctggggcggactagatgtaccgggaggctcacccagcaggtccacgaggatggagttgcccagcagcagcgagaagcccatgagcgcccaaggcaggaacggtgcctggaaagtgagcaggccgaag

SEQ ID NO: 329382 - DNA, 247 bp, Homo sapiens
  chr22:24179982-24180229
  hypo
accagcatggccatgagggcctggcccaggaagaacaggctgcccaggagtcccagcagctgggccagagtcaaggtgctccggtgcaggcctcagcccaagcccagggcccctctgacttcccaagaccctggaattcttcccctcatctcccctatgtgctattccctcatcaagatgagccagtccaataaaggcgacacactccacgggcttcaggtcccacgaaatctgccctgcacaccta

SEQ ID NO: 329383 - DNA, 200 bp, Homo sapiens; identical to SEQ ID NO: 220669
  chr22:24205105-24205305
  hypo

SEQ ID NO: 329384 - DNA, 51 bp, Homo sapiens
  chr22:24224724-24224775
  hypo
ctgccgtgcccggcgcccatgggagctgttccagcatcgggccctgaggag

SEQ ID NO: 329385 - DNA, 31 bp, Homo sapiens
  chr22:24224805-24224836
  hypo
tgccatggagctctgcgggaatgactcggtg

SEQ ID NO: 329386 - DNA, 44 bp, Homo sapiens; identical to SEQ ID NO: 276694
  chr22:24409920-24409964
  hypo

SEQ ID NO: 329387 - DNA, 108 bp, Homo sapiens; identical to SEQ ID NO: 220670
  chr22:24459508-24459616
  hypo

SEQ ID NO: 329388 - DNA, 142 bp, Homo sapiens; identical to SEQ ID NO: 276696
  chr22:24530396-24530538
  hypo

SEQ ID NO: 329389 - DNA, 187 bp, Homo sapiens; identical to SEQ ID NO: 295268
  chr22:24552924-24553111
  hypo

SEQ ID NO: 329390 - DNA, 131 bp, Homo sapiens; identical to SEQ ID NO: 276698
  chr22:24574386-24574517
  hypo

SEQ ID NO: 329391 - DNA, 35 bp, Homo sapiens; identical to SEQ ID NO: 276699
  chr22:24697722-24697757
  hypo

SEQ ID NO: 329392 - DNA, 38 bp, Homo sapiens; identical to SEQ ID NO: 220672
  chr22:24763169-24763207
  hypo

SEQ ID NO: 329393 - DNA, 173 bp, Homo sapiens; identical to SEQ ID NO: 295271
  chr22:24819901-24820074
  hypo

SEQ ID NO: 329394 - DNA, 61 bp, Homo sapiens; identical to SEQ ID NO: 295272
  chr22:24820486-24820547
  hypo

SEQ ID NO: 329395 - DNA, 91 bp, Homo sapiens; identical to SEQ ID NO: 206073
  chr22:24989196-24989287
  hypo

SEQ ID NO: 329396 - DNA, 139 bp, Homo sapiens; identical to SEQ ID NO: 276701
  chr22:24995693-24995832
  hypo

SEQ ID NO: 329397 - DNA, 130 bp, Homo sapiens; identical to SEQ ID NO: 220674
  chr22:25016920-25017050
  hypo

SEQ ID NO: 329398 - DNA, 36 bp, Homo sapiens; identical to SEQ ID NO: 276703
  chr22:25091139-25091175
  hypo

SEQ ID NO: 329399 - DNA, 254 bp, Homo sapiens; identical to SEQ ID NO: 276704
  chr22:25102501-25102755
  hypo

SEQ ID NO: 329400 - DNA, 103 bp, Homo sapiens; identical to SEQ ID NO: 276705
  chr22:25119952-25120055
  hypo

SEQ ID NO: 329401 - DNA, 326 bp, Homo sapiens; identical to SEQ ID NO: 276706
  chr22:25294115-25294441
  hypo

SEQ ID NO: 329402 - DNA, 120 bp, Homo sapiens; identical to SEQ ID NO: 220675
  chr22:25336184-25336304
  hypo

SEQ ID NO: 329403 - DNA, 254 bp, Homo sapiens; identical to SEQ ID NO: 206074
  chr22:25348188-25348442
  hypo

SEQ ID NO: 329404 - DNA, 787 bp, Homo sapiens; identical to SEQ ID NO: 206075
  chr22:25348485-25349272
  hypo

SEQ ID NO: 329405 - DNA, 409 bp, Homo sapiens; identical to SEQ ID NO: 206076
  chr22:25349348-25349757
  hypo

SEQ ID NO: 329406 - DNA, 331 bp, Homo sapiens; identical to SEQ ID NO: 220679
  chr22:25461275-25461606
  hypo

SEQ ID NO: 329407 - DNA, 187 bp, Homo sapiens; identical to SEQ ID NO: 220680
  chr22:25462990-25463177
  hypo

SEQ ID NO: 329408 - DNA, 40 bp, Homo sapiens; identical to SEQ ID NO: 276710
  chr22:25464946-25464986
  hypo

SEQ ID NO: 329409 - DNA, 91 bp, Homo sapiens; identical to SEQ ID NO: 276711
  chr22:25483556-25483647
  hypo

SEQ ID NO: 329410 - DNA, 101 bp, Homo sapiens; identical to SEQ ID NO: 220681
  chr22:25484763-25484864
  hypo

SEQ ID NO: 329411 - DNA, 41 bp, Homo sapiens; identical to SEQ ID NO: 220682
  chr22:25484924-25484965
  hypo

SEQ ID NO: 329412 - DNA, 85 bp, Homo sapiens; identical to SEQ ID NO: 220683
  chr22:25505390-25505475
  hypo

SEQ ID NO: 329413 - DNA, 44 bp, Homo sapiens; identical to SEQ ID NO: 276715
  chr22:25513768-25513812
  hypo

SEQ ID NO: 329414 - DNA, 327 bp, Homo sapiens; identical to SEQ ID NO: 220684
  chr22:25561924-25562251
  hypo

SEQ ID NO: 329415 - DNA, 125 bp, Homo sapiens; identical to SEQ ID NO: 276717
  chr22:25570290-25570415
  hypo

SEQ ID NO: 329416 - DNA, 184 bp, Homo sapiens; identical to SEQ ID NO: 220685
  chr22:25573211-25573395
  hypo

SEQ ID NO: 329417 - DNA, 386 bp, Homo sapiens; identical to SEQ ID NO: 276719
  chr22:25602962-25603348
  hypo

SEQ ID NO: 329418 - DNA, 195 bp, Homo sapiens; identical to SEQ ID NO: 276720
  chr22:25615344-25615539
  hypo

SEQ ID NO: 329419 - DNA, 60 bp, Homo sapiens; identical to SEQ ID NO: 295278
  chr22:25678186-25678246
  hypo

SEQ ID NO: 329420 - DNA, 155 bp, Homo sapiens; identical to SEQ ID NO: 220687
  chr22:25753158-25753313
  hypo

SEQ ID NO: 329421 - DNA, 42 bp, Homo sapiens; identical to SEQ ID NO: 220688
  chr22:25756562-25756604
  hypo

SEQ ID NO: 329422 - DNA, 33 bp, Homo sapiens; identical to SEQ ID NO: 276723
  chr22:26069299-26069332
  hypo

SEQ ID NO: 329423 - DNA, 155 bp, Homo sapiens; identical to SEQ ID NO: 276724
  chr22:26069540-26069695
  hypo

SEQ ID NO: 329424 - DNA, 37 bp, Homo sapiens; identical to SEQ ID NO: 276725
  chr22:26081888-26081925
  hypo

SEQ ID NO: 329425 - DNA, 79 bp, Homo sapiens
  chr22:26150543-26150622
  hypo
tttaaggggagactcgcgattttataccgtgaattccaaatgtctatggccacctcatgggcttaaaacagcagctgac

SEQ ID NO: 329426 - DNA, 152 bp, Homo sapiens; identical to SEQ ID NO: 276727
  chr22:26371252-26371404
  hypo

SEQ ID NO: 329427 - DNA, 125 bp, Homo sapiens; identical to SEQ ID NO: 276728
  chr22:26422520-26422645
  hypo

SEQ ID NO: 329428 - DNA, 761 bp, Homo sapiens; identical to SEQ ID NO: 276729
  chr22:26422873-26423634
  hypo

SEQ ID NO: 329429 - DNA, 42 bp, Homo sapiens; identical to SEQ ID NO: 206078
  chr22:26565123-26565165
  hypo

SEQ ID NO: 329430 - DNA, 287 bp, Homo sapiens; identical to SEQ ID NO: 295282
  chr22:26565999-26566286
  hypo

SEQ ID NO: 329431 - DNA, 112 bp, Homo sapiens; identical to SEQ ID NO: 206082
  chr22:26825000-26825112
  hypo

SEQ ID NO: 329432 - DNA, 312 bp, Homo sapiens; identical to SEQ ID NO: 276730
  chr22:26829744-26830056
  hypo

SEQ ID NO: 329433 - DNA, 34 bp, Homo sapiens; identical to SEQ ID NO: 276731
  chr22:26867803-26867837
  hypo

SEQ ID NO: 329434 - DNA, 201 bp, Homo sapiens; identical to SEQ ID NO: 276732
  chr22:26888176-26888377
  hypo

SEQ ID NO: 329435 - DNA, 146 bp, Homo sapiens
  chr22:26930530-26930676
  hypo
ggcaagccaggggcagcgagccaccttttaaggagaccccagaggagccactgctgggcccttggctgagaacagtgaagtaagcaacatccagcccactactgcagtgtccccagccggccctcgcctctgcttctgagaagcac

SEQ ID NO: 329436 - DNA, 219 bp, Homo sapiens; identical to SEQ ID NO: 220692
  chr22:26961223-26961442
  hypo

SEQ ID NO: 329437 - DNA, 80 bp, Homo sapiens; identical to SEQ ID NO: 220693
  chr22:26965205-26965285
  hypo

SEQ ID NO: 329438 - DNA, 76 bp, Homo sapiens; identical to SEQ ID NO: 276736
  chr22:26999516-26999592
  hypo

SEQ ID NO: 329439 - DNA, 73 bp, Homo sapiens; identical to SEQ ID NO: 220694
  chr22:27007746-27007819
  hypo

SEQ ID NO: 329440 - DNA, 265 bp, Homo sapiens; identical to SEQ ID NO: 220695
  chr22:27007869-27008134
  hypo

SEQ ID NO: 329441 - DNA, 103 bp, Homo sapiens
  chr22:27019112-27019215
  hypo
tgccagatcctggggcgagcccccaacctctcacccttcacgggactctgatgcggatctccaccttttttttttcctggcacagatggtggtgtgggatgag

SEQ ID NO: 329442 - DNA, 313 bp, Homo sapiens; identical to SEQ ID NO: 295295
  chr22:27068608-27068921
  hypo

SEQ ID NO: 329443 - DNA, 35 bp, Homo sapiens; identical to SEQ ID NO: 220696
  chr22:27099774-27099809
  hypo

SEQ ID NO: 329444 - DNA, 232 bp, Homo sapiens; identical to SEQ ID NO: 276741
  chr22:27486749-27486981
  hypo

SEQ ID NO: 329445 - DNA, 215 bp, Homo sapiens; identical to SEQ ID NO: 276742
  chr22:28187361-28187576
  hypo

SEQ ID NO: 329446 - DNA, 175 bp, Homo sapiens
  chr22:28191122-28191297
  hypo
tggagaatgctgatgctggccgcagcgtctgctgtgcatgctaaacacccggcttcaaatgagagagtgcgtcccgggcgtcctgggctgggcagtaaccgcggaacaaagagaaaaagcagagaggccgcattcatgaattagaaaacctaagcgggaaagctacccgggatgc

SEQ ID NO: 329447 - DNA, 210 bp, Homo sapiens; identical to SEQ ID NO: 295301
  chr22:28197049-28197259
  hypo

SEQ ID NO: 329448 - DNA, 32 bp, Homo sapiens; identical to SEQ ID NO: 276744
  chr22:28361345-28361377
  hypo

SEQ ID NO: 329449 - DNA, 63 bp, Homo sapiens; identical to SEQ ID NO: 295312
  chr22:29075343-29075406
  hypo

SEQ ID NO: 329450 - DNA, 91 bp, Homo sapiens; identical to SEQ ID NO: 220697
  chr22:29076604-29076695
  hypo

SEQ ID NO: 329451 - DNA, 189 bp, Homo sapiens; identical to SEQ ID NO: 276747
  chr22:29435189-29435378
  hypo

SEQ ID NO: 329452 - DNA, 425 bp, Homo sapiens; identical to SEQ ID NO: 206095
  chr22:29468748-29469173
  hypo

SEQ ID NO: 329453 - DNA, 202 bp, Homo sapiens; identical to SEQ ID NO: 206096
  chr22:29469213-29469415
  hypo

SEQ ID NO: 329454 - DNA, 46 bp, Homo sapiens; identical to SEQ ID NO: 276749
  chr22:29482738-29482784
  hypo

SEQ ID NO: 329455 - DNA, 80 bp, Homo sapiens; identical to SEQ ID NO: 276750
  chr22:29525175-29525255
  hypo

SEQ ID NO: 329456 - DNA, 330 bp, Homo sapiens; identical to SEQ ID NO: 276751
  chr22:29580364-29580694
  hypo

SEQ ID NO: 329457 - DNA, 138 bp, Homo sapiens; identical to SEQ ID NO: 220700
  chr22:29587096-29587234
  hypo

SEQ ID NO: 329458 - DNA, 90 bp, Homo sapiens; identical to SEQ ID NO: 276753
  chr22:29594544-29594634
  hypo

SEQ ID NO: 329459 - DNA, 580 bp, Homo sapiens; identical to SEQ ID NO: 276754
  chr22:29607421-29608001
  hypo

SEQ ID NO: 329460 - DNA, 41 bp, Homo sapiens; identical to SEQ ID NO: 276755
  chr22:29627464-29627505
  hypo

SEQ ID NO: 329461 - DNA, 34 bp, Homo sapiens; identical to SEQ ID NO: 220702
  chr22:29678067-29678101
  hypo

SEQ ID NO: 329462 - DNA, 174 bp, Homo sapiens; identical to SEQ ID NO: 220703
  chr22:29686337-29686511
  hypo

SEQ ID NO: 329463 - DNA, 968 bp, Homo sapiens; identical to SEQ ID NO: 295326
  chr22:29702352-29703320
  hypo

SEQ ID NO: 329464 - DNA, 150 bp, Homo sapiens; identical to SEQ ID NO: 220706
  chr22:29714174-29714324
  hypo

SEQ ID NO: 329465 - DNA, 205 bp, Homo sapiens; identical to SEQ ID NO: 276759
  chr22:29733758-29733963
  hypo

SEQ ID NO: 329466 - DNA, 109 bp, Homo sapiens; identical to SEQ ID NO: 276760
  chr22:29735487-29735596
  hypo

SEQ ID NO: 329467 - DNA, 354 bp, Homo sapiens; identical to SEQ ID NO: 276761
  chr22:29744977-29745331
  hypo

SEQ ID NO: 329468 - DNA, 159 bp, Homo sapiens; identical to SEQ ID NO: 220707
  chr22:29758099-29758258
  hypo

SEQ ID NO: 329469 - DNA, 149 bp, Homo sapiens; identical to SEQ ID NO: 276763
  chr22:29845784-29845933
  hypo

SEQ ID NO: 329470 - DNA, 180 bp, Homo sapiens; identical to SEQ ID NO: 220708
  chr22:29846233-29846413
  hypo

SEQ ID NO: 329471 - DNA, 197 bp, Homo sapiens; identical to SEQ ID NO: 226357
  chr22:29876678-29876875
  hypo

SEQ ID NO: 329472 - DNA, 33 bp, Homo sapiens; identical to SEQ ID NO: 276765
  chr22:29900365-29900398
  hypo

SEQ ID NO: 329473 - DNA, 120 bp, Homo sapiens; identical to SEQ ID NO: 220709
  chr22:30004164-30004284
  hypo

SEQ ID NO: 329474 - DNA, 80 bp, Homo sapiens; identical to SEQ ID NO: 276770
  chr22:30032865-30032945
  hypo

SEQ ID NO: 329475 - DNA, 39 bp, Homo sapiens; identical to SEQ ID NO: 276771
  chr22:30051627-30051666
  hypo

SEQ ID NO: 329476 - DNA, 179 bp, Homo sapiens; identical to SEQ ID NO: 276772
  chr22:30073518-30073697
  hypo

SEQ ID NO: 329477 - DNA, 161 bp, Homo sapiens; identical to SEQ ID NO: 276773
  chr22:30074060-30074221
  hypo

SEQ ID NO: 329478 - DNA, 99 bp, Homo sapiens
  chr22:30084259-30084358
  hypo
aggcagtaaaacaccctgttcggcccctcggcactgaagatgtgtttcagtgcagctctcctcggcaccggattcgttgctgcaacagtgggagggaag

SEQ ID NO: 329479 - DNA, 134 bp, Homo sapiens
  chr22:30084388-30084522
  hypo
aggttctgttctcatgatccttgctgtgatttctcttttgatgttggcaattttaaaatgacatcagtctatctggacctttttcctaaggctcttgctcagaccactcagtagatagccgccacctgcccagt

SEQ ID NO: 329480 - DNA, 209 bp, Homo sapiens; identical to SEQ ID NO: 276775
  chr22:30086757-30086966
  hypo

SEQ ID NO: 329481 - DNA, 471 bp, Homo sapiens
  chr22:30090268-30090739
  hypo
cttgcctcaggccacgtcaccttaccccagccatgttgccagggcatgaggactaagatgcttgccctgccaagcccggaggggatgagcagcctcagctggtgccgccacagacagcacaccacagaggtggctcagggaccttggtagatgggaatgtgagaatctattaaaataggcagggatctccggtcctctgtcaagaggcaatgctgacggctttttcctgctggcgtgcctctgcccaccagccttccccttgcacatcctcatttgtcacctcctaatttgaattattgggcaaatctggccgcttatttgggactgacagccaacttcttgagcatctatttgaacagccttccctttcgctcccagccacctttgaggtgagtccaagtggcaggacaggaccctgtgtgacagagcggaggtcttgtgccctctcagcttcttctctgctttcttaca

SEQ ID NO: 329482 - DNA, 88 bp, Homo sapiens; identical to SEQ ID NO: 220711
  chr22:30090769-30090857
  hypo

SEQ ID NO: 329483 - DNA, 50 bp, Homo sapiens; identical to SEQ ID NO: 220712
  chr22:30091060-30091110
  hypo

SEQ ID NO: 329484 - DNA, 448 bp, Homo sapiens; identical to SEQ ID NO: 220713
  chr22:30091301-30091749
  hypo

SEQ ID NO: 329485 - DNA, 67 bp, Homo sapiens; identical to SEQ ID NO: 276778
  chr22:30141125-30141192
  hypo

SEQ ID NO: 329486 - DNA, 270 bp, Homo sapiens; identical to SEQ ID NO: 220714
  chr22:30190730-30191000
  hypo

SEQ ID NO: 329487 - DNA, 40 bp, Homo sapiens; identical to SEQ ID NO: 276781
  chr22:30192061-30192101
  hypo

SEQ ID NO: 329488 - DNA, 94 bp, Homo sapiens; identical to SEQ ID NO: 276782
  chr22:30215045-30215139
  hypo

SEQ ID NO: 329489 - DNA, 257 bp, Homo sapiens; identical to SEQ ID NO: 276783
  chr22:30221027-30221284
  hypo

SEQ ID NO: 329490 - DNA, 31 bp, Homo sapiens; identical to SEQ ID NO: 220715
  chr22:30309742-30309773
  hypo

SEQ ID NO: 329491 - DNA, 31 bp, Homo sapiens; identical to SEQ ID NO: 220716
  chr22:30310013-30310044
  hypo

SEQ ID NO: 329492 - DNA, 80 bp, Homo sapiens; identical to SEQ ID NO: 220717
  chr22:30352153-30352233
  hypo

SEQ ID NO: 329493 - DNA, 174 bp, Homo sapiens; identical to SEQ ID NO: 220718
  chr22:30422074-30422248
  hypo

SEQ ID NO: 329494 - DNA, 34 bp, Homo sapiens; identical to SEQ ID NO: 276788
  chr22:30431160-30431194
  hypo

SEQ ID NO: 329495 - DNA, 185 bp, Homo sapiens; identical to SEQ ID NO: 220719
  chr22:30624613-30624798
  hypo

SEQ ID NO: 329496 - DNA, 143 bp, Homo sapiens
  chr22:30634183-30634326
  hypo
aggagcgggattcacgaggcatttctatgtccctacttgtaattccttcggacaaccttgtgaagtagataagatggcattcatcactgatgattcttgcaattttcaagataagacagctgagctcatgaaaagggtcacgg

SEQ ID NO: 329497 - DNA, 32 bp, Homo sapiens
  chr22:30634356-30634388
  hypo
cctggccggccgcaggggcagggccttcccag

SEQ ID NO: 329498 - DNA, 90 bp, Homo sapiens; identical to SEQ ID NO: 276791
  chr22:30647190-30647280
  hypo

SEQ ID NO: 329499 - DNA, 245 bp, Homo sapiens; identical to SEQ ID NO: 276792
  chr22:30653608-30653853
  hypo

SEQ ID NO: 329500 - DNA, 197 bp, Homo sapiens; identical to SEQ ID NO: 220720
  chr22:30656576-30656773
  hypo

SEQ ID NO: 329501 - DNA, 72 bp, Homo sapiens; identical to SEQ ID NO: 276794
  chr22:30681973-30682045
  hypo

SEQ ID NO: 329502 - DNA, 43 bp, Homo sapiens; identical to SEQ ID NO: 276795
  chr22:30708028-30708071
  hypo

SEQ ID NO: 329503 - DNA, 192 bp, Homo sapiens; identical to SEQ ID NO: 226359
  chr22:30723111-30723303
  hypo

SEQ ID NO: 329504 - DNA, 42 bp, Homo sapiens; identical to SEQ ID NO: 276796
  chr22:30734441-30734483
  hypo

SEQ ID NO: 329505 - DNA, 181 bp, Homo sapiens; identical to SEQ ID NO: 276797
  chr22:30768084-30768265
  hypo

SEQ ID NO: 329506 - DNA, 264 bp, Homo sapiens; identical to SEQ ID NO: 206101
  chr22:30792874-30793138
  hypo

SEQ ID NO: 329507 - DNA, 64 bp, Homo sapiens; identical to SEQ ID NO: 276798
  chr22:30843508-30843572
  hypo

SEQ ID NO: 329508 - DNA, 120 bp, Homo sapiens; identical to SEQ ID NO: 276800
  chr22:30873893-30874013
  hypo

SEQ ID NO: 329509 - DNA, 155 bp, Homo sapiens; identical to SEQ ID NO: 276801
  chr22:30888310-30888465
  hypo

SEQ ID NO: 329510 - DNA, 213 bp, Homo sapiens; identical to SEQ ID NO: 276802
  chr22:30939013-30939226
  hypo

SEQ ID NO: 329511 - DNA, 521 bp, Homo sapiens; identical to SEQ ID NO: 276803
  chr22:30939623-30940144
  hypo

SEQ ID NO: 329512 - DNA, 141 bp, Homo sapiens; identical to SEQ ID NO: 276804
  chr22:30940937-30941078
  hypo

SEQ ID NO: 329513 - DNA, 1179 bp, Homo sapiens; identical to SEQ ID NO: 276805
  chr22:30950916-30952095
  hypo

SEQ ID NO: 329514 - DNA, 353 bp, Homo sapiens; identical to SEQ ID NO: 276806
  chr22:30977857-30978210
  hypo

SEQ ID NO: 329515 - DNA, 328 bp, Homo sapiens; identical to SEQ ID NO: 295344
  chr22:31002803-31003131
  hypo

SEQ ID NO: 329516 - DNA, 50 bp, Homo sapiens; identical to SEQ ID NO: 276807
  chr22:31059626-31059676
  hypo

SEQ ID NO: 329517 - DNA, 33 bp, Homo sapiens; identical to SEQ ID NO: 220725
  chr22:31062272-31062305
  hypo

SEQ ID NO: 329518 - DNA, 165 bp, Homo sapiens; identical to SEQ ID NO: 276809
  chr22:31078361-31078526
  hypo

SEQ ID NO: 329519 - DNA, 44 bp, Homo sapiens; identical to SEQ ID NO: 276810
  chr22:31126862-31126906
  hypo

SEQ ID NO: 329520 - DNA, 85 bp, Homo sapiens; identical to SEQ ID NO: 220726
  chr22:31169318-31169403
  hypo

SEQ ID NO: 329521 - DNA, 409 bp, Homo sapiens; identical to SEQ ID NO: 206106
  chr22:31198752-31199161
  hypo

SEQ ID NO: 329522 - DNA, 119 bp, Homo sapiens; identical to SEQ ID NO: 276812
  chr22:31220230-31220349
  hypo

SEQ ID NO: 329523 - DNA, 188 bp, Homo sapiens; identical to SEQ ID NO: 276813
  chr22:31220642-31220830
  hypo

SEQ ID NO: 329524 - DNA, 45 bp, Homo sapiens; identical to SEQ ID NO: 276814
  chr22:31250071-31250116
  hypo

SEQ ID NO: 329525 - DNA, 128 bp, Homo sapiens; identical to SEQ ID NO: 220728
  chr22:31260802-31260930
  hypo

SEQ ID NO: 329526 - DNA, 36 bp, Homo sapiens; identical to SEQ ID NO: 276816
  chr22:31261979-31262015
  hypo

SEQ ID NO: 329527 - DNA, 237 bp, Homo sapiens; identical to SEQ ID NO: 220729
  chr22:31264325-31264562
  hypo

SEQ ID NO: 329528 - DNA, 709 bp, Homo sapiens; identical to SEQ ID NO: 276818
  chr22:31266249-31266958
  hypo

SEQ ID NO: 329529 - DNA, 200 bp, Homo sapiens; identical to SEQ ID NO: 276819
  chr22:31279750-31279950
  hypo

SEQ ID NO: 329530 - DNA, 221 bp, Homo sapiens; identical to SEQ ID NO: 276820
  chr22:31301689-31301910
  hypo

SEQ ID NO: 329531 - DNA, 215 bp, Homo sapiens; identical to SEQ ID NO: 276821
  chr22:31475552-31475767
  hypo

SEQ ID NO: 329532 - DNA, 432 bp, Homo sapiens; identical to SEQ ID NO: 276822
  chr22:31483868-31484300
  hypo

SEQ ID NO: 329533 - DNA, 227 bp, Homo sapiens; identical to SEQ ID NO: 276823
  chr22:31486793-31487020
  hypo

SEQ ID NO: 329534 - DNA, 443 bp, Homo sapiens; identical to SEQ ID NO: 276824
  chr22:31487249-31487692
  hypo

SEQ ID NO: 329535 - DNA, 341 bp, Homo sapiens; identical to SEQ ID NO: 276825
  chr22:31489497-31489838
  hypo

SEQ ID NO: 329536 - DNA, 64 bp, Homo sapiens; identical to SEQ ID NO: 220732
  chr22:31494668-31494732
  hypo

SEQ ID NO: 329537 - DNA, 78 bp, Homo sapiens; identical to SEQ ID NO: 220733
  chr22:31494797-31494875
  hypo

SEQ ID NO: 329538 - DNA, 110 bp, Homo sapiens; identical to SEQ ID NO: 220734
  chr22:31495079-31495189
  hypo

SEQ ID NO: 329539 - DNA, 567 bp, Homo sapiens; identical to SEQ ID NO: 276828
  chr22:31522437-31523004
  hypo

SEQ ID NO: 329540 - DNA, 266 bp, Homo sapiens; identical to SEQ ID NO: 220735
  chr22:31644627-31644893
  hypo

SEQ ID NO: 329541 - DNA, 118 bp, Homo sapiens; identical to SEQ ID NO: 276830
  chr22:31655943-31656061
  hypo

SEQ ID NO: 329542 - DNA, 139 bp, Homo sapiens; identical to SEQ ID NO: 276831
  chr22:31685462-31685601
  hypo

SEQ ID NO: 329543 - DNA, 44 bp, Homo sapiens; identical to SEQ ID NO: 220736
  chr22:31744073-31744117
  hypo

SEQ ID NO: 329544 - DNA, 143 bp, Homo sapiens; identical to SEQ ID NO: 220737
  chr22:31942754-31942897
  hypo

SEQ ID NO: 329545 - DNA, 34 bp, Homo sapiens; identical to SEQ ID NO: 276834
  chr22:31976811-31976845
  hypo

SEQ ID NO: 329546 - DNA, 154 bp, Homo sapiens; identical to SEQ ID NO: 276835
  chr22:31998583-31998737
  hypo

SEQ ID NO: 329547 - DNA, 302 bp, Homo sapiens
  chr22:32009418-32009720
  hypo
aggggcagctcctccaggagggtgccacgcggctcctgcgctttgcagccagcatgaaggcctcccggcagcagctgcaggcccagcagcaggtccaggtaggcccagggccccttcctgtggggagcaggcagggtgtggcatgagctgaccagaggctgtgttgtaggcggctcacagtctccatcgtgccgtccgccgctgtgccacgctctggaaacagaaagtgctgggccggggcgggaagcctcagcccctggcagccatcgcacccagcaggaaagtgacgtttgagggtcccc

SEQ ID NO: 329548 - DNA, 140 bp, Homo sapiens
  chr22:32014093-32014233
  hypo
ccctcaggtcctgtcggcggcaagcgagcagcctgcgcaggtggctggagctgaacagagaggagccggggcctgaggaccaggaagtagagcagcaggtgcagaaagagctggaacaggtgaggccccaggccatcccc

SEQ ID NO: 329549 - DNA, 87 bp, Homo sapiens; identical to SEQ ID NO: 220738
  chr22:32014373-32014460
  hypo

SEQ ID NO: 329550 - DNA, 304 bp, Homo sapiens; identical to SEQ ID NO: 276839
  chr22:32025196-32025500
  hypo

SEQ ID NO: 329551 - DNA, 383 bp, Homo sapiens; identical to SEQ ID NO: 276840
  chr22:32078008-32078391
  hypo

SEQ ID NO: 329552 - DNA, 120 bp, Homo sapiens; identical to SEQ ID NO: 276841
  chr22:32101966-32102086
  hypo

SEQ ID NO: 329553 - DNA, 38 bp, Homo sapiens; identical to SEQ ID NO: 276842
  chr22:32275827-32275865
  hypo

SEQ ID NO: 329554 - DNA, 31 bp, Homo sapiens; identical to SEQ ID NO: 276843
  chr22:32276566-32276597
  hypo

SEQ ID NO: 329555 - DNA, 220 bp, Homo sapiens; identical to SEQ ID NO: 276844
  chr22:32352537-32352757
  hypo

SEQ ID NO: 329556 - DNA, 213 bp, Homo sapiens; identical to SEQ ID NO: 276845
  chr22:32354707-32354920
  hypo

SEQ ID NO: 329557 - DNA, 95 bp, Homo sapiens; identical to SEQ ID NO: 276847
  chr22:32384071-32384166
  hypo

SEQ ID NO: 329558 - DNA, 95 bp, Homo sapiens; identical to SEQ ID NO: 206112
  chr22:32571844-32571939
  hypo

SEQ ID NO: 329559 - DNA, 430 bp, Homo sapiens; identical to SEQ ID NO: 276848
  chr22:32665358-32665788
  hypo

SEQ ID NO: 329560 - DNA, 45 bp, Homo sapiens
  chr22:32667491-32667536
  hypo
ccgtgagaagaagccgaagccatccaagaagaaagcaggtggccg

SEQ ID NO: 329561 - DNA, 89 bp, Homo sapiens
  chr22:32667663-32667752
  hypo
tgctgcggctgcaccccgtgggcatcaatggccctgtcaactctttcgctctgttccacaatgtcaactgtccccgcggcttcctgtac

SEQ ID NO: 329562 - DNA, 56 bp, Homo sapiens; identical to SEQ ID NO: 276850
  chr22:32668363-32668419
  hypo

SEQ ID NO: 329563 - DNA, 175 bp, Homo sapiens; identical to SEQ ID NO: 276851
  chr22:32668773-32668948
  hypo

SEQ ID NO: 329564 - DNA, 198 bp, Homo sapiens; identical to SEQ ID NO: 276852
  chr22:32792002-32792200
  hypo

SEQ ID NO: 329565 - DNA, 160 bp, Homo sapiens; identical to SEQ ID NO: 220742
  chr22:32804846-32805006
  hypo

SEQ ID NO: 329566 - DNA, 212 bp, Homo sapiens; identical to SEQ ID NO: 276854
  chr22:32914022-32914234
  hypo

SEQ ID NO: 329567 - DNA, 259 bp, Homo sapiens; identical to SEQ ID NO: 276855
  chr22:32960689-32960948
  hypo

SEQ ID NO: 329568 - DNA, 189 bp, Homo sapiens; identical to SEQ ID NO: 276856
  chr22:32997561-32997750
  hypo

SEQ ID NO: 329569 - DNA, 107 bp, Homo sapiens; identical to SEQ ID NO: 276857
  chr22:33250662-33250769
  hypo

SEQ ID NO: 329570 - DNA, 38 bp, Homo sapiens; identical to SEQ ID NO: 276858
  chr22:33305903-33305941
  hypo

SEQ ID NO: 329571 - DNA, 43 bp, Homo sapiens; identical to SEQ ID NO: 276859
  chr22:33361654-33361697
  hypo

SEQ ID NO: 329572 - DNA, 42 bp, Homo sapiens; identical to SEQ ID NO: 276860
  chr22:33361997-33362039
  hypo

SEQ ID NO: 329573 - DNA, 75 bp, Homo sapiens; identical to SEQ ID NO: 276861
  chr22:34144333-34144408
  hypo

SEQ ID NO: 329574 - DNA, 151 bp, Homo sapiens; identical to SEQ ID NO: 276862
  chr22:34242012-34242163
  hypo

SEQ ID NO: 329575 - DNA, 50 bp, Homo sapiens; identical to SEQ ID NO: 276863
  chr22:34257537-34257587
  hypo

SEQ ID NO: 329576 - DNA, 1102 bp, Homo sapiens; identical to SEQ ID NO: 295368
  chr22:34315937-34317039
  hypo

SEQ ID NO: 329577 - DNA, 44 bp, Homo sapiens; identical to SEQ ID NO: 276864
  chr22:35526200-35526244
  hypo

SEQ ID NO: 329578 - DNA, 243 bp, Homo sapiens; identical to SEQ ID NO: 276865
  chr22:35719273-35719516
  hypo

SEQ ID NO: 329579 - DNA, 183 bp, Homo sapiens; identical to SEQ ID NO: 220745
  chr22:35730462-35730645
  hypo

SEQ ID NO: 329580 - DNA, 317 bp, Homo sapiens; identical to SEQ ID NO: 220746
  chr22:35742069-35742386
  hypo

SEQ ID NO: 329581 - DNA, 57 bp, Homo sapiens; identical to SEQ ID NO: 220747
  chr22:35758435-35758492
  hypo

SEQ ID NO: 329582 - DNA, 262 bp, Homo sapiens; identical to SEQ ID NO: 295372
  chr22:35767972-35768234
  hypo

SEQ ID NO: 329583 - DNA, 273 bp, Homo sapiens; identical to SEQ ID NO: 295373
  chr22:35776987-35777260
  hypo

SEQ ID NO: 329584 - DNA, 42 bp, Homo sapiens; identical to SEQ ID NO: 276869
  chr22:35806956-35806998
  hypo

SEQ ID NO: 329585 - DNA, 217 bp, Homo sapiens; identical to SEQ ID NO: 276870
  chr22:35820082-35820299
  hypo

SEQ ID NO: 329586 - DNA, 143 bp, Homo sapiens; identical to SEQ ID NO: 276871
  chr22:35821626-35821769
  hypo

SEQ ID NO: 329587 - DNA, 654 bp, Homo sapiens; identical to SEQ ID NO: 276872
  chr22:35842433-35843087
  hypo

SEQ ID NO: 329588 - DNA, 74 bp, Homo sapiens; identical to SEQ ID NO: 276873
  chr22:35843123-35843197
  hypo

SEQ ID NO: 329589 - DNA, 290 bp, Homo sapiens
  chr22:35848670-35848960
  hypo
tcctggttagccctgtgtgtgagtttgtgttaaataatcagtccgactcctccgctggggtggtggtgccagtgtggccagttcttgtgcaaatagaacattttcaagatagttctgccacttgtacagcactctacgtgctgtagagttcagccctgagagagagggacaggatcctgtgtgtcccgtccgccttgcatgtgggtctcaccagcggcttccttcatgtcactctggagcactctcacccaccccgagaggaaagtgccgctatccctgctttgcagatg

SEQ ID NO: 329590 - DNA, 38 bp, Homo sapiens; identical to SEQ ID NO: 276875
  chr22:35875348-35875386
  hypo

SEQ ID NO: 329591 - DNA, 431 bp, Homo sapiens; identical to SEQ ID NO: 276876
  chr22:35947750-35948181
  hypo

SEQ ID NO: 329592 - DNA, 140 bp, Homo sapiens; identical to SEQ ID NO: 276877
  chr22:35951597-35951737
  hypo

SEQ ID NO: 329593 - DNA, 240 bp, Homo sapiens; identical to SEQ ID NO: 276878
  chr22:36089709-36089949
  hypo

SEQ ID NO: 329594 - DNA, 153 bp, Homo sapiens; identical to SEQ ID NO: 276879
  chr22:36123184-36123337
  hypo

SEQ ID NO: 329595 - DNA, 102 bp, Homo sapiens; identical to SEQ ID NO: 220752
  chr22:36246094-36246196
  hypo

SEQ ID NO: 329596 - DNA, 58 bp, Homo sapiens; identical to SEQ ID NO: 206117
  chr22:36424337-36424395
  hypo

SEQ ID NO: 329597 - DNA, 78 bp, Homo sapiens; identical to SEQ ID NO: 57980
  chr22:36424418-36424496
  hypo

SEQ ID NO: 329598 - DNA, 186 bp, Homo sapiens; identical to SEQ ID NO: 206119
  chr22:36425195-36425381
  hypo

SEQ ID NO: 329599 - DNA, 315 bp, Homo sapiens; identical to SEQ ID NO: 295380
  chr22:36462014-36462329
  hypo

SEQ ID NO: 329600 - DNA, 89 bp, Homo sapiens; identical to SEQ ID NO: 276881
  chr22:36462715-36462804
  hypo

SEQ ID NO: 329601 - DNA, 163 bp, Homo sapiens; identical to SEQ ID NO: 276882
  chr22:36519454-36519617
  hypo

SEQ ID NO: 329602 - DNA, 32 bp, Homo sapiens; identical to SEQ ID NO: 276883
  chr22:36582596-36582628
  hypo

SEQ ID NO: 329603 - DNA, 33 bp, Homo sapiens; identical to SEQ ID NO: 276884
  chr22:36646818-36646851
  hypo

SEQ ID NO: 329604 - DNA, 174 bp, Homo sapiens; identical to SEQ ID NO: 220757
  chr22:36677171-36677345
  hypo

SEQ ID NO: 329605 - DNA, 150 bp, Homo sapiens; identical to SEQ ID NO: 276886
  chr22:36683790-36683940
  hypo

SEQ ID NO: 329606 - DNA, 278 bp, Homo sapiens; identical to SEQ ID NO: 276888
  chr22:36688047-36688325
  hypo

SEQ ID NO: 329607 - DNA, 171 bp, Homo sapiens; identical to SEQ ID NO: 220759
  chr22:36692853-36693024
  hypo

SEQ ID NO: 329608 - DNA, 129 bp, Homo sapiens; identical to SEQ ID NO: 220760
  chr22:36695463-36695592
  hypo

SEQ ID NO: 329609 - DNA, 71 bp, Homo sapiens; identical to SEQ ID NO: 220761
  chr22:36696999-36697070
  hypo

SEQ ID NO: 329610 - DNA, 260 bp, Homo sapiens; identical to SEQ ID NO: 276892
  chr22:36707808-36708068
  hypo

SEQ ID NO: 329611 - DNA, 238 bp, Homo sapiens; identical to SEQ ID NO: 220762
  chr22:36713506-36713744
  hypo

SEQ ID NO: 329612 - DNA, 71 bp, Homo sapiens; identical to SEQ ID NO: 276894
  chr22:36721696-36721767
  hypo

SEQ ID NO: 329613 - DNA, 194 bp, Homo sapiens; identical to SEQ ID NO: 276895
  chr22:36722630-36722824
  hypo

SEQ ID NO: 329614 - DNA, 203 bp, Homo sapiens; identical to SEQ ID NO: 220763
  chr22:36732742-36732945
  hypo

SEQ ID NO: 329615 - DNA, 403 bp, Homo sapiens; identical to SEQ ID NO: 276897
  chr22:36740160-36740563
  hypo

SEQ ID NO: 329616 - DNA, 78 bp, Homo sapiens; identical to SEQ ID NO: 276898
  chr22:36741013-36741091
  hypo

SEQ ID NO: 329617 - DNA, 92 bp, Homo sapiens; identical to SEQ ID NO: 276899
  chr22:36838769-36838861
  hypo

SEQ ID NO: 329618 - DNA, 135 bp, Homo sapiens
  chr22:36855433-36855568
  hypo
gattacaggcgtgagccaccgtgcctggctggggcccggaactttctaaggcagaggcggcagagacaaagaggtggctggaggtggggcagtgccgagccaagtctcaggacatccctactgccgagcctcccc

SEQ ID NO: 329619 - DNA, 32 bp, Homo sapiens
  chr22:36855598-36855630
  hypo
gcaggcggggcccagctcgggtttcactcctt

SEQ ID NO: 329620 - DNA, 112 bp, Homo sapiens
  chr22:36860797-36860909
  hypo
ccaaagtcctgggattacaggcgtgagccaccgcgcccggctccatgttctgtatatttagaaggaacctgtgtgagtggccaccaaacgttcactctgaaccatgctggcg

SEQ ID NO: 329621 - DNA, 36 bp, Homo sapiens; identical to SEQ ID NO: 276902
  chr22:36867728-36867764
  hypo

SEQ ID NO: 329622 - DNA, 117 bp, Homo sapiens; identical to SEQ ID NO: 276903
  chr22:36868766-36868883
  hypo

SEQ ID NO: 329623 - DNA, 97 bp, Homo sapiens; identical to SEQ ID NO: 276904
  chr22:36871884-36871981
  hypo

SEQ ID NO: 329624 - DNA, 85 bp, Homo sapiens; identical to SEQ ID NO: 276905
  chr22:36880506-36880591
  hypo

SEQ ID NO: 329625 - DNA, 171 bp, Homo sapiens; identical to SEQ ID NO: 276906
  chr22:36885622-36885793
  hypo

SEQ ID NO: 329626 - DNA, 117 bp, Homo sapiens; identical to SEQ ID NO: 220764
  chr22:36902565-36902682
  hypo

SEQ ID NO: 329627 - DNA, 50 bp, Homo sapiens; identical to SEQ ID NO: 276909
  chr22:36906969-36907019
  hypo

SEQ ID NO: 329628 - DNA, 125 bp, Homo sapiens; identical to SEQ ID NO: 276910
  chr22:36907687-36907812
  hypo

SEQ ID NO: 329629 - DNA, 262 bp, Homo sapiens; identical to SEQ ID NO: 276911
  chr22:37159744-37160006
  hypo

SEQ ID NO: 329630 - DNA, 110 bp, Homo sapiens; identical to SEQ ID NO: 276912
  chr22:37160269-37160379
  hypo

SEQ ID NO: 329631 - DNA, 177 bp, Homo sapiens; identical to SEQ ID NO: 220765
  chr22:37168633-37168810
  hypo

SEQ ID NO: 329632 - DNA, 103 bp, Homo sapiens; identical to SEQ ID NO: 276914
  chr22:37234764-37234867
  hypo

SEQ ID NO: 329633 - DNA, 208 bp, Homo sapiens
  chr22:37329775-37329983
  hypo
gagctaggagccagcgaagccgagggtccaggtgggagggatttgcagctgctcccacgggcaccgggccaggcctcaccctcagtgccaacccacaggacagcaagaccgagaccctccagaacgcccacagcatggccctgccagccctggagccctccaccaggtactgggccagggtgagggtcaggacctcccgcaccggcta

SEQ ID NO: 329634 - DNA, 104 bp, Homo sapiens
  chr22:37330029-37330133
  hypo
gagtcgggtaggtgaaggctggagtccagagcttctggccaggaccagctcatagtttctcactgccagaaaatccccaatgcagcagccgtagcaggcctgca

SEQ ID NO: 329635 - DNA, 147 bp, Homo sapiens; identical to SEQ ID NO: 276916
  chr22:37332531-37332678
  hypo

SEQ ID NO: 329636 - DNA, 39 bp, Homo sapiens
  chr22:37348992-37349031
  hypo
gggcatcctgggtgtctgcccacccgcaggtgatgtggc

SEQ ID NO: 329637 - DNA, 238 bp, Homo sapiens
  chr22:37367561-37367799
  hypo
cttgttataaacttgttctaacaacaattcactctgagcaggcattccgcatgctcattacataatatttttgtctctgtgcagctgcacatctgcaccgtagtgtagctccctgtccccgggtgaccgattggaactaggtttctccatccccaataggcctcactgtgtctcatcacaccaaagtatttttaaaaaggcttaatgaagacagcatcctctgtatcatcccccggga

SEQ ID NO: 329638 - DNA, 256 bp, Homo sapiens
  chr22:37367829-37368085
  hypo
cttcaacgttcctatctgcctaagccttgaatcccctcctctatgatatagcaaggtaaatgcctgcatcctgactgcatttaatggaccacgggccctgggttggggttgcagcacccagtgagctatgagagcagcccccagctgctccgtctgacagattgaagccaggctctccagccagcgcttccagcttcatcagttctgtttgttcaacgttatgttccttctgccctggtctcgcagcctgaaattc

SEQ ID NO: 329639 - DNA, 479 bp, Homo sapiens; identical to SEQ ID NO: 206124
  chr22:37414885-37415364
  hypo

SEQ ID NO: 329640 - DNA, 185 bp, Homo sapiens; identical to SEQ ID NO: 276919
  chr22:37507694-37507879
  hypo

SEQ ID NO: 329641 - DNA, 142 bp, Homo sapiens; identical to SEQ ID NO: 276920
  chr22:37509140-37509282
  hypo

SEQ ID NO: 329642 - DNA, 200 bp, Homo sapiens; identical to SEQ ID NO: 276921
  chr22:37527573-37527773
  hypo

SEQ ID NO: 329643 - DNA, 110 bp, Homo sapiens; identical to SEQ ID NO: 276922
  chr22:37562423-37562533
  hypo

SEQ ID NO: 329644 - DNA, 208 bp, Homo sapiens; identical to SEQ ID NO: 276923
  chr22:37622731-37622939
  hypo

SEQ ID NO: 329645 - DNA, 52 bp, Homo sapiens; identical to SEQ ID NO: 276924
  chr22:37683793-37683845
  hypo

SEQ ID NO: 329646 - DNA, 131 bp, Homo sapiens
  chr22:37769150-37769281
  hypo
aaggatgtcatgcagatcctcgtccttggcgaactggaccttcttgcgcagggcgtgaccggcggccatgtacacctcctcccggtggtgcttcttgtagggccggaagcgctcccagatcttgtgcgtgc

SEQ ID NO: 329647 - DNA, 86 bp, Homo sapiens; identical to SEQ ID NO: 276926
  chr22:37770930-37771016
  hypo

SEQ ID NO: 329648 - DNA, 136 bp, Homo sapiens; identical to SEQ ID NO: 276927
  chr22:37875332-37875468
  hypo

SEQ ID NO: 329649 - DNA, 206 bp, Homo sapiens; identical to SEQ ID NO: 276928
  chr22:37893389-37893595
  hypo

SEQ ID NO: 329650 - DNA, 215 bp, Homo sapiens; identical to SEQ ID NO: 276929
  chr22:37902176-37902391
  hypo

SEQ ID NO: 329651 - DNA, 35 bp, Homo sapiens; identical to SEQ ID NO: 295402
  chr22:37914844-37914879
  hypo

SEQ ID NO: 329652 - DNA, 500 bp, Homo sapiens; identical to SEQ ID NO: 206127
  chr22:37914933-37915433
  hypo

SEQ ID NO: 329653 - DNA, 123 bp, Homo sapiens; identical to SEQ ID NO: 226374
  chr22:37915687-37915810
  hypo

SEQ ID NO: 329654 - DNA, 767 bp, Homo sapiens; identical to SEQ ID NO: 295405
  chr22:37956436-37957203
  hypo

SEQ ID NO: 329655 - DNA, 193 bp, Homo sapiens; identical to SEQ ID NO: 276930
  chr22:37964558-37964751
  hypo

SEQ ID NO: 329656 - DNA, 118 bp, Homo sapiens; identical to SEQ ID NO: 276932
  chr22:38014384-38014502
  hypo

SEQ ID NO: 329657 - DNA, 109 bp, Homo sapiens; identical to SEQ ID NO: 276933
  chr22:38017617-38017726
  hypo

SEQ ID NO: 329658 - DNA, 99 bp, Homo sapiens; identical to SEQ ID NO: 276934
  chr22:38019344-38019443
  hypo

SEQ ID NO: 329659 - DNA, 79 bp, Homo sapiens; identical to SEQ ID NO: 276935
  chr22:38019473-38019552
  hypo

SEQ ID NO: 329660 - DNA, 259 bp, Homo sapiens; identical to SEQ ID NO: 276936
  chr22:38037235-38037494
  hypo

SEQ ID NO: 329661 - DNA, 318 bp, Homo sapiens; identical to SEQ ID NO: 276937
  chr22:38060991-38061309
  hypo

SEQ ID NO: 329662 - DNA, 180 bp, Homo sapiens; identical to SEQ ID NO: 276938
  chr22:38061511-38061691
  hypo

SEQ ID NO: 329663 - DNA, 79 bp, Homo sapiens
  chr22:38064611-38064690
  hypo
ctcacttttaaaggacatagaggagggagtcacttttcctggctttgggtgtggtcctgggagccgttgcagccattct

SEQ ID NO: 329664 - DNA, 90 bp, Homo sapiens
  chr22:38081627-38081717
  hypo
atagggtgaggcaccgcgaagaccattggtctgggaccacacagctgtaggtgtgatgccagtatacaaatccaggcagtttggctccct

SEQ ID NO: 329665 - DNA, 716 bp, Homo sapiens
  chr22:38086594-38087310
  hypo
gatgcagcagggcgcgccaccacttgccagagccatggtggctcggggtgcccagcccaggtccccccagctactgctccatgtaagtcattgtcttgtgcctctttagggaggggctggagacaggtctgaggaggaggcgtcatccacggagaaaccaaccaaagccttgcccaggaagtccagagaccccctgctctctcagcggtgagtcttggcctgctgcctccccggtcccacccctcctggctggcagtagtgacctggcccttagggtggtgtggagcaggtgtagggcccggagcagccctctgcctgtccagtgatcctctgcctctcctcattgccccgtcctgtcccacccacccctgatagtgtctgacctccagtgcttttcgtgcctgggtgaagggcctgtgtctctgagctgagttgctggcaggcactctggaggtagagcaggccaactctggcatgaacttggcggtcctggcattcgcaacctgtcctgacatcccctccgtgagccaggtggtgagtcaccccacaatgcaatcttaaactgaggctttctgccctcccctaggatctcctccctcacagcatcactacatgcacacagccgcaaaaaggtcaagaggaaacatccccgacgggcccaggactccaaaaagcccccaagggcccctcgtaccagcaaggcccagcgccgccgt

SEQ ID NO: 329666 - DNA, 97 bp, Homo sapiens; identical to SEQ ID NO: 276942
  chr22:38095179-38095276
  hypo

SEQ ID NO: 329667 - DNA, 242 bp, Homo sapiens; identical to SEQ ID NO: 276943
  chr22:38146508-38146750
  hypo

SEQ ID NO: 329668 - DNA, 44 bp, Homo sapiens; identical to SEQ ID NO: 276944
  chr22:38149210-38149254
  hypo

SEQ ID NO: 329669 - DNA, 44 bp, Homo sapiens; identical to SEQ ID NO: 220770
  chr22:38149554-38149598
  hypo

SEQ ID NO: 329670 - DNA, 90 bp, Homo sapiens; identical to SEQ ID NO: 276946
  chr22:38150056-38150146
  hypo

SEQ ID NO: 329671 - DNA, 77 bp, Homo sapiens; identical to SEQ ID NO: 276947
  chr22:38182164-38182241
  hypo

SEQ ID NO: 329672 - DNA, 86 bp, Homo sapiens; identical to SEQ ID NO: 276949
  chr22:38208855-38208941
  hypo

SEQ ID NO: 329673 - DNA, 388 bp, Homo sapiens; identical to SEQ ID NO: 220771
  chr22:38209275-38209663
  hypo

SEQ ID NO: 329674 - DNA, 65 bp, Homo sapiens; identical to SEQ ID NO: 276951
  chr22:38211829-38211894
  hypo

SEQ ID NO: 329675 - DNA, 38 bp, Homo sapiens; identical to SEQ ID NO: 276952
  chr22:38238232-38238270
  hypo

SEQ ID NO: 329676 - DNA, 49 bp, Homo sapiens; identical to SEQ ID NO: 276953
  chr22:38266335-38266384
  hypo

SEQ ID NO: 329677 - DNA, 32 bp, Homo sapiens; identical to SEQ ID NO: 220772
  chr22:38285336-38285368
  hypo

SEQ ID NO: 329678 - DNA, 323 bp, Homo sapiens; identical to SEQ ID NO: 276955
  chr22:38328789-38329112
  hypo

SEQ ID NO: 329679 - DNA, 266 bp, Homo sapiens; identical to SEQ ID NO: 220773
  chr22:38363621-38363887
  hypo

SEQ ID NO: 329680 - DNA, 67 bp, Homo sapiens; identical to SEQ ID NO: 220774
  chr22:38364989-38365056
  hypo

SEQ ID NO: 329681 - DNA, 337 bp, Homo sapiens; identical to SEQ ID NO: 276958
  chr22:38369807-38370144
  hypo

SEQ ID NO: 329682 - DNA, 130 bp, Homo sapiens; identical to SEQ ID NO: 276959
  chr22:38375998-38376128
  hypo

SEQ ID NO: 329683 - DNA, 285 bp, Homo sapiens; identical to SEQ ID NO: 276960
  chr22:38378821-38379106
  hypo

SEQ ID NO: 329684 - DNA, 803 bp, Homo sapiens; identical to SEQ ID NO: 220776
  chr22:38379136-38379939
  hypo

SEQ ID NO: 329685 - DNA, 79 bp, Homo sapiens; identical to SEQ ID NO: 220777
  chr22:38379969-38380048
  hypo

SEQ ID NO: 329686 - DNA, 59 bp, Homo sapiens; identical to SEQ ID NO: 220778
  chr22:38380262-38380321
  hypo

SEQ ID NO: 329687 - DNA, 135 bp, Homo sapiens; identical to SEQ ID NO: 220779
  chr22:38380437-38380572
  hypo

SEQ ID NO: 329688 - DNA, 251 bp, Homo sapiens; identical to SEQ ID NO: 220780
  chr22:38381980-38382231
  hypo

SEQ ID NO: 329689 - DNA, 109 bp, Homo sapiens; identical to SEQ ID NO: 276965
  chr22:38415281-38415390
  hypo

SEQ ID NO: 329690 - DNA, 196 bp, Homo sapiens; identical to SEQ ID NO: 276966
  chr22:38424123-38424319
  hypo

SEQ ID NO: 329691 - DNA, 611 bp, Homo sapiens; identical to SEQ ID NO: 220781
  chr22:38434365-38434976
  hypo

SEQ ID NO: 329692 - DNA, 160 bp, Homo sapiens; identical to SEQ ID NO: 220782
  chr22:38435006-38435166
  hypo

SEQ ID NO: 329693 - DNA, 114 bp, Homo sapiens; identical to SEQ ID NO: 220783
  chr22:38470384-38470498
  hypo

SEQ ID NO: 329694 - DNA, 142 bp, Homo sapiens; identical to SEQ ID NO: 276969
  chr22:38474475-38474617
  hypo

SEQ ID NO: 329695 - DNA, 34 bp, Homo sapiens; identical to SEQ ID NO: 276970
  chr22:38486388-38486422
  hypo

SEQ ID NO: 329696 - DNA, 326 bp, Homo sapiens; identical to SEQ ID NO: 276971
  chr22:38506277-38506603
  hypo

SEQ ID NO: 329697 - DNA, 388 bp, Homo sapiens; identical to SEQ ID NO: 220785
  chr22:38506928-38507316
  hypo

SEQ ID NO: 329698 - DNA, 126 bp, Homo sapiens; identical to SEQ ID NO: 220786
  chr22:38507346-38507472
  hypo

SEQ ID NO: 329699 - DNA, 321 bp, Homo sapiens; identical to SEQ ID NO: 276973
  chr22:38508432-38508753
  hypo

SEQ ID NO: 329700 - DNA, 121 bp, Homo sapiens; identical to SEQ ID NO: 276974
  chr22:38512227-38512348
  hypo

SEQ ID NO: 329701 - DNA, 69 bp, Homo sapiens
  chr22:38516974-38517043
  hypo
gaacagcctgcagagcgcctgaacgcaggaggtggcaggaggaagcgggtttaccgaggcctaagcaaa

SEQ ID NO: 329702 - DNA, 255 bp, Homo sapiens; identical to SEQ ID NO: 276977
  chr22:38520660-38520915
  hypo

SEQ ID NO: 329703 - DNA, 126 bp, Homo sapiens; identical to SEQ ID NO: 220788
  chr22:38525495-38525621
  hypo

SEQ ID NO: 329704 - DNA, 256 bp, Homo sapiens; identical to SEQ ID NO: 276979
  chr22:38528842-38529098
  hypo

SEQ ID NO: 329705 - DNA, 31 bp, Homo sapiens; identical to SEQ ID NO: 276980
  chr22:38531761-38531792
  hypo

SEQ ID NO: 329706 - DNA, 123 bp, Homo sapiens; identical to SEQ ID NO: 276981
  chr22:38541364-38541487
  hypo

SEQ ID NO: 329707 - DNA, 398 bp, Homo sapiens; identical to SEQ ID NO: 295422
  chr22:38577754-38578152
  hypo

SEQ ID NO: 329708 - DNA, 37 bp, Homo sapiens; identical to SEQ ID NO: 220791
  chr22:38578432-38578469
  hypo

SEQ ID NO: 329709 - DNA, 364 bp, Homo sapiens; identical to SEQ ID NO: 276985
  chr22:38618369-38618733
  hypo

SEQ ID NO: 329710 - DNA, 386 bp, Homo sapiens; identical to SEQ ID NO: 276986
  chr22:38633207-38633593
  hypo

SEQ ID NO: 329711 - DNA, 114 bp, Homo sapiens; identical to SEQ ID NO: 276987
  chr22:38634943-38635057
  hypo

SEQ ID NO: 329712 - DNA, 89 bp, Homo sapiens; identical to SEQ ID NO: 276988
  chr22:38639963-38640052
  hypo

SEQ ID NO: 329713 - DNA, 86 bp, Homo sapiens
  chr22:38687297-38687383
  hypo
ggcgggccgtggcacctgctgtcttgggaaacacaggtcaatacatccacacacacacacacacacacacacgcaggggacgccgg

SEQ ID NO: 329714 - DNA, 405 bp, Homo sapiens; identical to SEQ ID NO: 220793
  chr22:38694593-38694998
  hypo

SEQ ID NO: 329715 - DNA, 38 bp, Homo sapiens; identical to SEQ ID NO: 220794
  chr22:38695215-38695253
  hypo

SEQ ID NO: 329716 - DNA, 127 bp, Homo sapiens; identical to SEQ ID NO: 276992
  chr22:38742147-38742274
  hypo

SEQ ID NO: 329717 - DNA, 54 bp, Homo sapiens; identical to SEQ ID NO: 276993
  chr22:38795422-38795476
  hypo

SEQ ID NO: 329718 - DNA, 53 bp, Homo sapiens; identical to SEQ ID NO: 276994
  chr22:38795506-38795559
  hypo

SEQ ID NO: 329719 - DNA, 93 bp, Homo sapiens; identical to SEQ ID NO: 276995
  chr22:38818418-38818511
  hypo

SEQ ID NO: 329720 - DNA, 158 bp, Homo sapiens; identical to SEQ ID NO: 276996
  chr22:38827317-38827475
  hypo

SEQ ID NO: 329721 - DNA, 69 bp, Homo sapiens; identical to SEQ ID NO: 276997
  chr22:38845518-38845587
  hypo

SEQ ID NO: 329722 - DNA, 73 bp, Homo sapiens; identical to SEQ ID NO: 220795
  chr22:38874142-38874215
  hypo

SEQ ID NO: 329723 - DNA, 42 bp, Homo sapiens; identical to SEQ ID NO: 220796
  chr22:38874259-38874301
  hypo

SEQ ID NO: 329724 - DNA, 139 bp, Homo sapiens; identical to SEQ ID NO: 276999
  chr22:38884002-38884141
  hypo

SEQ ID NO: 329725 - DNA, 81 bp, Homo sapiens; identical to SEQ ID NO: 277000
  chr22:38885334-38885415
  hypo

SEQ ID NO: 329726 - DNA, 148 bp, Homo sapiens; identical to SEQ ID NO: 277001
  chr22:38904742-38904890
  hypo

SEQ ID NO: 329727 - DNA, 135 bp, Homo sapiens; identical to SEQ ID NO: 295431
  chr22:38966046-38966181
  hypo

SEQ ID NO: 329728 - DNA, 84 bp, Homo sapiens; identical to SEQ ID NO: 220797
  chr22:38995555-38995639
  hypo

SEQ ID NO: 329729 - DNA, 154 bp, Homo sapiens; identical to SEQ ID NO: 277003
  chr22:39122031-39122185
  hypo

SEQ ID NO: 329730 - DNA, 229 bp, Homo sapiens; identical to SEQ ID NO: 220798
  chr22:39132169-39132398
  hypo

SEQ ID NO: 329731 - DNA, 71 bp, Homo sapiens; identical to SEQ ID NO: 277005
  chr22:39144764-39144835
  hypo

SEQ ID NO: 329732 - DNA, 341 bp, Homo sapiens; identical to SEQ ID NO: 277006
  chr22:39148552-39148893
  hypo

SEQ ID NO: 329733 - DNA, 97 bp, Homo sapiens; identical to SEQ ID NO: 277007
  chr22:39149136-39149233
  hypo

SEQ ID NO: 329734 - DNA, 42 bp, Homo sapiens; identical to SEQ ID NO: 277008
  chr22:39175179-39175221
  hypo

SEQ ID NO: 329735 - DNA, 253 bp, Homo sapiens; identical to SEQ ID NO: 295439
  chr22:39239093-39239346
  hypo

SEQ ID NO: 329736 - DNA, 32 bp, Homo sapiens; identical to SEQ ID NO: 206137
  chr22:39239412-39239444
  hypo

SEQ ID NO: 329737 - DNA, 189 bp, Homo sapiens; identical to SEQ ID NO: 295441
  chr22:39239935-39240124
  hypo

SEQ ID NO: 329738 - DNA, 248 bp, Homo sapiens; identical to SEQ ID NO: 226380
  chr22:39268982-39269230
  hypo

SEQ ID NO: 329739 - DNA, 286 bp, Homo sapiens; identical to SEQ ID NO: 277009
  chr22:39411545-39411831
  hypo

SEQ ID NO: 329740 - DNA, 89 bp, Homo sapiens; identical to SEQ ID NO: 220801
  chr22:39424923-39425012
  hypo

SEQ ID NO: 329741 - DNA, 83 bp, Homo sapiens; identical to SEQ ID NO: 220802
  chr22:39425582-39425665
  hypo

SEQ ID NO: 329742 - DNA, 95 bp, Homo sapiens; identical to SEQ ID NO: 277012
  chr22:39444961-39445056
  hypo

SEQ ID NO: 329743 - DNA, 120 bp, Homo sapiens; identical to SEQ ID NO: 277013
  chr22:39449270-39449390
  hypo

SEQ ID NO: 329744 - DNA, 204 bp, Homo sapiens; identical to SEQ ID NO: 277014
  chr22:39474506-39474710
  hypo

SEQ ID NO: 329745 - DNA, 120 bp, Homo sapiens; identical to SEQ ID NO: 277015
  chr22:39475634-39475754
  hypo

SEQ ID NO: 329746 - DNA, 123 bp, Homo sapiens; identical to SEQ ID NO: 220803
  chr22:39529109-39529232
  hypo

SEQ ID NO: 329747 - DNA, 100 bp, Homo sapiens; identical to SEQ ID NO: 220804
  chr22:39530873-39530973
  hypo

SEQ ID NO: 329748 - DNA, 329 bp, Homo sapiens; identical to SEQ ID NO: 295445
  chr22:39549058-39549387
  hypo

SEQ ID NO: 329749 - DNA, 151 bp, Homo sapiens; identical to SEQ ID NO: 295446
  chr22:39549472-39549623
  hypo

SEQ ID NO: 329750 - DNA, 39 bp, Homo sapiens; identical to SEQ ID NO: 220805
  chr22:39571321-39571360
  hypo

SEQ ID NO: 329751 - DNA, 47 bp, Homo sapiens; identical to SEQ ID NO: 206139
  chr22:39638593-39638640
  hypo

SEQ ID NO: 329752 - DNA, 133 bp, Homo sapiens; identical to SEQ ID NO: 277019
  chr22:39686245-39686378
  hypo

SEQ ID NO: 329753 - DNA, 311 bp, Homo sapiens; identical to SEQ ID NO: 277020
  chr22:39687860-39688171
  hypo

SEQ ID NO: 329754 - DNA, 356 bp, Homo sapiens; identical to SEQ ID NO: 277021
  chr22:39690525-39690881
  hypo

SEQ ID NO: 329755 - DNA, 41 bp, Homo sapiens; identical to SEQ ID NO: 277022
  chr22:39744066-39744107
  hypo

SEQ ID NO: 329756 - DNA, 154 bp, Homo sapiens; identical to SEQ ID NO: 220808
  chr22:39755185-39755339
  hypo

SEQ ID NO: 329757 - DNA, 237 bp, Homo sapiens; identical to SEQ ID NO: 277024
  chr22:39756397-39756634
  hypo

SEQ ID NO: 329758 - DNA, 130 bp, Homo sapiens; identical to SEQ ID NO: 220810
  chr22:39770342-39770472
  hypo

SEQ ID NO: 329759 - DNA, 149 bp, Homo sapiens; identical to SEQ ID NO: 277026
  chr22:39772140-39772289
  hypo

SEQ ID NO: 329760 - DNA, 136 bp, Homo sapiens; identical to SEQ ID NO: 220811
  chr22:39773595-39773731
  hypo

SEQ ID NO: 329761 - DNA, 230 bp, Homo sapiens; identical to SEQ ID NO: 277028
  chr22:39777671-39777901
  hypo

SEQ ID NO: 329762 - DNA, 98 bp, Homo sapiens; identical to SEQ ID NO: 277029
  chr22:39778980-39779078
  hypo

SEQ ID NO: 329763 - DNA, 36 bp, Homo sapiens; identical to SEQ ID NO: 277030
  chr22:39785123-39785159
  hypo

SEQ ID NO: 329764 - DNA, 31 bp, Homo sapiens; identical to SEQ ID NO: 295456
  chr22:39853626-39853657
  hypo

SEQ ID NO: 329765 - DNA, 209 bp, Homo sapiens; identical to SEQ ID NO: 295457
  chr22:39853690-39853899
  hypo

SEQ ID NO: 329766 - DNA, 131 bp, Homo sapiens; identical to SEQ ID NO: 295458
  chr22:39853934-39854065
  hypo

SEQ ID NO: 329767 - DNA, 49 bp, Homo sapiens; identical to SEQ ID NO: 220812
  chr22:39872956-39873005
  hypo

SEQ ID NO: 329768 - DNA, 363 bp, Homo sapiens; identical to SEQ ID NO: 277033
  chr22:39907959-39908322
  hypo

SEQ ID NO: 329769 - DNA, 37 bp, Homo sapiens; identical to SEQ ID NO: 277034
  chr22:39930313-39930350
  hypo

SEQ ID NO: 329770 - DNA, 131 bp, Homo sapiens; identical to SEQ ID NO: 277035
  chr22:40024709-40024840
  hypo

SEQ ID NO: 329771 - DNA, 141 bp, Homo sapiens; identical to SEQ ID NO: 277036
  chr22:40025211-40025352
  hypo

SEQ ID NO: 329772 - DNA, 135 bp, Homo sapiens; identical to SEQ ID NO: 277037
  chr22:40025722-40025857
  hypo

SEQ ID NO: 329773 - DNA, 220 bp, Homo sapiens; identical to SEQ ID NO: 220814
  chr22:40026479-40026699
  hypo

SEQ ID NO: 329774 - DNA, 204 bp, Homo sapiens; identical to SEQ ID NO: 277039
  chr22:40033278-40033482
  hypo

SEQ ID NO: 329775 - DNA, 428 bp, Homo sapiens; identical to SEQ ID NO: 220815
  chr22:40045203-40045631
  hypo

SEQ ID NO: 329776 - DNA, 217 bp, Homo sapiens; identical to SEQ ID NO: 101328
  chr22:40045721-40045938
  hypo

SEQ ID NO: 329777 - DNA, 149 bp, Homo sapiens; identical to SEQ ID NO: 134172
  chr22:40060841-40060990
  hypo

SEQ ID NO: 329778 - DNA, 71 bp, Homo sapiens; identical to SEQ ID NO: 277042
  chr22:40061913-40061984
  hypo

SEQ ID NO: 329779 - DNA, 185 bp, Homo sapiens; identical to SEQ ID NO: 220817
  chr22:40074972-40075157
  hypo

SEQ ID NO: 329780 - DNA, 216 bp, Homo sapiens; identical to SEQ ID NO: 220818
  chr22:40075302-40075518
  hypo

SEQ ID NO: 329781 - DNA, 181 bp, Homo sapiens; identical to SEQ ID NO: 295466
  chr22:40081595-40081776
  hypo

SEQ ID NO: 329782 - DNA, 77 bp, Homo sapiens; identical to SEQ ID NO: 295467
  chr22:40082052-40082129
  hypo

SEQ ID NO: 329783 - DNA, 104 bp, Homo sapiens; identical to SEQ ID NO: 295468
  chr22:40082159-40082263
  hypo

SEQ ID NO: 329784 - DNA, 166 bp, Homo sapiens; identical to SEQ ID NO: 277044
  chr22:40083965-40084131
  hypo

SEQ ID NO: 329785 - DNA, 313 bp, Homo sapiens; identical to SEQ ID NO: 220819
  chr22:40089236-40089549
  hypo

SEQ ID NO: 329786 - DNA, 39 bp, Homo sapiens; identical to SEQ ID NO: 220820
  chr22:40262908-40262947
  hypo

SEQ ID NO: 329787 - DNA, 98 bp, Homo sapiens; identical to SEQ ID NO: 277048
  chr22:40320324-40320422
  hypo

SEQ ID NO: 329788 - DNA, 200 bp, Homo sapiens; identical to SEQ ID NO: 277049
  chr22:40348320-40348520
  hypo

SEQ ID NO: 329789 - DNA, 180 bp, Homo sapiens; identical to SEQ ID NO: 277050
  chr22:40360353-40360533
  hypo

SEQ ID NO: 329790 - DNA, 84 bp, Homo sapiens; identical to SEQ ID NO: 277051
  chr22:40380593-40380677
  hypo

SEQ ID NO: 329791 - DNA, 241 bp, Homo sapiens
  chr22:40417215-40417456
  hypo
ggggcaggtgggggcgggggcagggcaagagagaggcctgggcacatgtgtcttgcttttctgtccccacgttcccaggttcacctggagttcctcccatgtggacagaaacctcctcctgctcctgacaggacagaacgtagagccctttgacacggagttccgggagctgtacgccatctccgaggaggtggacttgtaccggcagctgagcctggcgggcagggttggcctccattac

SEQ ID NO: 329792 - DNA, 236 bp, Homo sapiens
  chr22:40417628-40417864
  hypo
agagcttcctgaaagacctggttacggtggagcaggtgctgccccccgtggagcccatccccttgggagagctgagccagaaggatggcaggatggtctctcacatgcacagagacctgaagcccaaatcccgagaggcacccagccgaaacggcatgggagaagcggcccggggggaggccgcccccgccaggcgcttcagcagcaggctcttcagtcgccgagccaagaggcct

SEQ ID NO: 329793 - DNA, 108 bp, Homo sapiens; identical to SEQ ID NO: 220821
  chr22:40444189-40444297
  hypo

SEQ ID NO: 329794 - DNA, 79 bp, Homo sapiens; identical to SEQ ID NO: 220822
  chr22:40593308-40593387
  hypo

SEQ ID NO: 329795 - DNA, 55 bp, Homo sapiens; identical to SEQ ID NO: 277055
  chr22:40620809-40620864
  hypo

SEQ ID NO: 329796 - DNA, 39 bp, Homo sapiens; identical to SEQ ID NO: 220823
  chr22:40621438-40621477
  hypo

SEQ ID NO: 329797 - DNA, 40 bp, Homo sapiens; identical to SEQ ID NO: 220824
  chr22:40624792-40624832
  hypo

SEQ ID NO: 329798 - DNA, 198 bp, Homo sapiens; identical to SEQ ID NO: 277058
  chr22:40642784-40642982
  hypo

SEQ ID NO: 329799 - DNA, 282 bp, Homo sapiens; identical to SEQ ID NO: 277059
  chr22:40693256-40693538
  hypo

SEQ ID NO: 329800 - DNA, 37 bp, Homo sapiens; identical to SEQ ID NO: 277060
  chr22:40764628-40764665
  hypo

SEQ ID NO: 329801 - DNA, 338 bp, Homo sapiens; identical to SEQ ID NO: 277061
  chr22:40804024-40804362
  hypo

SEQ ID NO: 329802 - DNA, 220 bp, Homo sapiens; identical to SEQ ID NO: 277062
  chr22:40812787-40813007
  hypo

SEQ ID NO: 329803 - DNA, 117 bp, Homo sapiens; identical to SEQ ID NO: 220825
  chr22:40815004-40815121
  hypo

SEQ ID NO: 329804 - DNA, 35 bp, Homo sapiens; identical to SEQ ID NO: 277064
  chr22:40896203-40896238
  hypo

SEQ ID NO: 329805 - DNA, 41 bp, Homo sapiens; identical to SEQ ID NO: 277065
  chr22:40911584-40911625
  hypo

SEQ ID NO: 329806 - DNA, 34 bp, Homo sapiens; identical to SEQ ID NO: 220826
  chr22:40912133-40912167
  hypo

SEQ ID NO: 329807 - DNA, 242 bp, Homo sapiens
  chr22:41034283-41034525
  hypo
atcttggagttagacgggatcctcgtgggctcttagtcacacacaccttccccaaggcaaaaattcttgcacaaaatacctgataaaattatttattcgataaatattttttgagtaagaacactgagggggtaagctagatgagatacagtcactaccctgggggtgcttacaccaaactggaggatgctaaggcacgtactgcggtgactgcaatgccaggccggtatcccaggtgacta

SEQ ID NO: 329808 - DNA, 203 bp, Homo sapiens; identical to SEQ ID NO: 277068
  chr22:41044524-41044727
  hypo

SEQ ID NO: 329809 - DNA, 149 bp, Homo sapiens; identical to SEQ ID NO: 277070
  chr22:41087989-41088138
  hypo

SEQ ID NO: 329810 - DNA, 96 bp, Homo sapiens; identical to SEQ ID NO: 220827
  chr22:41156760-41156856
  hypo

SEQ ID NO: 329811 - DNA, 35 bp, Homo sapiens; identical to SEQ ID NO: 277072
  chr22:41157096-41157131
  hypo

SEQ ID NO: 329812 - DNA, 35 bp, Homo sapiens; identical to SEQ ID NO: 277073
  chr22:41177928-41177963
  hypo

SEQ ID NO: 329813 - DNA, 103 bp, Homo sapiens
  chr22:41398426-41398529
  hypo
tattaaatgagttttgaacactcctcagtatcaggcactggggatacatagatgagcatggcagataagggctcaggaagaactgtagattgttgaagagtca

SEQ ID NO: 329814 - DNA, 139 bp, Homo sapiens; identical to SEQ ID NO: 220828
  chr22:41486563-41486702
  hypo

SEQ ID NO: 329815 - DNA, 204 bp, Homo sapiens; identical to SEQ ID NO: 220829
  chr22:41536178-41536382
  hypo

SEQ ID NO: 329816 - DNA, 159 bp, Homo sapiens; identical to SEQ ID NO: 277077
  chr22:41573032-41573191
  hypo

SEQ ID NO: 329817 - DNA, 127 bp, Homo sapiens; identical to SEQ ID NO: 220830
  chr22:41634855-41634982
  hypo

SEQ ID NO: 329818 - DNA, 420 bp, Homo sapiens; identical to SEQ ID NO: 220831
  chr22:41639282-41639702
  hypo

SEQ ID NO: 329819 - DNA, 135 bp, Homo sapiens; identical to SEQ ID NO: 220832
  chr22:41641907-41642042
  hypo

SEQ ID NO: 329820 - DNA, 317 bp, Homo sapiens
  chr22:41656916-41657233
  hypo
ttctgctggcactcacgatcggggactcagcaatgtcctgcggggatggggagaggagagtggaagaggagtggggataaggtcacctgagagcacgtcatttggcacctgagccctgcggctgcccctgcctatctccctgtcttggaggtctggtatgttccttctctgtgccccacaccagtggctgggccaggctactgtcagcactcgcaccatctcacttcaccacttctgagcctggcagatgacactccttggtcagagtggcctgcctggcctgaagccccataggggctggctcaccagtgggagcc

SEQ ID NO: 329821 - DNA, 302 bp, Homo sapiens; identical to SEQ ID NO: 220834
  chr22:41657416-41657718
  hypo

SEQ ID NO: 329822 - DNA, 110 bp, Homo sapiens; identical to SEQ ID NO: 220835
  chr22:41658259-41658369
  hypo

SEQ ID NO: 329823 - DNA, 87 bp, Homo sapiens; identical to SEQ ID NO: 220836
  chr22:41664703-41664790
  hypo

SEQ ID NO: 329824 - DNA, 224 bp, Homo sapiens; identical to SEQ ID NO: 277084
  chr22:41666686-41666910
  hypo

SEQ ID NO: 329825 - DNA, 376 bp, Homo sapiens
  chr22:41667721-41668097
  hypo
ctgacacctggactccacctcagcctactcctagttgtgtgactctgggctacacttctctcgcccgtcaagacctcactcctcacttgcacactgctgcagcagcagagagaacccctctggcatcagcactacgcccggaacactgggccatcaagggcagatcccaccctgcccctgccctgggctgcttcctgcacagaggagggcctaggaggtggtgtgcagtgattcactcgagccactgcatctgtagcaggcgggaaggtgcatgcagcactcctaccggccaggctctcccaggacaacctctgaggaagaaggaagggctctatctcctatttcatataagagcccagcctcagagctgcacgca

SEQ ID NO: 329826 - DNA, 77 bp, Homo sapiens; identical to SEQ ID NO: 220838
  chr22:41668168-41668245
  hypo

SEQ ID NO: 329827 - DNA, 44 bp, Homo sapiens; identical to SEQ ID NO: 220839
  chr22:41669065-41669109
  hypo

SEQ ID NO: 329828 - DNA, 164 bp, Homo sapiens; identical to SEQ ID NO: 220840
  chr22:41669352-41669516
  hypo

SEQ ID NO: 329829 - DNA, 103 bp, Homo sapiens; identical to SEQ ID NO: 220841
  chr22:41676091-41676194
  hypo

SEQ ID NO: 329830 - DNA, 88 bp, Homo sapiens; identical to SEQ ID NO: 277089
  chr22:41768561-41768649
  hypo

SEQ ID NO: 329831 - DNA, 160 bp, Homo sapiens; identical to SEQ ID NO: 220842
  chr22:41779337-41779497
  hypo

SEQ ID NO: 329832 - DNA, 265 bp, Homo sapiens; identical to SEQ ID NO: 277091
  chr22:41790057-41790322
  hypo

SEQ ID NO: 329833 - DNA, 42 bp, Homo sapiens; identical to SEQ ID NO: 220843
  chr22:41839259-41839301
  hypo

SEQ ID NO: 329834 - DNA, 180 bp, Homo sapiens; identical to SEQ ID NO: 277094
  chr22:41871436-41871616
  hypo

SEQ ID NO: 329835 - DNA, 172 bp, Homo sapiens; identical to SEQ ID NO: 277095
  chr22:41877561-41877733
  hypo

SEQ ID NO: 329836 - DNA, 567 bp, Homo sapiens; identical to SEQ ID NO: 277096
  chr22:41970755-41971322
  hypo

SEQ ID NO: 329837 - DNA, 178 bp, Homo sapiens; identical to SEQ ID NO: 277097
  chr22:41973278-41973456
  hypo

SEQ ID NO: 329838 - DNA, 97 bp, Homo sapiens; identical to SEQ ID NO: 220845
  chr22:42033731-42033828
  hypo

SEQ ID NO: 329839 - DNA, 31 bp, Homo sapiens; identical to SEQ ID NO: 220846
  chr22:42034495-42034526
  hypo

SEQ ID NO: 329840 - DNA, 213 bp, Homo sapiens; identical to SEQ ID NO: 220847
  chr22:42095789-42096002
  hypo

SEQ ID NO: 329841 - DNA, 73 bp, Homo sapiens
  chr22:42096253-42096326
  hypo
gtgaacgggaagactgttccttgggcagagctggccaaagcgggctgcctgggtcctcattgcctaccgcgtt

SEQ ID NO: 329842 - DNA, 233 bp, Homo sapiens; identical to SEQ ID NO: 226386
  chr22:42229858-42230091
  hypo

SEQ ID NO: 329843 - DNA, 36 bp, Homo sapiens; identical to SEQ ID NO: 277103
  chr22:42256093-42256129
  hypo

SEQ ID NO: 329844 - DNA, 98 bp, Homo sapiens; identical to SEQ ID NO: 206152
  chr22:42310966-42311064
  hypo

SEQ ID NO: 329845 - DNA, 36 bp, Homo sapiens; identical to SEQ ID NO: 277104
  chr22:42329321-42329357
  hypo

SEQ ID NO: 329846 - DNA, 71 bp, Homo sapiens; identical to SEQ ID NO: 220849
  chr22:42395290-42395361
  hypo

SEQ ID NO: 329847 - DNA, 400 bp, Homo sapiens; identical to SEQ ID NO: 206156
  chr22:42669780-42670180
  hypo

SEQ ID NO: 329848 - DNA, 58 bp, Homo sapiens; identical to SEQ ID NO: 277108
  chr22:42706987-42707045
  hypo

SEQ ID NO: 329849 - DNA, 93 bp, Homo sapiens; identical to SEQ ID NO: 277109
  chr22:42713566-42713659
  hypo

SEQ ID NO: 329850 - DNA, 190 bp, Homo sapiens; identical to SEQ ID NO: 277110
  chr22:42733979-42734169
  hypo

SEQ ID NO: 329851 - DNA, 192 bp, Homo sapiens; identical to SEQ ID NO: 277111
  chr22:42744709-42744901
  hypo

SEQ ID NO: 329852 - DNA, 327 bp, Homo sapiens; identical to SEQ ID NO: 226390
  chr22:42765054-42765381
  hypo

SEQ ID NO: 329853 - DNA, 42 bp, Homo sapiens; identical to SEQ ID NO: 277112
  chr22:42796231-42796273
  hypo

SEQ ID NO: 329854 - DNA, 200 bp, Homo sapiens; identical to SEQ ID NO: 277113
  chr22:42822800-42823000
  hypo

SEQ ID NO: 329855 - DNA, 207 bp, Homo sapiens
  chr22:42829718-42829925
  hypo
gagaagtttcctaccgcgcagggggcaggcggggaccccagtgttattgactgttgatccatcacagtgatacatgctcacatatgtcacagtgagatgcagacccgctgcttcacgctattcctggctcctgggagtagcaggttgtctaagcaccttgatgccatggtgatagacctcgtgtcaatgcctcagggtacacgggga

SEQ ID NO: 329856 - DNA, 40 bp, Homo sapiens; identical to SEQ ID NO: 220851
  chr22:42916315-42916355
  hypo

SEQ ID NO: 329857 - DNA, 66 bp, Homo sapiens
  chr22:42944667-42944733
  hypo
atatttgctaaccccctgtgtatgtttgtctttaaatctaatgttcttcacagtgaaaccctgtct

SEQ ID NO: 329858 - DNA, 164 bp, Homo sapiens; identical to SEQ ID NO: 277117
  chr22:42956595-42956759
  hypo

SEQ ID NO: 329859 - DNA, 50 bp, Homo sapiens; identical to SEQ ID NO: 220852
  chr22:42972462-42972512
  hypo

SEQ ID NO: 329860 - DNA, 97 bp, Homo sapiens; identical to SEQ ID NO: 220853
  chr22:42995215-42995312
  hypo

SEQ ID NO: 329861 - DNA, 106 bp, Homo sapiens; identical to SEQ ID NO: 220854
  chr22:42995599-42995705
  hypo

SEQ ID NO: 329862 - DNA, 350 bp, Homo sapiens; identical to SEQ ID NO: 220855
  chr22:42998893-42999243
  hypo

SEQ ID NO: 329863 - DNA, 192 bp, Homo sapiens; identical to SEQ ID NO: 277122
  chr22:43000041-43000233
  hypo

SEQ ID NO: 329864 - DNA, 189 bp, Homo sapiens; identical to SEQ ID NO: 277123
  chr22:43005280-43005469
  hypo

SEQ ID NO: 329865 - DNA, 248 bp, Homo sapiens; identical to SEQ ID NO: 226391
  chr22:43015553-43015801
  hypo

SEQ ID NO: 329866 - DNA, 34 bp, Homo sapiens; identical to SEQ ID NO: 277124
  chr22:43089901-43089935
  hypo

SEQ ID NO: 329867 - DNA, 34 bp, Homo sapiens; identical to SEQ ID NO: 220856
  chr22:43137119-43137153
  hypo

SEQ ID NO: 329868 - DNA, 34 bp, Homo sapiens; identical to SEQ ID NO: 277126
  chr22:43138068-43138102
  hypo

SEQ ID NO: 329869 - DNA, 83 bp, Homo sapiens; identical to SEQ ID NO: 277127
  chr22:43140873-43140956
  hypo

SEQ ID NO: 329870 - DNA, 256 bp, Homo sapiens; identical to SEQ ID NO: 277128
  chr22:43149956-43150212
  hypo

SEQ ID NO: 329871 - DNA, 742 bp, Homo sapiens; identical to SEQ ID NO: 277129
  chr22:43164501-43165243
  hypo

SEQ ID NO: 329872 - DNA, 272 bp, Homo sapiens; identical to SEQ ID NO: 277130
  chr22:43166965-43167237
  hypo

SEQ ID NO: 329873 - DNA, 109 bp, Homo sapiens; identical to SEQ ID NO: 277131
  chr22:43191428-43191537
  hypo

SEQ ID NO: 329874 - DNA, 171 bp, Homo sapiens; identical to SEQ ID NO: 277132
  chr22:43238823-43238994
  hypo

SEQ ID NO: 329875 - DNA, 137 bp, Homo sapiens; identical to SEQ ID NO: 220859
  chr22:43253987-43254124
  hypo

SEQ ID NO: 329876 - DNA, 149 bp, Homo sapiens; identical to SEQ ID NO: 220860
  chr22:43266094-43266243
  hypo

SEQ ID NO: 329877 - DNA, 51 bp, Homo sapiens; identical to SEQ ID NO: 220861
  chr22:43273690-43273741
  hypo

SEQ ID NO: 329878 - DNA, 141 bp, Homo sapiens; identical to SEQ ID NO: 277136
  chr22:43298921-43299062
  hypo

SEQ ID NO: 329879 - DNA, 175 bp, Homo sapiens; identical to SEQ ID NO: 220862
  chr22:43351234-43351409
  hypo

SEQ ID NO: 329880 - DNA, 69 bp, Homo sapiens; identical to SEQ ID NO: 277138
  chr22:43363016-43363085
  hypo

SEQ ID NO: 329881 - DNA, 93 bp, Homo sapiens; identical to SEQ ID NO: 277139
  chr22:43365553-43365646
  hypo

SEQ ID NO: 329882 - DNA, 163 bp, Homo sapiens; identical to SEQ ID NO: 277140
  chr22:43390391-43390554
  hypo

SEQ ID NO: 329883 - DNA, 92 bp, Homo sapiens; identical to SEQ ID NO: 277141
  chr22:43402810-43402902
  hypo

SEQ ID NO: 329884 - DNA, 49 bp, Homo sapiens
  chr22:43434578-43434627
  hypo
tcatctagttccatttacaacagactcatccacaaaaccgaagtggtag

SEQ ID NO: 329885 - DNA, 34 bp, Homo sapiens; identical to SEQ ID NO: 277143
  chr22:43437050-43437084
  hypo

SEQ ID NO: 329886 - DNA, 267 bp, Homo sapiens; identical to SEQ ID NO: 220863
  chr22:43465387-43465654
  hypo

SEQ ID NO: 329887 - DNA, 294 bp, Homo sapiens
  chr22:43524629-43524923
  hypo
gggtaagagccttgagatccctgaccctgacttgcgctgcggccagtgggggctgtcagagccgctccttggggcgccacagtccccaccactccgtatcatcatctgtgtcacctgtgtccacatctgcctgatcccatgggcttttgggtttgagatgcctggttctgagtgcacaaaccagtgcatggtcctgggtctccctctggtccgagagccttcacctggcaggcaggactcccgtctcctggccagggcaggggcctccctgagcagccttcctggtagcctggt

SEQ ID NO: 329888 - DNA, 194 bp, Homo sapiens; identical to SEQ ID NO: 220864
  chr22:43529307-43529501
  hypo

SEQ ID NO: 329889 - DNA, 226 bp, Homo sapiens; identical to SEQ ID NO: 277147
  chr22:43555231-43555457
  hypo

SEQ ID NO: 329890 - DNA, 143 bp, Homo sapiens; identical to SEQ ID NO: 277148
  chr22:43559030-43559173
  hypo

SEQ ID NO: 329891 - DNA, 202 bp, Homo sapiens; identical to SEQ ID NO: 220865
  chr22:43566412-43566614
  hypo

SEQ ID NO: 329892 - DNA, 328 bp, Homo sapiens; identical to SEQ ID NO: 277150
  chr22:43567652-43567980
  hypo

SEQ ID NO: 329893 - DNA, 199 bp, Homo sapiens
  chr22:43570048-43570247
  hypo
tggagaggtcctgcggtccgtgaagacggccgtgacgttcggggcccacagctcggctcctgcaccacggtttccacagtgggtgctcatggaggagcaggcggacacagacgctgggccggggaaaagggccatggagcacaccgatgccgtgtctgggacttaccacctttcccgctgctggaagtagctgacaaac

SEQ ID NO: 329894 - DNA, 312 bp, Homo sapiens
  chr22:43570314-43570626
  hypo
ggcgcgcgatggaggccaggcagtccttgacagtcagcaggttctcgcaggggaactggttcagcagcacgcctggcctctcctggctgagtttcctgcagggcggaggcaggtgcgccagctcaaggggaggccggcagtgcctagaagccctgactgggagggcccctgcggccagaggtgccctcacctgtagtccttgaagtgtgagaagttgaagaggatgtcggcgtccgcctcactctgggtgagggtgaagcgcgggtgggtgaggctgctggccacctgctgcacgtccgtgtagaccctgtg

SEQ ID NO: 329895 - DNA, 182 bp, Homo sapiens; identical to SEQ ID NO: 220869
  chr22:43581409-43581591
  hypo

SEQ ID NO: 329896 - DNA, 130 bp, Homo sapiens
  chr22:43581627-43581757
  hypo
tgccaggcatatttctcatgccacctcccatccttccaatactgtgggagccagatggtgtctcaccatccccttcccagatggagaacaggtctcagacgggcgagtgaccgcccgagggagggcgtgc

SEQ ID NO: 329897 - DNA, 313 bp, Homo sapiens
  chr22:43608344-43608657
  hypo
agatgagaggggttcggggaagcctctcggagcagtgcagccctgcctctcggggtgggcgggcgtggtggggagggcatgctcacctttagcctcgcagtcctggaaggaggtggtgccttcgtgtttggtgagcaaaccccctccacaggggaagcagccggtgcgcccgggctcaggctggtacgtgcccacggggcaggcctggcagggcttgaagccatcggccgagaagaagcctggagaacactggcctgaaagtcagaggtcatggctcaggcgggcaggagggcaccgcagggccgaggctgtg

SEQ ID NO: 329898 - DNA, 75 bp, Homo sapiens
  chr22:43608687-43608762
  hypo
cccggccctggaaaaggtactgggcacccgaggcctggggtggggacggggtggggaaaacgcagcagccggggt

SEQ ID NO: 329899 - DNA, 201 bp, Homo sapiens; identical to SEQ ID NO: 277154
  chr22:43609924-43610125
  hypo

SEQ ID NO: 329900 - DNA, 135 bp, Homo sapiens; identical to SEQ ID NO: 220870
  chr22:43689261-43689396
  hypo

SEQ ID NO: 329901 - DNA, 50 bp, Homo sapiens; identical to SEQ ID NO: 277156
  chr22:43861119-43861169
  hypo

SEQ ID NO: 329902 - DNA, 301 bp, Homo sapiens; identical to SEQ ID NO: 220871
  chr22:43926571-43926872
  hypo

SEQ ID NO: 329903 - DNA, 78 bp, Homo sapiens; identical to SEQ ID NO: 220872
  chr22:43926902-43926980
  hypo

SEQ ID NO: 329904 - DNA, 48 bp, Homo sapiens; identical to SEQ ID NO: 277159
  chr22:44026051-44026099
  hypo

SEQ ID NO: 329905 - DNA, 132 bp, Homo sapiens; identical to SEQ ID NO: 206161
  chr22:44287922-44288054
  hypo

SEQ ID NO: 329906 - DNA, 42 bp, Homo sapiens; identical to SEQ ID NO: 277160
  chr22:44317774-44317816
  hypo

SEQ ID NO: 329907 - DNA, 207 bp, Homo sapiens; identical to SEQ ID NO: 220874
  chr22:44322831-44323038
  hypo

SEQ ID NO: 329908 - DNA, 559 bp, Homo sapiens; identical to SEQ ID NO: 295522
  chr22:44419919-44420478
  hypo

SEQ ID NO: 329909 - DNA, 81 bp, Homo sapiens; identical to SEQ ID NO: 277162
  chr22:44449271-44449352
  hypo

SEQ ID NO: 329910 - DNA, 37 bp, Homo sapiens
  chr22:44487741-44487778
  hypo
aaatgcaaatatattaccttcgggggagtgggtaact

SEQ ID NO: 329911 - DNA, 442 bp, Homo sapiens
  chr22:44493264-44493706
  hypo
ccgcgtgagcagcccgtagcagactgagggccatgatgtgcagtggcctgcgggggtttcatgtccagggtccccggtcaaggctagcaggtcatgaatgctgacaggcagcaagggctgactgtgagctctggagcccccagatacagaggtgtttctcatctggagcaagcgcctgctctgaatcaggcccctgccccgtgagacgcagctgctccctggtctgtgcagagcctctgattctggcctactgtcaccatcaccaggtgaccaggagatcccggcgggatctgcagacatggacacactgccacacatagctgcctgcctggggcctgctgtccaccctctcaggcccactgttcccctctaggcggggtcaggaatgaaagctaccccacggggacaggtaaagaccggagatgcctctgagaaagtgttt

SEQ ID NO: 329912 - DNA, 365 bp, Homo sapiens
  chr22:44493741-44494106
  hypo
ccacctttcacagtctctgggtcagacgccccattcctctcagtggtcccgccgactgaggcaggacccctcaagaagcacacagtcctgggacatccgagccaccatggcatgctgcccagtctggggtcagacgtgggctcagagccttcaggagggagcagcgagttccctgtgggggccacatgagctgggcgggcccgaatcttgcttctcctcagttcagcgagagcaaggtgtggggacatgctagatagggcaatgctgagatttttagtgtgggttgaaggggatgtttccagaaacgggctctctgaaggctgggattgggtagtgacctgctcactctccgtcctgcaccccct

SEQ ID NO: 329913 - DNA, 146 bp, Homo sapiens; identical to SEQ ID NO: 277165
  chr22:44495150-44495296
  hypo

SEQ ID NO: 329914 - DNA, 131 bp, Homo sapiens; identical to SEQ ID NO: 277166
  chr22:44495597-44495728
  hypo

SEQ ID NO: 329915 - DNA, 336 bp, Homo sapiens; identical to SEQ ID NO: 277167
  chr22:44496284-44496620
  hypo

SEQ ID NO: 329916 - DNA, 93 bp, Homo sapiens; identical to SEQ ID NO: 220875
  chr22:44500128-44500221
  hypo

SEQ ID NO: 329917 - DNA, 45 bp, Homo sapiens; identical to SEQ ID NO: 220876
  chr22:44500269-44500314
  hypo

SEQ ID NO: 329918 - DNA, 40 bp, Homo sapiens; identical to SEQ ID NO: 277170
  chr22:44545748-44545788
  hypo

SEQ ID NO: 329919 - DNA, 463 bp, Homo sapiens; identical to SEQ ID NO: 277171
  chr22:44559545-44560008
  hypo

SEQ ID NO: 329920 - DNA, 89 bp, Homo sapiens; identical to SEQ ID NO: 277173
  chr22:44612660-44612749
  hypo

SEQ ID NO: 329921 - DNA, 43 bp, Homo sapiens
  chr22:44681502-44681545
  hypo
caccgtgccaggtagaccttgcagatgtcgtagttcattgccg

SEQ ID NO: 329922 - DNA, 121 bp, Homo sapiens; identical to SEQ ID NO: 277175
  chr22:44745294-44745415
  hypo

SEQ ID NO: 329923 - DNA, 199 bp, Homo sapiens; identical to SEQ ID NO: 277176
  chr22:44790443-44790642
  hypo

SEQ ID NO: 329924 - DNA, 240 bp, Homo sapiens; identical to SEQ ID NO: 277177
  chr22:44808388-44808628
  hypo

SEQ ID NO: 329925 - DNA, 136 bp, Homo sapiens
  chr22:44892380-44892516
  hypo
aggggtcagccctcgtggtccgtcagcgtgcggcggagtccctgtgcctaagtagcagagcggtagtcattgaaacaggccgggatgccagcaagagggaggcgagcatgcagtgagcgataggtacaaagctagc

SEQ ID NO: 329926 - DNA, 136 bp, Homo sapiens
  chr22:45004116-45004252
  hypo
tgccggccctctcccgctgtgtggcctcggggaagcctcttcccctgtctgagcctctgcattctcatctgtagaatggggatgctctgtcctgccttccagagcgttgctgatatcagaatccaggtgtggaact

SEQ ID NO: 329927 - DNA, 215 bp, Homo sapiens; identical to SEQ ID NO: 295526
  chr22:45015983-45016198
  hypo

SEQ ID NO: 329928 - DNA, 34 bp, Homo sapiens; identical to SEQ ID NO: 295527
  chr22:45064203-45064237
  hypo

SEQ ID NO: 329929 - DNA, 389 bp, Homo sapiens; identical to SEQ ID NO: 295528
  chr22:45064286-45064675
  hypo

SEQ ID NO: 329930 - DNA, 149 bp, Homo sapiens; identical to SEQ ID NO: 295529
  chr22:45064918-45065067
  hypo

SEQ ID NO: 329931 - DNA, 338 bp, Homo sapiens; identical to SEQ ID NO: 277180
  chr22:45074487-45074825
  hypo

SEQ ID NO: 329932 - DNA, 120 bp, Homo sapiens
  chr22:45075605-45075725
  hypo
taatagtaagactcagcctccccgctctgggacactcagtctgatggggcaggctggtcagaagacatagagccatggtgtgtttggaactttcacagagggaagcctggggctcgggaa

SEQ ID NO: 329933 - DNA, 52 bp, Homo sapiens; identical to SEQ ID NO: 277182
  chr22:45085115-45085167
  hypo

SEQ ID NO: 329934 - DNA, 557 bp, Homo sapiens; identical to SEQ ID NO: 206165
  chr22:45097773-45098330
  hypo

SEQ ID NO: 329935 - DNA, 470 bp, Homo sapiens; identical to SEQ ID NO: 206166
  chr22:45098381-45098851
  hypo

SEQ ID NO: 329936 - DNA, 32 bp, Homo sapiens; identical to SEQ ID NO: 220880
  chr22:45113077-45113109
  hypo

SEQ ID NO: 329937 - DNA, 32 bp, Homo sapiens; identical to SEQ ID NO: 220881
  chr22:45113349-45113381
  hypo

SEQ ID NO: 329938 - DNA, 38 bp, Homo sapiens
  chr22:45120588-45120626
  hypo
tgtcttgacctctgcgagcctctcttgcctcccctgta

SEQ ID NO: 329939 - DNA, 92 bp, Homo sapiens
  chr22:45120758-45120850
  hypo
ttggacaggtggaaggcaggagcaaaccaagtgttgcaggcccagccctgccaggtgtctctccagaaggtgtgagacgcagaggccactgt

SEQ ID NO: 329940 - DNA, 37 bp, Homo sapiens; identical to SEQ ID NO: 277187
  chr22:45121861-45121898
  hypo

SEQ ID NO: 329941 - DNA, 163 bp, Homo sapiens; identical to SEQ ID NO: 220882
  chr22:45122235-45122398
  hypo

SEQ ID NO: 329942 - DNA, 280 bp, Homo sapiens; identical to SEQ ID NO: 220883
  chr22:45123031-45123311
  hypo

SEQ ID NO: 329943 - DNA, 129 bp, Homo sapiens; identical to SEQ ID NO: 220884
  chr22:45123857-45123986
  hypo

SEQ ID NO: 329944 - DNA, 33 bp, Homo sapiens
  chr22:45135979-45136012
  hypo
tagtggttggtctaccatcggcatcaccggggt

SEQ ID NO: 329945 - DNA, 191 bp, Homo sapiens; identical to SEQ ID NO: 277192
  chr22:45136242-45136433
  hypo

SEQ ID NO: 329946 - DNA, 73 bp, Homo sapiens
  chr22:45137750-45137823
  hypo
agactccgtctcagaaaaaaaaaaaaaaaaaaaaaacctgatgtgaggtgaaagaagccagccaggaaacacc

SEQ ID NO: 329947 - DNA, 42 bp, Homo sapiens; identical to SEQ ID NO: 277194
  chr22:45175293-45175335
  hypo

SEQ ID NO: 329948 - DNA, 199 bp, Homo sapiens; identical to SEQ ID NO: 277195
  chr22:45181176-45181375
  hypo

SEQ ID NO: 329949 - DNA, 85 bp, Homo sapiens; identical to SEQ ID NO: 277196
  chr22:45220426-45220511
  hypo

SEQ ID NO: 329950 - DNA, 183 bp, Homo sapiens; identical to SEQ ID NO: 220885
  chr22:45242866-45243049
  hypo

SEQ ID NO: 329951 - DNA, 265 bp, Homo sapiens; identical to SEQ ID NO: 220886
  chr22:45277521-45277786
  hypo

SEQ ID NO: 329952 - DNA, 123 bp, Homo sapiens; identical to SEQ ID NO: 277199
  chr22:45288210-45288333
  hypo

SEQ ID NO: 329953 - DNA, 268 bp, Homo sapiens; identical to SEQ ID NO: 277200
  chr22:45312207-45312475
  hypo

SEQ ID NO: 329954 - DNA, 213 bp, Homo sapiens; identical to SEQ ID NO: 277201
  chr22:45312785-45312998
  hypo

SEQ ID NO: 329955 - DNA, 48 bp, Homo sapiens; identical to SEQ ID NO: 277202
  chr22:45322691-45322739
  hypo

SEQ ID NO: 329956 - DNA, 163 bp, Homo sapiens; identical to SEQ ID NO: 277203
  chr22:45389286-45389449
  hypo

SEQ ID NO: 329957 - DNA, 77 bp, Homo sapiens; identical to SEQ ID NO: 277204
  chr22:45392668-45392745
  hypo

SEQ ID NO: 329958 - DNA, 137 bp, Homo sapiens; identical to SEQ ID NO: 277205
  chr22:45392805-45392942
  hypo

SEQ ID NO: 329959 - DNA, 176 bp, Homo sapiens; identical to SEQ ID NO: 295538
  chr22:45405768-45405944
  hypo

SEQ ID NO: 329960 - DNA, 175 bp, Homo sapiens; identical to SEQ ID NO: 295539
  chr22:45406385-45406560
  hypo

SEQ ID NO: 329961 - DNA, 103 bp, Homo sapiens; identical to SEQ ID NO: 277206
  chr22:45474745-45474848
  hypo

SEQ ID NO: 329962 - DNA, 146 bp, Homo sapiens; identical to SEQ ID NO: 277207
  chr22:45581809-45581955
  hypo

SEQ ID NO: 329963 - DNA, 144 bp, Homo sapiens; identical to SEQ ID NO: 277208
  chr22:45584841-45584985
  hypo

SEQ ID NO: 329964 - DNA, 147 bp, Homo sapiens; identical to SEQ ID NO: 220887
  chr22:45591073-45591220
  hypo

SEQ ID NO: 329965 - DNA, 734 bp, Homo sapiens
  chr22:45592909-45593643
  hypo
ccggccccgggagtcgagtggcctcgcctggctgcggctccagcactggcgtgccatcgcagaccccggtggcggtggacaggtaggcacttggcagcactccgagggctgggcccggccggggctctgcgcaggctccgcacgcggctaggtcatcaggatgggcttctgccgaacttccaggatgtctagggccggcaggagggaagcaggtgaaacagtaaccctcaacagcggtgagtgctatggtcacggcagtgccacttctgaaggaagcccgcctcagccactcatgcatctcctctccaggcctcacagactgcagaggagacgtgtctccaccatcctcaccctgcagactgggaaatgggctcgcagcaacggcacaccctgcagggcctcaggtgcaagctggtgtgggggccagagccactgcctgtcacagctgctgcaggcctgggtcagcgaggtggcctgagagcctcccctcgcccgtgagtaacacacacctgggcatctgtggccactcaagaggggacagcaggtgcgccagaaaggtgaacaaagggaggacttcagctctgggaaagctacggctccacccaaagtctgagacaaagaggccaagagccctgcaaagaaacccaaccaaccgacaggacagggcgggatgactccgggtggctcacaagtaccaaggccctggaggcagagctggctgtgagaaggtgcgg

SEQ ID NO: 329966 - DNA, 272 bp, Homo sapiens; identical to SEQ ID NO: 220889
  chr22:45593715-45593987
  hypo

SEQ ID NO: 329967 - DNA, 386 bp, Homo sapiens; identical to SEQ ID NO: 220890
  chr22:45594190-45594576
  hypo

SEQ ID NO: 329968 - DNA, 85 bp, Homo sapiens; identical to SEQ ID NO: 220891
  chr22:45594816-45594901
  hypo

SEQ ID NO: 329969 - DNA, 159 bp, Homo sapiens; identical to SEQ ID NO: 277213
  chr22:45595258-45595417
  hypo

SEQ ID NO: 329970 - DNA, 238 bp, Homo sapiens
  chr22:45603946-45604184
  hypo
cccatcagaaaggtgtccgtgtgcgcaccaaagccaggcccaagaggacactgggagctgcccggtacccactgacaggagggtggccaggccgccatggtacactctgcaggcattacacagcagtgagaccagattacaaccacctgtgtcaacaggcatgactcacaaacatgacatgcggagaaagaagcctgaaacaacatatactgcccgattccaatgtatgagctgtgag

SEQ ID NO: 329971 - DNA, 76 bp, Homo sapiens; identical to SEQ ID NO: 220893
  chr22:45604387-45604463
  hypo

SEQ ID NO: 329972 - DNA, 323 bp, Homo sapiens; identical to SEQ ID NO: 220894
  chr22:45607125-45607448
  hypo

SEQ ID NO: 329973 - DNA, 360 bp, Homo sapiens; identical to SEQ ID NO: 220895
  chr22:45607751-45608111
  hypo

SEQ ID NO: 329974 - DNA, 208 bp, Homo sapiens; identical to SEQ ID NO: 277218
  chr22:45613816-45614024
  hypo

SEQ ID NO: 329975 - DNA, 120 bp, Homo sapiens; identical to SEQ ID NO: 220896
  chr22:45653545-45653665
  hypo

SEQ ID NO: 329976 - DNA, 168 bp, Homo sapiens; identical to SEQ ID NO: 277220
  chr22:45717844-45718012
  hypo

SEQ ID NO: 329977 - DNA, 38 bp, Homo sapiens; identical to SEQ ID NO: 277221
  chr22:45741339-45741377
  hypo

SEQ ID NO: 329978 - DNA, 617 bp, Homo sapiens; identical to SEQ ID NO: 220897
  chr22:45808543-45809160
  hypo

SEQ ID NO: 329979 - DNA, 184 bp, Homo sapiens; identical to SEQ ID NO: 277223
  chr22:45814422-45814606
  hypo

SEQ ID NO: 329980 - DNA, 437 bp, Homo sapiens; identical to SEQ ID NO: 277224
  chr22:45821511-45821948
  hypo

SEQ ID NO: 329981 - DNA, 149 bp, Homo sapiens; identical to SEQ ID NO: 220899
  chr22:45822398-45822547
  hypo

SEQ ID NO: 329982 - DNA, 72 bp, Homo sapiens; identical to SEQ ID NO: 220900
  chr22:45826806-45826878
  hypo

SEQ ID NO: 329983 - DNA, 209 bp, Homo sapiens; identical to SEQ ID NO: 277227
  chr22:45897738-45897947
  hypo

SEQ ID NO: 329984 - DNA, 46 bp, Homo sapiens; identical to SEQ ID NO: 277228
  chr22:45914455-45914501
  hypo

SEQ ID NO: 329985 - DNA, 269 bp, Homo sapiens; identical to SEQ ID NO: 220901
  chr22:45929578-45929847
  hypo

SEQ ID NO: 329986 - DNA, 154 bp, Homo sapiens; identical to SEQ ID NO: 277230
  chr22:45932767-45932921
  hypo

SEQ ID NO: 329987 - DNA, 78 bp, Homo sapiens; identical to SEQ ID NO: 277231
  chr22:45938766-45938844
  hypo

SEQ ID NO: 329988 - DNA, 88 bp, Homo sapiens; identical to SEQ ID NO: 277232
  chr22:45940276-45940364
  hypo

SEQ ID NO: 329989 - DNA, 34 bp, Homo sapiens; identical to SEQ ID NO: 277233
  chr22:45949260-45949294
  hypo

SEQ ID NO: 329990 - DNA, 42 bp, Homo sapiens; identical to SEQ ID NO: 277234
  chr22:45958411-45958453
  hypo

SEQ ID NO: 329991 - DNA, 427 bp, Homo sapiens; identical to SEQ ID NO: 220902
  chr22:45959026-45959453
  hypo

SEQ ID NO: 329992 - DNA, 182 bp, Homo sapiens; identical to SEQ ID NO: 277236
  chr22:45975266-45975448
  hypo

SEQ ID NO: 329993 - DNA, 125 bp, Homo sapiens; identical to SEQ ID NO: 220903
  chr22:45976304-45976429
  hypo

SEQ ID NO: 329994 - DNA, 407 bp, Homo sapiens; identical to SEQ ID NO: 277238
  chr22:45982090-45982497
  hypo

SEQ ID NO: 329995 - DNA, 70 bp, Homo sapiens; identical to SEQ ID NO: 220904
  chr22:45982908-45982978
  hypo

SEQ ID NO: 329996 - DNA, 259 bp, Homo sapiens; identical to SEQ ID NO: 220905
  chr22:45983008-45983267
  hypo

SEQ ID NO: 329997 - DNA, 392 bp, Homo sapiens; identical to SEQ ID NO: 277241
  chr22:46009356-46009748
  hypo

SEQ ID NO: 329998 - DNA, 87 bp, Homo sapiens; identical to SEQ ID NO: 277242
  chr22:46040672-46040759
  hypo

SEQ ID NO: 329999 - DNA, 209 bp, Homo sapiens; identical to SEQ ID NO: 277243
  chr22:46042935-46043144
  hypo

SEQ ID NO: 330000 - DNA, 159 bp, Homo sapiens; identical to SEQ ID NO: 277244
  chr22:46051559-46051718
  hypo

SEQ ID NO: 330001 - DNA, 119 bp, Homo sapiens; identical to SEQ ID NO: 277245
  chr22:46082801-46082920
  hypo

SEQ ID NO: 330002 - DNA, 214 bp, Homo sapiens; identical to SEQ ID NO: 277246
  chr22:46145006-46145220
  hypo

SEQ ID NO: 330003 - DNA, 34 bp, Homo sapiens; identical to SEQ ID NO: 277247
  chr22:46153006-46153040
  hypo

SEQ ID NO: 330004 - DNA, 56 bp, Homo sapiens; identical to SEQ ID NO: 277248
  chr22:46158114-46158170
  hypo

SEQ ID NO: 330005 - DNA, 50 bp, Homo sapiens; identical to SEQ ID NO: 277249
  chr22:46229653-46229703
  hypo

SEQ ID NO: 330006 - DNA, 116 bp, Homo sapiens; identical to SEQ ID NO: 277250
  chr22:46229733-46229849
  hypo

SEQ ID NO: 330007 - DNA, 494 bp, Homo sapiens; identical to SEQ ID NO: 220906
  chr22:46255144-46255638
  hypo

SEQ ID NO: 330008 - DNA, 488 bp, Homo sapiens; identical to SEQ ID NO: 277252
  chr22:46261684-46262172
  hypo

SEQ ID NO: 330009 - DNA, 161 bp, Homo sapiens; identical to SEQ ID NO: 277253
  chr22:46278023-46278184
  hypo

SEQ ID NO: 330010 - DNA, 116 bp, Homo sapiens
  chr22:46278408-46278524
  hypo
ggtgatccccctgccgacaagcgcccatgtgtgtaaagtggggtaatggaggtggctcagggagcactgaccgtgaaacaggcgaagtggccactgcctgagcgttccacattgtt

SEQ ID NO: 330011 - DNA, 56 bp, Homo sapiens
  chr22:46278554-46278610
  hypo
attgggcggagcacctatgacatcgacagaaccccagcgcccgccccagaggacag

SEQ ID NO: 330012 - DNA, 181 bp, Homo sapiens; identical to SEQ ID NO: 220908
  chr22:46312229-46312410
  hypo

SEQ ID NO: 330013 - DNA, 115 bp, Homo sapiens
  chr22:46318779-46318894
  hypo
acttgacgaagcagcaccagtggaatttgcagttgcactgccacaccttggtgtactggtgggtgttgtagcctcggccgcagcacatggtgtcacagccgtccgcgccgggcga

SEQ ID NO: 330014 - DNA, 58 bp, Homo sapiens; identical to SEQ ID NO: 277257
  chr22:46329875-46329933
  hypo

SEQ ID NO: 330015 - DNA, 134 bp, Homo sapiens; identical to SEQ ID NO: 277258
  chr22:46339130-46339264
  hypo

SEQ ID NO: 330016 - DNA, 269 bp, Homo sapiens; identical to SEQ ID NO: 277259
  chr22:46407789-46408058
  hypo

SEQ ID NO: 330017 - DNA, 147 bp, Homo sapiens
  chr22:46410634-46410781
  hypo
cttccaatatttccgaggccagctgcccagagaaggagggctgggtggagaggaccgtgccagcagcagtaggcctgggccaggagacaggcacgcacctccgcggtctctggcgagtctatgtccacacagcggcaggacctccac

SEQ ID NO: 330018 - DNA, 52 bp, Homo sapiens; identical to SEQ ID NO: 277261
  chr22:46437045-46437097
  hypo

SEQ ID NO: 330019 - DNA, 102 bp, Homo sapiens; identical to SEQ ID NO: 220909
  chr22:46437983-46438085
  hypo

SEQ ID NO: 330020 - DNA, 36 bp, Homo sapiens; identical to SEQ ID NO: 220910
  chr22:46455649-46455685
  hypo

SEQ ID NO: 330021 - DNA, 95 bp, Homo sapiens; identical to SEQ ID NO: 220911
  chr22:46455925-46456020
  hypo

SEQ ID NO: 330022 - DNA, 368 bp, Homo sapiens; identical to SEQ ID NO: 226399
  chr22:46465893-46466261
  hypo

SEQ ID NO: 330023 - DNA, 359 bp, Homo sapiens; identical to SEQ ID NO: 226400
  chr22:46468170-46468529
  hypo

SEQ ID NO: 330024 - DNA, 270 bp, Homo sapiens
  chr22:46498385-46498655
  hypo
agcaggctcccagttcatcccgcagcctcgtgtcgctgctccagctgtcccgggtacgacgtgcccttctccaaaaacacctcacccacccagctgggctggcctcgagaactggggagtcagaggcccttggctgtccctgaaaaaggaaaacgggcctcctgatgggggcttcctgggctcacccaacacagaaggacctcctagtgcccgtgcgccggcaggtaaacctctttgggtccccgttccctcatccctgaaacatgggga

SEQ ID NO: 330025 - DNA, 171 bp, Homo sapiens
  chr22:46498685-46498856
  hypo
tgggggaaggaagagccgctccattcctgcgtttgatcaggttgtcacgaggactgagtgagtcaccaggtgtgaggggctttggtgggtgtgtcacagtggcaaagcattcacaccggccaggtccccagctgggagcatgtgcccaggagcctgcggtgtgcagctggt

SEQ ID NO: 330026 - DNA, 58 bp, Homo sapiens; identical to SEQ ID NO: 277266
  chr22:46499693-46499751
  hypo

SEQ ID NO: 330027 - DNA, 171 bp, Homo sapiens; identical to SEQ ID NO: 277267
  chr22:46505610-46505781
  hypo

SEQ ID NO: 330028 - DNA, 107 bp, Homo sapiens
  chr22:46521745-46521852
  hypo
tcgcctgagagtggcgtcttccaccctctgaccgccatggctccacaggcagcccgcaagagcctccagcctctggcagccctggaccagaccttggtaacacctgc

SEQ ID NO: 330029 - DNA, 39 bp, Homo sapiens; identical to SEQ ID NO: 220914
  chr22:46522039-46522078
  hypo

SEQ ID NO: 330030 - DNA, 132 bp, Homo sapiens; identical to SEQ ID NO: 277269
  chr22:46555874-46556006
  hypo

SEQ ID NO: 330031 - DNA, 159 bp, Homo sapiens; identical to SEQ ID NO: 277270
  chr22:46582357-46582516
  hypo

SEQ ID NO: 330032 - DNA, 43 bp, Homo sapiens; identical to SEQ ID NO: 220915
  chr22:46585895-46585938
  hypo

SEQ ID NO: 330033 - DNA, 181 bp, Homo sapiens; identical to SEQ ID NO: 277272
  chr22:46594236-46594417
  hypo

SEQ ID NO: 330034 - DNA, 367 bp, Homo sapiens; identical to SEQ ID NO: 277273
  chr22:46597070-46597437
  hypo

SEQ ID NO: 330035 - DNA, 120 bp, Homo sapiens; identical to SEQ ID NO: 220916
  chr22:46598479-46598599
  hypo

SEQ ID NO: 330036 - DNA, 108 bp, Homo sapiens
  chr22:46599515-46599623
  hypo
attgggcgaaaaggaaaaaagaaaaaaactctcagcaaagctagaggggatcctgccaatgagttcccagctcacagactgattagcaggccaccacacatgagctgg

SEQ ID NO: 330037 - DNA, 111 bp, Homo sapiens; identical to SEQ ID NO: 226401
  chr22:46658172-46658283
  hypo

SEQ ID NO: 330038 - DNA, 94 bp, Homo sapiens; identical to SEQ ID NO: 220917
  chr22:46678247-46678341
  hypo

SEQ ID NO: 330039 - DNA, 634 bp, Homo sapiens; identical to SEQ ID NO: 277277
  chr22:46704066-46704700
  hypo

SEQ ID NO: 330040 - DNA, 317 bp, Homo sapiens; identical to SEQ ID NO: 277278
  chr22:46745023-46745340
  hypo

SEQ ID NO: 330041 - DNA, 321 bp, Homo sapiens
  chr22:46748629-46748950
  hypo
gcgatgggatcaggcgtccgcgctggccagagtgctgctcgctcatgtgcagacccttactgcggtgaggcctgcgtgagcctgtgctgtgcctggtgtcaggggacaggctccgagtcagtcacagtgtgcagtcctgctgtggggacagagtgcagccattgttgggttagtacagtggcggggatgtgcctgccggcgtgatgatcaggcaggtcttgacacagcacagacctgagctgtgggactggccaggagagccaggctgcagctcaggtgtagggcgtcttgcagtgaattgcacttggagatcttccacct

SEQ ID NO: 330042 - DNA, 249 bp, Homo sapiens; identical to SEQ ID NO: 277280
  chr22:46750300-46750549
  hypo

SEQ ID NO: 330043 - DNA, 94 bp, Homo sapiens; identical to SEQ ID NO: 277281
  chr22:46751900-46751994
  hypo

SEQ ID NO: 330044 - DNA, 42 bp, Homo sapiens; identical to SEQ ID NO: 277282
  chr22:46755416-46755458
  hypo

SEQ ID NO: 330045 - DNA, 115 bp, Homo sapiens
  chr22:46770692-46770807
  hypo
ccattgcggggatgcgcccggctgcggatgtgaagaaacccctccgcaggagcagcgaccctgccatatgggccccgcacacggagcccccgccagcccggggcctcggcctcgg

SEQ ID NO: 330046 - DNA, 252 bp, Homo sapiens
  chr22:46770884-46771136
  hypo
aggcctggtgctccacctaccactgctgggaagccatggaggcttctcaagggtgacctgcgaggtgggggtgcctgccttccctcttgaggtaagaggggtctggtcccaccgcttgccgtaaaaaaggaggagcagctcaggtctgcacgtggccctgagcagctcgccggaaggttccagcctggtctttttattccgtttcccttcccagggccggtccagccccacagacaccgtctccacccacga

SEQ ID NO: 330047 - DNA, 110 bp, Homo sapiens; identical to SEQ ID NO: 220918
  chr22:46785285-46785395
  hypo

SEQ ID NO: 330048 - DNA, 141 bp, Homo sapiens; identical to SEQ ID NO: 277285
  chr22:46786062-46786203
  hypo

SEQ ID NO: 330049 - DNA, 402 bp, Homo sapiens; identical to SEQ ID NO: 277286
  chr22:46787966-46788368
  hypo

SEQ ID NO: 330050 - DNA, 98 bp, Homo sapiens; identical to SEQ ID NO: 277287
  chr22:46790967-46791065
  hypo

SEQ ID NO: 330051 - DNA, 245 bp, Homo sapiens; identical to SEQ ID NO: 277288
  chr22:46804736-46804981
  hypo

SEQ ID NO: 330052 - DNA, 407 bp, Homo sapiens; identical to SEQ ID NO: 277289
  chr22:46805659-46806066
  hypo

SEQ ID NO: 330053 - DNA, 604 bp, Homo sapiens; identical to SEQ ID NO: 277290
  chr22:46812243-46812847
  hypo

SEQ ID NO: 330054 - DNA, 222 bp, Homo sapiens; identical to SEQ ID NO: 277291
  chr22:46813168-46813390
  hypo

SEQ ID NO: 330055 - DNA, 745 bp, Homo sapiens; identical to SEQ ID NO: 277292
  chr22:46815672-46816417
  hypo

SEQ ID NO: 330056 - DNA, 270 bp, Homo sapiens; identical to SEQ ID NO: 220922
  chr22:46816771-46817041
  hypo

SEQ ID NO: 330057 - DNA, 196 bp, Homo sapiens; identical to SEQ ID NO: 220923
  chr22:46828035-46828231
  hypo

SEQ ID NO: 330058 - DNA, 86 bp, Homo sapiens; identical to SEQ ID NO: 277295
  chr22:46835121-46835207
  hypo

SEQ ID NO: 330059 - DNA, 191 bp, Homo sapiens; identical to SEQ ID NO: 277296
  chr22:46838112-46838303
  hypo

SEQ ID NO: 330060 - DNA, 203 bp, Homo sapiens; identical to SEQ ID NO: 220924
  chr22:46838991-46839194
  hypo

SEQ ID NO: 330061 - DNA, 175 bp, Homo sapiens; identical to SEQ ID NO: 277298
  chr22:46847860-46848035
  hypo

SEQ ID NO: 330062 - DNA, 283 bp, Homo sapiens; identical to SEQ ID NO: 277299
  chr22:46850525-46850808
  hypo

SEQ ID NO: 330063 - DNA, 235 bp, Homo sapiens; identical to SEQ ID NO: 220925
  chr22:46859885-46860120
  hypo

SEQ ID NO: 330064 - DNA, 102 bp, Homo sapiens; identical to SEQ ID NO: 277301
  chr22:46867879-46867981
  hypo

SEQ ID NO: 330065 - DNA, 44 bp, Homo sapiens; identical to SEQ ID NO: 220926
  chr22:46888632-46888676
  hypo

SEQ ID NO: 330066 - DNA, 167 bp, Homo sapiens; identical to SEQ ID NO: 277303
  chr22:46905651-46905818
  hypo

SEQ ID NO: 330067 - DNA, 82 bp, Homo sapiens; identical to SEQ ID NO: 277305
  chr22:46922073-46922155
  hypo

SEQ ID NO: 330068 - DNA, 224 bp, Homo sapiens
  chr22:46929401-46929625
  hypo
gcagagttgcccgggcccggcccaattgcgccccggcatgccaggcggagcccttggcgggttcctgaggctctccaggaggcccatcaggagctactcctcccaccccgacggccactcaccagacacagacacctccatgagcgcctccagcggccggttgttgtccaggtcgcggctgagctgcagttcgcccgtggcggggtccagcagcaacaggcgca

SEQ ID NO: 330069 - DNA, 203 bp, Homo sapiens
  chr22:46929718-46929921
  hypo
tggacttgttggtgacatagttgttgaagaggatctggaagtcgggcagcacaggcgggttgtcattctggtccacgagaaggatgtgcaccgtggctcggctcaccagcggagccgacgtggcctgcaccaccagcacatactcccgccggacctcaaagtccagctccaccatggcacgcaggtccccgttgagcaggtcc

SEQ ID NO: 330070 - DNA, 239 bp, Homo sapiens
  chr22:46930034-46930273
  hypo
gttctcctcaacaaacagctccagttcgtccttctcaaacatgggggcattgtcattaatgtccaagatggtcacctggatttctaccgaggcgctaaggggagtgggactgccccgatccacagccagagcccaaaggttgtacacggccacattctcccggtccagccggcgctgggtgcgaatcacaccggacgtgggctcgatgtagaagtccccatcgccgtcgtccccaccct

SEQ ID NO: 330071 - DNA, 31 bp, Homo sapiens; identical to SEQ ID NO: 277307
  chr22:46931122-46931153
  hypo

SEQ ID NO: 330072 - DNA, 301 bp, Homo sapiens; identical to SEQ ID NO: 220929
  chr22:46931418-46931719
  hypo

SEQ ID NO: 330073 - DNA, 66 bp, Homo sapiens; identical to SEQ ID NO: 220930
  chr22:46932128-46932194
  hypo

SEQ ID NO: 330074 - DNA, 372 bp, Homo sapiens; identical to SEQ ID NO: 277309
  chr22:46979973-46980345
  hypo

SEQ ID NO: 330075 - DNA, 59 bp, Homo sapiens; identical to SEQ ID NO: 277310
  chr22:46992940-46992999
  hypo

SEQ ID NO: 330076 - DNA, 87 bp, Homo sapiens; identical to SEQ ID NO: 277311
  chr22:47004839-47004926
  hypo

SEQ ID NO: 330077 - DNA, 87 bp, Homo sapiens; identical to SEQ ID NO: 220932
  chr22:47004986-47005073
  hypo

SEQ ID NO: 330078 - DNA, 323 bp, Homo sapiens
  chr22:47005562-47005885
  hypo
aggcccacgcacacactggattccgcattgtggagtgcgagtgctttggggatgtggaacagcagagcagggtctgcagagcatcccaccggggagggccgtggggccccaggcaggaggcggtgcttagggctggctcctggcttcaccagtcttcttcactgtgttgttgtttgtcactgggcagtaagaggcgcctctctgaaacctgaggggcggcccggctgctggtaggtgtggacgggggcctacactggtggctgttctgagtcggttcgccttccagcacccctgagtgtggcgccctccttgctggctcctct

SEQ ID NO: 330079 - DNA, 153 bp, Homo sapiens; identical to SEQ ID NO: 277314
  chr22:47014558-47014711
  hypo

SEQ ID NO: 330080 - DNA, 154 bp, Homo sapiens; identical to SEQ ID NO: 220933
  chr22:47022397-47022551
  hypo

SEQ ID NO: 330081 - DNA, 412 bp, Homo sapiens; identical to SEQ ID NO: 220934
  chr22:47022632-47023044
  hypo

SEQ ID NO: 330082 - DNA, 79 bp, Homo sapiens; identical to SEQ ID NO: 220935
  chr22:47023191-47023270
  hypo

SEQ ID NO: 330083 - DNA, 490 bp, Homo sapiens; identical to SEQ ID NO: 277316
  chr22:47023708-47024198
  hypo

SEQ ID NO: 330084 - DNA, 197 bp, Homo sapiens; identical to SEQ ID NO: 277317
  chr22:47037419-47037616
  hypo

SEQ ID NO: 330085 - DNA, 297 bp, Homo sapiens; identical to SEQ ID NO: 220936
  chr22:47054011-47054308
  hypo

SEQ ID NO: 330086 - DNA, 232 bp, Homo sapiens
  chr22:47054716-47054948
  hypo
atcctagcagtatcatgtcctgggcgccagtgccgccctggctcctagagaggcatgtctgcacctgacatctttgctcttgtttgtgggtcccatgtgggaccctgagtgctcacagtctcctccctcaccctgccctgcgcctcacagtgccgccagcaggaagcaggtcattcaggaccccagcgcaagttacaaagccagtgccctcctgtctcgctaacaccacgag

SEQ ID NO: 330087 - DNA, 33 bp, Homo sapiens; identical to SEQ ID NO: 220937
  chr22:47056194-47056227
  hypo

SEQ ID NO: 330088 - DNA, 94 bp, Homo sapiens; identical to SEQ ID NO: 277321
  chr22:47059000-47059094
  hypo

SEQ ID NO: 330089 - DNA, 165 bp, Homo sapiens; identical to SEQ ID NO: 277322
  chr22:47064650-47064815
  hypo

SEQ ID NO: 330090 - DNA, 89 bp, Homo sapiens; identical to SEQ ID NO: 277323
  chr22:47069564-47069653
  hypo

SEQ ID NO: 330091 - DNA, 61 bp, Homo sapiens; identical to SEQ ID NO: 277324
  chr22:47074764-47074825
  hypo

SEQ ID NO: 330092 - DNA, 234 bp, Homo sapiens; identical to SEQ ID NO: 277325
  chr22:47075161-47075395
  hypo

SEQ ID NO: 330093 - DNA, 264 bp, Homo sapiens; identical to SEQ ID NO: 277326
  chr22:47107084-47107348
  hypo

SEQ ID NO: 330094 - DNA, 212 bp, Homo sapiens; identical to SEQ ID NO: 277327
  chr22:47113342-47113554
  hypo

SEQ ID NO: 330095 - DNA, 95 bp, Homo sapiens; identical to SEQ ID NO: 277328
  chr22:47139211-47139306
  hypo

SEQ ID NO: 330096 - DNA, 160 bp, Homo sapiens; identical to SEQ ID NO: 220938
  chr22:47163644-47163804
  hypo

SEQ ID NO: 330097 - DNA, 284 bp, Homo sapiens; identical to SEQ ID NO: 220939
  chr22:47172072-47172356
  hypo

SEQ ID NO: 330098 - DNA, 203 bp, Homo sapiens; identical to SEQ ID NO: 277331
  chr22:47187931-47188134
  hypo

SEQ ID NO: 330099 - DNA, 115 bp, Homo sapiens; identical to SEQ ID NO: 277332
  chr22:47189586-47189701
  hypo

SEQ ID NO: 330100 - DNA, 119 bp, Homo sapiens; identical to SEQ ID NO: 220940
  chr22:47192836-47192955
  hypo

SEQ ID NO: 330101 - DNA, 46 bp, Homo sapiens; identical to SEQ ID NO: 220941
  chr22:47193289-47193335
  hypo

SEQ ID NO: 330102 - DNA, 89 bp, Homo sapiens; identical to SEQ ID NO: 220942
  chr22:47193371-47193460
  hypo

SEQ ID NO: 330103 - DNA, 885 bp, Homo sapiens; identical to SEQ ID NO: 277335
  chr22:47197333-47198218
  hypo

SEQ ID NO: 330104 - DNA, 975 bp, Homo sapiens
  chr22:47298524-47299499
  hypo
accagcccttccactgagctgactcttcgcctccactcagagtcccgttcaagtgggcacgttgttttcacctttcctgcgataactgcaagcaacacacctgcatttttgacacacaaagttgtaatggttgtgattcccgaagaacaccagcagacagacacccggtgggcacgtggggacacgaagactcagatgtctctgtcctcagcagcgcacagttgaagtgagggatgaagacagatgtgcgtgaaacccagagagatcatatacagttgtcaatgaaaccacagtttgtatcctgccgactgcattccagggtggctgaaagaattggagaagacagcccgaggaggggcagcgtatggggcagtccactctggagggtcatgcccaattgctggggccgcctcacgtctctgctctgtgatttcttctatttcctggcccggttgggccgtggatctctccctggtgcacctggagtctctgtggatctctttcctcaggggactctgcaacccagcctcacgccctgcagggggtcacagacctcagcctggtgggcgttcgggaccgagggctgagggccgagggttgaggtgaagtgcagtggcacagccatcccaggctgcaggcgaaggggctccccttcgagaacccacaggatggtagcagagcgaagttcagcctgcgggggcgtctgtactcggggaagctgtggaccaggcatggagccagcctgtttgccctccccgccctgatggctgctccggctggctaggcctcttctctgagattcttggcttagtacctctggcttttgccgcttgaatttggggacctgtcggctcttcctgtttcgcttcagtggacttccaccctagctctcgcctctggttgctgctctgagcgtgagtctagagggaccagcaaggtcctgagggagttgcgaggaatcgggccctgtccagg

SEQ ID NO: 330105 - DNA, 145 bp, Homo sapiens; identical to SEQ ID NO: 277337
  chr22:47307379-47307524
  hypo

SEQ ID NO: 330106 - DNA, 251 bp, Homo sapiens
  chr22:47327901-47328152
  hypo
agattgattcattgtcgaggaatgccttattctgatgttacgcggtttctttcctggctcatgcatgcccccatttgtgcgtttatagaaagtgtaagtcctgtgctagtcagagcaagactctgtcagtgaagacgatggtgactagtggcgggttcaccgtgtcagacactgcgctaagcaggtcattacatgatcacctggaattcttaaatgccctctggcgacaccaccatacatgactgttgtga

SEQ ID NO: 330107 - DNA, 198 bp, Homo sapiens; identical to SEQ ID NO: 277339
  chr22:47354378-47354576
  hypo

SEQ ID NO: 330108 - DNA, 110 bp, Homo sapiens; identical to SEQ ID NO: 220945
  chr22:47370212-47370322
  hypo

SEQ ID NO: 330109 - DNA, 305 bp, Homo sapiens; identical to SEQ ID NO: 277341
  chr22:47372443-47372748
  hypo

SEQ ID NO: 330110 - DNA, 187 bp, Homo sapiens; identical to SEQ ID NO: 277342
  chr22:47380645-47380832
  hypo

SEQ ID NO: 330111 - DNA, 154 bp, Homo sapiens; identical to SEQ ID NO: 277343
  chr22:47381551-47381705
  hypo

SEQ ID NO: 330112 - DNA, 235 bp, Homo sapiens; identical to SEQ ID NO: 277344
  chr22:47393097-47393332
  hypo

SEQ ID NO: 330113 - DNA, 63 bp, Homo sapiens; identical to SEQ ID NO: 277345
  chr22:47405907-47405970
  hypo

SEQ ID NO: 330114 - DNA, 181 bp, Homo sapiens; identical to SEQ ID NO: 277346
  chr22:47406193-47406374
  hypo

SEQ ID NO: 330115 - DNA, 364 bp, Homo sapiens; identical to SEQ ID NO: 277347
  chr22:47411015-47411379
  hypo

SEQ ID NO: 330116 - DNA, 229 bp, Homo sapiens
  chr22:47428637-47428866
  hypo
ctgacttcagcttatctccacggcagagcttcattcacgccagtgcaaggcggcacccacttgctgcagcccagacgtccacgcagagctgtgggctgggagtggccagtgaaaccaggtgccacctgccaggccaggcacctgccctggaacgttcctttcacactgccgtcccaggctgccctgtgtggcccctccttcctcaggcgctttgtttcaagcagtgatt

SEQ ID NO: 330117 - DNA, 360 bp, Homo sapiens; identical to SEQ ID NO: 220948
  chr22:47436579-47436939
  hypo

SEQ ID NO: 330118 - DNA, 74 bp, Homo sapiens; identical to SEQ ID NO: 277350
  chr22:47441099-47441173
  hypo

SEQ ID NO: 330119 - DNA, 110 bp, Homo sapiens; identical to SEQ ID NO: 277351
  chr22:47441203-47441313
  hypo

SEQ ID NO: 330120 - DNA, 214 bp, Homo sapiens; identical to SEQ ID NO: 220949
  chr22:47455004-47455218
  hypo

SEQ ID NO: 330121 - DNA, 92 bp, Homo sapiens; identical to SEQ ID NO: 220950
  chr22:47465507-47465599
  hypo

SEQ ID NO: 330122 - DNA, 120 bp, Homo sapiens; identical to SEQ ID NO: 220951
  chr22:47465779-47465899
  hypo

SEQ ID NO: 330123 - DNA, 120 bp, Homo sapiens; identical to SEQ ID NO: 220952
  chr22:47465959-47466079
  hypo

SEQ ID NO: 330124 - DNA, 120 bp, Homo sapiens; identical to SEQ ID NO: 220953
  chr22:47466259-47466379
  hypo

SEQ ID NO: 330125 - DNA, 59 bp, Homo sapiens; identical to SEQ ID NO: 277357
  chr22:47486206-47486265
  hypo

SEQ ID NO: 330126 - DNA, 137 bp, Homo sapiens; identical to SEQ ID NO: 277358
  chr22:47489047-47489184
  hypo

SEQ ID NO: 330127 - DNA, 49 bp, Homo sapiens; identical to SEQ ID NO: 277359
  chr22:47511004-47511053
  hypo

SEQ ID NO: 330128 - DNA, 197 bp, Homo sapiens
  chr22:47525924-47526121
  hypo
ccatcccttctaggcccctcctcaggacaccccctcctgccgggctccccccaagcgcagcccccttcccaaacccacgtttgcctcactgtcttccttgtccggtagagcacacccctcagcacttctctgtgtgaatgagcctggcagggacctaccttgagatctacatgtctggataccgctgccttctggcc

SEQ ID NO: 330129 - DNA, 227 bp, Homo sapiens; identical to SEQ ID NO: 277361
  chr22:47532466-47532693
  hypo

SEQ ID NO: 330130 - DNA, 411 bp, Homo sapiens; identical to SEQ ID NO: 220954
  chr22:47534596-47535007
  hypo

SEQ ID NO: 330131 - DNA, 747 bp, Homo sapiens; identical to SEQ ID NO: 277363
  chr22:47540105-47540852
  hypo

SEQ ID NO: 330132 - DNA, 546 bp, Homo sapiens; identical to SEQ ID NO: 277364
  chr22:47542709-47543255
  hypo

SEQ ID NO: 330133 - DNA, 89 bp, Homo sapiens; identical to SEQ ID NO: 277365
  chr22:47614609-47614698
  hypo

SEQ ID NO: 330134 - DNA, 199 bp, Homo sapiens
  chr22:47666573-47666772
  hypo
agcattttaaaaagcgttcatgtgagtcatcatttattgaacactggctgtgtgccaggcattgggctaggcaggcgcctgcgttgtttttaatccttaccagtactgtgcctggcagtcacggttctgtctttgtcgtggccaaggagcatgaggcttagggaggctcgaactcgcctaagatctccagacaatgccg

SEQ ID NO: 330135 - DNA, 248 bp, Homo sapiens; identical to SEQ ID NO: 220955
  chr22:48027378-48027626
  hypo

SEQ ID NO: 330136 - DNA, 62 bp, Homo sapiens; identical to SEQ ID NO: 220956
  chr22:48027786-48027848
  hypo

SEQ ID NO: 330137 - DNA, 130 bp, Homo sapiens; identical to SEQ ID NO: 277368
  chr22:48280049-48280179
  hypo

SEQ ID NO: 330138 - DNA, 36 bp, Homo sapiens; identical to SEQ ID NO: 277369
  chr22:48528663-48528699
  hypo

SEQ ID NO: 330139 - DNA, 217 bp, Homo sapiens; identical to SEQ ID NO: 277370
  chr22:48723482-48723699
  hypo

SEQ ID NO: 330140 - DNA, 60 bp, Homo sapiens; identical to SEQ ID NO: 277371
  chr22:48727541-48727601
  hypo

SEQ ID NO: 330141 - DNA, 266 bp, Homo sapiens
  chr22:48728451-48728717
  hypo
cacacatgacatacacacaccgctcactccaccatacacacacacaccacctacgcaccacttttattgaggttaaagagtccagcatttcccacggaggaagcaaatcctttctcctccacagtcacgcgttctgcacgcgtatcccacgctgccatgtggacgtctaagtggagagacagaggctcttcccggcagcgctgccgctcaagcgggagaggccgaccccgaccctgaaaccctcgcaggcgcctggtgctagcaga

SEQ ID NO: 330142 - DNA, 218 bp, Homo sapiens; identical to SEQ ID NO: 220957
  chr22:48793077-48793295
  hypo

SEQ ID NO: 330143 - DNA, 43 bp, Homo sapiens; identical to SEQ ID NO: 277374
  chr22:48809224-48809267
  hypo

SEQ ID NO: 330144 - DNA, 341 bp, Homo sapiens; identical to SEQ ID NO: 277376
  chr22:48918775-48919116
  hypo

SEQ ID NO: 330145 - DNA, 570 bp, Homo sapiens; identical to SEQ ID NO: 277377
  chr22:48921050-48921620
  hypo

SEQ ID NO: 330146 - DNA, 377 bp, Homo sapiens; identical to SEQ ID NO: 277378
  chr22:48923829-48924206
  hypo

SEQ ID NO: 330147 - DNA, 159 bp, Homo sapiens; identical to SEQ ID NO: 277379
  chr22:48946285-48946444
  hypo

SEQ ID NO: 330148 - DNA, 153 bp, Homo sapiens; identical to SEQ ID NO: 277380
  chr22:48955833-48955986
  hypo

SEQ ID NO: 330149 - DNA, 110 bp, Homo sapiens; identical to SEQ ID NO: 277381
  chr22:48956016-48956126
  hypo

SEQ ID NO: 330150 - DNA, 88 bp, Homo sapiens; identical to SEQ ID NO: 277382
  chr22:48959486-48959574
  hypo

SEQ ID NO: 330151 - DNA, 306 bp, Homo sapiens; identical to SEQ ID NO: 277383
  chr22:48965019-48965325
  hypo

SEQ ID NO: 330152 - DNA, 105 bp, Homo sapiens; identical to SEQ ID NO: 134357
  chr22:48972766-48972871
  hypo

SEQ ID NO: 330153 - DNA, 314 bp, Homo sapiens; identical to SEQ ID NO: 277384
  chr22:48977759-48978073
  hypo

SEQ ID NO: 330154 - DNA, 277 bp, Homo sapiens; identical to SEQ ID NO: 277385
  chr22:48996154-48996431
  hypo

SEQ ID NO: 330155 - DNA, 107 bp, Homo sapiens; identical to SEQ ID NO: 277386
  chr22:48998395-48998502
  hypo

SEQ ID NO: 330156 - DNA, 414 bp, Homo sapiens; identical to SEQ ID NO: 277387
  chr22:49008040-49008454
  hypo

SEQ ID NO: 330157 - DNA, 256 bp, Homo sapiens; identical to SEQ ID NO: 277388
  chr22:49010565-49010821
  hypo

SEQ ID NO: 330158 - DNA, 92 bp, Homo sapiens
  chr22:49013241-49013333
  hypo
aggataaatgggtgctgtttcggggcctggtttgaggccattcgttactgcagccgtgtggagctcctggaagcatgcaggcactcccgtcc

SEQ ID NO: 330159 - DNA, 48 bp, Homo sapiens
  chr22:49013485-49013533
  hypo
aacataaagctgccccatgcctgaggcgggggctggatgttctggagc

SEQ ID NO: 330160 - DNA, 137 bp, Homo sapiens; identical to SEQ ID NO: 277390
  chr22:49014306-49014443
  hypo

SEQ ID NO: 330161 - DNA, 772 bp, Homo sapiens; identical to SEQ ID NO: 220959
  chr22:49026210-49026982
  hypo

SEQ ID NO: 330162 - DNA, 133 bp, Homo sapiens
  chr22:49038918-49039051
  hypo
gctggggctgagctgggggtcgcgacagcccagaaagactgagaggcactgcaacccggctgccatgtggatctcagatgcacggcctccagcgccatgggataagaacgtgtaccgttcaggctgcccggtg

SEQ ID NO: 330163 - DNA, 343 bp, Homo sapiens; identical to SEQ ID NO: 277393
  chr22:49042351-49042694
  hypo

SEQ ID NO: 330164 - DNA, 158 bp, Homo sapiens; identical to SEQ ID NO: 277394
  chr22:49045921-49046079
  hypo

SEQ ID NO: 330165 - DNA, 240 bp, Homo sapiens; identical to SEQ ID NO: 277395
  chr22:49046594-49046834
  hypo

SEQ ID NO: 330166 - DNA, 120 bp, Homo sapiens
  chr22:49047904-49048024
  hypo
ggctgggcacagcgcgtcatctccacctcgaggcgccaacggggcccccagggccagctgaaggcatgttgtggctgggactagggtgacgggaattttccaccaggagcgacgtgaatc

SEQ ID NO: 330167 - DNA, 42 bp, Homo sapiens; identical to SEQ ID NO: 277397
  chr22:49053747-49053789
  hypo

SEQ ID NO: 330168 - DNA, 337 bp, Homo sapiens; identical to SEQ ID NO: 277398
  chr22:49054731-49055068
  hypo

SEQ ID NO: 330169 - DNA, 168 bp, Homo sapiens; identical to SEQ ID NO: 277399
  chr22:49057067-49057235
  hypo

SEQ ID NO: 330170 - DNA, 202 bp, Homo sapiens; identical to SEQ ID NO: 277400
  chr22:49063357-49063559
  hypo

SEQ ID NO: 330171 - DNA, 86 bp, Homo sapiens; identical to SEQ ID NO: 277401
  chr22:49070489-49070575
  hypo

SEQ ID NO: 330172 - DNA, 91 bp, Homo sapiens; identical to SEQ ID NO: 277402
  chr22:49087333-49087424
  hypo

SEQ ID NO: 330173 - DNA, 257 bp, Homo sapiens; identical to SEQ ID NO: 277403
  chr22:49104033-49104290
  hypo

SEQ ID NO: 330174 - DNA, 240 bp, Homo sapiens; identical to SEQ ID NO: 220960
  chr22:49138231-49138471
  hypo

SEQ ID NO: 330175 - DNA, 573 bp, Homo sapiens
  chr22:49138501-49139074
  hypo
accaggcgacgtggtgggccgggtggtgtggtgaagccggcagcacagtggagcaggcattatggtggactgggcagcatggtgtattagaagaggagagatggcctggggtgctcagcggggctgagtccccagctgggagctcaggtgcgatgaagcccaagggactgacggtgtgaggagggccctctgctgcctccatgcagcccacacgcggggcccccacagtgcggacatgttggggcaatgctgcctggccccgccctcagcccagccctgggacgcaggctcagcagcccccggattccagtcaacatccccaggactcactcgggtcaggcacagtgtccaagctgtgtgagtctccgggagccgctggaacaaaatgccacacacccggtggcttcaaaccatgaaacccgttctcactgttctgggtccagacgtctgtggtcacagtgtctgctgggccgtgctcccgcaggaggcagcagcagagggtcctccctgcctcctcctgccattcttccggttcgggggtccagacgtctgtggtcacggtgtctgctgggc

SEQ ID NO: 330176 - DNA, 115 bp, Homo sapiens; identical to SEQ ID NO: 277405
  chr22:49140371-49140486
  hypo

SEQ ID NO: 330177 - DNA, 177 bp, Homo sapiens
  chr22:49145662-49145839
  hypo
acacagcccctgaggggccccgggagtggccttggctccctggagagcccacgtctcagccacagttctccactcgcctcggacttcacccgttctctgccgcccgcccactccgtttccctgtggtccgtgaaggacggcctcaggccttggcatcctgagcttcggtctgtccag

SEQ ID NO: 330178 - DNA, 397 bp, Homo sapiens
  chr22:49146049-49146446
  hypo
actgtcaggcacagaagcggcctcctcccgtgccccagactgtccgaattgcttttattttcttatactttcagtatactccatagaccaaagagcaaaatctatctgaacctggacgcaccctcactgtcagggtccctggggtcgcttgtgcgggcgggagggcaatggtggcagagacatgctggtggccccggcggagcggagagggcggccgtggtggaggcctccaccccaggagcaccccgcgcaccctcggaggacgggcttcggctgcgcggaggccgtggcacacctgcgggaggcagcgacggcccccacgcagacgccgggaacgcaggccgctttattcctctgtacttagatcaacttgaccgtactaaaatccctttctgtt

SEQ ID NO: 330179 - DNA, 65 bp, Homo sapiens
  chr22:49146942-49147007
  hypo
tgtattggtcaacacttgagcgtacaatatcttgaacatgcttcttccaatgggttttgtttccc

SEQ ID NO: 330180 - DNA, 42 bp, Homo sapiens; identical to SEQ ID NO: 277408
  chr22:49175463-49175505
  hypo

SEQ ID NO: 330181 - DNA, 201 bp, Homo sapiens; identical to SEQ ID NO: 277409
  chr22:49203055-49203256
  hypo

SEQ ID NO: 330182 - DNA, 115 bp, Homo sapiens; identical to SEQ ID NO: 277410
  chr22:49216176-49216291
  hypo

SEQ ID NO: 330183 - DNA, 197 bp, Homo sapiens; identical to SEQ ID NO: 277411
  chr22:49231767-49231964
  hypo

SEQ ID NO: 330184 - DNA, 189 bp, Homo sapiens; identical to SEQ ID NO: 277412
  chr22:49233007-49233196
  hypo

SEQ ID NO: 330185 - DNA, 61 bp, Homo sapiens
  chr22:49233434-49233495
  hypo
atgcacacgtgtcctcccatgcacacacgtgcgcacacacaggctacgaggtggggctgtc

SEQ ID NO: 330186 - DNA, 281 bp, Homo sapiens; identical to SEQ ID NO: 220962
  chr22:49277152-49277433
  hypo

SEQ ID NO: 330187 - DNA, 84 bp, Homo sapiens; identical to SEQ ID NO: 277415
  chr22:49294317-49294401
  hypo

SEQ ID NO: 330188 - DNA, 266 bp, Homo sapiens; identical to SEQ ID NO: 277416
  chr22:49295890-49296156
  hypo

SEQ ID NO: 330189 - DNA, 282 bp, Homo sapiens; identical to SEQ ID NO: 277417
  chr22:49333182-49333464
  hypo

SEQ ID NO: 330190 - DNA, 43 bp, Homo sapiens; identical to SEQ ID NO: 277418
  chr22:49380597-49380640
  hypo

SEQ ID NO: 330191 - DNA, 88 bp, Homo sapiens; identical to SEQ ID NO: 277419
  chr22:49380670-49380758
  hypo

SEQ ID NO: 330192 - DNA, 140 bp, Homo sapiens; identical to SEQ ID NO: 277421
  chr22:49389207-49389347
  hypo

SEQ ID NO: 330193 - DNA, 142 bp, Homo sapiens; identical to SEQ ID NO: 277422
  chr22:49404568-49404710
  hypo

SEQ ID NO: 330194 - DNA, 31 bp, Homo sapiens; identical to SEQ ID NO: 277423
  chr22:49424884-49424915
  hypo

SEQ ID NO: 330195 - DNA, 94 bp, Homo sapiens; identical to SEQ ID NO: 277424
  chr22:49430807-49430901
  hypo

SEQ ID NO: 330196 - DNA, 275 bp, Homo sapiens; identical to SEQ ID NO: 277425
  chr22:49498249-49498524
  hypo

SEQ ID NO: 330197 - DNA, 125 bp, Homo sapiens; identical to SEQ ID NO: 277426
  chr22:49504662-49504787
  hypo

SEQ ID NO: 330198 - DNA, 51 bp, Homo sapiens; identical to SEQ ID NO: 277428
  chr22:49512003-49512054
  hypo

SEQ ID NO: 330199 - DNA, 108 bp, Homo sapiens; identical to SEQ ID NO: 277429
  chr22:49535540-49535648
  hypo

SEQ ID NO: 330200 - DNA, 216 bp, Homo sapiens; identical to SEQ ID NO: 277430
  chr22:49538065-49538281
  hypo

SEQ ID NO: 330201 - DNA, 226 bp, Homo sapiens; identical to SEQ ID NO: 277431
  chr22:49546643-49546869
  hypo

SEQ ID NO: 330202 - DNA, 71 bp, Homo sapiens; identical to SEQ ID NO: 277432
  chr22:49558735-49558806
  hypo

SEQ ID NO: 330203 - DNA, 212 bp, Homo sapiens; identical to SEQ ID NO: 277433
  chr22:49559994-49560206
  hypo

SEQ ID NO: 330204 - DNA, 142 bp, Homo sapiens; identical to SEQ ID NO: 277434
  chr22:49579810-49579952
  hypo

SEQ ID NO: 330205 - DNA, 244 bp, Homo sapiens; identical to SEQ ID NO: 277435
  chr22:49580738-49580982
  hypo

SEQ ID NO: 330206 - DNA, 193 bp, Homo sapiens; identical to SEQ ID NO: 277436
  chr22:49582855-49583048
  hypo

SEQ ID NO: 330207 - DNA, 179 bp, Homo sapiens; identical to SEQ ID NO: 277437
  chr22:49610931-49611110
  hypo

SEQ ID NO: 330208 - DNA, 77 bp, Homo sapiens; identical to SEQ ID NO: 277438
  chr22:49629162-49629239
  hypo

SEQ ID NO: 330209 - DNA, 107 bp, Homo sapiens
  chr22:49637421-49637528
  hypo
ctcgcgactccagctccttccgaggaggtcactgagctttgcacgatgccggctccttctcaggaggtcaccagagcttctcgtgactccagccccttcccaggagg

SEQ ID NO: 330210 - DNA, 128 bp, Homo sapiens
  chr22:49637781-49637909
  hypo
tggagccctccatttcggccgctcccgcgtcaggcccaaaataggtgcctgctggtcatcacttctgcgatcatgctttcatctccactcaattacgtcgcctccgcgtacttctgggctgctggttt

SEQ ID NO: 330211 - DNA, 85 bp, Homo sapiens; identical to SEQ ID NO: 277440
  chr22:49678542-49678627
  hypo

SEQ ID NO: 330212 - DNA, 296 bp, Homo sapiens; identical to SEQ ID NO: 277441
  chr22:49693559-49693855
  hypo

SEQ ID NO: 330213 - DNA, 199 bp, Homo sapiens; identical to SEQ ID NO: 277442
  chr22:49698397-49698596
  hypo

SEQ ID NO: 330214 - DNA, 192 bp, Homo sapiens; identical to SEQ ID NO: 277443
  chr22:49698626-49698818
  hypo

SEQ ID NO: 330215 - DNA, 147 bp, Homo sapiens; identical to SEQ ID NO: 277444
  chr22:49699808-49699955
  hypo

SEQ ID NO: 330216 - DNA, 42 bp, Homo sapiens; identical to SEQ ID NO: 277445
  chr22:49721831-49721873
  hypo

SEQ ID NO: 330217 - DNA, 316 bp, Homo sapiens; identical to SEQ ID NO: 277446
  chr22:49729097-49729413
  hypo

SEQ ID NO: 330218 - DNA, 222 bp, Homo sapiens; identical to SEQ ID NO: 220963
  chr22:49729772-49729994
  hypo

SEQ ID NO: 330219 - DNA, 41 bp, Homo sapiens; identical to SEQ ID NO: 220964
  chr22:49730114-49730155
  hypo

SEQ ID NO: 330220 - DNA, 166 bp, Homo sapiens; identical to SEQ ID NO: 277449
  chr22:49751421-49751587
  hypo

SEQ ID NO: 330221 - DNA, 211 bp, Homo sapiens; identical to SEQ ID NO: 277450
  chr22:49773232-49773443
  hypo

SEQ ID NO: 330222 - DNA, 140 bp, Homo sapiens
  chr22:49785182-49785322
  hypo
tctctgcctcactgtcctcacgcagccccagctccggcattgcactcgaggccacccggagccccatctcactctctctgcactctgccaggcactgcgagaggcatggctttcagcggcacccccgagagaggcctccc

SEQ ID NO: 330223 - DNA, 131 bp, Homo sapiens
  chr22:49785379-49785510
  hypo
tctaccgggaagcagcaggggctcatgagggcgtcacgccttgctcggctgtgagtcttgtccatgggggtgatctcaggacctgcgcctgatgcactcaggaaacactcgccaagacacacatgggccct

SEQ ID NO: 330224 - DNA, 89 bp, Homo sapiens
  chr22:49831760-49831849
  hypo
gggcagaaagcatgtccacacgggtccaggacactgggctcccatgtgggtcctagcgccactgaggacctccgtccgcacagagcggg

SEQ ID NO: 330225 - DNA, 79 bp, Homo sapiens; identical to SEQ ID NO: 277453
  chr22:49833907-49833986
  hypo

SEQ ID NO: 330226 - DNA, 120 bp, Homo sapiens; identical to SEQ ID NO: 277454
  chr22:49834662-49834782
  hypo

SEQ ID NO: 330227 - DNA, 97 bp, Homo sapiens; identical to SEQ ID NO: 277455
  chr22:49835737-49835834
  hypo

SEQ ID NO: 330228 - DNA, 254 bp, Homo sapiens; identical to SEQ ID NO: 277457
  chr22:49855321-49855575
  hypo

SEQ ID NO: 330229 - DNA, 138 bp, Homo sapiens; identical to SEQ ID NO: 220965
  chr22:49857253-49857391
  hypo

SEQ ID NO: 330230 - DNA, 42 bp, Homo sapiens; identical to SEQ ID NO: 277459
  chr22:49858316-49858358
  hypo

SEQ ID NO: 330231 - DNA, 242 bp, Homo sapiens
  chr22:49864171-49864413
  hypo
tgtgtgcacgtgctcgcctgcaaacctgccacgcgggagaggcttccaaacagcaggaaccccacaggccccaactgcggaaggaggacggagccagttcccctcgggcggtcatcattggtcttggtgacaagccagtgcagcaggtgtaaggaatgaacagacgtcaggggaaggcgggaattccaaacacctttcctctgacttcacccacgggaaccaaaggagagggaggtgcctgg

SEQ ID NO: 330232 - DNA, 34 bp, Homo sapiens
  chr22:49864470-49864504
  hypo
tttcctgggctgctgtggctggatggctctgttg

SEQ ID NO: 330233 - DNA, 120 bp, Homo sapiens; identical to SEQ ID NO: 277461
  chr22:49880500-49880620
  hypo

SEQ ID NO: 330234 - DNA, 227 bp, Homo sapiens; identical to SEQ ID NO: 277462
  chr22:49901386-49901613
  hypo

SEQ ID NO: 330235 - DNA, 488 bp, Homo sapiens; identical to SEQ ID NO: 220966
  chr22:49911018-49911506
  hypo

SEQ ID NO: 330236 - DNA, 207 bp, Homo sapiens
  chr22:49911586-49911793
  hypo
ccgtcggagctggggatcatcctcccagagtttcagcagctcagagaaggccagcaactcaccgagccatgccacagcgtgcaagcacagcggcccggccctcctgcattctgtcatgcactgcgtgtcatcttattaaaggatccaacgcaggctcataaaatacttaatgaaaacatgccaccaggtgcacgtcctggaagagcc

SEQ ID NO: 330237 - DNA, 60 bp, Homo sapiens
  chr22:49943108-49943168
  hypo
gacagacaaggcctcgcataggcagaggtggcttcacagcagcgggcaagtgggggaccc

SEQ ID NO: 330238 - DNA, 69 bp, Homo sapiens
  chr22:49943364-49943433
  hypo
tctgtcaccagccagcatgtctgaaatcactgcagagatgctgctgagggaacacggacagcgttctga

SEQ ID NO: 330239 - DNA, 124 bp, Homo sapiens; identical to SEQ ID NO: 277465
  chr22:49945296-49945420
  hypo

SEQ ID NO: 330240 - DNA, 252 bp, Homo sapiens; identical to SEQ ID NO: 277466
  chr22:49945706-49945958
  hypo

SEQ ID NO: 330241 - DNA, 407 bp, Homo sapiens
  chr22:49948171-49948578
  hypo
ctgagacagcatcgcgagctgagggagaaactgacagacggcagttcaccaaaacccaaaaactggtcattctctggcctttaacaaaccaaagtatatttctccctctgaaataagaaacacaggacaattattaagttccaaaagtacgtttcattttggaggcatgttgttggtcccctttggaatcatgaacccctgtgagcgaaacacctcccaccattgattctgacagggtacggcgggcagttcccggcccaggtagaggcagacaggtgcagagccacagggccaccactgcagagtctggccttctctccagccccgggtgcacccacggttatcagggacccagcactgcctccctgcacgcacatggctctccaggccaccactgcagagtccgg

SEQ ID NO: 330242 - DNA, 85 bp, Homo sapiens
  chr22:49948620-49948705
  hypo
cggtgctgcctccctgcacccacccggctctccacagcagcaaacggggtacattagggtggacgggatgtggggccagggccct

SEQ ID NO: 330243 - DNA, 202 bp, Homo sapiens; identical to SEQ ID NO: 277468
  chr22:49958407-49958609
  hypo

SEQ ID NO: 330244 - DNA, 200 bp, Homo sapiens; identical to SEQ ID NO: 277469
  chr22:49964997-49965197
  hypo

SEQ ID NO: 330245 - DNA, 107 bp, Homo sapiens
  chr22:49967872-49967979
  hypo
cgctccccagacgccggagcacccacggccagcgggtggacacggtgtccacatggtgcacactcttgcccttgagcctgtgggagggaagccaggaagatatggac

SEQ ID NO: 330246 - DNA, 150 bp, Homo sapiens; identical to SEQ ID NO: 277472
  chr22:49971212-49971362
  hypo

SEQ ID NO: 330247 - DNA, 84 bp, Homo sapiens; identical to SEQ ID NO: 277473
  chr22:49971682-49971766
  hypo

SEQ ID NO: 330248 - DNA, 63 bp, Homo sapiens
  chr22:49980097-49980160
  hypo
atgacgcaggctctcgtgtcagggcgcacagccatgtgatgactccacattcactcagtgctc

SEQ ID NO: 330249 - DNA, 53 bp, Homo sapiens; identical to SEQ ID NO: 220968
  chr22:49983615-49983668
  hypo

SEQ ID NO: 330250 - DNA, 42 bp, Homo sapiens; identical to SEQ ID NO: 220969
  chr22:50000856-50000898
  hypo

SEQ ID NO: 330251 - DNA, 238 bp, Homo sapiens
  chr22:50002819-50003057
  hypo
agccggtgtcctcgggagccggtggtggggctccctgaaggtcctagaaatccggcggcacagggacgtgcaggcggatgagctggagggagattctgcttttctcagttcctagtgagaagtcagagcccctctgaaagacagacagtcatctaggtcccatctcaggagaaagtggaaccgcccgggccgtgcctgctagaatcaagtgcagttttcacaagaccttgctggaaac

SEQ ID NO: 330252 - DNA, 210 bp, Homo sapiens; identical to SEQ ID NO: 220970
  chr22:50008973-50009183
  hypo

SEQ ID NO: 330253 - DNA, 289 bp, Homo sapiens; identical to SEQ ID NO: 220971
  chr22:50009330-50009619
  hypo

SEQ ID NO: 330254 - DNA, 69 bp, Homo sapiens; identical to SEQ ID NO: 220972
  chr22:50009663-50009732
  hypo

SEQ ID NO: 330255 - DNA, 46 bp, Homo sapiens
  chr22:50025072-50025118
  hypo
gtgtttcaggacacgcggggtgcaagtgtttcggggcatacgcgtg

SEQ ID NO: 330256 - DNA, 173 bp, Homo sapiens; identical to SEQ ID NO: 220973
  chr22:50025148-50025321
  hypo

SEQ ID NO: 330257 - DNA, 33 bp, Homo sapiens; identical to SEQ ID NO: 277485
  chr22:50047562-50047595
  hypo

SEQ ID NO: 330258 - DNA, 222 bp, Homo sapiens
  chr22:50054165-50054387
  hypo
cggctgccgggtctcggggcccggtgggtccctcctcggtggcttgacccgtttgcctttgagcaatgactcggtgggcagcagagccccacccgtaaccagcctgcacagcgcagccccacaggaatctgttcaggcaaaggttctaattatcaagacatttttatttcaagcagagctcaatatttcaagttcattctgtgcctacgtttcagaaaaaaa

SEQ ID NO: 330259 - DNA, 207 bp, Homo sapiens; identical to SEQ ID NO: 220975
  chr22:50054635-50054842
  hypo

SEQ ID NO: 330260 - DNA, 195 bp, Homo sapiens; identical to SEQ ID NO: 277488
  chr22:50085872-50086067
  hypo

SEQ ID NO: 330261 - DNA, 79 bp, Homo sapiens; identical to SEQ ID NO: 277489
  chr22:50092133-50092212
  hypo

SEQ ID NO: 330262 - DNA, 353 bp, Homo sapiens; identical to SEQ ID NO: 277490
  chr22:50107838-50108191
  hypo

SEQ ID NO: 330263 - DNA, 95 bp, Homo sapiens; identical to SEQ ID NO: 277491
  chr22:50113602-50113697
  hypo

SEQ ID NO: 330264 - DNA, 50 bp, Homo sapiens; identical to SEQ ID NO: 277492
  chr22:50114361-50114411
  hypo

SEQ ID NO: 330265 - DNA, 198 bp, Homo sapiens; identical to SEQ ID NO: 295570
  chr22:50118499-50118697
  hypo

SEQ ID NO: 330266 - DNA, 66 bp, Homo sapiens; identical to SEQ ID NO: 134360
  chr22:50118722-50118788
  hypo

SEQ ID NO: 330267 - DNA, 154 bp, Homo sapiens
  chr22:50119262-50119416
  hypo
tcactgggatgccccgtctccagctgagcaacagcactgtgtgtcccagacctgaacagcgagtggagacagtgccgctgtgccaccgcagggcacctcccgctgccttggccacccaggccctcctgggagggatccaaaccactgaccagaa

SEQ ID NO: 330268 - DNA, 80 bp, Homo sapiens
  chr22:50119476-50119556
  hypo
ggtgcacgaaggacgggcacggcagagctcggctgtgagggtgtcatctgggctcggagctcagccgccgtgtcacctga

SEQ ID NO: 330269 - DNA, 42 bp, Homo sapiens; identical to SEQ ID NO: 277494
  chr22:50131653-50131695
  hypo

SEQ ID NO: 330270 - DNA, 131 bp, Homo sapiens; identical to SEQ ID NO: 277495
  chr22:50156812-50156943
  hypo

SEQ ID NO: 330271 - DNA, 128 bp, Homo sapiens; identical to SEQ ID NO: 220976
  chr22:50169707-50169835
  hypo

SEQ ID NO: 330272 - DNA, 73 bp, Homo sapiens; identical to SEQ ID NO: 206182
  chr22:50170510-50170583
  hypo

SEQ ID NO: 330273 - DNA, 181 bp, Homo sapiens; identical to SEQ ID NO: 220978
  chr22:50170790-50170971
  hypo

SEQ ID NO: 330274 - DNA, 772 bp, Homo sapiens; identical to SEQ ID NO: 277498
  chr22:50171291-50172063
  hypo

SEQ ID NO: 330275 - DNA, 71 bp, Homo sapiens; identical to SEQ ID NO: 277499
  chr22:50176846-50176917
  hypo

SEQ ID NO: 330276 - DNA, 123 bp, Homo sapiens
  chr22:50177125-50177248
  hypo
cagacacagcacaacgcgcctgggcatggccgtcacacccaaaccaccagtcactatgggacggctccgcacatgctcaggacagcctcagaatgctgtccactgtgtcgtcagctgcagcag

SEQ ID NO: 330277 - DNA, 64 bp, Homo sapiens
  chr22:50177299-50177363
  hypo
ggaaggctgaggtgccacgacatcccgccagctccaggcgtgcaccgggcgccagcaccattcc

SEQ ID NO: 330278 - DNA, 249 bp, Homo sapiens; identical to SEQ ID NO: 277501
  chr22:50177707-50177956
  hypo

SEQ ID NO: 330279 - DNA, 162 bp, Homo sapiens; identical to SEQ ID NO: 277502
  chr22:50187009-50187171
  hypo

SEQ ID NO: 330280 - DNA, 240 bp, Homo sapiens; identical to SEQ ID NO: 220981
  chr22:50191341-50191581
  hypo

SEQ ID NO: 330281 - DNA, 95 bp, Homo sapiens; identical to SEQ ID NO: 220982
  chr22:50191626-50191721
  hypo

SEQ ID NO: 330282 - DNA, 113 bp, Homo sapiens; identical to SEQ ID NO: 220983
  chr22:50192075-50192188
  hypo

SEQ ID NO: 330283 - DNA, 157 bp, Homo sapiens; identical to SEQ ID NO: 277505
  chr22:50209203-50209360
  hypo

SEQ ID NO: 330284 - DNA, 533 bp, Homo sapiens; identical to SEQ ID NO: 277506
  chr22:50209390-50209923
  hypo

SEQ ID NO: 330285 - DNA, 162 bp, Homo sapiens; identical to SEQ ID NO: 277507
  chr22:50223386-50223548
  hypo

SEQ ID NO: 330286 - DNA, 157 bp, Homo sapiens; identical to SEQ ID NO: 277508
  chr22:50234239-50234396
  hypo

SEQ ID NO: 330287 - DNA, 441 bp, Homo sapiens; identical to SEQ ID NO: 295576
  chr22:50246433-50246874
  hypo

SEQ ID NO: 330288 - DNA, 174 bp, Homo sapiens; identical to SEQ ID NO: 277509
  chr22:50250093-50250267
  hypo

SEQ ID NO: 330289 - DNA, 229 bp, Homo sapiens; identical to SEQ ID NO: 220988
  chr22:50250297-50250526
  hypo

SEQ ID NO: 330290 - DNA, 68 bp, Homo sapiens; identical to SEQ ID NO: 277511
  chr22:50282333-50282401
  hypo

SEQ ID NO: 330291 - DNA, 121 bp, Homo sapiens; identical to SEQ ID NO: 220989
  chr22:50296995-50297116
  hypo

SEQ ID NO: 330292 - DNA, 86 bp, Homo sapiens; identical to SEQ ID NO: 220990
  chr22:50297146-50297232
  hypo

SEQ ID NO: 330293 - DNA, 78 bp, Homo sapiens; identical to SEQ ID NO: 277513
  chr22:50305618-50305696
  hypo

SEQ ID NO: 330294 - DNA, 268 bp, Homo sapiens
  chr22:50316605-50316873
  hypo
ctcactctcacacaatgtgtcgccatcctcatggggcgcctgccccggttggcactgagtgtctaaggacagggcctggccatcgcctcatcccctcccctgccgcgtggggcctccgaggatggcatttgagatgattcctcctcaggggctgccctcctccctgcccttccccagccggccctggccacgggctgtgtcaggccatgatcggtccttccccgctccctggccgggctgtcctgggccgctcacagctgtgccgctc

SEQ ID NO: 330295 - DNA, 80 bp, Homo sapiens
  chr22:50316938-50317018
  hypo
acgccaacggctcctacacgtgcgaaggtgggccaggcgggcgggtctgcactccggggcctgccgggtttcgttgctgc

SEQ ID NO: 330296 - DNA, 42 bp, Homo sapiens; identical to SEQ ID NO: 277515
  chr22:50340691-50340733
  hypo

SEQ ID NO: 330297 - DNA, 121 bp, Homo sapiens; identical to SEQ ID NO: 277516
  chr22:50341662-50341783
  hypo

SEQ ID NO: 330298 - DNA, 403 bp, Homo sapiens; identical to SEQ ID NO: 277517
  chr22:50343413-50343816
  hypo

SEQ ID NO: 330299 - DNA, 184 bp, Homo sapiens; identical to SEQ ID NO: 277518
  chr22:50344327-50344511
  hypo

SEQ ID NO: 330300 - DNA, 326 bp, Homo sapiens; identical to SEQ ID NO: 277519
  chr22:50345917-50346243
  hypo

SEQ ID NO: 330301 - DNA, 445 bp, Homo sapiens; identical to SEQ ID NO: 277520
  chr22:50346303-50346748
  hypo

SEQ ID NO: 330302 - DNA, 185 bp, Homo sapiens; identical to SEQ ID NO: 295578
  chr22:50422041-50422226
  hypo

SEQ ID NO: 330303 - DNA, 189 bp, Homo sapiens; identical to SEQ ID NO: 220992
  chr22:50433174-50433363
  hypo

SEQ ID NO: 330304 - DNA, 223 bp, Homo sapiens; identical to SEQ ID NO: 295579
  chr22:50453234-50453457
  hypo

SEQ ID NO: 330305 - DNA, 102 bp, Homo sapiens; identical to SEQ ID NO: 295580
  chr22:50453539-50453641
  hypo

SEQ ID NO: 330306 - DNA, 48 bp, Homo sapiens; identical to SEQ ID NO: 277524
  chr22:50506925-50506973
  hypo

SEQ ID NO: 330307 - DNA, 31 bp, Homo sapiens; identical to SEQ ID NO: 277525
  chr22:50509793-50509824
  hypo

SEQ ID NO: 330308 - DNA, 144 bp, Homo sapiens; identical to SEQ ID NO: 277526
  chr22:50511772-50511916
  hypo

SEQ ID NO: 330309 - DNA, 64 bp, Homo sapiens; identical to SEQ ID NO: 277527
  chr22:50515962-50516026
  hypo

SEQ ID NO: 330310 - DNA, 395 bp, Homo sapiens; identical to SEQ ID NO: 277528
  chr22:50520368-50520763
  hypo

SEQ ID NO: 330311 - DNA, 197 bp, Homo sapiens; identical to SEQ ID NO: 277529
  chr22:50521454-50521651
  hypo

SEQ ID NO: 330312 - DNA, 66 bp, Homo sapiens; identical to SEQ ID NO: 277530
  chr22:50529039-50529105
  hypo

SEQ ID NO: 330313 - DNA, 267 bp, Homo sapiens
  chr22:50529625-50529892
  hypo
tagaacacgcgctcagcggtagctggagctccagctcttggcagcgctcagatcctatgcctgtactgtaaccgtcgccccaggttcctcccgtggctgggaagctgcagtaaaggcacgttcaggactcaggaccgtggctgcagcagtggccagacggctgagggcgtgcgctgctcctgggccagacttgtctgcccagccccgaaccttttccagcaccgtgtttgttgagattctccagtcttccgaggctgctgctgatgg

SEQ ID NO: 330314 - DNA, 75 bp, Homo sapiens
  chr22:50529922-50529997
  hypo
aaccgtgcatgctaatgactcccagatgctgatataagtggccatttacatagcacttaacgcgtgtcagccacg

SEQ ID NO: 330315 - DNA, 198 bp, Homo sapiens; identical to SEQ ID NO: 277532
  chr22:50601380-50601578
  hypo

SEQ ID NO: 330316 - DNA, 35 bp, Homo sapiens; identical to SEQ ID NO: 295581
  chr22:50623255-50623290
  hypo

SEQ ID NO: 330317 - DNA, 131 bp, Homo sapiens; identical to SEQ ID NO: 277533
  chr22:50626942-50627073
  hypo

SEQ ID NO: 330318 - DNA, 59 bp, Homo sapiens; identical to SEQ ID NO: 220994
  chr22:50656965-50657024
  hypo

SEQ ID NO: 330319 - DNA, 39 bp, Homo sapiens; identical to SEQ ID NO: 277536
  chr22:50695754-50695793
  hypo

SEQ ID NO: 330320 - DNA, 196 bp, Homo sapiens; identical to SEQ ID NO: 277537
  chr22:50714229-50714425
  hypo

SEQ ID NO: 330321 - DNA, 2093 bp, Homo sapiens; identical to SEQ ID NO: 277538
  chr22:50718698-50720791
  hypo

SEQ ID NO: 330322 - DNA, 463 bp, Homo sapiens; identical to SEQ ID NO: 220996
  chr22:50721365-50721828
  hypo

SEQ ID NO: 330323 - DNA, 616 bp, Homo sapiens
  chr22:50721872-50722488
  hypo
tcctggcgggcgacaggcagtgtggcccaggcactccccgacccaccccacaccctgacaccctcaccccctcagcctccccacccacccagtcacccggaaccccagcgtgggtactgacccagctgacagggcccagaccagggccgtccactcaccgggtggacacggagtaacgttccggctgaaaggagcagttccggccggccacagagatcctctggatgtcccctgcttggacgcccaaattggaccccaggatggtgatgcggatgcccccacccagggggcccgtctcaggctggatctgaaaccacagagccgggtgagcagggaggggctcatgccagggacgagggaaggtgtaggccaggcttcgaggggctcaccctggtgatgacgggcggcgggcactcggaggtggtgttgcacagggcctcatacacgcacctgctctggcccccgcaccacgcacacctgtagtcggggttagcggcccggcacaggctgcagtcgctgcggccaaaggagcagttgtagagggtcactgcggggagagctgccgtcagtggtcaccccgtgcctgcccgcccccgacctgctccccactgcgccc

SEQ ID NO: 330324 - DNA, 621 bp, Homo sapiens; identical to SEQ ID NO: 277540
  chr22:50724162-50724783
  hypo

SEQ ID NO: 330325 - DNA, 84 bp, Homo sapiens; identical to SEQ ID NO: 206187
  chr22:50745645-50745729
  hypo

SEQ ID NO: 330326 - DNA, 183 bp, Homo sapiens; identical to SEQ ID NO: 206188
  chr22:50765110-50765293
  hypo

SEQ ID NO: 330327 - DNA, 44 bp, Homo sapiens; identical to SEQ ID NO: 226414
  chr22:50766078-50766122
  hypo

SEQ ID NO: 330328 - DNA, 76 bp, Homo sapiens; identical to SEQ ID NO: 221000
  chr22:50853285-50853361
  hypo

SEQ ID NO: 330329 - DNA, 221 bp, Homo sapiens; identical to SEQ ID NO: 277542
  chr22:50858128-50858349
  hypo

SEQ ID NO: 330330 - DNA, 125 bp, Homo sapiens; identical to SEQ ID NO: 221001
  chr22:50864103-50864228
  hypo

SEQ ID NO: 330331 - DNA, 149 bp, Homo sapiens; identical to SEQ ID NO: 221002
  chr22:50873266-50873415
  hypo

SEQ ID NO: 330332 - DNA, 219 bp, Homo sapiens; identical to SEQ ID NO: 295589
  chr22:50873755-50873974
  hypo

SEQ ID NO: 330333 - DNA, 385 bp, Homo sapiens; identical to SEQ ID NO: 295590
  chr22:50874004-50874389
  hypo

SEQ ID NO: 330334 - DNA, 72 bp, Homo sapiens; identical to SEQ ID NO: 221004
  chr22:50874675-50874747
  hypo

SEQ ID NO: 330335 - DNA, 465 bp, Homo sapiens; identical to SEQ ID NO: 277548
  chr22:50877969-50878434
  hypo

SEQ ID NO: 330336 - DNA, 115 bp, Homo sapiens; identical to SEQ ID NO: 277549
  chr22:50882626-50882741
  hypo

SEQ ID NO: 330337 - DNA, 197 bp, Homo sapiens; identical to SEQ ID NO: 221005
  chr22:50884059-50884256
  hypo

SEQ ID NO: 330338 - DNA, 550 bp, Homo sapiens; identical to SEQ ID NO: 277551
  chr22:50885391-50885941
  hypo

SEQ ID NO: 330339 - DNA, 808 bp, Homo sapiens; identical to SEQ ID NO: 277552
  chr22:50894558-50895366
  hypo

SEQ ID NO: 330340 - DNA, 158 bp, Homo sapiens; identical to SEQ ID NO: 277553
  chr22:50897897-50898055
  hypo

SEQ ID NO: 330341 - DNA, 494 bp, Homo sapiens
  chr22:50899708-50900202
  hypo
tccccaacttaggacaggccaggcagagtcagaagcaaggaaggtaagggggggggggtcccagaatctcagggtaccacagttatggggaatcccaagtgggtggggaaggagcagacaaaggcccgtttcccacgggcacccagaacccccgagaaaagggagagggaggcagggaaagcccatccatcccaaagacctgggggagagggggcgacagggccagagagtctgcaggctcacccagggggtccgtgggcatccccgtgaagatgacccggtacgtggtgaggaagacggcgccctcagctgggagcaatgctggtcccccagcactgccccccgcgccctcctcacgcccatccggcagcaggtagacgcgcaggccgtccagcacacactcctcacccggcagcaggcgcggccgcagcagcttgggctgctcgaaaacaagagcaggagctcaggatgcagcccgggccttgggcccccgc

SEQ ID NO: 330342 - DNA, 67 bp, Homo sapiens
  chr22:50900232-50900299
  hypo
tgggcggcagcctccggctctcccgctgcacggcctccagggtctcgatgtgcatctggacaatgtc

SEQ ID NO: 330343 - DNA, 137 bp, Homo sapiens; identical to SEQ ID NO: 277555
  chr22:50918772-50918909
  hypo

SEQ ID NO: 330344 - DNA, 80 bp, Homo sapiens; identical to SEQ ID NO: 226417
  chr22:50920028-50920108
  hypo

SEQ ID NO: 330345 - DNA, 494 bp, Homo sapiens; identical to SEQ ID NO: 277556
  chr22:50921117-50921611
  hypo

SEQ ID NO: 330346 - DNA, 302 bp, Homo sapiens
  chr22:50922303-50922605
  hypo
cttccctggggggacgggggactcacatgtgcctgccactggagcctctcaaccgtccagcagaacacggggttcagaaagggctccttctgctatttagcgaacactgagcatttaatttacaaatgtttgctagggtcaccctctcggccatcccacgagggtcgccatgatcaccccaactctagaggccgcagcagagctcaggacattcccccacagagcttgcccctcagttcctacctccaagggggagggtcctggaagcgcccacccaggcgccgcccctgtgcttgctcccc

SEQ ID NO: 330347 - DNA, 116 bp, Homo sapiens; identical to SEQ ID NO: 221013
  chr22:50922663-50922779
  hypo

SEQ ID NO: 330348 - DNA, 95 bp, Homo sapiens; identical to SEQ ID NO: 277558
  chr22:50925263-50925358
  hypo

SEQ ID NO: 330349 - DNA, 139 bp, Homo sapiens
  chr22:50938934-50939073
  hypo
cacacaaaagcttgcatatccaatgttcacagcagcactattcacataggaaaggcggaagccacgcaagcgtctatcgatatacgaatgaataaggacagggaaaacgtggcccctccgtacactggactgactcagc

SEQ ID NO: 330350 - DNA, 33 bp, Homo sapiens
  chr22:50939111-50939144
  hypo
gtgtggccttgaaaacaccgtgctgagtgaaag

SEQ ID NO: 330351 - DNA, 374 bp, Homo sapiens; identical to SEQ ID NO: 221014
  chr22:50942719-50943093
  hypo

SEQ ID NO: 330352 - DNA, 323 bp, Homo sapiens
  chr22:50943412-50943735
  hypo
cctggagacaggtgggaggttctcagggctgccctgcccccagcccatcccccagccctgcagcgctacccaccaggctaatcaggaacaaggccacggtcgcagtgcccacaagggacagttggactacagcactgagcttccgtagccagccccgcacctgggtccacctgtgggcaaggacccaaggtcgtcaggccggccctgcacacctgtgccccctccctgcttcctgggccatgtacctccacagggcactcagcagctcccagaccagggaggccacacccagccacacagtgggcagcgtcagtgtcttcagc

SEQ ID NO: 330353 - DNA, 223 bp, Homo sapiens
  chr22:50944142-50944365
  hypo
agccaggtgctggtcgtccagcagcgcagtggtaagcaccagcgtcatcaggttgaagaagttgtagttgccggtgatgataatcaggacctgcagcagcacctgggggcggcccgctctcagtgctcccggagactgacgcctggccccgtggcaggcacccacctccaccctgcagggtgcatccctctgctacaaggccttcccaacagcggttgccagc

SEQ ID NO: 330354 - DNA, 124 bp, Homo sapiens; identical to SEQ ID NO: 221017
  chr22:50944716-50944840
  hypo

SEQ ID NO: 330355 - DNA, 168 bp, Homo sapiens
  chr22:50954809-50954977
  hypo
tgccctggaagaagcgagtgcagactgggccttggattccccctgtctttgtgttgtttcttgcagctggatcagatctgcatttcttttgacgaaggcaagaccacaatgaacttcattgaggcagcgttgttgatccagggctctgcctgcgtctacagtaagaag

SEQ ID NO: 330356 - DNA, 251 bp, Homo sapiens; identical to SEQ ID NO: 277564
  chr22:50961988-50962239
  hypo

SEQ ID NO: 330357 - DNA, 639 bp, Homo sapiens; identical to SEQ ID NO: 206191
  chr22:50970392-50971031
  hypo

SEQ ID NO: 330358 - DNA, 95 bp, Homo sapiens; identical to SEQ ID NO: 277565
  chr22:51010439-51010534
  hypo

SEQ ID NO: 330359 - DNA, 78 bp, Homo sapiens; identical to SEQ ID NO: 221019
  chr22:51023316-51023394
  hypo

SEQ ID NO: 330360 - DNA, 234 bp, Homo sapiens; identical to SEQ ID NO: 295601
  chr22:51112317-51112551
  hypo

SEQ ID NO: 330361 - DNA, 131 bp, Homo sapiens
  chr22:51144194-51144325
  hypo
gagccagccggcaccgtgacccccgccagcacccttgatcgtctcctgaggccctgattctgggggttcccagggcccctgaggccctgaccgcccgcccccccccccccgcactccctgagctccttgag

SEQ ID NO: 330362 - DNA, 149 bp, Homo sapiens
  chr22:51144435-51144584
  hypo
cacctggccacgccgcgccgcctgctgctggacaggaggtccaaggcctccctcttctttgcagccccaccgccccccaagagggcccccagcaccacactgaccctgcgctccaagtccatgacagctgagctcgaggaacttggtga

SEQ ID NO: 330363 - DNA, 269 bp, Homo sapiens; identical to SEQ ID NO: 221021
  chr22:51149171-51149440
  hypo

SEQ ID NO: 330364 - DNA, 256 bp, Homo sapiens; identical to SEQ ID NO: 277569
  chr22:51160332-51160588
  hypo

SEQ ID NO: 330365 - DNA, 198 bp, Homo sapiens; identical to SEQ ID NO: 221023
  chr22:51171376-51171574
  hypo

SEQ ID NO: 330366 - DNA, 129 bp, Homo sapiens; identical to SEQ ID NO: 206196
  chrX:2846678-2846807
  hypo

SEQ ID NO: 330367 - DNA, 219 bp, Homo sapiens; identical to SEQ ID NO: 295607
  chrX:2846856-2847075
  hypo

SEQ ID NO: 330368 - DNA, 329 bp, Homo sapiens; identical to SEQ ID NO: 295608
  chrX:2847196-2847525
  hypo

SEQ ID NO: 330369 - DNA, 80 bp, Homo sapiens
  chrX:2931093-2931173
  hypo
tgtctgcctacaacctgaaccgtgccttcacgtggcttggtgggtcaggtggtcttcccaccaatgaaacgacttttgcc

SEQ ID NO: 330370 - DNA, 148 bp, Homo sapiens; identical to SEQ ID NO: 277572
  chrX:3609054-3609202
  hypo

SEQ ID NO: 330371 - DNA, 60 bp, Homo sapiens; identical to SEQ ID NO: 277573
  chrX:3609232-3609292
  hypo

SEQ ID NO: 330372 - DNA, 42 bp, Homo sapiens; identical to SEQ ID NO: 277577
  chrX:4637572-4637614
  hypo

SEQ ID NO: 330373 - DNA, 120 bp, Homo sapiens; identical to SEQ ID NO: 277578
  chrX:4643432-4643552
  hypo

SEQ ID NO: 330374 - DNA, 139 bp, Homo sapiens; identical to SEQ ID NO: 277579
  chrX:6105440-6105579
  hypo

SEQ ID NO: 330375 - DNA, 36 bp, Homo sapiens; identical to SEQ ID NO: 277580
  chrX:6617024-6617060
  hypo

SEQ ID NO: 330376 - DNA, 259 bp, Homo sapiens; identical to SEQ ID NO: 277581
  chrX:8769255-8769514
  hypo

SEQ ID NO: 330377 - DNA, 156 bp, Homo sapiens; identical to SEQ ID NO: 277582
  chrX:9214925-9215081
  hypo

SEQ ID NO: 330378 - DNA, 33 bp, Homo sapiens; identical to SEQ ID NO: 277583
  chrX:9289523-9289556
  hypo

SEQ ID NO: 330379 - DNA, 610 bp, Homo sapiens; identical to SEQ ID NO: 295622
  chrX:9432816-9433426
  hypo

SEQ ID NO: 330380 - DNA, 241 bp, Homo sapiens; identical to SEQ ID NO: 206206
  chrX:9433471-9433712
  hypo

SEQ ID NO: 330381 - DNA, 42 bp, Homo sapiens; identical to SEQ ID NO: 277584
  chrX:9656568-9656610
  hypo

SEQ ID NO: 330382 - DNA, 458 bp, Homo sapiens; identical to SEQ ID NO: 277585
  chrX:9863402-9863860
  hypo

SEQ ID NO: 330383 - DNA, 42 bp, Homo sapiens; identical to SEQ ID NO: 277586
  chrX:9874884-9874926
  hypo

SEQ ID NO: 330384 - DNA, 44 bp, Homo sapiens; identical to SEQ ID NO: 206208
  chrX:10023769-10023813
  hypo

SEQ ID NO: 330385 - DNA, 715 bp, Homo sapiens; identical to SEQ ID NO: 221028
  chrX:10085163-10085878
  hypo

SEQ ID NO: 330386 - DNA, 180 bp, Homo sapiens; identical to SEQ ID NO: 277588
  chrX:10092559-10092739
  hypo

SEQ ID NO: 330387 - DNA, 71 bp, Homo sapiens; identical to SEQ ID NO: 277589
  chrX:10102566-10102637
  hypo

SEQ ID NO: 330388 - DNA, 161 bp, Homo sapiens; identical to SEQ ID NO: 226428
  chrX:11776190-11776351
  hypo

SEQ ID NO: 330389 - DNA, 115 bp, Homo sapiens; identical to SEQ ID NO: 221029
  chrX:11783710-11783825
  hypo

SEQ ID NO: 330390 - DNA, 42 bp, Homo sapiens; identical to SEQ ID NO: 221030
  chrX:13062333-13062375
  hypo

SEQ ID NO: 330391 - DNA, 92 bp, Homo sapiens; identical to SEQ ID NO: 277592
  chrX:15766033-15766125
  hypo

SEQ ID NO: 330392 - DNA, 32 bp, Homo sapiens; identical to SEQ ID NO: 277593
  chrX:15806008-15806040
  hypo

SEQ ID NO: 330393 - DNA, 134 bp, Homo sapiens; identical to SEQ ID NO: 206213
  chrX:15808573-15808707
  hypo

SEQ ID NO: 330394 - DNA, 99 bp, Homo sapiens; identical to SEQ ID NO: 206214
  chrX:15809046-15809145
  hypo

SEQ ID NO: 330395 - DNA, 82 bp, Homo sapiens; identical to SEQ ID NO: 206215
  chrX:15817994-15818076
  hypo

SEQ ID NO: 330396 - DNA, 122 bp, Homo sapiens; identical to SEQ ID NO: 206216
  chrX:15821797-15821919
  hypo

SEQ ID NO: 330397 - DNA, 87 bp, Homo sapiens; identical to SEQ ID NO: 206217
  chrX:15822233-15822320
  hypo

SEQ ID NO: 330398 - DNA, 39 bp, Homo sapiens; identical to SEQ ID NO: 206218
  chrX:15826355-15826394
  hypo

SEQ ID NO: 330399 - DNA, 122 bp, Homo sapiens; identical to SEQ ID NO: 206219
  chrX:15827322-15827444
  hypo

SEQ ID NO: 330400 - DNA, 214 bp, Homo sapiens; identical to SEQ ID NO: 206220
  chrX:15833799-15834013
  hypo

SEQ ID NO: 330401 - DNA, 56 bp, Homo sapiens; identical to SEQ ID NO: 206221
  chrX:15836709-15836765
  hypo

SEQ ID NO: 330402 - DNA, 110 bp, Homo sapiens; identical to SEQ ID NO: 206222
  chrX:15838329-15838439
  hypo

SEQ ID NO: 330403 - DNA, 535 bp, Homo sapiens; identical to SEQ ID NO: 206223
  chrX:15840848-15841383
  hypo

SEQ ID NO: 330404 - DNA, 224 bp, Homo sapiens; identical to SEQ ID NO: 206224
  chrX:16730628-16730852
  hypo

SEQ ID NO: 330405 - DNA, 56 bp, Homo sapiens; identical to SEQ ID NO: 206225
  chrX:16730902-16730958
  hypo

SEQ ID NO: 330406 - DNA, 36 bp, Homo sapiens; identical to SEQ ID NO: 221044
  chrX:16736864-16736900
  hypo

SEQ ID NO: 330407 - DNA, 92 bp, Homo sapiens; identical to SEQ ID NO: 221045
  chrX:18239018-18239110
  hypo

SEQ ID NO: 330408 - DNA, 37 bp, Homo sapiens; identical to SEQ ID NO: 277596
  chrX:18516222-18516259
  hypo

SEQ ID NO: 330409 - DNA, 31 bp, Homo sapiens; identical to SEQ ID NO: 221046
  chrX:19530839-19530870
  hypo

SEQ ID NO: 330410 - DNA, 221 bp, Homo sapiens; identical to SEQ ID NO: 221047
  chrX:20135284-20135505
  hypo

SEQ ID NO: 330411 - DNA, 52 bp, Homo sapiens; identical to SEQ ID NO: 221048
  chrX:20160884-20160936
  hypo

SEQ ID NO: 330412 - DNA, 201 bp, Homo sapiens; identical to SEQ ID NO: 226442
  chrX:23801081-23801282
  hypo

SEQ ID NO: 330413 - DNA, 32 bp, Homo sapiens; identical to SEQ ID NO: 277600
  chrX:24062614-24062646
  hypo

SEQ ID NO: 330414 - DNA, 33 bp, Homo sapiens; identical to SEQ ID NO: 277601
  chrX:24069674-24069707
  hypo

SEQ ID NO: 330415 - DNA, 33 bp, Homo sapiens; identical to SEQ ID NO: 277602
  chrX:24128931-24128964
  hypo

SEQ ID NO: 330416 - DNA, 70 bp, Homo sapiens; identical to SEQ ID NO: 206227
  chrX:27999798-27999868
  hypo

SEQ ID NO: 330417 - DNA, 42 bp, Homo sapiens; identical to SEQ ID NO: 277603
  chrX:33133914-33133956
  hypo

SEQ ID NO: 330418 - DNA, 298 bp, Homo sapiens; identical to SEQ ID NO: 277604
  chrX:34149208-34149506
  hypo

SEQ ID NO: 330419 - DNA, 218 bp, Homo sapiens; identical to SEQ ID NO: 277605
  chrX:39699844-39700062
  hypo

SEQ ID NO: 330420 - DNA, 1155 bp, Homo sapiens; identical to SEQ ID NO: 206230
  chrX:39910498-39911653
  hypo

SEQ ID NO: 330421 - DNA, 157 bp, Homo sapiens; identical to SEQ ID NO: 206231
  chrX:39913138-39913295
  hypo

SEQ ID NO: 330422 - DNA, 78 bp, Homo sapiens; identical to SEQ ID NO: 206232
  chrX:39913508-39913586
  hypo

SEQ ID NO: 330423 - DNA, 146 bp, Homo sapiens; identical to SEQ ID NO: 206233
  chrX:39914620-39914766
  hypo

SEQ ID NO: 330424 - DNA, 167 bp, Homo sapiens; identical to SEQ ID NO: 206234
  chrX:39916407-39916574
  hypo

SEQ ID NO: 330425 - DNA, 273 bp, Homo sapiens; identical to SEQ ID NO: 206235
  chrX:39921382-39921655
  hypo

SEQ ID NO: 330426 - DNA, 326 bp, Homo sapiens; identical to SEQ ID NO: 206236
  chrX:39921998-39922324
  hypo

SEQ ID NO: 330427 - DNA, 345 bp, Homo sapiens; identical to SEQ ID NO: 206237
  chrX:39922860-39923205
  hypo

SEQ ID NO: 330428 - DNA, 264 bp, Homo sapiens; identical to SEQ ID NO: 206238
  chrX:39923588-39923852
  hypo

SEQ ID NO: 330429 - DNA, 187 bp, Homo sapiens; identical to SEQ ID NO: 206239
  chrX:39930225-39930412
  hypo

SEQ ID NO: 330430 - DNA, 54 bp, Homo sapiens; identical to SEQ ID NO: 206240
  chrX:39930889-39930943
  hypo

SEQ ID NO: 330431 - DNA, 2832 bp, Homo sapiens; identical to SEQ ID NO: 206241
  chrX:39931601-39934433
  hypo

SEQ ID NO: 330432 - DNA, 79 bp, Homo sapiens; identical to SEQ ID NO: 206242
  chrX:39935706-39935785
  hypo

SEQ ID NO: 330433 - DNA, 126 bp, Homo sapiens; identical to SEQ ID NO: 206243
  chrX:39937096-39937222
  hypo

SEQ ID NO: 330434 - DNA, 1950 bp, Homo sapiens; identical to SEQ ID NO: 295678
  chrX:39954906-39956856
  hypo

SEQ ID NO: 330435 - DNA, 626 bp, Homo sapiens; identical to SEQ ID NO: 295689
  chrX:40014669-40015295
  hypo

SEQ ID NO: 330436 - DNA, 667 bp, Homo sapiens; identical to SEQ ID NO: 295697
  chrX:40035057-40035724
  hypo

SEQ ID NO: 330437 - DNA, 730 bp, Homo sapiens; identical to SEQ ID NO: 134528
  chrX:40035852-40036582
  hypo

SEQ ID NO: 330438 - DNA, 184 bp, Homo sapiens; identical to SEQ ID NO: 277606
  chrX:40247665-40247849
  hypo

SEQ ID NO: 330439 - DNA, 44 bp, Homo sapiens; identical to SEQ ID NO: 277607
  chrX:40631233-40631277
  hypo

SEQ ID NO: 330440 - DNA, 43 bp, Homo sapiens; identical to SEQ ID NO: 221067
  chrX:40631517-40631560
  hypo

SEQ ID NO: 330441 - DNA, 291 bp, Homo sapiens; identical to SEQ ID NO: 226463
  chrX:41112860-41113151
  hypo

SEQ ID NO: 330442 - DNA, 97 bp, Homo sapiens
  chrX:41331600-41331697
  hypo
gaagttggccacatccatgtcggtggctccaaagtgggtggccacacgcacaccctcgtgcaatgtgaagctcacctgatgactcaccatggccagc

SEQ ID NO: 330443 - DNA, 310 bp, Homo sapiens; identical to SEQ ID NO: 221068
  chrX:41331751-41332061
  hypo

SEQ ID NO: 330444 - DNA, 104 bp, Homo sapiens; identical to SEQ ID NO: 277610
  chrX:44224968-44225072
  hypo

SEQ ID NO: 330445 - DNA, 32 bp, Homo sapiens; identical to SEQ ID NO: 221069
  chrX:44730007-44730039
  hypo

SEQ ID NO: 330446 - DNA, 38 bp, Homo sapiens; identical to SEQ ID NO: 277613
  chrX:44754637-44754675
  hypo

SEQ ID NO: 330447 - DNA, 36 bp, Homo sapiens; identical to SEQ ID NO: 221070
  chrX:44760627-44760663
  hypo

SEQ ID NO: 330448 - DNA, 42 bp, Homo sapiens; identical to SEQ ID NO: 277615
  chrX:44799977-44800019
  hypo

SEQ ID NO: 330449 - DNA, 99 bp, Homo sapiens; identical to SEQ ID NO: 277616
  chrX:44865332-44865431
  hypo

SEQ ID NO: 330450 - DNA, 36 bp, Homo sapiens; identical to SEQ ID NO: 277617
  chrX:44909558-44909594
  hypo

SEQ ID NO: 330451 - DNA, 88 bp, Homo sapiens; identical to SEQ ID NO: 221071
  chrX:44922874-44922962
  hypo

SEQ ID NO: 330452 - DNA, 31 bp, Homo sapiens; identical to SEQ ID NO: 221072
  chrX:44923014-44923045
  hypo

SEQ ID NO: 330453 - DNA, 36 bp, Homo sapiens; identical to SEQ ID NO: 277619
  chrX:47181621-47181657
  hypo

SEQ ID NO: 330454 - DNA, 147 bp, Homo sapiens; identical to SEQ ID NO: 277620
  chrX:55115418-55115565
  hypo

SEQ ID NO: 330455 - DNA, 34 bp, Homo sapiens; identical to SEQ ID NO: 277621
  chrX:57609886-57609920
  hypo

SEQ ID NO: 330456 - DNA, 82 bp, Homo sapiens; identical to SEQ ID NO: 277622
  chrX:57705240-57705322
  hypo

SEQ ID NO: 330457 - DNA, 698 bp, Homo sapiens; identical to SEQ ID NO: 277623
  chrX:64771578-64772276
  hypo

SEQ ID NO: 330458 - DNA, 197 bp, Homo sapiens; identical to SEQ ID NO: 277624
  chrX:65007842-65008039
  hypo

SEQ ID NO: 330459 - DNA, 33 bp, Homo sapiens; identical to SEQ ID NO: 277625
  chrX:70442913-70442946
  hypo

SEQ ID NO: 330460 - DNA, 39 bp, Homo sapiens; identical to SEQ ID NO: 277626
  chrX:70532323-70532362
  hypo

SEQ ID NO: 330461 - DNA, 317 bp, Homo sapiens; identical to SEQ ID NO: 277627
  chrX:70797825-70798142
  hypo

SEQ ID NO: 330462 - DNA, 76 bp, Homo sapiens; identical to SEQ ID NO: 221074
  chrX:71485135-71485211
  hypo

SEQ ID NO: 330463 - DNA, 562 bp, Homo sapiens; identical to SEQ ID NO: 206269
  chrX:73163983-73164545
  hypo

SEQ ID NO: 330464 - DNA, 38 bp, Homo sapiens; identical to SEQ ID NO: 277629
  chrX:102232746-102232784
  hypo

SEQ ID NO: 330465 - DNA, 87 bp, Homo sapiens; identical to SEQ ID NO: 295729
  chrX:123094090-123094177
  hypo

SEQ ID NO: 330466 - DNA, 98 bp, Homo sapiens; identical to SEQ ID NO: 134582
  chrX:123094335-123094433
  hypo

SEQ ID NO: 330467 - DNA, 223 bp, Homo sapiens; identical to SEQ ID NO: 206276
  chrX:123094493-123094716
  hypo

SEQ ID NO: 330468 - DNA, 124 bp, Homo sapiens; identical to SEQ ID NO: 206277
  chrX:123095161-123095285
  hypo

SEQ ID NO: 330469 - DNA, 151 bp, Homo sapiens; identical to SEQ ID NO: 206278
  chrX:123095555-123095706
  hypo

SEQ ID NO: 330470 - DNA, 65 bp, Homo sapiens; identical to SEQ ID NO: 206279
  chrX:123155216-123155281
  hypo

SEQ ID NO: 330471 - DNA, 141 bp, Homo sapiens; identical to SEQ ID NO: 206280
  chrX:123156380-123156521
  hypo

SEQ ID NO: 330472 - DNA, 79 bp, Homo sapiens; identical to SEQ ID NO: 206281
  chrX:123159689-123159768
  hypo

SEQ ID NO: 330473 - DNA, 165 bp, Homo sapiens; identical to SEQ ID NO: 206282
  chrX:123164810-123164975
  hypo

SEQ ID NO: 330474 - DNA, 97 bp, Homo sapiens; identical to SEQ ID NO: 206283
  chrX:123171376-123171473
  hypo

SEQ ID NO: 330475 - DNA, 77 bp, Homo sapiens; identical to SEQ ID NO: 206284
  chrX:123176418-123176495
  hypo

SEQ ID NO: 330476 - DNA, 205 bp, Homo sapiens; identical to SEQ ID NO: 206285
  chrX:123179013-123179218
  hypo

SEQ ID NO: 330477 - DNA, 152 bp, Homo sapiens; identical to SEQ ID NO: 206286
  chrX:123181203-123181355
  hypo

SEQ ID NO: 330478 - DNA, 74 bp, Homo sapiens; identical to SEQ ID NO: 206287
  chrX:123182854-123182928
  hypo

SEQ ID NO: 330479 - DNA, 135 bp, Homo sapiens; identical to SEQ ID NO: 206288
  chrX:123184024-123184159
  hypo

SEQ ID NO: 330480 - DNA, 278 bp, Homo sapiens; identical to SEQ ID NO: 206289
  chrX:123184966-123185244
  hypo

SEQ ID NO: 330481 - DNA, 108 bp, Homo sapiens; identical to SEQ ID NO: 206290
  chrX:123189977-123190085
  hypo

SEQ ID NO: 330482 - DNA, 112 bp, Homo sapiens; identical to SEQ ID NO: 206291
  chrX:123191715-123191827
  hypo

SEQ ID NO: 330483 - DNA, 131 bp, Homo sapiens; identical to SEQ ID NO: 206292
  chrX:123195073-123195204
  hypo

SEQ ID NO: 330484 - DNA, 104 bp, Homo sapiens; identical to SEQ ID NO: 206293
  chrX:123195620-123195724
  hypo

SEQ ID NO: 330485 - DNA, 306 bp, Homo sapiens; identical to SEQ ID NO: 206294
  chrX:123196749-123197055
  hypo

SEQ ID NO: 330486 - DNA, 213 bp, Homo sapiens; identical to SEQ ID NO: 206295
  chrX:123197688-123197901
  hypo

SEQ ID NO: 330487 - DNA, 71 bp, Homo sapiens; identical to SEQ ID NO: 206296
  chrX:123199725-123199796
  hypo

SEQ ID NO: 330488 - DNA, 262 bp, Homo sapiens; identical to SEQ ID NO: 206297
  chrX:123200024-123200286
  hypo

SEQ ID NO: 330489 - DNA, 93 bp, Homo sapiens; identical to SEQ ID NO: 206298
  chrX:123202413-123202506
  hypo

SEQ ID NO: 330490 - DNA, 175 bp, Homo sapiens; identical to SEQ ID NO: 206299
  chrX:123204998-123205173
  hypo

SEQ ID NO: 330491 - DNA, 140 bp, Homo sapiens; identical to SEQ ID NO: 206300
  chrX:123210181-123210321
  hypo

SEQ ID NO: 330492 - DNA, 102 bp, Homo sapiens; identical to SEQ ID NO: 206301
  chrX:123211806-123211908
  hypo

SEQ ID NO: 330493 - DNA, 150 bp, Homo sapiens; identical to SEQ ID NO: 206302
  chrX:123215228-123215378
  hypo

SEQ ID NO: 330494 - DNA, 133 bp, Homo sapiens; identical to SEQ ID NO: 206303
  chrX:123217270-123217403
  hypo

SEQ ID NO: 330495 - DNA, 224 bp, Homo sapiens; identical to SEQ ID NO: 206304
  chrX:123220396-123220620
  hypo

SEQ ID NO: 330496 - DNA, 390 bp, Homo sapiens; identical to SEQ ID NO: 206305
  chrX:123224424-123224814
  hypo

SEQ ID NO: 330497 - DNA, 127 bp, Homo sapiens; identical to SEQ ID NO: 206306
  chrX:123227867-123227994
  hypo

SEQ ID NO: 330498 - DNA, 78 bp, Homo sapiens; identical to SEQ ID NO: 206307
  chrX:123229221-123229299
  hypo

SEQ ID NO: 330499 - DNA, 2083 bp, Homo sapiens; identical to SEQ ID NO: 206308
  chrX:123234423-123236506
  hypo

SEQ ID NO: 330500 - DNA, 136 bp, Homo sapiens; identical to SEQ ID NO: 206309
  chrX:129139163-129139299
  hypo

SEQ ID NO: 330501 - DNA, 91 bp, Homo sapiens; identical to SEQ ID NO: 206310
  chrX:129146553-129146644
  hypo

SEQ ID NO: 330502 - DNA, 3264 bp, Homo sapiens; identical to SEQ ID NO: 206311
  chrX:129146925-129150189
  hypo

SEQ ID NO: 330503 - DNA, 177 bp, Homo sapiens; identical to SEQ ID NO: 206312
  chrX:129154948-129155125
  hypo

SEQ ID NO: 330504 - DNA, 81 bp, Homo sapiens; identical to SEQ ID NO: 206313
  chrX:129156871-129156952
  hypo

SEQ ID NO: 330505 - DNA, 392 bp, Homo sapiens; identical to SEQ ID NO: 206314
  chrX:129158962-129159354
  hypo

SEQ ID NO: 330506 - DNA, 227 bp, Homo sapiens; identical to SEQ ID NO: 206315
  chrX:129162609-129162836
  hypo

SEQ ID NO: 330507 - DNA, 222 bp, Homo sapiens; identical to SEQ ID NO: 206316
  chrX:129168429-129168651
  hypo

SEQ ID NO: 330508 - DNA, 167 bp, Homo sapiens; identical to SEQ ID NO: 206317
  chrX:129171341-129171508
  hypo

SEQ ID NO: 330509 - DNA, 148 bp, Homo sapiens; identical to SEQ ID NO: 206318
  chrX:129173111-129173259
  hypo

SEQ ID NO: 330510 - DNA, 78 bp, Homo sapiens; identical to SEQ ID NO: 206319
  chrX:129184691-129184769
  hypo

SEQ ID NO: 330511 - DNA, 157 bp, Homo sapiens; identical to SEQ ID NO: 206320
  chrX:129185834-129185991
  hypo

SEQ ID NO: 330512 - DNA, 2230 bp, Homo sapiens; identical to SEQ ID NO: 206321
  chrX:129189828-129192058
  hypo

SEQ ID NO: 330513 - DNA, 156 bp, Homo sapiens; identical to SEQ ID NO: 206323
  chrX:133507341-133507497
  hypo

SEQ ID NO: 330514 - DNA, 184 bp, Homo sapiens; identical to SEQ ID NO: 206324
  chrX:133511601-133511785
  hypo

SEQ ID NO: 330515 - DNA, 102 bp, Homo sapiens; identical to SEQ ID NO: 206325
  chrX:133512034-133512136
  hypo

SEQ ID NO: 330516 - DNA, 134 bp, Homo sapiens; identical to SEQ ID NO: 206326
  chrX:133527530-133527664
  hypo

SEQ ID NO: 330517 - DNA, 44 bp, Homo sapiens; identical to SEQ ID NO: 206327
  chrX:133527938-133527982
  hypo

SEQ ID NO: 330518 - DNA, 479 bp, Homo sapiens; identical to SEQ ID NO: 206328
  chrX:133547517-133547996
  hypo

SEQ ID NO: 330519 - DNA, 277 bp, Homo sapiens; identical to SEQ ID NO: 206329
  chrX:133549045-133549322
  hypo

SEQ ID NO: 330520 - DNA, 134 bp, Homo sapiens; identical to SEQ ID NO: 206330
  chrX:133551198-133551332
  hypo

SEQ ID NO: 330521 - DNA, 130 bp, Homo sapiens; identical to SEQ ID NO: 206331
  chrX:133559230-133559360
  hypo

SEQ ID NO: 330522 - DNA, 3132 bp, Homo sapiens; identical to SEQ ID NO: 206332
  chrX:133559690-133562822
  hypo

SEQ ID NO: 330523 - DNA, 43 bp, Homo sapiens; identical to SEQ ID NO: 277630
  chrX:134059956-134059999
  hypo

SEQ ID NO: 330524 - DNA, 48 bp, Homo sapiens; identical to SEQ ID NO: 277632
  chrX:150560734-150560782
  hypo

SEQ ID NO: 330525 - DNA, 183 bp, Homo sapiens; identical to SEQ ID NO: 277633
  chrX:150571593-150571776
  hypo

SEQ ID NO: 330526 - DNA, 393 bp, Homo sapiens; identical to SEQ ID NO: 277634
  chrX:151306512-151306905
  hypo

SEQ ID NO: 330527 - DNA, 153 bp, Homo sapiens; identical to SEQ ID NO: 277635
  chrX:151306965-151307118
  hypo

SEQ ID NO: 330528 - DNA, 40 bp, Homo sapiens; identical to SEQ ID NO: 221133
  chrY:5077817-5077857
  hypo

SEQ ID NO: 330529 - DNA, 61 bp, Homo sapiens; identical to SEQ ID NO: 277637
  chrY:6790937-6790998
  hypo

SEQ ID NO: 330530 - DNA, 79 bp, Homo sapiens; identical to SEQ ID NO: 221134
  chrY:7525418-7525497
  hypo

SEQ ID NO: 330531 - DNA, 168 bp, Homo sapiens; identical to SEQ ID NO: 277639
  chrY:8147742-8147910
  hypo

SEQ ID NO: 330532 - DNA, 103 bp, Homo sapiens; identical to SEQ ID NO: 277640
  chrY:14488010-14488113
  hypo

SEQ ID NO: 330533 - DNA, 92 bp, Homo sapiens; identical to SEQ ID NO: 277641
  chrY:14513075-14513167
  hypo

SEQ ID NO: 330534 - DNA, 92 bp, Homo sapiens; identical to SEQ ID NO: 277642
  chrY:14513347-14513439
  hypo

SEQ ID NO: 330535 - DNA, 93 bp, Homo sapiens; identical to SEQ ID NO: 277643
  chrY:14532158-14532251
  hypo

SEQ ID NO: 330536 - DNA, 449 bp, Homo sapiens; identical to SEQ ID NO: 277644
  chrY:14776354-14776803
  hypo

SEQ ID NO: 330537 - DNA, 148 bp, Homo sapiens; identical to SEQ ID NO: 221135
  chrY:14777103-14777251
  hypo

SEQ ID NO: 330538 - DNA, 135 bp, Homo sapiens; identical to SEQ ID NO: 221136
  chrY:15015981-15016116
  hypo

SEQ ID NO: 330539 - DNA, 180 bp, Homo sapiens; identical to SEQ ID NO: 221137
  chrY:15446038-15446218
  hypo

SEQ ID NO: 330540 - DNA, 45 bp, Homo sapiens; identical to SEQ ID NO: 277648
  chrY:16001309-16001354
  hypo

SEQ ID NO: 330541 - DNA, 45 bp, Homo sapiens; identical to SEQ ID NO: 277649
  chrY:16001474-16001519
  hypo

SEQ ID NO: 330542 - DNA, 1097 bp, Homo sapiens; identical to SEQ ID NO: 295806
  chrY:16636060-16637157
  hypo

SEQ ID NO: 330543 - DNA, 222 bp, Homo sapiens
  chrY:21205113-21205335
  hypo
tcctcgcagcctccactggaacaatagtttcccttgttgaggctgctaccctggaagcgaggagaggcggggacgaaggaggagccgagtgtccatcttgcgcatctggcctcccgcatctaggcacatgtttaagatgcttacacagcaggtgccatgctaactgctggcagaaggaatcccgccttcttgcatgcaggcactcgccgggcttgggaaaga

SEQ ID NO: 330544 - DNA, 338 bp, Homo sapiens; identical to SEQ ID NO: 277651
  chrY:21208477-21208815
  hypo

SEQ ID NO: 330545 - DNA, 152 bp, Homo sapiens; identical to SEQ ID NO: 221140
  chrY:21226202-21226354
  hypo

SEQ ID NO: 330546 - DNA, 82 bp, Homo sapiens; identical to SEQ ID NO: 277653
  chrY:21713517-21713599
  hypo

SEQ ID NO: 330547 - DNA, 218 bp, Homo sapiens; identical to SEQ ID NO: 277654
  chrY:22914872-22915090
  hypo

SEQ ID NO: 330548 - DNA, 123 bp, Homo sapiens
  chrY:22918582-22918705
  hypo
gcagttgttacagctgaagataaagacattttactgttaactgagacgagtttctctgaaaaagtttggtgtctttttcaggcccggggccccaagaagcacttgaagcgtgttgcagcgccg

SEQ ID NO: 330549 - DNA, 55 bp, Homo sapiens; identical to SEQ ID NO: 221141
  chrY:23568831-23568886
  hypo

SEQ ID NO: 330550 - DNA, 103 bp, Homo sapiens; identical to SEQ ID NO: 277657
  AC133920.2_81912-122260:1986-2089
  hypo

SEQ ID NO: 330551 - DNA, 166 bp, Homo sapiens; identical to SEQ ID NO: 277658
  AC153808.1_1-20788:1301-1467
  hypo

SEQ ID NO: 330552 - DNA, 258 bp, Homo sapiens; identical to SEQ ID NO: 221142
  AC153808.1_1-20788:20324-20582
  hypo

SEQ ID NO: 330553 - DNA, 120 bp, Homo sapiens; identical to SEQ ID NO: 277660
  AC240459.2_22426-31906:3389-3509
  hypo

SEQ ID NO: 330554 - DNA, 180 bp, Homo sapiens; identical to SEQ ID NO: 277661
  AEKP01114215.1_1-7461:1444-1624
  hypo

SEQ ID NO: 330555 - DNA, 31 bp, Homo sapiens; identical to SEQ ID NO: 277662
  AEKP01114218.1_1-13684:9403-9434
  hypo

SEQ ID NO: 330556 - DNA, 42 bp, Homo sapiens; identical to SEQ ID NO: 277663
  AEKP01114218.1_1-13684:9682-9724
  hypo

SEQ ID NO: 330557 - DNA, 33 bp, Homo sapiens; identical to SEQ ID NO: 277664
  AEKP01114218.1_1-13684:12132-12165
  hypo

SEQ ID NO: 330558 - DNA, 246 bp, Homo sapiens; identical to SEQ ID NO: 221143
  AEKP01149809.1_1-6354:1325-1571
  hypo

SEQ ID NO: 330559 - DNA, 74 bp, Homo sapiens; identical to SEQ ID NO: 277667
  AEKP01160137.1_1408-4031:1582-1656
  hypo

SEQ ID NO: 330560 - DNA, 116 bp, Homo sapiens; identical to SEQ ID NO: 221144
  AEKP01166227.1_44013-111583:41310-41426
  hypo

SEQ ID NO: 330561 - DNA, 166 bp, Homo sapiens; identical to SEQ ID NO: 277669
  AEKP01166227.1_44013-111583:53194-53360
  hypo

SEQ ID NO: 330562 - DNA, 82 bp, Homo sapiens; identical to SEQ ID NO: 221145
  AEKP01172922.1_98-3151:2030-2112
  hypo

SEQ ID NO: 330563 - DNA, 151 bp, Homo sapiens; identical to SEQ ID NO: 277671
  AEKP01184864.1_3582-5885:476-627
  hypo

SEQ ID NO: 330564 - DNA, 58 bp, Homo sapiens; identical to SEQ ID NO: 277672
  AEKP01188815.1_1-4777:3487-3545
  hypo

SEQ ID NO: 330565 - DNA, 35 bp, Homo sapiens; identical to SEQ ID NO: 277673
  AEKP01209288.1_3835-9918:5050-5085
  hypo

SEQ ID NO: 330566 - DNA, 120 bp, Homo sapiens; identical to SEQ ID NO: 277674
  AEKP01212943.1_1-3701:1910-2030
  hypo

SEQ ID NO: 330567 - DNA, 93 bp, Homo sapiens; identical to SEQ ID NO: 277675
  AEKP01213516.1_1-2586:271-364
  hypo

SEQ ID NO: 330568 - DNA, 80 bp, Homo sapiens; identical to SEQ ID NO: 221146
  AEKP01221093.1_87-1602:655-735
  hypo

SEQ ID NO: 330569 - DNA, 120 bp, Homo sapiens; identical to SEQ ID NO: 221147
  AEKP01221093.1_87-1602:855-975
  hypo

SEQ ID NO: 330570 - DNA, 74 bp, Homo sapiens; identical to SEQ ID NO: 277679
  AL162252.17_162460-176678:8567-8641
  hypo

SEQ ID NO: 330571 - DNA, 112 bp, Homo sapiens; identical to SEQ ID NO: 277680
  FP565324.3_2001-29640:15327-15439
  hypo

SEQ ID NO: 330572 - DNA, 253 bp, Homo sapiens; identical to SEQ ID NO: 277681
  GL000194.1:58620-58873
  hypo

SEQ ID NO: 330573 - DNA, 32 bp, Homo sapiens; identical to SEQ ID NO: 221148
  GL000195.1:80192-80224
  hypo

SEQ ID NO: 330574 - DNA, 120 bp, Homo sapiens; identical to SEQ ID NO: 277683
  GL000225.1:79485-79605
  hypo

SEQ ID NO: 330575 - DNA, 62 bp, Homo sapiens; identical to SEQ ID NO: 277684
  GL383535.1:198019-198081
  hypo

SEQ ID NO: 330576 - DNA, 7860 bp, Homo sapiens; identical to SEQ ID NO: 58444
  HPV16:0-7860
  hypo

SEQ ID NO: 330577 - DNA, 7800 bp, Homo sapiens; identical to SEQ ID NO: 58445
  HPV18:0-7800
  hypo

SEQ ID NO: 330578 - DNA, 116 bp, Homo sapiens; identical to SEQ ID NO: 221149
  NW_001838014.1_249000-295694:3953-4069
  hypo

SEQ ID NO: 330579 - DNA, 54 bp, Homo sapiens; identical to SEQ ID NO: 221150
  NW_001838014.1_249000-295694:7052-7106
  hypo

SEQ ID NO: 330580 - DNA, 158 bp, Homo sapiens; identical to SEQ ID NO: 221151
  NW_001838056.1_145425-224902:38581-38739
  hypo

SEQ ID NO: 330581 - DNA, 212 bp, Homo sapiens; identical to SEQ ID NO: 221152
  NW_001838286.2_1380778-1470498:80826-81038
  hypo

SEQ ID NO: 330582 - DNA, 1231 bp, Homo sapiens; identical to SEQ ID NO: 277689
  NW_001838286.2_1380778-1470498:81098-82329
  hypo

SEQ ID NO: 330583 - DNA, 112 bp, Homo sapiens; identical to SEQ ID NO: 206354
  NW_001838402.2_289580-297926:6069-6181
  hypo

SEQ ID NO: 330584 - DNA, 97 bp, Homo sapiens; identical to SEQ ID NO: 221155
  NW_001838987.1_19978397-19979692:120-217
  hypo

SEQ ID NO: 330585 - DNA, 142 bp, Homo sapiens; identical to SEQ ID NO: 221156
  NW_001838993.2_42143-59442:15877-16019
  hypo

SEQ ID NO: 330586 - DNA, 113 bp, Homo sapiens; identical to SEQ ID NO: 277692
  NW_001838998.1_673882-674972:67-180
  hypo

SEQ ID NO: 330587 - DNA, 198 bp, Homo sapiens; identical to SEQ ID NO: 277693
  NW_001839317.1_1572-22707:16430-16628
  hypo

SEQ ID NO: 330588 - DNA, 88 bp, Homo sapiens; identical to SEQ ID NO: 277694
  NW_001839407.1_18933-24809:4220-4308
  hypo

SEQ ID NO: 330589 - DNA, 207 bp, Homo sapiens; identical to SEQ ID NO: 277695
  NW_001839407.1_18933-24809:5028-5235
  hypo

SEQ ID NO: 330590 - DNA, 256 bp, Homo sapiens; identical to SEQ ID NO: 277696
  NW_001839407.1_42766-49957:1426-1682
  hypo

SEQ ID NO: 330591 - DNA, 180 bp, Homo sapiens; identical to SEQ ID NO: 277697
  NW_001839407.1_50257-55859:1427-1607
  hypo

SEQ ID NO: 330592 - DNA, 120 bp, Homo sapiens; identical to SEQ ID NO: 277698
  NW_001839407.1_50257-55859:1667-1787
  hypo

SEQ ID NO: 330593 - DNA, 120 bp, Homo sapiens; identical to SEQ ID NO: 277699
  NW_001839407.1_56047-63507:6752-6872
  hypo

SEQ ID NO: 330594 - DNA, 47 bp, Homo sapiens
  NW_001839407.1_56047-63507:6992-7039
  hypo
cgcgccggcagaggggatcttccaacctgcctgggcatgcggggatt

SEQ ID NO: 330595 - DNA, 34 bp, Homo sapiens
  NW_001839407.1_56047-63507:7078-7112
  hypo
cccaccctcaggctcctcggtggcgtccacacct

SEQ ID NO: 330596 - DNA, 44 bp, Homo sapiens; identical to SEQ ID NO: 277701
  NW_001839407.1_56047-63507:7172-7216
  hypo

SEQ ID NO: 330597 - DNA, 120 bp, Homo sapiens; identical to SEQ ID NO: 277702
  NW_001839595.1_33916-36793:2251-2371
  hypo

SEQ ID NO: 330598 - DNA, 120 bp, Homo sapiens; identical to SEQ ID NO: 277703
  NW_001839595.1_74059-77718:791-911
  hypo

SEQ ID NO: 330599 - DNA, 269 bp, Homo sapiens
  NW_001839603.1_36678-41438:2711-2980
  hypo
cacggtggcagttgggaggttgcaggtgcacgggtgggccgacgacggtggcgtagagttgcagagtaggcgagccgccggaggggtgtcaggcctggacgttgcacgggctcagtctttctcgggacgggtgtctccacctagcccaggcgaggacgcattttccgggggtggtgggtaggggtggggcgggggtggtatggcgccggtggggaggcggaaaggcatgagaagtctgcccgggctgctcctacagctgaggcggatgc

SEQ ID NO: 330600 - DNA, 33 bp, Homo sapiens; identical to SEQ ID NO: 277706
  NW_001839613.1_2341-3640:87-120
  hypo

SEQ ID NO: 330601 - DNA, 144 bp, Homo sapiens; identical to SEQ ID NO: 221157
  NW_001839646.1_1-5206:1404-1548
  hypo

SEQ ID NO: 330602 - DNA, 300 bp, Homo sapiens; identical to SEQ ID NO: 221158
  NW_001839646.1_1-5206:2128-2428
  hypo

SEQ ID NO: 330603 - DNA, 120 bp, Homo sapiens; identical to SEQ ID NO: 277709
  NW_001839647.1_1-2990:356-476
  hypo

SEQ ID NO: 330604 - DNA, 120 bp, Homo sapiens; identical to SEQ ID NO: 277710
  NW_001839651.1_32960-37353:877-997
  hypo

SEQ ID NO: 330605 - DNA, 95 bp, Homo sapiens; identical to SEQ ID NO: 277711
  NW_001839668.1_21493-58548:14916-15011
  hypo

SEQ ID NO: 330606 - DNA, 312 bp, Homo sapiens; identical to SEQ ID NO: 277712
  NW_001839668.1_21493-58548:15041-15353
  hypo

SEQ ID NO: 330607 - DNA, 106 bp, Homo sapiens
  NW_001839668.1_21493-58548:15413-15519
  hypo
gcagctttttgtcgccgcagctgtttgcctcggccgccatggcttgttgcccccctcactgtggcttgttgcccccatcgccccggctttttccgccaccgccccg

SEQ ID NO: 330608 - DNA, 195 bp, Homo sapiens
  NW_001839668.1_21493-58548:15594-15789
  hypo
ggctttttgcccccatcaccgtggctttttccacgactccgcggctttttgccgacacggctttttactcccaccaccacaggtttttgccgctgtggctttttcacctcaccatcgcgggtttttgcctccaccgccgtggctttttgcccccactgctgcgggtctgagggcgggatcagcagactcagctgc

SEQ ID NO: 330609 - DNA, 144 bp, Homo sapiens; identical to SEQ ID NO: 221159
  NW_001839689.1_34352-41752:1478-1622
  hypo

SEQ ID NO: 330610 - DNA, 120 bp, Homo sapiens; identical to SEQ ID NO: 221160
  NW_001839689.1_34352-41752:1982-2102
  hypo

SEQ ID NO: 330611 - DNA, 120 bp, Homo sapiens; identical to SEQ ID NO: 277716
  NW_001839689.1_69962-76288:4519-4639
  hypo

SEQ ID NO: 330612 - DNA, 224 bp, Homo sapiens; identical to SEQ ID NO: 277717
  NW_001839792.1_1-3553:1228-1452
  hypo

SEQ ID NO: 330613 - DNA, 120 bp, Homo sapiens; identical to SEQ ID NO: 277718
  NW_001839859.1_35699-41775:4706-4826
  hypo

SEQ ID NO: 330614 - DNA, 120 bp, Homo sapiens; identical to SEQ ID NO: 221161
  NW_001839864.1_130-4387:2039-2159
  hypo

SEQ ID NO: 330615 - DNA, 33 bp, Homo sapiens; identical to SEQ ID NO: 277720
  NW_001840146.1_14915-50612:25838-25871
  hypo

SEQ ID NO: 330616 - DNA, 78 bp, Homo sapiens; identical to SEQ ID NO: 277721
  NW_001840273.1_1-3087:648-726
  hypo

SEQ ID NO: 330617 - DNA, 229 bp, Homo sapiens; identical to SEQ ID NO: 277722
  NW_001840273.1_1-3087:786-1015
  hypo

SEQ ID NO: 330618 - DNA, 152 bp, Homo sapiens
  NW_001840306.1_6328-82586:33362-33514
  hypo
agagaggccaaggcatgagtcgcaacgaaaccccagacaacatcctccgttttcacaagagcggtgcctcccctggtcaccactgcgacccctgcttccagctggcacgagccacacacactgctcatttttctcagcgcctgattgtctgt

SEQ ID NO: 330619 - DNA, 98 bp, Homo sapiens; identical to SEQ ID NO: 277724
  NW_001840669.1_1-3203:1830-1928
  hypo

SEQ ID NO: 330620 - DNA, 87 bp, Homo sapiens; identical to SEQ ID NO: 221162
  NW_001840841.1_1-4205:1699-1786
  hypo

SEQ ID NO: 330621 - DNA, 103 bp, Homo sapiens; identical to SEQ ID NO: 221163
  NW_001840841.1_1-4205:2206-2309
  hypo

SEQ ID NO: 330622 - DNA, 105 bp, Homo sapiens; identical to SEQ ID NO: 277728
  NW_001840841.1_32027-40624:2466-2571
  hypo

SEQ ID NO: 330623 - DNA, 61 bp, Homo sapiens; identical to SEQ ID NO: 221164
  NW_001840859.1_1-2890:1537-1598
  hypo

SEQ ID NO: 330624 - DNA, 137 bp, Homo sapiens; identical to SEQ ID NO: 277730
  NW_001840859.1_78656-82292:1905-2042
  hypo

SEQ ID NO: 330625 - DNA, 406 bp, Homo sapiens; identical to SEQ ID NO: 277731
  NW_001840867.1_34087-92528:38237-38643
  hypo

SEQ ID NO: 330626 - DNA, 120 bp, Homo sapiens; identical to SEQ ID NO: 221165
  NW_001841051.1_73730-82666:506-626
  hypo

SEQ ID NO: 330627 - DNA, 120 bp, Homo sapiens; identical to SEQ ID NO: 221166
  NW_001841051.1_73730-82666:746-866
  hypo

SEQ ID NO: 330628 - DNA, 120 bp, Homo sapiens; identical to SEQ ID NO: 277734
  NW_001841109.1_139-6923:1788-1908
  hypo

SEQ ID NO: 330629 - DNA, 58 bp, Homo sapiens; identical to SEQ ID NO: 277735
  NW_001841138.1_67124-102688:28426-28484
  hypo

SEQ ID NO: 330630 - DNA, 120 bp, Homo sapiens; identical to SEQ ID NO: 221167
  NW_001841145.1_129149-174453:6133-6253
  hypo

SEQ ID NO: 330631 - DNA, 84 bp, Homo sapiens; identical to SEQ ID NO: 277737
  NW_001841145.1_177495-186900:958-1042
  hypo

SEQ ID NO: 330632 - DNA, 164 bp, Homo sapiens
  NW_001841145.1_177495-186900:6349-6513
  hypo
gaaaatccgtcctcccctcggctgggtggagaccccctttccgcgaaacacggtccgcacagcgtacaggcctgacaaccctccagcggctcgcctgctctgtgcctccctgccaccgtcgcccacccgcccatacccctgcatcctcccagctgccaccatgg

SEQ ID NO: 330633 - DNA, 180 bp, Homo sapiens; identical to SEQ ID NO: 277739
  NW_001841145.1_40791-55171:240-420
  hypo

SEQ ID NO: 330634 - DNA, 120 bp, Homo sapiens; identical to SEQ ID NO: 221168
  NW_001841145.1_63352-67863:4022-4142
  hypo

SEQ ID NO: 330635 - DNA, 120 bp, Homo sapiens; identical to SEQ ID NO: 221169
  NW_001841145.1_63352-67863:4202-4322
  hypo

SEQ ID NO: 330636 - DNA, 120 bp, Homo sapiens; identical to SEQ ID NO: 277742
  NW_001841145.1_82-8803:5706-5826
  hypo

SEQ ID NO: 330637 - DNA, 141 bp, Homo sapiens; identical to SEQ ID NO: 221170
  NW_001841145.1_90215-97412:6817-6958
  hypo

SEQ ID NO: 330638 - DNA, 153 bp, Homo sapiens
  NW_001841157.1_1611084-1612812:898-1051
  hypo
cccttggaagctcctgtagtcgatgagtggtttttctttacgggtgttttccaaaatggctaattcctggaacagatgaagccccgaactgctcagaacagcgcgcagacctcttgcctctctactccccaaacctgccggtggttcctcagt

SEQ ID NO: 330639 - DNA, 363 bp, Homo sapiens
  NW_001841157.1_1611084-1612812:1090-1453
  hypo
gcccgcctggagcccaaattccatgtaaggcagggtcgccctcgtgtcccgctgtggctccggtgtccttcccccgtcagattcctacttagaggccctggggggacggagtcatatcgggggacaaacggcggctcaaggtgccttctccggggagattgtctcaagggcaggaggaggcctccccgggcaggtgtggacgggggccccgggcagaagcgtctctcacggtggcccttgtgtccccgcagccgagtggcaggtggcggaggccacagcgctggtgcacacgctggactgctggtccgtggtgcagacaatggtcgtgtccaccaaaacgccggacaggaagctcatctttgg

SEQ ID NO: 330640 - DNA, 265 bp, Homo sapiens; identical to SEQ ID NO: 277745
  NW_001841507.1_62-5931:3856-4121
  hypo

SEQ ID NO: 330641 - DNA, 165 bp, Homo sapiens; identical to SEQ ID NO: 277746
  NW_001841533.1_1-11450:7730-7895
  hypo

SEQ ID NO: 330642 - DNA, 120 bp, Homo sapiens; identical to SEQ ID NO: 221171
  NW_001842224.1_80-3146:1734-1854
  hypo

SEQ ID NO: 330643 - DNA, 178 bp, Homo sapiens; identical to SEQ ID NO: 277748
  NW_001842432.1_1-179261:39824-40002
  hypo

SEQ ID NO: 330644 - DNA, 143 bp, Homo sapiens
  NW_001842432.1_1-179261:102976-103119
  hypo
ccagttttggagaagcacctcgttcctgatggaggccgtgggcctctttgtcctcgcttaccaggcagcagctccagccattctcagccccaccggtgggtgccgccttccatcaggccaaagactttccgaaactgcccttc

SEQ ID NO: 330645 - DNA, 83 bp, Homo sapiens
  NW_001842432.1_1-179261:103214-103297
  hypo
ctggaggtccctgagccgggggttgggaggccaatccatcggtgcagtgccgggtgcaggccgcagtctcaaaagtgcttgga

SEQ ID NO: 330646 - DNA, 135 bp, Homo sapiens
  chr1:999594-999729
  hyper
cgggcgcctgtctggcaaggaggctgagaagctgctgctgcagaaggggcatccgggcagcttcctggtgcacatgagtcagagcgatcctgggggcttcccgctgtcagcgctgacgcaagggtgggacgaggc

SEQ ID NO: 330647 - DNA, 365 bp, Homo sapiens
  chr1:1181916-1182281
  hyper
cgcgggaggacgcgctggcggtggcgttggggggatctgcgcgctggccaggctgctgcgtcctctgtgcctcccgccgggccccgacgcccccgaggagcacgagctgcggcccgaggaggaccacgaccgcggcccaggcccagcgccgcatggctccgtcccgaggcggctcagcgcggcgagtctcggcgccagggcgcagtcatggggacggccggcgctcagagcccccgcgcgggggcgaggcccaggggcgcgcccggcctccgccgctgcatgtctgcgcggacctgcccggaacggcggcgcgacggcgctcaggtccccccggggtcccgctccagcccccgctcccagccccc

SEQ ID NO: 330648 - DNA, 958 bp, Homo sapiens; identical to SEQ ID NO: 226572
  chr1:1475244-1476202
  hyper

SEQ ID NO: 330649 - DNA, 531 bp, Homo sapiens
  chr1:1534831-1535362
  hyper
cgtcatggccaccacgatgtcctgcatgccggccggctcggcggtgaactccacgcactcggccggctcgggggtctctggcgcggcggcggcgggcccagcgcgcagcggcagcggctgcaggcacaggcggtagaggacgctgtcgtgcacgtcgggcagcaggtagtcgcggcaggaggccccgaggagcacgcgctcgcacgggaagcgcgtgtaggcgccgcgccacgagcagttgagcgcgaaggcgcgcacgcggcgcgcggcggccggggccaggcgccactgcaggaggacgctgcggttgcgcaggacgctggcgcgcagggagcggccggccggggcgtgcagcacgcagcccggagcctggcagcggaagccgcgcgcggggctgcggaagcacaggcgcccgccgcccgcctcggggccctcgggcagcaccttgtaggggcaccagggcgcgtcgggggtcggctcccagcccggcggcgtcggggcggccgcggcgcagggcggcggcgcgcaggc

SEQ ID NO: 330650 - DNA, 391 bp, Homo sapiens
  chr1:1566262-1566653
  hyper
cggccgcggggactcgcgctctgatccaaggggcccgacactccccagggctgtggggtcccgtcccagcagggagttagttggggggcgtcccaggcagggtctgggggccgggcgcacgcaggcggggtgacgagctgggggggcggggggcggtgtcggagcaaatacggcggccaggcccagcctctcgcgctttccaagaaccgcccgcggccgccgccagctgcttggcgctgaccccgttggccgggctgccgtcaccctgggcccgacgccggcgcggaaaacggggagggacgagacagacacaggccggtctggctcggaatctcctgctcctctgcccaatcccccacccccgccccgcgggacgccggtgcccggtctc

SEQ ID NO: 330651 - DNA, 390 bp, Homo sapiens; identical to SEQ ID NO: 226578
  chr1:1566684-1567074
  hyper

SEQ ID NO: 330652 - DNA, 725 bp, Homo sapiens
  chr1:1713574-1714299
  hyper
cgaggaaagggagctggggggtgggggtaggggacagggcgaggccagagagtagtgggaggggccgaggcggcctttcccgggagcgctcggttcccggccggcccttctattggccccagtcactcaggctcccaggtccggctcgggggggagcggggggccgcgccaggccgctgaagtgtccccgtttcgcgtgggcagagcgcgcctccccacgcatcctgctgagggccagcctctgctaggtgcgtgacacggaggggacagaacggaaaccttgtcctgctcaagtgtggacgtgcgtgccacgtgctagagtaaaattgaggtggggaacctccatccctgggacatggagcacaggggcgaccccgcgccgcttggtcaaaggaggtccgaggccctgcaggaacagcccacagccggagcgagctgcaggtcactccactgcctgtgtccacctgcgacaggtgcgcccgcgcaagcggggcggagccaggtgacccggacacaggaagcgcgccaggggcccccacaccgcggagctgctggcgacaaagggcgctgctcctgcataggccaggctaatgcaatctacaaactagatttctgtgcctacagtttgaaaatgattgcagttcactcagccagtgtggaattatcctcctctttccacactgccttagtcagtgccgctgtccaagtgcacgttgttggcgccc

SEQ ID NO: 330653 - DNA, 434 bp, Homo sapiens
  chr1:1935038-1935472
  hyper
cgggaaaggcgtttcatatgggacggagttctgcctggggggcgggggtcaaacccttccagctcagccccagggtcaaacgcatccgcccccacacccacctctggctggcctgggtcccaggttctcgggctccggaggcacagacaccccgggctgctcaggcaggcggcggtccttggcgattgccctccgcggcgccggcggcgtggtttggggcgggcagctccatggcaacggaagactccatcgtggccggagggggagcctcgcccgttctgctccccggctggagcgggtggtttggtccgacccaccaccgaccgcgcgggccggggccggggcaaggaggtcgcgggccccgaggcgcggctgaagggccaggccacaggccgcggggcggggacgtctccggggtcccagacagccaggcc

SEQ ID NO: 330654 - DNA, 1441 bp, Homo sapiens
  chr1:1981183-1982624
  hyper
cgattgtccagatcaagcccctcgagtaaggcccgagaggctgtggcttcagaaatgaaggtcatgggcgactcgggccaatgccgcgtccttgacctgggcgaagtgagcggttgcactcacgagtgtggacggcccttccctacaggggaccttggattcgctgggggcggagtgggggctggggcccagagaacccgagtccggacgctcccgtccgtgaccctggccgggttctccgctcctcgcagcttcagtccgcaagtgtgagatgtcaggggacccctggacggcggggccctcgggctggcagcgcgcgccgcaggagtttcgattcggagggtctgggcgaaggccgagaactcgcgtttccagcgagttcccgggggcgccgctccgtcccagaggccggggcccctccggttgccgggcagagccgcgccgcgcgcggtcccattggcgcaggtgcgccgcgccccgcccaacaggtagccccgcccgacaggtagccccgcccgcgcctcgccattgggccgcggccgggtgtcccccgaggattggcccaggtggcggccccgcctcgccctcattggccgcaggtgccaccgcccgccccgggaccgcccgccccgcggattggccgctggctccacctcggtccgccatgttcggacaccgccccccgcccccgccggacggtcccgccccgcgcgccccccgctcccgccccgcgcgccgccggagttccgcggagttgaccgggtcggcgccgtcggtcctgagcgctgccttccgcgttccgccgcggccccacctggagcccccgccccgcgccatggccggagctcccggggcgcagcgctgacggcggcggggggagcgcgccatgcccagcaggaccggccccaagatggaagggagcggcggccgcgtccgcctcaaggcgcattacggggggtgagcggcggagagggcggggagcggcgcgggtgaggcagggagggcggggagggctcagccgtcggggctcctgcgcgagagggagagagggaaggggcggcgaggtcgctgcgggcccggggctgtcgcgggaggtcctcggtccccgcccgtgagcgtcacccgcggacacgtcgtggacagcgcgggctccttccccgggaccgggtttccctggggtcggccccgcgccgcgagctcctcggcccggtcattgtggtagacgttttcgctggaaagttgggcggggacgttccggccgcaaacctgtaaggactgaaagttttcatcaagttgtgaaaactcctggcgggtttcttaaaatcagcgtttcctaaacgttctccacgtttacccggtcgggggtctcgctttagccaaaatccggagacccggggcgcgggcgctgtggctccaatgcagcccccggcagggctcgggg

SEQ ID NO: 330655 - DNA, 807 bp, Homo sapiens
  chr1:2374848-2375655
  hyper
cgcctgggcaaacgcccagcctggagatgggaagcgctctcggccccgcccccttcccggtcccgccggctggggccacggggagccggagggaggcggagggggaggtgtggggagcggaaggccgcaggagcatctttgcggagaaagtactttggctgcggcgggcgcagggcgggccggctagccccgcgccccacctgttctgtgcgtcgcgctcgcccggttgcgcccgatctgcctccagcccggtgcccgccgcggagcccgcgcccccggccccctcccggcgcggggcgggcagggggtgtggtgcgggcggcacgagtgacagcgcgctcctcgcgcggcgcctccacggggcgcagtgtcaccgcgcacagcccgccgcgggccgcccgagctggcggggcgatgccgcgggagccggagccccagcccgagcccgagcccggccgctgactgcgcctcccggcccgcagcccccgcccccgccgccctcgctgccctcgctgcagccgccacggagacaatggacgcgggagccgccccgcagaagcacagtaggtgccgctcctgccgctgcgccgctgccaaccgggatgcgcgggtggacgcgcgggggcgccgcagccctggtgcgggtcggggctgagccgcctgggcttcagactcgggagcggaggctcggatcgcggtggcacgggcaggggtgcgggcgcgggactgtgggcgggacgggcggagcggtcttgagctctccggatggcctcaggtgcggggtgagggatctgggggccgcccctc

SEQ ID NO: 330656 - DNA, 1819 bp, Homo sapiens
  chr1:2460612-2462431
  hyper
cgggcggccggggacttcccagaagtcacttgcttaaatgcaaacacagaacaaccccatggggtcagacacttggcagaagatgggccctgattgtcctaaaacggcagggactctgcacacacattctctgagaatggggctcctgcgggccggccagcttggggccagagccttccggagaagggcgcgtccaagcccggggcggacgacggcgggaaggcgcttccctacaggcgagaggagcaggctcgccctctggtcgtcgggccgcgcgcccgcaggtcccgccgggtcaccagggccgccagaggccgcaggcgggctggtgcgcggcggcggcggcggcggtggccttggcggagagcgcgggcgggggcgcggcgcccggcgccttgggctccttggcgggcgcggcgggcgcggccgggggccgctggaagtggtacagcagcttcatctgcgtgtcgctggcggcgtggagcgtcaggaactgcacggcctcctgcaggcaccacgagtagccttcgctgtagtcctggtgcaggctcttggggccggcggcggcgacgaaggctgcggggagacgcggcggcggtgagcgggcggcggggcgcgggggagccggggcgcggtgggaactcggggcgcggggggcccgggcgcgctcacctttgctgtgcttcaggtagctgacagccatctccaggatgtcggccttctccagcttggagttgggctggtgccgcgcgaactcctgctccagcagcagcttcagctgctcgatgctgctgttgatgcggtcgcggcgcatcttctccaccaccggcttccgcagctgcgggaggagggggtgtcaggctggcccggcacggcgcagggacccccgaggaccggaggccgcggggacagcgcgccgggcgagtctggtacttactcggtttttctctttggggctgagcagctccacggccacagtgctgggggccatgcctggcgcggaacaggcgacgaggcgacgcggggaggccgggcgagacgaggcgagcgggcgcgggcaaggccaagcgcgtcccgggctggcgcggacaccggccccgcgcgccgacgccctatataggcgcgggcggcggcctggcgcctggagtccgggcgccgcggccgttcccacactccgcggccaatggccgggcgggccgcacaaaggcgccggcccattagcgcacgctaaattgcctgtgaattggcgcgggcacaatgggcgctccccaaggagcaggtgggccgcgcggcacaatgtccgggctgtgggaacgcgctcgccctcattagcatcccggggcctgatgccgggagccccgcgcctcaatatgctgccttttcccaggccgccaaacgggaggggggcaggaaggagggccccctcccccgccctcccctccgctcccctcccctgcctctccccagcggcttcccactgctggctggcagaggccgtaggagcagataagggaaaaactgtagaatgaacaagtgccacggcttcctgggggatgggcaccttccctgactgggacctgctgcccctccaggggagggggacagagggggcgacgctcttaggatcagtcctacgtgcctatattacaagccccctgactgtcacctgggactcctgacttctccagacctagaaaatgggccttgtgccttcctggctgggctccgggcagctccaggaagctggggcccgtgctccacgtggagcccggcacccggcagctctccccgcggagccgggcacccggcagctctcccc

SEQ ID NO: 330657 - DNA, 193 bp, Homo sapiens; identical to SEQ ID NO: 226595
  chr1:2472195-2472388
  hyper

SEQ ID NO: 330658 - DNA, 862 bp, Homo sapiens
  chr1:3309969-3310831
  hyper
cgcggtctgagcaggacccaccgcgggtctcacgaggaaaggaggattataagcagacggcaggaatgtgtagggagctgcagtcataatttatgacaagccctgcaggaaggggtctgcagtacagtaaatgcgcaatttgtgacgctctcgagccaggagccggcgcaggctgggtccgcagacgcccggttcccaccgcggccggcccggtctttgtcccgggaagtcgcctgaccccgccggccaggaacagtggcgttctcggcgcgtctggctgataaggcctttgtgacaccggggacaggctgtaaaaacgcagccagcttttgtctgcacctccgcgccgctggcaagggcggggccggcgagtgtggaaaagtttgcgcggattcccgttcacctctgacccccgaagcagttggaggcaggtcggggacccccgcccccgccccgccccgcctcgggccctgcgatcagcagtaatagcgattaattccgactgtggctccaagtcccatggccaaggcgccctcctcctgcaggtccagggccagggagggggagcccgcggcccggcgcgctagaccctcccgcggcggcggcggctccagggcagtgtccgcgccggaggggagggtcccccggcaagtctgctgccctcggagccggggtggggtcccaggagacaccgggggccctcggattgggggaagaggtgggggaaggggtttccttccgcagcgccgcggatcagaggagggaggcctggcgccctcggagctgcggtggggggcatcccaggagatctggctcggtgtgtagagaagggagtccgggcggcgtcctgggagtgtctgtg

SEQ ID NO: 330659 - DNA, 588 bp, Homo sapiens
  chr1:3325196-3325784
  hyper
cgtgagctggtgcctgtgttggcatgtgtgagagtgtgtgagtgtgagcacgtgagccggtgcatgtgttggcgtgcatgagagtgtgtgagtgtgggcgcgtgagccggtgcatgtgttggcacacgtgagagtgcatgagtgtgggcgcgtgagccggtgcgtgtgtgtgagcgcgtgtgggcgcgtgagctggtgcgtgtgttggaggatgtgagagcacgagggtgggcacgtgagctggtgcgtgtgtgtgtgagagcgcatgagggtgggcgtgtgagccagtgcttgtgttggcacgcatgagagtgaggggcgtgtgagccagtgcatgtgttggcacgtgtgagagcatgtgagggttggcgtgtgagccggggcatgtcagtgtgtgtgagtgtgggcgtgtgggccggtgcgtgtgtcggcgcacgtgacagcgtgagtgtgggcgcgtgtctgtgagtgcgagtgtgggcgtgtgagttgatgcatgtgagtgtgtgagtgtgggtgtgtgtgagtgagtgtgggcacgtgagttggtgcgtgtgtgtgtgagagtgtgggcgcgtgagttggtgc

SEQ ID NO: 330660 - DNA, 1216 bp, Homo sapiens
  chr1:3567217-3568433
  hyper
tggcccttgcctcacgctccagtgccactgagatcaaggagagaacgaatttgccgctgactgggcagagcgagcgcgtggatcgcggccaccgcccgttcatcacccgcgcgcatctgggctggcaccgggcgaagaatcgtgcgggtctgggacctgggggcccagagggagcgagctcctgcgcgggcgctcggtccgcaggtttcgcaggctcaggggcgtgcctcgttctcacccccactccggaccccggtcctcttccctagacagcggccccctccacccctggctcccgcaggccgctagtagtccgcgccaggccccgccggcgcctctagggccccccagatcgcgcagaccctgacatccccgcctggccctgggttctgggagctgagagccggccagggtcctgctcgtacctccgggcgcccagcctcgggtctgctccccgcggacgccccaacctccccggccgaatggatggtggtgcgcgcgcgtcctactccggcggtgccggccttttctgttgccaaaactagacccaaacctctgcatgggattcgtctttgggtccccaccccgtgcgcccagcaaacagtgggtgagccatgaagatgtgcgagtcagccggaccctccccgtcaggcgcggacccgctgcggccagagaacccagtctgcgccagcccggctcgctcgcgaagccacgggcttcactgacgcgactttccaagacgtgggggtcaccatgggcagaggacatcggttcggagccagatcacgggccccataagcatcagaccataagcagcgccgccactgagagccgctcggaactcgcccagcatgtcgggtcccctagccagggcctggtgtacgtggtcgagggccctggaagccccgatggcctaggaggagcaggcgggcggggcggcgggtgtcgctggccggtagagagcttcggcctgacctagcgcaggtctggtgcgcgcagagaacaactccaagcgcaccgacgcccgcgagctccttccaaacaccgaacgggatccagagcccgagcccacaggcggcggccgggggagggagcagggtgctggccgccgcccgggagtgttcgcgtcctgggtgacccctggaaggacgtggggcccaaactccggctggggttgggagagcagcccccagaggctctccgcgggatcctctgc

SEQ ID NO: 330661 - DNA, 746 bp, Homo sapiens
  chr1:3663338-3664084
  hyper
cgacccccgaccgagggacccgtgggatctgcgctcaccgccctgcgagcagaggcgttcgtgtcggagcccccacacctggggagcggggagctgcggtccctggttgtcccacaggagaagggggagggaacggggcaggcggggaggatgagcgcttccgcgtgcagcgggggctggagtgggtccgtccgagctggagtggtctccgaggggcggcggatgctcggagggggcggatcccttagggctgggggccaggacgatcccacccggagaagcctcgcgggcgagaagagggtcccttcctgcgggggcagatggaggcgcgggagccttccccgggaggtgaccgaggccagtcagcggccccggggacccaaggccggggactctcggcggccggtggacgggcagggccggcccgcctgggcaggcggcggggtgaaggtgtccagggcctgaggcggcaaagtgccgccgccgtcagccccgactgccacccaccaggcacccggcccatccccggctcccatctagggatccacacccgggcgccgcggcgccgcggtttaaagcctgtgagatcccgcaacaacccggatccggaagcgcggggtcgcggctgggcgagggcaggggtggggccttcggtgcagacccagggccaagtcgagggaggctccgggcgcggggcggggtcttgggcgtgggggcggagcctgcgcggggcgtagagatctgac

SEQ ID NO: 330662 - DNA, 299 bp, Homo sapiens
  chr1:4712686-4712985
  hyper
cgacacggtccggtccggagcccctccctgccctgctggctcctagtgtgcgaagccggccccttccaggcccactccggttgcaggaagggcctccctggtgcagcaccgcctcctcacaccgctaggtggcagcactgccggcgcctccttccccgccggccgccataggccccgctggttccaggacctccctgcctccttcgcctcttaatgggatccgctccctcacacccctcagggagaggctctaggggacgatgacccaggggcggcccggcagggaaactgctgagtca

SEQ ID NO: 330663 - DNA, 2349 bp, Homo sapiens
  chr1:4714352-4716701
  hyper
cggcggcgcccggcggtccaatcctagcctgcggcctctctcgagcctttcgcaaggtggggaccgggacgcgaccggggatggggaagggggctgcaggaggccccgcctgcgctgtcgcccctgctgggcacagcgccccccaccacccgcggcgaccccggcccccgcaaggtggggcggcgagcaggagccggggccaggccaggggctcgagctcccgttcgaggggcggggaaggcgggtgacgtgagccgggccgggcgggcggagttgggaccggctccgggaggcgggggcgagcgcgcggagaggcagacgcgaggagggaggcggctgagcagcgcgggcggctctgcggcgggcgcggtgggcgcgggcggcggggccccgggatccccgcgcgcctcctccgcgcggcgccgccgccgcgcgtccccacgccccgcgctccacggcgccctcgccccgcgcgcctctcgtgcccgcctcctgccagtctccgggccgcggccgtctgcagagcgagcgctcagacggagcccccgggcaacttgagtggcgccgatcggcggcggagcctctggcagagccccccgacccggcagcgcggaggggactcgcgtccgtccgcgtcgcgtcaccccaaaccctaagcagcgccgccccatcggcgcggagctccggctggaggcaagagccgcgcgccgggagacacgcaccgtgagcggcagcgccgccggcctccctcctcgccgccccggagggcgaagccgcggctccccagccctttgctgcgccgcgacagcgccggaacacgccccgcctcgctgccgccttcgctgtgccgccggcggagggggccgcgagccccgcgccccggccggaggatgtgcgcccccgcgggccgcccagcctgagccatgcgccccaacggcggcggcgcgccggccggcatggagccccgcgcggccgcgctctgactcgctgtgcgccccgcggccggcgggcggcgggaggcggcggaccgagagccggagaccggcgccgcgggacggaagcgagcgggcgcgggcgccgcgcagatggcctgggcgagccaggtctgaggccccgctccccgaaacgtgaccatgtggattcaacagcttttaggactcaggtgagcgacccggccggcgccgggtgcgtgtgggcgcgtgggtgccaggctgggcggaagcggcgctttcctctatgttgcaaatcaagggacccctcttcgcttcccgcaagcgggcaacggggtgcaccggtagccggaaaggggcgcccgcccggagcctggagcagcaccgcggccctggcggggagcggccgggtctccagggttccgcgcgtccggggtcggggcagcggcgcccgccccagcaacccgggaagtggggccggccaggcgcgcccgcagctctaggagccagcagcgcagtgtcctggccggctgccccggcgcgcctcctccccggggcccggggcgaggcgccggccgctgggcgcggcgggcgcgggggccggggctgccggggaaagctaaagctccgggctcccagcgagagcttcgcaggcggagttggaggaaaccacagccaaacagccactccgctcccccttctcctttctcggggccccggggctgagcaggggcctcccaggctcccagctgccgacccagctgtttgcgggtgacctccgggcccgacgggcgctcacagctggcgggcagctggggcgggagagctggggttcttggggagctccggcggccaccccgctgtaaacacacacgcacatacgcccgccggcgcgcccggggcttgtctgtgtctgggactccagggccagatggaagagggggttcgagcctagagcccgtggtgggggtgtccagaaagacccttctcggcaaactttgccagcccgccggggttctcgggcttctctggcttctgcctggggtggcccagggcccaccagagcacagctgtcgtttttgctgggcaggctgcctctgagccctcgccctcctgccggggcattcaccgagctcgtgcatttgggtcccgggttggaaccgcgagcggggaggacagaggtggaggcggagagcagcgtgcggttctcgagtttgtccactgggatgcactgcgctcccgcgttggggacgaaaaggccagtagttgttagcccgctgcttgagccgcccccactcagggatgaagctgcggggggagtgaggcgaagggagggaggatctagtgcgtgtcctgattttgagaaatcggaaggggactgggacgccaagtgttttct

SEQ ID NO: 330664 - DNA, 344 bp, Homo sapiens
  chr1:5772056-5772400
  hyper
cgcactgtcccccaccggggaaggcaccgtcacagctcccgcacagccggtcaccgcaccgtcccccgccggggaaggcaccgtgtcacagctcccgcacagccggtcaccgcaccatcccccgccggggaagggactgtcacagctcctgcacagccggtcaccgcactgtcccccgccggggaaggcaccgtcacagctcccgcacagccggtcaccgcactgtcctccgccaggaaaggcaccatcacagctcctgcacagctggtcaccgcactgtcctccgccggggaaggcaccgtgtcacagctcccgcacagccggtccccgcactgtcctccacc

SEQ ID NO: 330665 - DNA, 896 bp, Homo sapiens
  chr1:6052426-6053322
  hyper
cgaggactggccgaggggcgcgccccgtccgctgccacccgcgggaggagcctcggaaggcggcgcaccgcgccgcacactcagtccaagaacccgcctcgcgtcactgtcgccgtcagggccgcggagccaatcagagcccaagtcgagggctgcgctttgcgagcgccagccaatcggtgcggcggcgggcccatcctgatttgcatgtccgacgacccctcaaccaatggtaatgtgactggcgtgaacaatagccaatcagaagctggaagaggcgtggccccgggcgtcccacgaggtgaagatgctgctggcggaacctgcaggagctagcgggattcgggggcgctaaagtcgcaggggcagggcgggaaggaagatccggcgcggggcacaggatccggagctggagcccccaggtgagtaccggggagaccccggcggggcgcgctttccaccaagctgctccgggacggcggcggcgggtatccgcgaggcccgcgctgcggcaggcgccgcggtcccgtctccatctcttcttccccggccctgcgtccctgcctccgccgctgtctcacctcctctccagcctcctcacctccttctccatcgtctcccttcccccatccctttctgtctttccttccctgtcctcccgcccgcccgacccttcagctcgcatccctgacccctgcccctgccgccgtccctcttcccggtgcacctcttccccatctctgcccgctccggtcctagcagcctcgccctcccctttcctccatcctcctctcatcccctctcccggcctctgcgcagccccaccggggcgctgctgttcccggtcctccccatctctcctcctgatcgcttctcaaggctcatccgtcgttctc

SEQ ID NO: 330666 - DNA, 155 bp, Homo sapiens
  chr1:6086224-6086379
  hyper
cgctgctcatccaggaaggtcggagatgtcgggccctcccacctgggtcacgcgctaggcatgcctgagagcaaaggccacgccccgacaccccacggggccctggcgcgccaggcttctcagccctgcggcggcagtgcatagctctggcacgc

SEQ ID NO: 330667 - DNA, 935 bp, Homo sapiens
  chr1:6240609-6241544
  hyper
cgagcccgggcgcagggggaggcgaggaaacaccgcccccgcgcaccccgggcagagccagccgccgccgctcgcctgcgaaggcgctgggccccgagcccccaagggcgcggaggcagggtcttcagggcagcgcgcggcccgctcccccactcggttcacaggcgccgggacccaccccgctcccggctccggcctcggcacgttcctaaccccctctccaaagaggattagaagaaaaatgtgttccacacttggggaaaagacgctctggagactgtgggtctgatttacagcagaaaaatccgcgcaggcgggctcccctcacctgcttccccgctcccaccgcccacgtgcccccttccaaaaagcccctccaggctgggtgcagctgaaacccatgcagacccctaggggtggtgcggatctgcgatgtctgtgcccaaaactcccgctcagaagcgacacctgtcgcagagcaggaaggagccgccgccaccagccctcggtcgttaaaggtgaagatggaggccaaagccctcgggagcaagactggaattttaaatgagcgcctccagtctccgcggcggcaagtcttaaagctaccttaagaacgcaaaagttccaggggctggccgaccgccagctctctaaccccagaaggcccgtgaagggagggccccctctcactgcctcgcaggggcactgggggaacccacctgagacacgcaggatcggcagcagtttcccttcttcccgttcaattttattgccagcaaaccccaaacaaaagaccctctgcattcatccctgggcaaggagaggtcggtccagccttctggaaccaaagactggggtgttgggaacccctccatctcccagatccgctttaactacgctgtagatagagaagccgggtcagcccagtgctggcc

SEQ ID NO: 330668 - DNA, 165 bp, Homo sapiens
  chr1:6265347-6265512
  hyper
cgaaaggcagggctgggattacagggcgtctcactccgcctcccaagcgctggaaagtcggtggaggggcgtccgctgctctctggcgcccccaattggccgccgaggaaatgaggcggcgatgacctgttcagacccaaatgggatggaagagtggggattagc

SEQ ID NO: 330669 - DNA, 988 bp, Homo sapiens
  chr1:6265789-6266777
  hyper
cgtgagccaccgcgcccggcctacccttgaagaccccgcagccaaggtcctccggccccgctctgcgcggcgctctggtcttggggctccggactctgtcatgccgggcaggggccagtccgatccttgcacccttgcctggcaccgtccctggagccttggcgtcctggcctctcctccccgcgggctggaggtggagtggccgggccggaaccagtgcgcaaagcagatggcgagcgcggaggtcggttcggccccgccgcgcctcaaggcagcagccaccctggggaaggtggatgccggaagaggcgtcgcctgcgggtcacccagaggacacccggcggggaattccgagggtgggagtgaggagaggtaggagaggccacggcagagggaggccccgcgcagagtgggaaccatcgcccggtgcgggcctgaacttccagggccggctactcctcggcagagcgaccgcgcggtgtctcagagcgcggcccggagccgcactaagagcgctggacggcgggagagaggctcggaggaccggtagctcccagcaaagcggcccagcgggtaggtacaaggccccgcccctcgccagtcctcactgcctgttctccctgcgccggggagctccaggccccagccctaacctgggccctagcggctccccactccatgacctctggacgcccagtcgggtccaggcgcgatagggagggcgcgggcgcccgggcagaggggccgcgggagctcaagcggggctccgtgcgtgccccagccgcccgcttgcgctgtcgctgcagatgtcgggagctatcttcgggcccctggagggcccgagctccctggatgccccgagcatccacccgctggtgtgcccgctgtgccacgtgcagtacgagcgcccgtgtcttctggactgtttccacgacttctgtgccggctgcctgcgtggccgcgcgaccgacggccgcctcacctgccc

SEQ ID NO: 330670 - DNA, 369 bp, Homo sapiens
  chr1:6301695-6302064
  hyper
cgcgaccctcggccagtgtaaggcgagtagcgggccaaggaggctgtttgtgatggaggagccacgggtgggggcgtcagaaagtagggggatcattccaggtggggagaccactgaccgaaaacgggccacaggacagggggcgcggcgggcagtgtcggggttggggtcggggggcaacggaggcggaagtccattcagtggaccagggcggagcgacgcctgagaattccgcccaggccttgaggcgggcctcgcctcccgcagccaaagcagaacattgcgaattagagcattttgcggtcaattttccactgcttaagaaacactaagctatccacgtgagcgtccccccgcccccggcccgat

SEQ ID NO: 330671 - DNA, 831 bp, Homo sapiens; identical to SEQ ID NO: 226642
  chr1:6309259-6310090
  hyper

SEQ ID NO: 330672 - DNA, 227 bp, Homo sapiens
  chr1:6474528-6474755
  hyper
cgagcccctgctccctgctgccccccaatggacctcgggtaacaagacaccacgtgtgtggggcgtgttctctagatccgttctcacgatcctgaaaccattattgagccttacagctgctttaagcgcccggggcttcatcagagcctttgaaaaccccaggtgaaactagttactcactgggaagcctcggtgtgtggctgccttctccctgatactgcatgccc

SEQ ID NO: 330673 - DNA, 939 bp, Homo sapiens
  chr1:6479998-6480937
  hyper
gagctttaagggagcggctcgcccgccccgccccgccccgcggagtccggccgcccgctggtcccacctcctgcctttgttcctgcgcagggtggagccgggaggggagaccgcgacgcccccggggatcccgctccccgcctttgcgtcctgtctaccgcggggtggcggcccccagttttccccgagcacctgcgggagagtggtaaaggcgccatcgggggccttcgctgcgtgaccccgagggcaggagggccaggtggggccaggccttgcctgactggagctacggtccctcctctccaatgctgcccttcattcattccccaggctcgggttcagcgtcttctctgagccccgccctgggccgcagcaggggacccagcggttacgggagctcccatgagggacagcagcgggagggacttgcacccccagctgctttatcgggtgaagggctgagctggacgggaaatccgagttccggagaaaggtcgtgacttgctccagtcctcgacgctgggaacaggccgagcctggacaagggccccagtcgctggacgcccggctctaaggagcccgtagaacccttcggcggcttgcctagttaagagtcttttggttaccccactccaggctttgggtggggaaacggaatcctagagaagcagaggcagccctggagccctcggagctcgttttcattcccaccggctaggggtccgggttctcgcccgcaagacagtcagggctcatgtgacgcgcgggcaggacagttttgggtgcgggccccagtggcccgcccaggaccgccttcgcgccgcgtggccgttgctgcggcaaactggctggcgtcccccgcccatctgctccgggctcccctcccccgaccggctggcggggcaacggccacgcccgcgaaccacactgcgaactgcc

SEQ ID NO: 330674 - DNA, 309 bp, Homo sapiens
  chr1:6500747-6501056
  hyper
cgcggcgagccgcggccacaccaaggtgctcagctggctgctgctgcacggcggggagatctcggctgacctgtggggcgggaccccgctgcacgacgccgccgagaacggggagctagaggtcagcgcgggcccggggtgggggcgcgcgccctctgctggcaccgcgctttcagcacggccctgcccgggcgcgggggtcccagctcgcggccgcggccgggtcctcactgcgtgcccccgcagtgctgccagatcctggtagtgaacggcgcggagctggacgtccgcgaccgcgacgggtacacg

SEQ ID NO: 330675 - DNA, 2006 bp, Homo sapiens
  chr1:6507073-6509079
  hyper
cgctgagttcccaacgcagactgttggccccgcccaaatccacaggacaggtggcccagccagtgccccgtctccaccgttgagcccaagtgccaggtctgcgtggtcccctcctggctgtgtgagccccctcccggctgtgtgcgtccctccgggctgtgtgcgcccctcccggctgtgtgcgcccctccccactgtgtgcgcccctcccggctatgtgcgtccatctcggccgtgtgcgtgctgggccgcaggcgccagggccggggcccggacgctccacaaagggctctttgtgtcgccgcggcgccccccgcgcgggtgcctgaccgggggcgggagcagggtcgtggcgtccgaacctccgggctgcagggggcgcggagcgggcgggctggcccagaaaacaaatcctgcggtgtcgcatttcctgcaacgtgagccaggtcgggcggggtgaagggtctgaggccaccgcagggacgcatgggctggagagtggggcagaggacagcccccacccggtcactcagtctttggcccggccgcctcactctccctcactgagctgggcctagttgggggcagctgcgatggggtgggaagccacgctgtcacccgaccccgccttacggcccctgaaatccgaggcttgagcgcgggtgtcggtgtcgctttcgtggatggcgatggtttccagatgcaggaggggaagggtggggacgcgacccggagccgggggccaaatatgagaggcctcctctgcccacagtcagccctctcccctctcgggcggggatgaaggtgggggctcagctcccagcttagggagaggcgcagggggcggggtcacatctggccggggacgggtgcagagccgcggccaggtgtggcaaagtagttggcgccccctgtggcatccgcgacggctgggggggttcagcctgggattggcgggccccgggtgatgtcaggccgtcggagcccataggctggctgtgcgcgggtggctgtaacctgagaggaagtatcaggtaacgcaggtgtcgggtcctgccgcccccacagccaggtgcacagcgggggccaccagcaccgtggcaggtaggagcagcccccggacgggcaaccggggtccgtggcaagccggagcctccgagagcacaggctctggagggggctccctccggccccggacccccgaaagacagggctccgcggagccctggggacccgcagtccttctgacagccgagagcggagtgcggccgagggcctagtgagggctaagctgggaggtgccccttcgccagctccccctggcgtcggggctgggccaccccgcccctgggcccgcctcttctggcctcagtgggggcccctgtgccccttggccggtgcccagaacccctccctgtaaggcgggcggagcctgcccttccaccgaggcccccatgaccctcgcccgctgcccactgtgagaaccagggggtctaggaagtcagctgctgcacccctcgacggccgctggccgcgagtccccaggaggtgaagagctgggtggggaggcgtggggggcgcctaccgggcaggtgcccgagccccaccggtcactgtcttcccgcagctgagctcctgtgacggccacgacgggctgcggaggcaggactccagccgcaagccccgcgccttcagcaagcagcccagcacgggggactactaccggcagctgggccgctgccccggcgagacgctggccgcacgcccgggcatggcgcacagcgaggaggtgcgtgcccgccagcccgcgcgcgccggctgcccgcgcctcggccctgccgcccgcggctcactcgaaggcccctccgctcccccgcaggcggcgctgcttcctgggaaccatgttcctaacggctgcgccgcggaccccaaggcgtccagggagctgccaccgccgcccccaccgccgccgccgcccctgccggaggccgcgagttcgccaccgc

SEQ ID NO: 330676 - DNA, 916 bp, Homo sapiens
  chr1:6545237-6546153
  hyper
cggccgccatgggccgcatccttcccctgggggccgcggggcccatagtcacgggcaccccctccctggcctcccgcacaggactgggcggctgcaggcgagaactgggcacccagccccgttcccgccccgtcccggccccgtacctggctatcaccgtcgcgggcacgacccccggcccaggagggctccgagtcccggaggggcagccccgggcccggcctggaggctgctaggcgtccggagacaccgggtcctgtccccatggcggccggaggaagccgcggtctgcgccgcccgccggacaaagcgcggagccccgcttcctgccattgtgcggccgcgcccgcccccgccgagcgcggggaccccggggagggccgggcccggaacagcccccagccccccaggaaggcggacacctccctcccgcccgggccctcgccacccagccccggggatccccgcctccccgcccgggaacccctacacccccgcctccgcctgcccgggcgaccccccgcctccccgcctctgcccagacccggggactccacacccctacctctgcccggccgggggacccccacagccccgcctccgcccagtccccgggacccccaccttcccacctctgcctggcccggggtacccccacctctgcgcctctgcgcggccccgggcccctctcttctctgactccctcctcaacaccaatgccgggctcagagggctcctcagaacttgctctttctcctggggagctccttgaatgctggaggcagggggcgctggtgacacccccccccaccttggagactgtggagcccctcccctgggtgactcgatccccgcccagccctgggggtgcccactctgctgtggtccccacctcaccctcagcgccaacacgcac

SEQ ID NO: 330677 - DNA, 344 bp, Homo sapiens
  chr1:6546495-6546839
  hyper
cgactgctcactgcccaggtacggcagaggccgagagccaaaggccggtggcctctggaaagggccgtgggcagaaggcgggctgctctgagaggctatccttggcagcccccaggagctgggtgaggtggaggcatcaggaaaccctggcgacccacatggcacagcagcccaggtccctgcagttctaggccaggtccccaccgccagggggcactcagcaaagcctgagaggacgcaaacgcccagactctggtgctggagtcaccactacacggctgtcaaagcgcttttacactgattcccaggaaggcagggcaggcaccattagccccattcacggc

SEQ ID NO: 330678 - DNA, 212 bp, Homo sapiens; identical to SEQ ID NO: 221217
  chr1:7764990-7765202
  hyper

SEQ ID NO: 330679 - DNA, 108 bp, Homo sapiens
  chr1:7843510-7843618
  hyper
cgggcggtgaaaaccgtgggaacccagaaagacggccaaagcacgatgaggaccgctgccggcagcccgccccaccctgggctcctccccacacccgctcgggcagcc

SEQ ID NO: 330680 - DNA, 177 bp, Homo sapiens
  chr1:7844224-7844401
  hyper
cgggcgcaccggctcgcgccccgccccagggccaatggaggcctgcggagtcggccccgacgaccaatcgcacggcccgggggcgggaccggtcacgcggcggcagggggcgcggcgccggctgctgaccggcacgcggcgagcctcgagactgcgcgagggcggccccgggggcga

SEQ ID NO: 330681 - DNA, 369 bp, Homo sapiens
  chr1:8002368-8002737
  hyper
ggaactgtggctggggcaggcgtgggctggggaaggacatcgagagtagcttgggccgtcctcctgccccgcggttcccagcacgagctctcccgacagaagaggaaaacgcggcgcgactcggttgggggacagcgctgagatgcggacagatgcggacgttctgccgccgcctgcaggcagagggactcggagatcaggccgcagaagcagaagaaggcagacgggaaggaggaggaaggaaaggagccttgtggcttcgtgtccgaccctcccgcccttggcccgcgtgcctggagccagccccaccgcgcccgcgtttcctcccgcgggacttcccttggccctgggtctgcagcgggtcctgcc

SEQ ID NO: 330682 - DNA, 248 bp, Homo sapiens
  chr1:8014160-8014408
  hyper
cgcgacgctctaaaggaagtgacctttaggggctgttactctcagaccaggcccagcagcacccggcgcatttacgtcggatctgacccctgcaagcaccggcgcgaccgcgctagcggctgggaacacgcgacggtcccgcccactgcgacctgactcggccaatcccgggtggcgcatgctgcggccgccggaagtggacctacgtcatgcaggtcagtcggtaggtttccggcgcccagcgcccc

SEQ ID NO: 330683 - DNA, 1245 bp, Homo sapiens
  chr1:8085555-8086800
  hyper
ggcattaccatcgtcgctgtgagattaggcagagggagcggggctgaccgccagagaaccggtaccaaccaccgcaagcaatcgccgagcctcccaccccagctttcaagacaggatttacgggtacacggtgtgaacaagacaacgcaaccccctttttacaaataaaaaaaaaatcaaacaagcccccaggcccgaagacgctcatccccgccgggcaaccccgcgagcgcaggctgcgggacgaggaccttcatgctcgccgctcccgaacccccgtccgctcctgcggtcccggtgctgcggggacgtatcccgggcgctcgggtgcatggccccggccagccgaggggccgcgcgacgaccacagccggcgtggagaaggcggcgggcgccggcacttcgcggcgtccccaggcccgggctgcgccgccggggagggtcccgctctccacacctcaatggggagaagcccgcgagcgaccggccggcctctccctccatcccagagactccgcgtcgcggcgaccctccccgcgccctccacgcccccgccctcgcgtcggggagccgcctggatcccggcgcccggcgcggggccccctgagggaacggagcgctgcgtggccctccccaccccctcagcgcgccaggccccttaccccggaggagcggcggctgccccgcggcgccctcccgcgcatgtccgtcccggctggctcagcgccgcgggctcaggggcccggacatcgcgcaggcgcctcttgctggctcgcgctcccgctagcactctgcctcgcaccggaccgccgtcgccgcggctgccgccgccgcctctatatatagcataggccgccgggccgtgaggtcgccgcgtcccgccccgcctcctcccgcagccaatcagggcgcgcgccgcttaaaggggcgatgccgtggccgaggcgttgcgccgggcccaccgtggcgtatcgcggcgctgcagggagccggctttgtctcccggagaggcgtctccgggctgaccgcggccgcagctccgctcctctgcctgagccgtgcggcagccctgggagcctctcaacgccgagctttcctcagaagcccgcggcgacccgggcctcggccgctgttcctgcccgaactgagggcacatcgcgcttcgcgcgggatttcccataaattcaggctccgggcaagattgtgtgttttttcctctccgcgggccgccgctggccgtgtggg

SEQ ID NO: 330684 - DNA, 623 bp, Homo sapiens
  chr1:8277198-8277821
  hyper
gggtctgcccagctcggccggggagtgcagtaggggggcgtcctcccgactaagggcaaaggaggtgacggcggggacgcccgccccgtgacgaggagggctcggccgagccgtcccggggcgacaggaagcggccgccctttgaaggcccagcggcggcgctgggtcagccaggccagcttgtgggggagcggccgcccgcgcacggctggggccggggccagggccggagggcgccgcaggaaggggccggggccggggcggcttctctccccgcagccggcgcctccacgcggcggtcaagctcgcgcgtgggctttagcagtttcgggcgtgcacgtgcgcggaggctcctgcctctgcggagctcgcgccctcaagagacttccaggagggtttggagcccgggtttctctttcccccagccccggaacccgagtctgctccaagtgcgcatctgcgcggcggccgacggggacgcagcccggtgtccccggcaggaccccggagcaacgtctcctggagcctgtgcagaagctgggcttggcgagggagggggtgcttccggggacacccgcgcagggaaaaggaggatgctagtgacccatcctttctcgccgtgc

SEQ ID NO: 330685 - DNA, 1351 bp, Homo sapiens
  chr1:9711649-9713000
  hyper
cggcgggggaaggcgaggccctggaggacctgttgtttttcctgttgcaagtgaaaaggaaacaaagtgggaagtggagtgtgcgggttggcggcaggcggggcgccccggcgcgccccgcctccctccctcgaggctcactcgcgcccagcgcagtcgctccgagcggccgcgagcagagccgcccagccctgccagctgcgccgggacggtaagcgatcgccgctggctgcgtcaggggaggtgggaagaggaccgcggccaggggctttgggagctgcggctgcgctcgggggcgcggggctggctggcgggcgtctctccggcacacacagcccgtgcgccctggccctgggcgcctccccgagtctagcgagccgggtcctgggagccccgggggccgggctgctgggacctgggcgggggctgccctagaggcccggggccgtcccccgtgggcccgccgagaggggcgtgcgcagctccccggcgcctgcactgcgcgccttgcccgcctggcccggcagcggggtttcagctgcgctcacagcggcggtgcggcctccggtgcgccggctgaggcgcgaggatactggaagcgctcagcgcgtgcgcccgctccgagcgctgactagaggaccaggggcctcctctgtacggcagcggggtccacagagagcgcgctggtgatgtcgcccgagtgccctggcgcggagagagggctgcgcacagttcgccggcgcccgggtcctgtgcgcccttcccagcctgggcaagtggggagcggggctgcagaggggccggggtggaagttttcggggcttcctcccggctcgtggacccgcgccccgcctcccagtcccgggcctcccgcgttgctcgccgcgtttgctgcagcggcgcaggcgagatcagctccggatctgcggccgagccggggttacgccggcaaaaccgcccccagctttgcatttccggactttttaaaaaaatactcttacccgtaattcagcctgaatgaggctttttaaaaaaatcgagtttcctgtttttatttaggcttcctcatttgcacctcctcctttgaggtagagaagaggggaactgggacgacctttcgtgggcaccaggatgggggcgttgcagggcggggagacgggggtccagagaaccggggaagggccgctgggaggtcccgaaaagtgcgctgtgggtggggcgagggtgaagcaggtaggggcgagatttccggggtcgcgggtggggggcgccctggagcggccaaggtgcagggtcctcgcgtggcacccttgggatctgcccagtttgcggatggagcgcggggctgatc

SEQ ID NO: 330686 - DNA, 125 bp, Homo sapiens
  chr1:9747572-9747697
  hyper
cggatgtctgctgcaccgctcccctccctcaggcgggggacggcaggaaggagggagagatgggagggcgtgggggcggggccgggggcggtctccagcccccggcccgggctccgccctctccc

SEQ ID NO: 330687 - DNA, 122 bp, Homo sapiens
  chr1:9749342-9749464
  hyper
cgaaccccaagggccccgcctggcagcgtcctgggcctccgggcgagaacagcgggggtcggggaggatttgcagcgtccactcctctctccgccgcccgtgtgagctcgggcgcttctccc

SEQ ID NO: 330688 - DNA, 986 bp, Homo sapiens
  chr1:10057121-10058107
  hyper
cgcgcggtgggcagagccaggagcaccgggctgaggcggccgggagcgcagcggcttctaggggtgagtgggacccacgcggccccacctgctcctcccgcgcgcggccccacccccctgccccgccccgcctggtttataggtcccggcccgagcctccggccgcccgccgggtttgtcccgcgatccccgaccatgcccgccgacctcagcggtacttggaccctgctcagcagcgacaacttcgagggctacatgctggccctaggtaaggcggaggggaggcggcggcggcgcgaggctcgccgtgggtctcgggatcaggcgaaggcggccgggccgggcctgtaggtacgtcctctgtccgtgcctccgccctgctgcgcccaccgtcgcccagtcgcccccgagtccgctggtccttggcgcctccgtccatcgggcgcgggaccccagtccttcagtcccccagtccgtcctttcccgcgcccacccgcccccctgtccccacggccgtctctccacgccctctgttcccccggccgtcggtcccccacccgtccgtccctgagtgcccgcgtccagccccacgtccgtctctacccgcacgcggcacacctgcggagactgcagactcggggtccggccggggaggggggtccggccggggagggggcgcccgggaccgaagcctctgcccggccaccctccccgcagccgccttccgtgcaggccccggggccccgggcgcgctcccgcagcgaagtcccagcagcctcggcgcacccggagcgggtcggggatgcagaatcctggagccagcggacgacccttcaggtccgggcacccgcgggagtgcagagcctggttcggcccggggcgtgccccgaccgccgcctcccacgagggctgggtgcccgcggcgttcttgctcccgggggccccgcgctgtgcttcccgccctcatcgcggtgccaacggtgcgc

SEQ ID NO: 330689 - DNA, 812 bp, Homo sapiens
  chr1:10854235-10855047
  hyper
gtgtgtgtgtgtgtgtgtgtgcgcgcgcgcgcgcgtcgtgggttgggcggggggacaccaagattatccggcgatctgttttccagtcccctcgtgcgctctcaccgcgcgcctgtaccagctcggagacgtcctaaatttactaactttgccccgcgactaccagggccttttccccctcgccaccccctgagtgtaccgggtgtcggcgggacaactacgcacaatgagggccgcacccccacactccactcggtcagaaacgcacactccgccccgtggcccagtgatccaggtttgggggagctccatactcaggagaggcgctactgccgcttttccggtgggcacgcacccgcacccgcaccgtagccagcgtggctggaaggaggtcctcgccgcgcccagagccggctttccaagctgaagctggggcagaggaacttgtgtggaggaagagggggtcccctgcctccctcagcgctccactagcctcccccaactccggacccgggtcggggatgacttggaagaagaatctgcgcccaccccttagagaaaaatctattattattatcttaatctacgcccccaaagtgtccctccagccgtgattgacggcgcatacacctgttcccttcgcggaggagcttccagcgccggggacagacattcgcccaaacgctccgcagcggcccagcaaccgcccgcccgcccgcgcccggccagcccccgccagcggccccagcgcgcctctgcccgcacctcgccaccccggcggccgccccctccccttccagacccggctgccc

SEQ ID NO: 330690 - DNA, 570 bp, Homo sapiens; identical to SEQ ID NO: 226693
  chr1:10948510-10949080
  hyper

SEQ ID NO: 330691 - DNA, 1333 bp, Homo sapiens
  chr1:11538713-11540046
  hyper
cggagggcgcccggggatgcccgcgagtgtccaggaggctggtgacctgccaaggctgggcgggctggctggagaggagcgggagcgcgggcccgggagagacttgggtatcaggaaactcggaggcggggctggggggtggtgcctggcccggaccgtctgcaggggcggggaccgacccccaggggtcgctgcgccttgcgcttcccccgcccgcgggcgccagggccgggctgaaccaccgcgcggatcggcagggggagcggcggcgaagacagcgccagacagcgggtcccagagaccgcagcgcgcggcgtggcgcagggtctcgccggccactgattcaaggcgcggcggcgcggagcccgagaggcgccagggattgggcggcagcgcggctccggagcctggctcggacacccccgcgacccgtggtaggagcccggacccaaacaaaggcgggcggcgaataaaaggcggcggcggagcggagtgctcgggttgcgagctgaggactgggattcgcgcgcagcttcccgcggtctgcttgccctggagcggagggggagccccagcctcctgcggctccgagaagcttccccctgcgacttccgcgaggagacgagtctgcgcagcgtggtggccgccgccccccgaccctctgcgcactctctcccgcgccggcggctcagcctagccccgttcggccggccgaggtgagtgcacggccgcggggcgccatccgggcttggtctcggggctgggggatgcattgctaggaggagggggaagtcctccgcgccgtccgcaccccgacctgcttggcgccgcgcgcgaagttctctcgctctccagccagcccgggatgcgggcctcggagccccccgggaaagacggtcaggggtggacagaacccaagcttgccctctacgaccgggccccagctccgcaccatctccccgcgggactgcagcattcttggtcggccaaggggagttggatgttggatgtccaggaacggcaaggcttccgacctctggcccctgcttgtcccctctgagggatatctgggtccataaaagttgagcgtcagtctgaagccgcccttggatcgggctctcgcccatgctagagcggagggaggggacagagtaaggctaatgaccccctccacccactccctacctagcgtactcgtgctctcggagggacatttccccgattaacctggctgcaggtccggccggggagggcgcgtgggggcttggggcgggccgggccagcgatggatccgcgcgcgcgagggtccccaggctctgccgagaacgcgaac

SEQ ID NO: 330692 - DNA, 796 bp, Homo sapiens
  chr1:12123218-12124014
  hyper
ggccagaagctgcctgcctccgctccccgcagcccaggtgcggcgggcagcacactccctagagccaggaccactagttccgtcaaatccggggcgggccattcaaacagctaagggaggcgtctcctagtgtgccttttcctgagtcatctctgcacgtgtttgcccccttttttcttcgctgcttgtagctaagtgttcctggaaccaatttgatacgggagaactaaggctgaaacctcggaggaacaaccacttttgaagtgacttcgcggcgtgcgttgggtgcggactaggtggccgcggcgggagtgtgctggagcctgaagtccacgcgcgcggctgagaaccgccgggaccgcacgtgggcgccgcgcgcttcccccgcttcccaggtgggcgccggccgccaggccacctcacgtccggccccggggatgcgcgtcctcctcgccgcgctgggactgctgttcctgggggcgctacgagccttcccacaggtaagcgggtgacgggcgcctggggaggtgccggcggtccagagcccggacagtgtggggtgcgtgggacgcaagggaggacactcctcaccccgttccctgcccagctggagtgagggggcgcgggtgacaagcaggaacaccggaatatgctagcacccacaggtgggaggctggctgaagggctagtggtggggggcgcctccttctcaccccgcgatggctgggactgattcattcattcagtgtgaattggactgagagcactgccatacgcgggaggcgctctttagccc

SEQ ID NO: 330693 - DNA, 1035 bp, Homo sapiens
  chr1:12226892-12227927
  hyper
cgctggaggtatcggcccagcgatgctggagtggtcgggtcggaggcccagcagcgtctggggaggggcgtgggggaggcgtgtccaaggccggctggccccgccccgccccgccgcctggcctctggcccgctggggcgcgggctttcgctttcagtcgagggctagcgagcgcagcggagcctggagagaaggcgctgggctgcgagggcgcgagggcgcgagggcagggggcaaccggaccccgcccgcacccatggcgcccgtcgccgtctgggccgcgctggccgtcggactggagctctgggctgcggcgcacgccttgcccgcccaggtgggtgactcgcgcggcccacgggggacagccgccccgcatgtccacccggctggtgcgcagccttcgggtgcccgggccgcgctctcccggggcgctgtcacgggctgggaggctgggagtcccagtcgccgccccccatccgcatcagacacgcgcgcctctggggacccgctggggactccgggcccggcacacgtgcgctcggggcacaactctggcccccgaagcccctcttacccgcgtcgtgacaggggcgcaccctggttcctccgcgagcgcaggccggggcatttggggctgagcagcgggtcctgggcagacccccgctagacccgggacccctcttccctcaccccggcgactgccgcgacagcccttccctcccacgcggtggagaaggggctgtgccggggcgctgccccactgcccacgccgggcaccctcttcaaaagacttccttttcctctgggcgacggttttccgatttcttagaaataccagggtcctgtgtctgaagagcaggaccaggtgtgtgtcaggtccactgagggcacagctggagggcgagctgcctgtctgcttcctccgatgcgtccgggggctactgcagagtctgttttctgcggcctctggggacagggcaagcgagggaggtctgggctggtaatcgagcaaggcaaatgaagtctccgggggcc

SEQ ID NO: 330694 - DNA, 1749 bp, Homo sapiens
  chr1:12677012-12678761
  hyper
cgactagctcagcactcgtgggtggcgcggagaagtggggtggccggcgactctcagctcccgggcgcgggatcccgcagcggcagcaggtgggcttacccccgcccctgcggccccccactccctggagtcgcagtgcctggtacctttctggcgccgcgctccgcgaactcgcgggcgagctgacgcccgatgcctctcccgccgccggtgatgaggacgttctcccgcgacaggtcccgcagcttggcgggcagcaccagtccgacggctgctttcaccaccagatagatcatctgtagagggaacatcaccagcgcgcccagccgtttccacaccatcctccgcgccgcggagccgggcagggggcgaaactccccgggccgagcaatacaggaattaaaaaacaccccgaacaataaatagtaaaccgaataaggaggagagaggcgtcccacctggccactcttgaaatcacctcttcccaaatgcaaagcaccgggtgagaaaaagaaaaaaaaaaaaaaaaaaaaagataaattctcctctgggggagaaaaagcgtctcctaaggttgggacggtaaaagaggtggagggggaagccggaggtggaaagttctaacaagaagtttcttgccccagcagccgtttcggctggggaattctcaggtaatgtttacagactgacagaggagtttagggaggggaagaaaaaaaaaaaaaggcaccaaccacacgcgcgcaccctgcctcggtcccgcggtttcaaagtgcaagattaaaaaaaaaaaaaaaaaaaaaaaaaagctgattccaaattgtagcgcccccacccccaccccgtctccagaaaaaaaaaaaaaaaaaaaagtggggggaaaaagtgcttggagctcccaatttcagcccgcgaaagtctcccgactcattgctattcttgggctcaggaaattgcttaaacgcgatctgattgccagcaacgtgcaggagaagtggggggtccgggtgtcagtttctttacgtgcagcgctcgccctcgcgcgcgctcgctcgctccggctccctccctccctctctgttccagcagaggctgggagttgccgctcgatccagctccccttctctccctttttagcatttattgccttctttttgtcctttccaacttggagagggtccgggtgtggagcgcgcgtggatcggacgccttggtctgcgcggccctattcattcgctccccgggcagccgcgtcgcggagagggcggcccctttttcccccattttttcaataccccattaagtctgattgacagttaaagttgttgggaggcttcactaccgttcctctgagtggctgctgcggcctcccctccccctgcgccgtcgcggggagcgcgcataaggcgcgcactcgggctcgccgggactcgcgctctcccgggactggctcccctctctgcaagccgggacttgccgccggtgtccctgagggctcgcagctgtaactcgaacacgctggaaccgactccggcgagccggctgccttctcgagacgttcctccttgcccgggccgcccgcgggccaggtgatcaccccgagtgtggagcaggcccgggggagcttgcgtatgccttgatccaaccaggtcacccagggttttatttcaggtcatttggtcatcctcggcctccaggtaggatcaggaagccactcctcacctttgctcggacctcttctgtgttcac

SEQ ID NO: 330695 - DNA, 1141 bp, Homo sapiens
  chr1:13839543-13840684
  hyper
cgcagggagcgcagcgcgggcagcgcggccagggcggccacgctgaggctgcgcaggttgttgtcgttgagctccagcacctgcagcgactccagggtctcgaaggcgtcctcgtgcacgcccaccaggttgttgttagccaggctaagcttcaccagcctcccggccgagcggaaggcgccggcgcccagctgggtcaagttgttgtagctgaggtcgaggaacacgagcttggccgagccgctgaacgtgccctcctccagcgagcgcagcgagttgttcctgaagtccaggtagaccaggtcgccgtagaagatgaagaagtcctcggggatccgctggatgcggttgccggccaccagcagcttgcgcacgtccagggggaaagggtctggcacgctgggcagcccgcggtcgcggcagtccacggtgtgcgggtcggtgcaggcgcagcccgcggggcacgcgtgcccgggcgcgagcagcagcagaaggctgcagagcccgagcgccgcggcggcgcaggctggggctcgggggcgcatggccggggggcccgcgccggccgcggcgagaaggaagcggctctcggagcgagccctggcgcgggacggcgcggtgaggcactggctgccgggcgcggggagccagagggcggcccgggcggggagggcgtgcgcccgggcgtgcgggggcgatggagcgcggcgcggacggactggggagccgggacagcagggatggagaggggaggggcggggagggaggggcgagggactcaccaaagggtttacccggacaggaaattaacccgctagaaaaatctcttgggagaggcgggagcggcaggggtggccgagtggccgtcgccaaaacgcggccccaccctggcagctgatttccgagatctggcagtaagacgccgcgcgcaccgggcgggctgcactcgacgtctaagttcagctaccaagcccaggagcggtttccctaaggcgtgtcccgggcgtgcgccctgccccctcgcgcccgcctggtgccaaagcacgctccctgcacgccaccctatgtcgccaaagggagtgggacctgggtcactctgactctgctccgggggcaatccctgcaggttctcgggtgccgc

SEQ ID NO: 330696 - DNA, 897 bp, Homo sapiens
  chr1:13910117-13911014
  hyper
aagcccattttgccagggcccgcagtcctggcggcccccgcagctgcggccctgtaactttaaacctggcctgagatcatcgttttggcgccggccaaacagagcccgagggcgggcctagcgcgcccggacggagaccaccttgcggccgaccccgctcccccgcctcctcgggagagataaatgctgactccgctcggaaagttctcaactgcaaagtttgctgtccggctgcctagggtctgggaagctcgggcaccctccctctccggggctcctgctcccacccctccggcccccccaccgtcgcgctcctccaggctgggcctgtggccgcggtgctttttaattttcccccagctcagaatcttgctgctcggcccccaggagagcaacaactcaacgggaacgatgtggaaggtgtcagctctgctcttcgttttgggaagcgcgtcgctctgggtcctggcagaaggaggtaagacccagcgcaagtggcttcctgccgtcgctgatggggacgagcgagcagagacttgctggaatgcccgggcctggtattcgaggttgtccaggggagcgcgggggagctgagggtgtgtgcgtgtcaggcggctgagcgccggaggaggagaggcagcggcttagtcggtgccaggtcccaaagacgcagctgcgcgggtgtgccgggaggagccccggaatccacaggctgcgaggtgggcagcacagggggcctccctccgagtcggcagcaccagagagatcgggtggaaggttcacagtaggcagccccgcttgctggcagcagtggctggggtttccttcccatagagcggtgtgttggaggaatacgcacgcctcgggagaagctggcctcgtagaatcaggagggac

SEQ ID NO: 330697 - DNA, 714 bp, Homo sapiens; identical to SEQ ID NO: 221239
  chr1:14026482-14027196
  hyper

SEQ ID NO: 330698 - DNA, 473 bp, Homo sapiens
  chr1:14219352-14219825
  hyper
ccgcaccggggtggcggcgcgggctgggggccgctgcagcaggtctcagtccctccctgctgccacgcgaggagtggggagcggcagggcctaggcgtcccgagtggaggatgagccggagacgcctgcgggtccggagctgcaccgcgcccgtgcggcccgcgccgcccgcctcccgcgctctccctttggcagcagccggacgcctggcgcgtgcaggacctggggccgcggcgctcgcgcggggacgcgggagcccagggtcggcgctgcaggcagcggggcggcgccagcaaggccagctccccggggaccctggggcagcctcgcgccctgcctgcctccctggactgagacgccgcggggcctgggcagcgctctgccggcagctggtgctggaacacagccggggctgagctgctcccggggaccctgccccttccaggtgaccccaggagaagcagccccgggcc

SEQ ID NO: 330699 - DNA, 1852 bp, Homo sapiens
  chr1:14924521-14926373
  hyper
ccaatattcagcccggctaagaagcttaggagctggctaaggctgctcctccacctggatgcacacacagggctagggctgtggagaggcgggagcaccagcggcccacgccgaggaagataggcgctccctcctggggtgggcagcgcaggtctggcctgcgggtggggggtggagagtgagaggcacgcggggcaccagctcagctcccctctggggatttcgtactcgcagtttaaggaaccggtggagcacgaactccactcctgagctggcgcaagcgtctcccttccatggagatccaccccggctcccctctgaggccccctttccaagcaccctctcttccgagcacccagcacctccccaaccttagcacggctcggggcaccagttctccagggcgggggctgccccaccgctcaagggaggggacagagggccggcctcggtccaggcgacccctgcccctcgccaggggcgccaccttggccccctcccgactgccgtccgccgcctccgcccccccggggggtgtgtctccgaagtacgggggcgcgggaggccaagggtgcccccagcctccgaccgagaccccctcccgagccggcggcgaatggtaggctccatttaaagagtgcctggtggcgcgcggtgtccttcttggagcagctctcggcgcccgcccgccggggtctcggcgatcgctgctcctcctcctccttctcctcctcttttttctcctccgcctcctccccccgccgcctcgccaccgccgcggctagggctggaggcgccgctgtcattcctgtgccggaggaaccggcgctgccggtgcctgggggtcggggcgcgggcgaagccgggccgcggaggacacaacaggtagagccgggggtgcccggccgcgcgccccccgcgcatcatgcagctctttgtcacctctctcgcccccaggccaaaatcctgagcatgatggaagacaataagcagctcgcgctccgcatcgatggggcggtccagtcggccagccaggaggtgaccaacctgcgagccgaactcacggccaccaaccggagactggcggaactgagcggcggcggcggccccggcccgggcccgggagccgcggccagcgcctcggcggcgggggactcggcggcgacgaacatggagaacccccagcttggagcgcaaggtaggatcgccccggcgcccagggcggaggaaggcgagcagagcacgcccggcctcggaggtggccggggacccggggtcccccacacccggggcgaaatcgctttgcattctggcttgtaaccctttccgcccggcggtggccaccgctgctctccggctgggagttgcaggctgctgtcattcacgaaaacccgagcgcagtgtgcacggggtcacacggtcacaccggccccggccagcctgagcgaggcgcagccggcgggtcccttccggcatcagaaagtgccctttccgtggcaccagccccctagctccgtgcaaacttttcatgccggggccttttccccaccccccgcaggggtgaatggcacagttccccccacttccttaggctccttcccagagagagctccgggctctgccgccgtggttgggatagaggattgcactgctgtgcacttttctccgcggatgccaaatcccttggctcagttgcatctggactttattttcttctcatttgaggtctctcaggcattggaatctatagatgcaacagtagatgctcagctcagcagggagtttaaatttccgcaaatataaacaccgagagcactttccagggggatactgtagacctcaaaggttgagc

SEQ ID NO: 330700 - DNA, 1047 bp, Homo sapiens
  chr1:15250613-15251660
  hyper
cgcgggactgagagccgttcccacgtgagaggctccgcggccgaattcctcgcgtgcagcaggcgcggaccgcccggcgtccggccggactgagagccctggtccggcgcgcgccgccggccgggcgggaggcgggggcgggctcggctgcgccccgatgcggcggcgacctccgggtctgtgagcccggcgcgcgccgtcggagcccctcgcgcagccgctggtagcgtccccccgggcacccggcatgcgggcggccgactcgggctcgtgggagcgcgtccgccagctcgcggcgcagggcgagccggcgccttcctgcggggcgggggccgggcccgcgcggcccccgggacccgcagcctgcgagcagtgcgtggacgcggcggggcccggcgatcggccccgcgccggggttccccgggtccgagcggatggcgactgcagccagcccggtaggtgcgcgcggggcggggcggggcgggcggcgcggacacaggcccaggagccgccggggccgggcgcgcgagggcgctcggagccgggatcgggaagccgctggtggcaaagttctcgcagcgcgcggagccccgagccccgggcgggtgcagcgggaggcgtgcgggacgcagagtgagttcctcggcgtggggaccggggctcgggggctgcaccggggggccaggaccgcgcttgccggagccaggcgatcccgcggcgcctggagacccagctccgggctggaccccgcgtctgctgggggaagcgtgggaaaggggccagccctgcgcgaagttggttcggccccctgggaccgcacctgtgagccatgtggcggcccccgcggagtgccgaggggagcccccttcaccgccgcccctccgaggcgaaattgatgcctcgcatttgctaggagcggagagattgctgcgtttctcatacacttgaactccgagtaatgcagaaagagaaattgcagaggtggagacacaaacgcagtgatctaattgcgtttggttggcgaatccgccccaagtggagaacagc

SEQ ID NO: 330701 - DNA, 1899 bp, Homo sapiens
  chr1:15478897-15480796
  hyper
cgtggacaccatatgtacccatgaattccgcctttggaagtgaacttgattgcagcctattttcgtctggaggcggtggattcccggtaggaggcgccttcagtcctcggctcgatcctgtgacgccagccagctgcctatcggcttctcagtgtttgaacttcaaagggctggacgctcacccaagaaggggaccccggcctgacctctctcggaattcaaaaaaatctaaggctcagagagggaatgggagctggctcttccctctgtgtttagcatccacgttttttggcggtctggctgaaaccagcccaccctagttcgggcgccagagcaacgcagttccgagggcagatctccaaggggcggaggcagagccgcgggtgagaggcttccgcgccgacttcgggtttgcactccccggagccagaactccgtggcggctccgggcctccgtggatccgagcagagactggctgcccgcctgccactcgcaggctgggaaaacgccagccggtgcctcgccgggaaagttctcggcaaagctggggatgagccctcagcagggcaggctcccggtgcagcgcgcccccatccattgcccgcgcgcaagaacccggaatgggccccacctgggccgggactcgggcgtgcgatcccgagggcgccctggggaccacgcatcgggtggggaccctggccgagggcgtgagctgactcagtttttaaaaactcgcttcctccttccctacttgtgccggtcactcacctcgctgggaaccagcccagggcagaagggggagagggaggcggtggcctccccaggaaggaggagaggtgagtatcccgccaggtaaaggcggggcggctggcggagctgtgcctcggcgtctgcgcctggtgtgggaggaaagcgggtctcccagctccacttaaacccctaaaacctgggacttctagcttgagacattccccgaccaccacccgtcacacacacgcgcgtgcgcgcacacacgcatgcacaccgattctctgggccctagggaggaggggggatcagggctctattttctcccgaccccctcttatccaactcggctggcaagggttggggagaacttaggcccagcccccggcacacgctcagcgcgctccagcggcatacgctggggagtgggtgcccgcctcgctcagctgcgatccctcgcctcgggcccgggggtggtgccgagggccgggagggagggtcggccggtgggcggtgcttctccgggctggaggccgctcctggccggcaccgccctccgcctcccgcggtccctccctcccgcacgccggcgctcccaggccgcgcttcctgcgtccccaacccggtccctgagagggcagtgcgccctctccaccactgcgttccctcggctaagaatcccccgaaccccagccccgcgatcgcggcgcccaccgaggaggccgcccgggtggggcgcgggggtcgcgaagcccgcagtcccggaccgcccagccgagacggagccggacccgccgcctcccgggtgagtctcagccgccgcgccttgcgcccgctgcttcccgcggcgcgctgtcggttccccacagggccgtgtaagggggccgaggcccgtttgggtctcctgtccgtccgtctgtccgccgagcgcttcccgcctggggtcgaccaccgggaggactccgcaccccgcaccctctgcggccgcgccccgccggcgcgggacgctcccgcctcccgggcaccgcgcctggccagctggcctcggctggggaaggcagctggccttgggggccccctgttggcgggaacaggtgctatccgcccggcgggcttcgaacccttggcttcgccagaagcgctttcagcgc

SEQ ID NO: 330702 - DNA, 462 bp, Homo sapiens
  chr1:15573640-15574102
  hyper
cctgcacggtgccacgccccctctgccgcgcaggccacgccctcatctattaggctggaccccgcggcgcctggcggcgttgccatggcaacgcgcgtacacaggccggccgggcgggcggggtgccgggtgcgagctggagactccgcgggagcgcggccgggaggcttcgccccggagctggcccgacgcctcccgagctggcagggctctcggcggaggtcggagcgtgggcttcctcctcccgccaggtgagtgcggcgcgggaaggggtggcgggccgagaccggggaccggaaggggcggcccagcgaggactagccctggcaggaggaggggtggctccccggccccatcctcctggatccaggctccggtccccaggagcaccccagtagctaccccaacaccagcccctcctttccagatgcaggccccaccccgcccgcggaggaagccccc

SEQ ID NO: 330703 - DNA, 274 bp, Homo sapiens
  chr1:15735867-15736141
  hyper
cggcgcccgccacggttcaccctaaacaggggtttctgctccccaggtccgcctcggaacccctgcaaccctcattgagaacgccagtgtttaacagcgagtcgtttccatagcaaccgacagggtgtcacagacacaggattatgacttcacggcgtggggattccggagaagggggtggggcggcgccccccctcgcttccccgccccccggcaagccccgctcctcacccaagccgcgggggaggagccctcttctttcccgcccggcccc

SEQ ID NO: 330704 - DNA, 641 bp, Homo sapiens; identical to SEQ ID NO: 226731
  chr1:16085155-16085796
  hyper

SEQ ID NO: 330705 - DNA, 759 bp, Homo sapiens
  chr1:17445328-17446087
  hyper
cggcaagtctccgcggaagctccgctgaactgggagtgggaagcaggagaggggctgggttgaggtgggtccgaggggaagtgaggtgcggaggggaagtgaaaggggagaggacggcagggaagctgaaggggtgtgaggtcccccgggaggagaactggagagggccagacggagggttacgggtgaaagggagggtctgtgagggagctggggctgaggctgtgttagggggtctgggagagtctcagggtttctggaaggtggacacaaggttcgggggttgtcaggtttctggatgagattcttaggatttctgggctcgggggctcgggatgagggacaactcgggctggacaaaggctgtccacgtccccgagtctgagcgcgtctcaggatttctgggctcgagatctcggcccgggcatcacggtgggccggctcacctgtagacatcggtccagaggtaggtgcccagcacgtacaccgcctccacgcggctcccgtactgcagccgcacggtccgctcgcgcagcatcctccccgccgcagtgcccgcgctcgctggtccggggcggccgggagcacctgcagcaggtgcgccttctccagcagcctgcgccccacggccccgcgcgcagccttatccagcggccggtgggcggggcggcccgccccagtcctctcgcagtgggctgcgggcctgtccgtcaagcgtggtcccgcccctaactcgtcccgccccgctgaggtcgtggc

SEQ ID NO: 330706 - DNA, 745 bp, Homo sapiens
  chr1:18434105-18434850
  hyper
cggcttagcggacgagagccgaacagcccagaaaggattaaagaaaagtctgtataatacgcggagagcgcggcgaggggagggcaaggagggcgggggggcggggagagggggagggacggagggagggcgagaggaggggggtgctcgcgccgccgggagaggcgagcgcgaggcagagagcgcgattcggctccaaactccggcgctgcagccgatcggactctgggccgcggtgggcaccgcgcgcagctagggagccgagaaccgcggcgagccccgaggacgcccagagcgcgagggtcgctgcgcctcgcagagccggagccgagtcgagccgggcgcccgggctgcctggccgcggcggcatgggggcgcccccgcggctctccgcgctgcccgccaccgcctcggccagtggccggaggcaggagcgcgtctgagcccatggcgaggggacccgccgccaccgcctccacccccgccgccccgccaccgccgccagctcccgggcaccatgcgaaccgccccgagcctccgccgctgcgtctgcctgctgctcgccgcgatcctggacctggcgcgcggtgagtgcgcgggcgcctggcgggagccgagcggtgaacgtgcgcggggacggggtgccgggggagggcgctggccggggtcgctccgagaggctcgggctacgagcaccggtcctgcccggggtctgtggagctggttggctcgatgagggagggag

SEQ ID NO: 330707 - DNA, 101 bp, Homo sapiens
  chr1:18956226-18956327
  hyper
cgtggggccagagacgctctttcccccgggagacaaaaggcctgcagttgtggcgtcctgccccgctgggagggcgtttcgcccccaggactcggtgtccc

SEQ ID NO: 330708 - DNA, 1192 bp, Homo sapiens; identical to SEQ ID NO: 226755
  chr1:18956603-18957795
  hyper

SEQ ID NO: 330709 - DNA, 150 bp, Homo sapiens
  chr1:18960805-18960955
  hyper
cgcttggccaaggccgggtcaatcagctgggaggggtcttcatcaatgggcgacccctgcctaaccacatccgccacaagatagtggagatggcccaccatggcatccggccctgtgtcatctcccgacagctgcgtgtctcccacggct

SEQ ID NO: 330710 - DNA, 966 bp, Homo sapiens
  chr1:18963106-18964072
  hyper
cggcctgtgagtcccgggagagcccggctgcggggctgcgcgcctggtctaccccaatactgcggggagtgcgtcctcccgggctggcgttttggctgctactctcggcgtcgatcaattatttataggaaacttgggcaagggggcgggggacgggagggagggagagaggaaggaggagccggcccgcggctccctaaatgaatttgttaaccagacccccacacgctctctaaacggtcccttgaaaccccgcctgacagttgactgaccgctgcaatcaataaaaattagccagggccgccgcctgactcagccccgcgttgccagggcggactgggggacagagagtgccttcctctgtggcgtgcgccggcagggctgggagtggaggccaagttcccagatgcccagggtcggaggatcgcagtgggggagagacccaggctccacacaccctctccccattcttagcacggcttccgcgggcaggctggagtctgagtcctgcgccatgctttttctcaggatcagctaaggagggcgtttagttttcaagcgcccggaagcccgggaaaggggattgtgcttttgtttcttgacgggaggaagtttcgagagaaggaagggaaagtttttcctcattaccccctccccttcctcattgccctcataattcccctcctaagtctctttgagacttggtaagtgcacgttaaggggcgacagggagagaaacagaaatggaagacccagagtcacaaagactgacagttaaagaaaaggccccaaacacatacgcggagaggcggcaggctgagggaatcggaaagacagtggccatgggaacccgcagactgatggctttggaaaaagtggcgagtgccctggaacctgaaagcttgcaaaaagccagtgttgtttcagtctcccttcagaggtttctcccagcacccctctcctcac

SEQ ID NO: 330711 - DNA, 789 bp, Homo sapiens
  chr1:18969556-18970345
  hyper
ggtcgctacagcctcgggaggggtgaagggaagttgtgtgcgccccaagtccagctcaaaagaggccccgagggcattctagggcgccttgggcacgcgtgccaggcccccggtttggcagccgagctgagcgagggtggattgcgaggggcactggggccgccgcggagctctgcgtgtcggctgccagtgaattggccgatttccccagtctgagggtcagcgaacggacctttccatggcttggtcgccctggtcctggaggtgcgctgggcccgagctccggtggagaccaagggaggggtggggagaggcagcggagacagagagccacagaggaggagagagctagaaaattcagagtgagaaagtctgagcgcagcagaagagaatcttgcgcacagtttgaggacgctggaaaatgcggaggcgccgagggaggcgccgagcagcaggaagaaagacaaagagatgcagaatcaccgagagactggccctgggacaggcggatcaggagagccagcgggacctagagacagcccgcgggagagcacgggccgagagggcgagtgctcaaagccgggcagcggctaggggaagataggaggcgggcgagccgcggccgcccttttgatccttcgtggcttcgccttatcagaagcgctttcggtgacatccgcacaaaggcagttcatcatattacagcacgtcccggcggctcgctgcgatcctgccgcttaattagaggcgagcgagctgggccggcagggcgggagggaggccgacccc

SEQ ID NO: 330712 - DNA, 462 bp, Homo sapiens
  chr1:18971634-18972096
  hyper
cgcgcgcgcgcgtgcgtgcgcacgacagcagagtgtgtttgcggggctggggctgaatttggcagccagcccccaagctgacctctggagtggcccgcgtcggcgggctgggccttgcttcgccacgggttcgagggagaggcggagggaggagcggctgggctgcggagcctcttgccttcactgcactctttgtctgacaccacgaaaagaccgaagatcaaagaggcccccgagcgggacagaaaaaggggtggggcggcgggcgcgataagtagctcggaaaactccaccctaaacttttctgggtcctttccatgggacccagaccctacagaacctcacccaagtgggcgagtgggcggccggccgtgggttctctacagtcccaagcctccgcgagggcgacaggtggagagggacagctacggctgcgggctccaattcaggccgaggtctttc

SEQ ID NO: 330713 - DNA, 779 bp, Homo sapiens
  chr1:19043069-19043848
  hyper
cgccccatttcccttcgccccctgtgccaccacccccttgctcaccgtctccctgatcgcgtcataaccctgagaatacctccagcctgggtcctctctccacccactccattctctcaaaccctcatttccctctttgcctgcctcctcccatagctggcctcgcctctacccattctcttccccctaatctctctcattctcctctcctctctcattccgcacccaacaaacacctcttccccctccatcttcagcccctgcgcgccccccttgcccttgccctctcccccacccccgtgtcccctttccgaattcctccgctgctggtgggctccgaggcagggaccgggcgcgggctcccgaggccgggcggacccaagtccagggcgggggttggggcggcggccggagcggggatcgggtctggggggatccgcgcggccgcccctccccgcgctccgccgccgccgccgtcgccgccgcgcctttgatccatggcccgaggccgcctgacagtggaaaatgcggggagacaaaaccactcagtcaaagtgattcccaacaactgtctccccgagataaggacgccctcgggctcggcggcctgcttaattcccgctgcccgggcctgggatcccgagcagccgcgcgcctggccgccccccggactgcggagccgccgctcgctcgtccagtcttggtcgcggggcctcggccgtctcgggacggggcaggcggcgaagggacgggcagccggtaagcaagacccttgctgc

SEQ ID NO: 330714 - DNA, 305 bp, Homo sapiens
  chr1:19283562-19283867
  hyper
ctcctctcccacgtcgcctgccgagagggctccgtttctctgtcctctctgcccgcaatgcccctggccccaaattccttcggatgtgcgcgaccgcggctggaagggctgggggaccacagtatccgaaggtgcatcggcaccccacccccactctagcctggggaggcccagatcgacctttcggggataagagggcgcccgtgccccacgctgcggacccgggggtgggctcctcgaatgctagctgcgggccttgtcctctcgagatcggcccgggcacagctaagcccgctggttccccc

SEQ ID NO: 330715 - DNA, 620 bp, Homo sapiens
  chr1:20512380-20513000
  hyper
ggagagaaggaggccgcgggtccctgtcgcctccaggccaggcaatccactccaggctcgcaatccaccgacctggagttcacggcctccgccctcctggcccagcggcccccacccgaccccacccgaccccacccgacccaggccggttccggtcacgccggaagcacgtggccccccaccctgcggcgttgcccgggagaccagggttgtttaccagcaggacagagcccgggcgcaggcggcggatggagcggaacggctaggtgagagcggctgcccgatcccgcggcctgcccttggcctccgccaggcctggaaggggccgggggaggccagtccccgagaccccagcacatcacccgggagggcctccccagacccagcccgggggacgcaaaccccgggagacaggcgaggagcctggagaaaagtctgctcccgaggcaaagcaagcctggccagagctcacctttaccaaaatagggtgactcccgggctctgcagaaaccgagggacctatgcaaccgctgggccatgccctccaggctgggatgtagcgacggggacacagacccagggagagaaaaggatgtcccagtctccggcagggcagagac

SEQ ID NO: 330716 - DNA, 330 bp, Homo sapiens
  chr1:20618155-20618485
  hyper
cggcagccgggctcatgcctgctgcccttcggatgccccgcagcttgtgaccatccccagagccaccggccaagggcacaccctttcctgagccccgtgtctcctgcaaggtaagaggggaaggagaaaaggtcctcgggcagaaggaggcggctagtggagaggaactcagcagcgggtgcagtgtggcgcctgctaacgcatcaagcctccgctggaagttccaccataacgtctgcggcagccccaacagttccaccccatgctcccgccgccggcaccacagcagcagaaggaggcctgtggggcgggggccagaacctttccctc

SEQ ID NO: 330717 - DNA, 225 bp, Homo sapiens; identical to SEQ ID NO: 226785
  chr1:20669765-20669990
  hyper

SEQ ID NO: 330718 - DNA, 1485 bp, Homo sapiens
  chr1:20810336-20811821
  hyper
cgcggtgaaacagctccatcctccgtccctgccaggggtcccttccctgctttcctctgaaccacccaccaccctctatcctccagcctgcgtcccagctccattctgagaaaaggaaacagagggcgccaacccagccgctcctgctgcagccagggcgcgcactggcccgcgtcctccccgcaccaggcgcactaatttagacagaaatgtctggagctgggataggagagggagccaaagtctttgggtctcgggaccccaggtaagtcccgagcgcagctccggtgggcaaggctaggtgcggagatgagcggaaccaggaggggacgccaaaaccggttcccacgacgcgcagcgggtgggggttagggcctggcctgggcgggcgccccctcctgcgcgccctctcccagccgctggccgactgactcggccgccccgcgctccccgctgccgcagaggtcagagcctcccttcgctgcctgccagggacacatgccgtaacctcggcctctcttaccgtctcgacttagcctcgcctttctcagtccctccatcgtccctcggcgcgacggccggcagccgatcgaggtctctgtctctccctgtctaaggtgtcggtcgcccttattgtttcggcggcttctgcgtcctccccaaacgcgcgtcctcggctctgtctctcccgcttcagctcccctctcgggagctttgtctcggtctctgccaccctcggtctcccgcgtaccccctcccctccatccctgcgtctcagtctctctctgcagccgtcggtccccctcattgtccccgcgtctctggagctcctctcggagcctctctgcgtctccgcctctctggggcttttccagctctcgcgcggatcgcccaggcctggcaaaccccctcccaagccaagtaacaatgaaaagcccgtgcgacccgaacaccctagccttccccgcaggaatgggatcctccccacgcaggtccccacgccgtcccctgggggtccctgggaccccctccccacagggttatggagcgagtgcagctgtgactacactgcgcaaaaggcgggggtggggggcgcaaatcaaaaagcaaactttgccgcgcgggtggagacccccagctgctgctagaagccgccacgcccccagggtgacccagccggggatccggcttagggggacgcgttcctgcgacccgcttcagccggacccgcagtgcgggatcccccaattctgcaagaagggattccgtcaggtctgaacgggctccagcgggtgggagacctccgcaacccttgttcaggccgcggcgcgggaaaaagggggtgtcagacaagggggccgcgaactcaccccgcttgctccggccgatctggcccagcttgggcggccgcttgttctgcccggcgccgaagaagttgttggtgtcctgcaggcggcaggagaagatctggcccacgtcgccgcc

SEQ ID NO: 330719 - DNA, 342 bp, Homo sapiens
  chr1:21563161-21563503
  hyper
cggcctctccttcccccaccctcctctatctgtgctggacgccgcagcaccccctccaagtgcctggccagcctcaccttttccttggctgattttcgggtttcctcatccatccacttcagggtgctcaggctttcctcaaatgccttcttaatctccaggatgatctcggtggcctgaggagatacacatcacagcagtaaggtctgcgcactggtctcaggtaaatgcaacaggcaccccgtgcagaacaatgatggccagagattaaactcaattttccaagcgtcaggctgggtgagaaggggagccacagctgtgcttccaaaccacgctcctaac

SEQ ID NO: 330720 - DNA, 804 bp, Homo sapiens; identical to SEQ ID NO: 226800
  chr1:21835553-21836357
  hyper

SEQ ID NO: 330721 - DNA, 491 bp, Homo sapiens; identical to SEQ ID NO: 226802
  chr1:22140693-22141184
  hyper

SEQ ID NO: 330722 - DNA, 186 bp, Homo sapiens
  chr1:22351424-22351610
  hyper
cgacagtgcgtagtctggtagcaactggaaaagtcctgctgagatttagcctcccatacacacagagtcccaccccggacaggctgtatcaaccccccacggccatatgcccactgctgtttgcgtacaatgaggcgggacctatagactgtatccactgactcatctggagtgattccgcggggc

SEQ ID NO: 330723 - DNA, 236 bp, Homo sapiens
  chr1:23748954-23749190
  hyper
gagacttcagcaaccggcagtaaaccccgggcctgagctgcaacgtggaggatccgtcttattacaggaagtatgtcctcctctgcctaaccactgctgggcgggtccactttcactcccagagcaggccccacctttctcggccagacgcccagagctccatgcccacccagacactgccgagagcccaggcgcagacgtggctgtaaactggctccatgctgcagggaccctgc

SEQ ID NO: 330724 - DNA, 713 bp, Homo sapiens
  chr1:23884855-23885568
  hyper
gcaggagaggttcccggggtcccaggcagaacgggcgccagcacctgcgttctgggcgggggaggaaagaagaccaaggagcagtcagtttccgccgagcgtgccgaggcgggggccgtccgcagactggccggcgccagggaggaaacttggtctgtacctccagctgataactccgcgccccacgctgcccccacccagttggcgccaaagaccacaggcggagcttgcgctacccctcctacttggaattgacactagctgggagggggctgccgaagacagctccctatacaacatggaacagaaagacttgtatttagtcggacccatgtctactttgccagaccctcggccactgcgggagggcagggcccaggcgcatttaaggcttaaatgcacatcacatggaaactgactctgccattcatttgatgcaaccatgggcaagtcacttgtccctctctggcctcagtttccctaaaccgagtgagtggcaatttttcaaaacgtctgccaactccaggacttgccgtttaaacctccctctccaagagaggagatactcacctggaggtgtcaggacacggccgagtcagtggcaaaagctccttttgtcgttggagatgacaagttccggagtgagctcggctgtctgattagaggaaaagagggaagagttacgcgaggcaatcgggagctccgagggtccc

SEQ ID NO: 330725 - DNA, 380 bp, Homo sapiens; identical to SEQ ID NO: 197392
  chr1:24126329-24126709
  hyper

SEQ ID NO: 330726 - DNA, 813 bp, Homo sapiens
  chr1:24648324-24649137
  hyper
cgccgggcctttcatgtggtcgcagcgctctgggtgcctggagcccgcagccctgggcagccccgggctaccgcagggcgcaagggatcctgggctgcggccgagggcgccggaagtcgccgccgaccgcctgggtctcgcaggaaaacagccggcgcccgcgagctgcccagcgtcgggttttcctgaaggtgcgtcggggcccccggggagctggagccgcaggcgacctccccggtgacctgttgttcccctctggagggccggccggcgctccaggcaggccccgttgacagcccaggaagggagagtttcgccgcaaaggggcttggcacacagtaggtctaaggcaccgaggcaggagcgtcccccgcggcctcgctccctgctctctgggccccaccgctgccgcctggagtctcccctcagcctcgcagagacgcgactcggttgggggaaggggactagaaccgtcgcagtcctgaccgcggccgccgccgccgttctatctgatctccaggagcgccggctccagactgcctggagcgctgaaagagttaatcaggaacgcctccccgctgtggttttgtggtcgaaaccatgattgccaggagcaaatttttgtcgtgcacgaggtgtgttattaaaagtcggagctacgctgctgctgaatgaaaagttaaaagccctctttgagttcgggctgtaaaactggcggactgggccgagaggcttgagccaaccctaacggcggcggcccgggcggcgcgggggtcctgcggctccgccagctgctgggagcgggcaggctgc

SEQ ID NO: 330727 - DNA, 40 bp, Homo sapiens
  chr1:24739857-24739897
  hyper
cgcactcgcggagcctgagccagaagggtcggacgcccac

SEQ ID NO: 330728 - DNA, 234 bp, Homo sapiens
  chr1:24742017-24742251
  hyper
cgggagagggggcaggggagtcgccgcaccattcttcctgtggccgctagggggtccccgctccaggtgagcgccaagctctagccccaggtcgctcccttatgcttcaagcaagctttgcagcgcagccaattgccaggggctgtcccgcctactccccgtcctcgcagccacttgcctgcgcgaaatgcctgccaacttctgactggcaggcagtctggcaaatcaaatcgc

SEQ ID NO: 330729 - DNA, 796 bp, Homo sapiens
  chr1:24882115-24882911
  hyper
cgacagcctggggaggaaggagcctttgatcctacagcggcaagagttcttgacacttgccggctgccaagcctgtttcctcccggtctaacgttctgtggttgtctgaatctccagctgcccctcaaaaccttcaatcagattagcgccgtgctcctttaaagaccctactcaaagtgcctggagctcacctgggtgtgtttgtgaggccctttccctctctttaccccgcggaggagtccgacctggaagcctcctgctggacttctctactggactgagtgcccgggagtgccagagccagtcccaaaaaggacccaggagcggggacaccacggggaggcgccgccactccagtgtgcgggaccctggcacccccggcgcgttctccggcctccccaggatcacctgcacggggcggggccgggggcgggacgccccgggcgggggcgggatcccagggtggcagcgccgggcggcggcggggaccctggctgggagcgcggcggtgccggcgggaggccgagcggggctcgacagagcaggtaggaggcgcctggtcgccggggttgcccggggctgcggggagcgaggagcggtccggcccaggtgcggtggcttcctgtccacctgccggccgcgctgggcgaaggagggcccgggggtggggacgaggggtccccagtctcacccccacatctgttggaggaagtgcctggggtctgcgcgggagggcgttggtccggggtggtgggagggaggctgatcatctccagtgggtcttggagacgaggtc

SEQ ID NO: 330730 - DNA, 1983 bp, Homo sapiens
  chr1:25255291-25257274
  hyper
cggcctcagcttccagccacctcgggcagcaccacccccagccgccggcccttcctgccctgcccttttctcacggcagctgtgagaggtttaggggaaaaccgaggcgttttcgtttcatctcgctgcccccttaaaaaaatgaaaatgaaacagtcgcctactccctggcataaagaaaaaggtcctctaaatggctgggggctgccagggttaggggtcccccaatctcaactcgccattcgggacgcataatatccccgagcaaacgtctggagagcagtgccccgatcccggcctagcgccgtccggtaaaatttcggaagcccgagggtgtgagcaggaagcttttgcgaagcggcgcgggaggaggggtgctggaggcggagggtaggccctttcaccgttcgcaccccacccgcggtgtccttgcccctgtcccgggatcctcttctccgttacccgcagggctgtatctgagcgatccgggttaggggggcgcaaaaccccatccgcccatttccgcaccaacgtctctacgcaaggcgccccaaaacccaggtggagcggggcaaccccgttaaaagtcattcctgcagggcgcatccaaaacggaacgccgaggtcccggagccgagcgcgcagccagactgaaccgggtgcccgggtgtcgccgcggcgtctcgggcacctcccatccccactgctcccgaggctctggctcccgcagctcagacgcccggagccccagggccggcgccctcccgccccgggtcccgcactcaccttgaaggcgacgggcagcgtcttgttgcagcgccagtgcgagggcagcacggagcagaggaagttggggctgtcggtgcgcacgagctcgcctgcgtggtccgccagcacgtccaccatcgagcgcacctcgggccgggcgcgccctccgggccccacggccgcctgcgcgctcagcgcgccgctgttctcgcccatcttgccgccgccgccgccgcaggggaaggccggggagggaggtgtgaagcggcggctggtgcttgggtctacgggaatacgcataacagcggccgtcagggcgccgggcaggcggagacggcgcggcttcccccgggggcggccggcgcgggcgcctcctcggccgccgctgccgcgagaagcgggaaagcagaagcggcggggcccgggcctcagggcgcagggggcggcgcccggccactactcgccagggcccgcccgctgcgaggcctcgctggcccgacggccgcccgcagcctgcccggctagtcccgcatcctcggcgcgcggccccgcgtgcggccgcccctcgtggctgtcccggctgcctgggccgcggcggggcccgcgcggggctgtgccgctgccgccgcctcccgccccgaagctcgcccgcggccgccccgactccgcggccgcagccccagaacaaatcctccagaatcaagtggcggggccgcggccgcccgcgcggggttagtacccccggggcccgcggggcggggctggcggagcgacgcgtcgcacagccaatcggcggagcccccatcgcgggcacctcggtggcgttcgcggggaggaacggggcctgccggaggccgcccaacggggaggggcggaaggcgccaccccgcggaggaggccccagtgccacagcccagggcccccgagagctctgggagcccggggcaaatgctagaaatttgcttagaacgtccgggtcccacggaaggcgcccttgccgccctctctcgggtcgtagctccctgacgctggggcgcaaccccttcgctcctcctccccgctggccgcggccgggcttccccagctcttgctgcttcgggcctgtgacttctgcaaccccgggctgggggccgcggggtctcagggccggtgacgccgcactgggagccgccccaaagaggttactcacctccctcgtcccgcacattattctga

SEQ ID NO: 330731 - DNA, 751 bp, Homo sapiens
  chr1:26372113-26372864
  hyper
ggccccaggccccccgcgggcaggggtcagaatctgggctgcgccccaagggagagacggtccttgggccacagcccattatcttcgttccctcacctcaccccacccctcctgcatggtcccagctcaagccgcagccaaaaccaaccactgctaggatggcaaatgcggaggtgcgtcggctgccgccaaaattcccgcccgtccccaggctctcgccttaccggattgccggcctggcgtccaacagatgctgcttctccttggcctccatgcagtcccgcgccgagtcccggcagccgcgcagccgccccgccgagtgcgccctgaaagttgcgcgcgggactccgggtggcgctcacccacctgccccgagggccccgcgaggtgcgctcactccggcccggctcctgcggcccctgagctcccccggctcccgctgcggctgcagctccggctctggctccgcgtgccaagcgctcccgtgtctcgggtcagccgctgcgccccgcggccgccggctttatccggccctcgccaacccgtgtgaagctgccgtcggcgcgtcgtgtgcaaaagcccgcggggaagggggggcggtcgccggctgcaaaaggcccggctgtggccccgcacacctgtgcctgcgcccatggggcccgcggagcccacctgccggccgcgagaagtttgccagccttcgcccggcgcggcgccgggtgttgctgagtgaggacggggtgacgcctgc

SEQ ID NO: 330732 - DNA, 574 bp, Homo sapiens
  chr1:26551673-26552247
  hyper
cgcttctcgaccagcgatacactgtacctgcacggccgagtgaccctgtgtgacacgcgggcaagacgcccatgccaaccagtgagtgggcagccccgggacctcctgcgcagccgccgcagccttgcctgcaaagcagttcctgccgggcaggctgggtagccggactcccagctgcgccgtcttcacggaagcggtgctgatgcgggacctgggggactgcggtgctggggactggccagtcctaccgggggcggggcttgtggaagactgggcgggattttgaagacctaggtcttgtggatggtgaactcacttggggcggggagggaggtggggctaccctggggtcttgggcaaagtcctcgcctggccggcttcgctacccttgtgcttgcgttgcccacaagcttgtagtcagaagaactcgcctgggagggatcgctcctgggagatccgaacgcgggagggcctggagcgcggcggcagctggatagcattcgggcccatccgaataagcggtaaatggatcatttctggggcctccctgactcctcttccagagcctcctacc

SEQ ID NO: 330733 - DNA, 807 bp, Homo sapiens
  chr1:26662538-26663345
  hyper
cgcctctgccccagcgcccccagccctccgcccctccacgttctcacctgccgccgtggacccggcaggactgaggtcggaaggaggcgggcagagcggcctggtcatcttcgaaagagaagtggtcgcccagaaagtcggggcgggagaaaagctgaatctggaggcagagaggggagatgaggggaaggaggacgatggagtggggccgagaacagcggggaggggaaaggtccgaaatgaggggagagacgtgagcccagcggctccctgcggagtccctgccttacctttgagacgaagtgcagatcgtgctccccgacctgaaggtagggaccgaatcgagaattagggagggtgccggcccctagccttgtcttctctaggtttcagtaccgtccaccccgcggccgcgccctcggccccgcccccttctaaggccccgccccaagcgcccaggcaggtcctccagcccgctacctctgcgtgggggcggggcgcacccgaactccaggtcccgccaccggggaggccccgccccccgcggccggcacgcacctgtaggaccggctgcagcgaggcgagggtgctgttgccagcgccccagtcctcgcagttacgatacacgcccttctccagcacgtactgttccccggagaagcccacctcctggtaggccacccacctgcaggaagggcggggcgcgagtcagctgggacggagcctgcacctctcctggaaccgcccccggctcgcccgggcccgccccgctcccggagcccgggtcacttacacgccgctgagcac

SEQ ID NO: 330734 - DNA, 685 bp, Homo sapiens
  chr1:27113559-27114244
  hyper
cggcccctggcttcgtttggagggcagataactgaaaccacataaggctttggaatcctgagaaacaagaaatccaccaacggagaaggatttatcatctgtttcctttaaggagggtgcaaagttgttctaacagtttccgttacaagggtacaaactggccgctccccccaatagacggttttgttgagttcgcctctttttttttcttctttttttggccccacttcctatgagagaaactgcttgggtgagggaggtgaaaggagccctggagggtgttctctgaggttttcttcaccatcctcattagccacctgaggtggggctgaggactaaagtaggacagaaggtctctggtagatagaggaggggaaaatcagggggatcccccactttcttcacacccaggacgcagggtgccgctgccggccacagaaaccccaagaatgtttttctttggctattcagaggacatctattgtgtgtcaggccctgtgctgagctgttgttgcctgacagcaggaagagcgcggctctggtttctgtgaagaggctgcgggtcagcctccgactacaagagcctcggcccacaccgggaactcagtgaacgtcagcgggagctggggcaagagcactgactctgagacagcagcctccgctcactatttgaaggcggggtggc

SEQ ID NO: 330735 - DNA, 497 bp, Homo sapiens
  chr1:27332484-27332981
  hyper
cgggggtcacgtagtaattgacagtggctggcacaaccccgtcagtgcctggagggcgccaggccagggcggcagtggcagctgggccctgctcagccagtgcctgcagcgccagtgcggcaatgaggtccagcgtctggcggcgctcgtggttcatgaggcacacggtgctctcgttgaccacccggtgcagtgtcaccaggcaggcgtaacggcgggctgcatctgccccaccgaagtgggcctccaggtagcgctctagggtgcgccgctgctccaccaggtctggaaagtcgatgaagaagcgggagcacatgtagcgctgcagggcgcgcacatcggtgctgggccggggccggaagccccgcaccaggaggtggcagtacttgaggaggccaccacctcggatctcctcgggactgcgcgtggcgatgacacggtgccgcaggtgctccagggcctcggtgaagtccccgtacaggctttcgcctgtgacc

SEQ ID NO: 330736 - DNA, 698 bp, Homo sapiens
  chr1:27901989-27902687
  hyper
cgccgcggaggcgccccctagggtcgggcgccaggcgcccctgcccgagctgcgcgcttagctcgctcccccggccggccgcgctctccagctgcaggaaattccagaagctctccatcatccccgcgcagcgcgcagcccgggctgccaaggctccccgaaggagagccacatgccggccggccgcgcggcccgccctcggcccccacccggtccaacccggccgggtagccacgtctggccgggcgggggccaagccggccgccccttcccgcgccccgggcccggcggaatgcgtggcagccccgaccgggggctattttgagcgggaggggagcggcccggcctcggtgttttcggctttttcctggcccccggcccgccaggccgggccctctgctgcccgctgaatgggagggggggcggggtcacgtggcggggggaggggagggccgtcgcgatccgggtcgggctcgggctctgccccggcccggggactggaggcgcccggcagcggtccggacctgcgctctcggacgcggctgagtggcggggttattaatagcgtgcctggctcgggcagtggctccagggcgcccgctacctgcacgcccctcctgcagagagcactggcggcccggcgctccctccgcagcggcggactgaggcctaactggatagcgccaccgtgaaccggc

SEQ ID NO: 330737 - DNA, 459 bp, Homo sapiens
  chr1:27960573-27961032
  hyper
cgcctcctacctcggtcgggaagcccaccccccacccaccagaccgaggattccaaaagggggcgaaggcggagagcaaagggggctgcgcccacccggagccccgcggcggcccagcgcggcccgccctctcgttgccttggaggcagcccctgcgggcactcgcggtcaaaggcaggatttccgtcggggcggcagcaattcccggatccagcggggagcgcgggccgagaccgccgcgggcgcggagggggcgcccggagaggcctgtccctgccgagggcggggacttccccaggaagcggggacccacgcctcgcgcgcccggcaggagtcccctgcagcccggaacctaccgcaagggcgggccgagagggtcgcggggccgcggtcgcggccgctaacgttaccctgcgggctgtgggcttcaccccgacttcggccggctcggaagagggg

SEQ ID NO: 330738 - DNA, 578 bp, Homo sapiens
  chr1:28198925-28199503
  hyper
cggggggcggggcttcggcggggcggggctgcagggctcccgcgggctggcggggcggcttcggcgtgcggggcggggcatcggcggggcggggctgcagggctcccggggaccgcccgcccgcccctcagtctgagcccagagagccgcggggaccatggagccggtgccgctgcaggacttcgtgcgcgccttggaccccgcctccctcccgcgcgtgctgcgggtctgctcgggggtctacttcgagggtgagcgggggctggaacccctccgagcactcccttggtgtggggcgggggcagagacccggagaagacgttagcaatccggggaaactgcccctgggttcaaatcccgacactgccactggccaagctgtgtgatttggggccgcactcaacctctttggacctcggcttttgctttcgtggaacggggaccgctgacctgccccgcagggtagtgatgaaaagtcagtgggttgaggcgcgggaggtggatgcagccgggccactcctaggtggccccgcggtgcgcatgggacagagctccgaccgcgccgggacgcagcatta

SEQ ID NO: 330739 - DNA, 738 bp, Homo sapiens
  chr1:28286184-28286922
  hyper
cgcagccctggtccaggctctagtctccccgccctctcgctttcttgggcctccgggcgcctcaaaggtaaaactaggccatttgaagcctgcgaagcgaagggcagtcggtcttcaggcctagcgggcttggctgggctgggtcggtggacccctgggctggcggcgggagcagagcatcgagcggcttttagctggggttcgggcggaggacctgggacaaccgcgggcctcgctcctccccggacggggcgggacggggaagtcccgcccaccaggcccaggccccgggccgccccgagggctgcgcccacctccttcctgcctcggcaaccccgggccctgagggcaggccccaaccgcggaggagcaggagagggcggaggccggcgggccatgccctggtcgtcccgcggcgccctccttcgggacctggtcctgggcgtgctgggcaccgccgccttcctgctcgacctgggcaccgacctgtgggccgccgtccagtatgcgctcggcggccgctacctgtgggcggcgctggtgctggcgctgctgggcctggcctccgtggcgctgcagctcttcagctggctctggctgcgcgctgaccctgccggcctgcacgggtcgcagcccccgcgccgctgcctggcgctgctgcatctcctgcagctgggttacctgtacaggtgagtgcttcgccccgggaggggaggagtgtcggagcccagcacctcc

SEQ ID NO: 330740 - DNA, 841 bp, Homo sapiens
  chr1:29585852-29586693
  hyper
cggtgagtcccagcccactgggggcgcaggggtaaggggtgtgggcggccgcggctcctgcctgcagggggtgcaggcccagctcacgatgcagctctaaccccgcagcaaaggccccacacttctcccgcctgggcgacgtggaggtcaacgcgggccagaacgcgtcgttccagtgcatggccgcgggcagagcggccgaggccgaacgcttcctcttgcaagtgagcgggagcggtgatcttggctgggggcggggtgggagggggttggtggctgcttctggccctgactccccccagattgctgagtccctgcttcatactccagcactgcgcacagcgtcccggccctcccctagctctgctctgcgctttcttgggtcccccattcccccaggttagagcgcggctccaggaacctatgtccgcgcggtgtagtagggacggctaaatggggcccgggtcagagcgagatcgggacccctcgctccgaggcgcccctgaccccctcactctcttccctgcagcggcagagcggggcgctggtgccggcggcgggcgtgcggcacatcagccaccggcgcttcctggccactttcccgctggctgccgtgagccgcgccgagcaggacctgtaccgctgtgtgtcccaggccccgcgcggcgcgggcgtctctaacttcgcggagctcatcgtcaagggtcagctggtggacgccggggagcgccgggacctcaccctcgaggggcggggccggcgacgggggcgggctctgcccgggggcgtggccgtggggggtggggccggcagggtgtcgctggggcgctatctgaagatg

SEQ ID NO: 330741 - DNA, 560 bp, Homo sapiens; identical to SEQ ID NO: 226902
  chr1:29804771-29805331
  hyper

SEQ ID NO: 330742 - DNA, 359 bp, Homo sapiens
  chr1:30815417-30815776
  hyper
cgggcgctggcgacagcagcgcaggctggttaagctgcggcaggtccttgcagaggaggggctcttcccaggagggcgctccagccgaggcccctctgccttcacctgcgccatgaccacttccctcggccctctcccctcctccacgcctcctggggccgctctccagggtcctgggacgagaccagccccgggcagggcagcgcggggagccaggggtcccacacccaggagggcccctcaccgcaagggacgggcttaggcggataaatgtccggctcccctcgaggggcagagtcagcaccccccacacggtccctgagatggccctgggaccgagccgccgcccccgacttgtg

SEQ ID NO: 330743 - DNA, 539 bp, Homo sapiens
  chr1:31157913-31158452
  hyper
cggtgggcgcctcccgggcccagcagcctcttggctgggaaagagacagacgggggcccccttccccgggaactgactttccagtgggaacaaggacgaccgtcgaggaacccgacaaatgaattaaaccagcaccagcgtgatgagcaaagcggagaaggaaagagggcgctgtgaggagagcgaggctcctccgggaaagctccttctgctccaggtgacagcggagagagatgccaccgcgcggcgaccggcagggccgcgtcccctctgcgtcctagcacagcgacgccccgcccgccacccgccctacgtcacccacagcccccgacaccgccccctcccccggccctgggcttccagtccctgacagtccctgggacgccgccccacaacgcccgccctctctggaccctaggacggccccgggcacctgcatatgatgtgtggccacgcccccgccacagctaattggaccggggtggacacctgaacccagtcggaccaatcaactcctgggttgccccgagacccggacc

SEQ ID NO: 330744 - DNA, 1424 bp, Homo sapiens
  chr1:32180093-32181517
  hyper
ggagagaagagcaatgcagacgtgactgtcctgccaggcgggggcgccgccgccagacgcacgaaaacaaccaaataaatcaggcccaggaactcctaatccttcccggctgtggctgctaccgcttgccccgccggcaccgccctgccaagggcgcagagtcgggccagcagagccggagtgatgccgggccatcgaggcgtcctcagcccccgaggtgggaggtggtgggggggcggggaggagaagaagaaggctctcccgacacggtgactcaggcctccttgacccgctcctgggtgggcacgttcctgcgccccggtctatttttagagccggctctgggcctgagcgcagactgaagggaaggggggcctcgtggggggcgcaggcgcctgaccagctcctccagctcggggctcaagccccaggccctccagctgtctacttggaaaagggtggaagcacatggagggtgggtgtcagggtgtgcggcgcaggcccagagaatgcgccccccttccccacaaggcctggcagttccagagaactgggcgcggcctcccaaataacgacctctgttaagtgggaccaggagcctcccgatggtcgctgtgtctgcccattggaccaggggccagggcgggcggggctttgggcgacagaactggctagggtgggagaggagaggaagctgccaggttctggggatcccgaccccaccccgccgacagccacgcctccagcccactctggccacgccactggtctgcctttggaccacactcatggccgggtgccttccctgactccgccctaggccctgcctcctatctggctccgcccagccctggccaaccttagaacctgtcccaaggtccagagaggcctagatgaggggtagcctgcctctgagaggcatggagccctcctcccgcgtggggtcagggaatagaagggcgtcgagggtggcgggtgagggaacgttcctggcgccgcgaacgggaagcctccaggctgcaggacgtagctgcggggacccggcagtctgcgaggctggagtggccgaggccgccccgagcatagaaacagccctgtatacgtgggcacagaaaggcccagggaggcgcctgggcagaagtgtctaggacgatgcctctgccacggagccctggagtgggggcagctgatggctcaagacacatgagctctggtggcgagtacagggacgcggggtttggggaggcccaagtcaaggtccatccttctgggatgaggggcggaggatgggaggcggagcccggtctccagggcaccagccctccacctagcgggaagcttgggaatcgcggagtgcagaggtggggtgcggaaagggttccaccgcgcctgggctcctttttctccttggaggtcccactggc

SEQ ID NO: 330745 - DNA, 356 bp, Homo sapiens
  chr1:32226178-32226534
  hyper
cgctgggtggcgggggaggggcgggccgggggaaggggcgcggcgacgcgcacatccgtcgcgtttatccacctggcagctccaattcgcccgcccgtcactcaccctccgcctccccggcgctcgccgcccgacctgcccaggccgccacgcaggcggtgacccccactcggtggctttgggtcctctgccagcgctcggacccaaggacagggtcctcaggagccgctctcctagagctctgtcgccctgggggacgcacaccctccatcctgcctccggagctggggactgggccgaggggagggagcgaccccctctgtgcagtcctcccgctccgactgccagagagggtc

SEQ ID NO: 330746 - DNA, 1036 bp, Homo sapiens; identical to SEQ ID NO: 226916
  chr1:32237627-32238663
  hyper

SEQ ID NO: 330747 - DNA, 511 bp, Homo sapiens; identical to SEQ ID NO: 226917
  chr1:32410105-32410616
  hyper

SEQ ID NO: 330748 - DNA, 386 bp, Homo sapiens
  chr1:32827347-32827733
  hyper
cgtcgctaccgcctccgggctgtcctgggactcgggggcggcggcaaggccacgggagtctccggcctcaatggggaatctccgaccctgcgggggctcctgggcgctcatgtccaagccccggggcgctctgcgcggggagtggcggtcaggcctctcccgggtcgccgggcgccgccgcctcgcgcccgccccctgggccgtcgctcacctcccggcggttgagaccggtcccaggctagaagcagctgccggagccctggccgcgggagaacgctccggtccaggcggagccgggcaggtctctgtggcgtgcccgggcccgggcgtcgaggagggcagcattgtgacccgggccgcggcgcgctgacctcacagagcacgtt

SEQ ID NO: 330749 - DNA, 755 bp, Homo sapiens
  chr1:32930153-32930908
  hyper
agtgaaagaaaccgcgggtatgcaataaaaacctgttgaatcgattaaaccatttcccttatttccagatttttgcggaaagcgccagtaggtgaaatatgtgcggactgatgagtcaaagctcttattccctggactgcattaatacccacgacgtgcttttcgctctccagacaaagagaccggtacttggcaggtccctcaagtgggactcaaaagaccgaaccgagctgcagcctttcgctagcactggtcctcgccccttttggcatcttggtacttgtagttttgtccactctatctttacccgaaaagccagcgctgagaccacaactcccatcaccctgcgagcaccagcgccttcagagcgcatcctccgaggggcaccagcgccattgaccaccctgctggccgaagggcccgccttcccgaggccaggcgctcccgcgattggccagccgccccgcctctcatcggagggcgccaggtgaatgaaaggggggcgtgtcggtgcgcggtgctccgtggctgcgctgctggaacccgctggaaggtgagcgcgaagaagcgggttggcgctgccgctttcgttggtttggggaggattcctagcacccgggaggctggctggagattggggttagcgggcagggttgcccccactcagtcatcctccttcggaccgcttggccctggcaactcctgggacctccgccccgcgagcccttctagcgtggggaggggcaggcgcggcc

SEQ ID NO: 330750 - DNA, 514 bp, Homo sapiens
  chr1:33219389-33219903
  hyper
cgcctgccccacctggactggccaggccttcccctgtgcgccctaggctgggcggctcagccggtctcccaggtcccgggaggggcggagccgacgggatgcgcgccaggccccgcccctcctccgggcccgcccccggcctggccattggccgcagagctcgggggcgtggtcgagctggggctgggggcgcccgcggtgcccgcccgcgagtctcgctgcctccctcccggggctgcgggcccggcggccgggctggctgggccgcgcttgggttcccgcgccggctcccgcacccgcaatggggaactcacaccacaagaggaaggcccccagcggtccccgggtccgcagcttctggcggttcgggcggtcggcgaagcggccggcaggtaggggccggggtgggggcggggcaggcagggaggagggtccctactgcggtcgtcgccaccgctgctgccccctcccggggcttggagggtgtgagtgtgggggggtcgggaatccccgc

SEQ ID NO: 330751 - DNA, 601 bp, Homo sapiens
  chr1:33358626-33359227
  hyper
cgcgccgcgccccctgccggcagcagacggccccgcagcgcagtgccgcccccttggcccggcgccccctttcgaccaccgagcgcgggccgccctgggcccgggtgccagcccggtacttacccccgacgcgcgtgccccggggcacgcgctcctgagcccgccgctccaggccctccactgtcgggccccggtgtcctccaacatctctcctgacccctgcgcccgctcggagcttccacctgcggcgcctttgctcctttcccacccagccctccaagggagcgcggcagggcccgcccgatagccctctcttctgggaggccttcccggacacgccttcccgaagccctcggctccccacgcctccgtgattccccactccaccttgcccaggcgggggcagcaaacgtcagagagcccgggggcgcctctgaatcttgcgggtgggggctcgggcaggctcctctcactccccgcctcccctcccgcccccaggccatttacaagatggtttcgtccgtgatgaagatgccggaggacgagtcgaccccggaaaagaggactgagaaaatcttccgccaaatggacacaaacaacg

SEQ ID NO: 330752 - DNA, 169 bp, Homo sapiens; identical to SEQ ID NO: 221295
  chr1:33438469-33438638
  hyper

SEQ ID NO: 330753 - DNA, 138 bp, Homo sapiens
  chr1:33438840-33438978
  hyper
ctgccgcagctcccgcagtgttttctgtcaaggtcaagcatacccactctttgacaaggctgcctccgaaatccctcccttgcagtcctcccagccgttcccaccgcctttgccactcatccggcggcagccgtcctc

SEQ ID NO: 330754 - DNA, 362 bp, Homo sapiens
  chr1:33772344-33772706
  hyper
gggccgggaaccggcggcggcgctagttccgcagcagccggtaccccttgggcgcccacagcagtcgcgggcggcggatctcggcccgcgggccgatgtccgggctccagcagaactcgggcgacagcaccttggcgggcttgtgcagccagaagaacttgttgaggtggctctcgtcgtgccagcgcgcctccaggccgcgcgcgcggtcccagtccaggccccccgcacagtgcgccgtcagcccgcgcagcgccgccacgctgcccccgaacaccgccgcgtggttatagaagtcgccctggccccacgccatcgcggcggccgaatgcgcgtcgcgttcgaagggcagcagccacgac

SEQ ID NO: 330755 - DNA, 328 bp, Homo sapiens
  chr1:33772745-33773073
  hyper
tcggccagcgcctcgggcccaaaagtgccgctgaagtgctggtccacgtccatgcagaacatgaagtgcgcctcgcggcccggcagcccgcccagcgccgcgtgcaacgtgcgcatgcgcgccatcgacacgtcttgccagcgccgctcgcgcgccacgcgctccacgggcagccggcgtcccgggcccagcgccacgcggggcaccgctcccggaagctcggtgaacacgtagtacatcacgctctggcccgccatgaagtgctgctccgccgtctccaggaagcgctccaggtacttctccaggtatctaagggcgcggcgccacc

SEQ ID NO: 330756 - DNA, 847 bp, Homo sapiens
  chr1:33896040-33896887
  hyper
cgctgtcacgccgcggctggggagcgggcgccccggtcaggcccgacgcccgggtctcaccgcactctgcgggacaagcggagcaggcgcaggccgcgcaagaccacgggctgccgcggcgcgggcctctccgcaggaggggggtcggtccccggagaaagcgagtcactgacgggaccttggcccgttcccgttccggttcccgttcccggcaagcctcggccccaggctctccgcagccctcctcgctgcgcgttcccggcccgggggcgccgcgctctgccggtcgccggccgggactgcgggctcccagcgcgggccccacgccgcggaccaggggtcaggccgcctgccgcccgcctgtccgtgcccatggcaatgccccgccccgcgcggcccgtcccggccgagcgctccggcccgaccgtgacagctgggtgcccaaagggttaagccggcagcgcggcggccggtgtcccccgcgcgctgcccgtcagccgcgagctggccccagcgcgcacgcgcccgcccgttacctgcggtcgcctccgcgctcctcctccacctggccgctctctcccgggggccgcccctcagcccgccccctcggctcggcgccgcgcaccctgctggctgctcggacgctgcccgcggaggaggggcgagggcgctattaccatatattagcataccagcgcgcgtcacgtggccgctccagccaatggtcaccctagaagggcggggattgggcggaacacgccttagtgctgctcccagcctgaaccggtggccatggcaacgggcgggtgggcgggggagtggggaggtgccggagcccggtgccccc

SEQ ID NO: 330757 - DNA, 393 bp, Homo sapiens
  chr1:33937934-33938327
  hyper
cgacccctcagtagaactgggcccccttctgctcgagtgccctcccattgggcggtgctgttatccggaagcctatggaaaaggccaggatcgcaacaggtcccgcccccatgtgtcgcgcccgttccgatttgttccagtgccagggtccgttagaagatgacatatctattggctgaagacgtctgaaaggcagcaaacggagggggccgcccccggcgctcgcgcggttccttctgggaattgtggtctcagacgttccattcccagggtggcgccgctcggactccgcgtcccagcattccccgcacgagcccgggagcacttccgccctgttgtgaagtgggtgtctcggtgggtgagtccgggtggcggggcgggggcagctgagac

SEQ ID NO: 330758 - DNA, 2399 bp, Homo sapiens
  chr1:34628644-34631043
  hyper
ctgagcggtgcaagcgccggtgagtcggcctttttctctcccctaggggcaggatatgcccaaggggcagggacaaatctagccagaaaaacaattcagtccgatgccgagacattctccaatcagctaagccagagaccggcctcgcctcaacgtacgtccgggaggcctggcgggaggtagcagcgattcccccaccgcccatgtggcaagtctgggtgaccagcagcgtcggtatgcacagcctcccagtgggtgtgggtgtgcgagaggccagagctcccaggcgcgcgcaccgcgggcgcccctctctgggtgtcggtggctatgactcttagcagaacctaagaaagtcccgtcagctaggaatgagagagccagagctggctcggggcgccctccctgaccaagaaccccaacatgccgcggttaagcggtgggcgacacggtctgcgaggacagactcacaagacgctgaaggccagagtgggccagagagctcgccactcactgacctgccagaggagaggcgcactttcccaagaaggggaactggggtggtccaggccaagccttcagaggttcaatcggtggtttcaaaacaaaacaaaacaaaacaaaaacaaaaacaaaaaagaaaacacggctccaggtcgaaggtgccctaggtctaggcctggccagcaggtgtttcggtttctcccccagtgggtgtcagcctcgcgggctaaatgaaaatgcggttccaggcatcccggtttggacccgtctccacccgggcacacggaactttctagcttgtagctagaactgagcttcggaggggtgctgtgggtaaagcgggagggcaccagtcgcggccagtagcctccacaggggaccgggttccctcgaaggttcgcgtacctcccccgcgcgctgcaagctgcagccagacacccgcgaagttccgggactctccgcacccgctagatctgccccttcccggactcggtcgtcgggagctggtcccgccgcccgcgccgccgctgccgctgccgcagccgaggcgctcggctgcagcagggcgcgggaaagggcactttggcgcggagtgagcaccgaggggaatgtggcagcgcgaagcctggcggcggcactccctcccccgcctcgggctacaacccccaccccctccttcccatccctcaacaccctccagcccccacctgcaccctcctgcaaggaatgcgcgggacccccaccgtgggcacgcgtccacctgaaccccctcctagctccgagcgccgagggaggggtagcatttgaggagggggatggcggccgcagtctgcagtcggttccagagggggcaccggtttcaattggagaaaatgggcgggggcagggaagggcagaccttgcagacgcagaaatggggagggggcgcacggttcctctccagcccccaggaccagcgtgcctggcagaatcaggagccgggggagtagggctcccggaaagtttatcgggaaaaagcctagcaccgtgggggctgggaggctggagaaactgaagccacagaccaggtgccccgcaaccccgggcggggatgtctgtctcccaggcccccacaccggccgcatccgtccaagttgcggctggggttggggcagcagtgagggtgagggtggaggtgaggacgtggctgagggtggggtgggagacggaggcagggatgagaatgagagtaggcaactgggagggtgggagattcaggcagggatagaggcggggggagggactgggaccgggtcgaggatgggtgggctcggggctcgggtggggcgcgcggcggccgctggctcctcggcgcggctggactcacccgcggcggccgagacgctgagcaacccacagcccagcaacagcagcagaggcggcggcgttggcggcggcgggcggccccagcggctcccggcgcccggcacaagcgccgaaatcccggtttcgccgcgagccctccccgcggggcagccgcagcgccccagctcccgtccccgcgagcgcggcatggcgcggccggcagcgccgagggagaggctccgctcgccgccgaggagaaaggaggtcaggagagctctggagcttttttctgctcggaaaaaatcccggtacgcgggagccctgagcttctgcggctggaatgaaccaagtgtccgcccggccggggagaggcgcgctgcgctctcggaaatgactcgctccaatcccgcttcgcggggttcgcgccggggggcgggagggggtgaattatccccggattaatcactccggagccgcttctccgccgctccaaatgctgggggtggaggcgcagctaaggataaaatattggggggcgggggttcctcttcagc

SEQ ID NO: 330759 - DNA, 592 bp, Homo sapiens; identical to SEQ ID NO: 226948
  chr1:35246933-35247525
  hyper

SEQ ID NO: 330760 - DNA, 89 bp, Homo sapiens; identical to SEQ ID NO: 226949
  chr1:35258520-35258609
  hyper

SEQ ID NO: 330761 - DNA, 836 bp, Homo sapiens
  chr1:35351017-35351853
  hyper
cctcaccccagccccgaccgaccagggtcagagccctcgtgggcgcctccccgttccatacctgcaccccaatggacggccgccacttccgctgccgcgccaggctccgcagctcctccctgccagggatggtcttgatgatgagtgtggggggcttggggctggcccggggcggcaccggcgccaactccagtgtgcgcgcacccatggcggggccgtccagcccgtcggcggagctgcagcgccgggcggggccctcggccgccgtgaagctctcgtgcgcggagtcggtgctgctctgggcggtgatggagatgcggggcggggcctggcttcccggcgggatggggggcggggcctttctgaagttgaaggctgtggccggcgagcgcagagacgcagtgggtgaggctcgcggccctgcctgggtcctgggcccgcgcccgactcccaccctcaagaggccctacgggaccctgcagcggcgcgcactccacatgctgctgcacacacgccaacggacgctctccccgtcatccgaccccgggagcgagcgatctgcgcgggtcacagcacagtcgagggggaggccagaacccggacccagggcgctctcctgcctagggccgggccaggggcaggaaggtgtactcacaggagccgggcctccctgagacagcggcaggggtagcgaggaggggcaggcagtcgtcgtcttgagagcagccggcctggatggcccggaggtagctgtggctccgcatgcggaaacagccgggcaggtccagggcgtccacggcctgggactccagctccccaaacaccgacccgcacac

SEQ ID NO: 330762 - DNA, 108 bp, Homo sapiens
  chr1:35390551-35390659
  hyper
cgggaccgaacgaagcctcattcagcactcgggacagctccgaaggagcaaatccccgccgaatcccactcagcacccgggacagttcccagcgacattgccggcccc

SEQ ID NO: 330763 - DNA, 1656 bp, Homo sapiens
  chr1:35394588-35396244
  hyper
cggcacacacaatcgcccacagacccacacagtgacacactcggcacagacacacagcgacacgcactcacattcacacacctgcagaggaaacttctctccggatctccccagcaccacgacttcccccacaaccagctggctactccctcccagacccgagcctccagccgggcgagggctgggccggggctggcctgtccccgcggccctgaccgggagcgtgggtccgcggtccgcgtggtcccctgcccgcccctcgggtcgggcccgcgggcagccaggccggggcaggagcgggggcagctgaggaggcccagcccctcccccctcccggggccgggagccgagcgccggagcccggggcgtgggcggcgccggggccgcagccgggccgtgcctggggggcgctgcagagggagccgcgagcgcggccccgtccccactcctccccgcggcttacctggcccggctcgggctccggccgggttacatggtgccggcggcccgggccgggggcgctgcggcgttgggcaggcgggcagggaccggggcccggcactgcggagcccccagctgaggggccgcgccggctgcggagccccaagcgagcgccgagcggcagcgggcgcgggagcgggaggcggccaagccacggaggctggatttcccggggaccgggaaggggaggcggggggatcccgcccgcgcgctccgcccccgcccccgcccccgcgcagggcagccgagcagggagagggagagggagaggaagagggagggggaccgagctccccgcccccgcgcggacccaggagggccgaggtcgccgcccgcgggcggccgccggggtcccggaggagcgcccacctcgctgagcgacggtgctgggggcgcccagcgtaggggcaggaatgagatccccctccccggggacccaggaacaggcacccgaagtgtcacggccacgcacagccgacctgggtacagggacccaagcccggcggcgggcgggcggtcggggaccagctcagcctcacggaccgggtctcgccccccgccgaggggcagtcacgccctgaatgtcacacacagcccccaggcccgtccgcttaggagactctccttcgggctttcccggtcggccgcctgacctcagctcctggcttggggtcagggagcccccctcttcggccccagcccctgccaggatggggcgctgtgcccggcctcggagccgctggcaggcgtcccccacccacagtccgcacagccgaggcatccccagtgtggagggagagccccgctgtacctgccgcctgtgctgggcccccgcccgtgcccactgtgcccgcccgcctctgggccctgagcctgggattgtgccatggcggggtcggggtggggggaaagggactgtccgaagcacagctggaggctgcggagcccggacacaggctgcgggagccgagaggcggagagcggactgcagcagtcccctggcttgaatccgtcttggcgcccagagcgatgctgtaatgggggggagggggccacggtggggaagccgcagggggaggggctgaagacgtgggggaaggggtggctccggattccggctttccagggtaggtgtgaggaaacactgcctccggc

SEQ ID NO: 330764 - DNA, 1210 bp, Homo sapiens; identical to SEQ ID NO: 226956
  chr1:36042459-36043669
  hyper

SEQ ID NO: 330765 - DNA, 130 bp, Homo sapiens; identical to SEQ ID NO: 221306
  chr1:36788084-36788214
  hyper

SEQ ID NO: 330766 - DNA, 319 bp, Homo sapiens
  chr1:36916004-36916323
  hyper
cggggttcggtagccagtggcctgaaggccaggccgcagcgtcccaatagtccggttgctggggcaacgccgtgacgggaagagcgagccaatcagaaggcggtttggtgggaggtgccctgaagacgggagctaattggtctgggtggtggaccgtcccggggggattggtccgagccagaggccggcgcggcgttgggcgcggctggggagctgtgcttctgagagtaggtttccctcgaaagggcgagggccgggccagggctgggggtggtctcgacacagccagcccggcgcttgggaccccggccgctggcgc

SEQ ID NO: 330767 - DNA, 1420 bp, Homo sapiens
  chr1:37499288-37500708
  hyper
cgcgaaatgcgccctcgactcgggatcgcactggaaaccttcgccacactgtgccaggtctgacctcccaggagcgcgccaagggcccctcgcccactgcggcccggcggcctcctccccaataagtaaggcccgtgaccccgactctggaactttgtcctcacagggaggagctcctggtggtcaccgatcggctcagcagctcggagagaggttaggaaaatctctccggaacgcgttgggaggccccctcattcccgccccctcccgggcgcacggagacccccggctccagggagcgcttaccgatccggatgacgtggggcatcccgcgcgagtccgggatccagaaggcgcacacgaggagcccggcccagtattcccaaaccagactccggaggcgccgccagggagcggtcatcgttgggcgccgccgagcgtgcccggggcgcggccgtggcgggctccctggggcggcagctctaggcgcgggcgcgcagcagccccgaaggcgccgcctggcccagccgcccggctcccgagcgccgctgcaagtggggggcgccccgcggcgccgcgcacatcttactggggggccgccccgccggcgcccgccccgcctggctgccgcccacgggctgcccgcgagcgaggctcctgggctccgcccggactccgctcggactcggctccggctccgactcgcgtcggctcggctcccgcgcgggctcccacctgccccggctgccgggctctggcgggcgggctgcacgcgtctccggccgctcctcctccagccgccgccgatgctatcgcccgggctcgcacaaagccccggagtggagttgcacgcgcgcacactctccctcccagccccctcccctgcgccctgcctcccgcctcccgcgccgcccgccgcccgcgctccctccgcgcactcccccgcgcacacacacttcacactcacacttgccgaggcgcacactcgcgcgctcacacctgcgcggggggcggggaaggggaccctggccccattgtagggggacgcccggagaacgaggactctcctcgcttcccagacgtccccacccgccccgccggccccagtcccttctactgcgagggcacggagcccgggagccaggcgtggagcgcgagagctggcaccgcgagctgggagacggcggcagcccagcggccggaccagctggaggagacgcgcccgccgggagcagcgagaccgggagcccgccgtctgcggagcctggcctcgcggctcccacgcggcgggcgctggctggacggcggtggcagcgggagactgacccgggaaccggcttccctccccaaccccattcctcctggcagcagagttggggctgggggttcggagaggcagaattcaaagcgaattgtctac

SEQ ID NO: 330768 - DNA, 164 bp, Homo sapiens; identical to SEQ ID NO: 226966
  chr1:37721108-37721272
  hyper

SEQ ID NO: 330769 - DNA, 747 bp, Homo sapiens
  chr1:38230159-38230906
  hyper
cgtcgggcagcgcccggatccagccccctcgaccagcattccaccttctgttggccacactgtggtctcctagcccctgtagtccgggctccatcccgtctccccatattccgagctcacctccgcatctccctgtctccactcttcatctccccgcccccgcacctcccacctccaatcactcagcttgtccgtctcaccggccgctggaccgccgcctctggctcccgcggttcctggcctctttctttcccaacctcccgggtctccagcccccaagctcctcagcgcccctctcttcgctactgcttgatcacatttttctctgtctctccagttctttgctgcctgcttgcttcaagccccaatacagactctagtctctccaatgactccttcccccagaacccccatcgccagccccctatcttttggtatgccacgctccgagcagagctcaccagtcttctcaccttcctcggcggtcccaggccgccagggtcccaaaagcagcgcgagacagagctgcatccggcagaggaagaggcgcagcgggtgtggaccggcgcaggtctccatggtccgcagaccgagctgtcagtccggcggcggctcaagccgcgccagcctagcaccgctgagcaatgcccccagaccccagagccagcggggggcggagtctcaccgctcaccatcatccatgggaaccaatcactaggcaccgccgcgggatgccaaccaatcccc

SEQ ID NO: 330770 - DNA, 121 bp, Homo sapiens
  chr1:38412697-38412818
  hyper
ctgccccaggttccgggacagtgactacatttcccaacagcccctgcgccacatggtggtcagtcagcctgcaagtcccagcatgcccgagtcaatcgtggggtggggagtctctccatcc

SEQ ID NO: 330771 - DNA, 1454 bp, Homo sapiens
  chr1:38510073-38511527
  hyper
cgtttggtgtggccaggagggcagggccccgcggggagcaggggccgcgctatgcggcggtcggtctgcagcagggcagaagccccttcccgtctgggtgtgtgggagcgcagacccctccggcgtggccgggaaccaagccggggctcggatgaaacgaaacgaaaaatgaacactcgaattttttttgttagttttttttttttttttttgcttttttttggggggagggtagggtagggaaatataaggggaaaaataaattaggctagattaaagctttggctatttcctgcttttatacacagacgcggctctcgcgacctcccctccggggccccgataaatacagtatactgcgatttaaattaagggcgcgggcggagttagaaggaccccaggagccgagaggctccacgaataaataaaaaccgtaaaaaaccaagcccggagaaaggggaaagcggggtggggcgcatccttataggagagaagaggcgtgtagcgaataaagtgacagccccccaccctggacccgcaggctcaggagtccacgcggggagaggggatggagaactctcctcgcttcgtcctctctcccggggaatccctaaccccgcactgcgttacctgtcgctttggggaggccgctgccgggatccggccccgaacagcccgggggggcaggggcgggggtcgtcgaggggatgggggcagagagcaggcggcgggcaggatgcccggggtgagttggcgagttccggatcttcgctcctctctcccggggctcgggcgacgcagcctaccgggctgtcttcgccgctcaccggagagggtcgtccgggtgtttggttttgttcgaaagtttctgggcttttttttttttttgtaaaatccaaagcaaccgaacaaaaagagtccaggccgcgcgggcgggctgcgcgcccgcgccctgcagcgcgccggcgggggcccggcccgcggggtcactgcactgagccgggcagtgtgtggtggtggtggtggtgcagcgccgccggcgggggcggtgggggcgcggagggtggcgatgcgccgcccccgccaggccctagctccccaggcgcgtatacatcgtccatgggcgggtggcccgcgccggccgcaggggtcatgcgcttctccttctgccgccggttgcagaaccagacgcgcaccacctccttctccagctgcaggctgtctgccaagccggtgatctcgtgcgccgagggcttggggcacttgagaaagtggctctcgagcgcgcctttgacccccacctcgatggacgtgcgcttcttgcgcttgcggccctgcgccgcgatcttgtccaggttggtggggctgccgctggacgagtcggtctcctccagccacttgttgagcagcggcttgagcttgcacatgttcttgaagctcagctgcagggcctc

SEQ ID NO: 330772 - DNA, 908 bp, Homo sapiens
  chr1:38511531-38512439
  hyper
cggcagatggtggtctgcgagaacacgttaccgtagagcgtgcccagcgccagccccacgtcggcctgcgtaaagcccagcttgatgcgccgctgcttgaactgcttggcgaactgctccaggtcgtccgagctgggcgcatcctcgtccgagtgctcgcccaccgatgagccgccgccgcccgcgcccgggtgcaggtgcgccgccgccgcgtgcaggccgcccgcgtgtgcatgtccgtgtgcgtgtccgtgggcgcccagatgcggcggcggcgacggctccagctgcgcctcgtggccatcctcgtgcagcgcgtggtgcaggcccggccccgcgccgccaccgcccgccgccagcatcccggccaggccgccgccgccgccccccgggtaggccgcctgcgcgtacagcccgagcggctggggctggtggcccccgctggccccgggcgagggcgacatggccgggcccaagtggtgcgctgtgctgccctgcgcccatgccgcgcccgcgtgggccgccccctggtgcaccaggcgcgcgtggaaacctccgccgccgccgccgtcgtcggctcggccggtgccgccgccgcctgccttgccgtgttctaggtgcgggccgccggcccaatcgccgccgccgcctcctcccgtgggtagccactgggggtgcgctaggcccacggggtggcccgcgcccgcgcccagccactcgtggtgcatcagcttctgcacttcgcggtacgcggcccctgcatgcaatcgctccgcggccgccgccgccgccgccgccgccgcggcgtccgggtgcataagcggcccggtgcccccggctccgccaccggggccccgcggcaggtactgcgcggtggtggccatgccgccccgcgccctgcgccgcgc

SEQ ID NO: 330773 - DNA, 701 bp, Homo sapiens
  chr1:38512644-38513345
  hyper
cgctcccggggtcccgcgcgccggccgtgctgattggccgctggggcttcattcacggcccccctaccgtccgcgtacacactcacgccccgggggcgcggccgccacgtggggagtggcgcgggggtggccctgggaccgcaccccctctcgtcctggctgtgtgggccccgctttcccccagcgctggagactccgagcccggccggtcccacattccacgcgagctgaattcccgcccgcatcccgcccgggcagcagggattgccggctccgggaggcgctcgggctccgagaagcggctcagccccgcgcccctccctcctcagtaccgctgccggcggaccaggattcccgcgggtcctggcggctgcgagcgcgaggcggcgcggattcgcggctcggttccggcgcgactgctcaccgcgcccgcctcgcctcccgcggctgccagcgtgcactgggcgctcctcggcgcgtctgcccggcccgtctcggctttccttctccttcctctagtcccagcgtcacaactccgccgacctcctctgccctgagagcgcgtccggtgcgggcggagtcggacggactctggcttcacgcctcgcgcgggcacaccttctcccgggcactgaggcccaggtgagtaccgcgcgggcagctggggctgggacggcgggcggcagcggttctacagtcct

SEQ ID NO: 330774 - DNA, 548 bp, Homo sapiens
  chr1:39043984-39044532
  hyper
gagatggaaggagccgaagggaccagagagagcgtggacgggaggaagacagacacgaagaacttaagaggggagcgcgcccaggatgggagcgagccagagaggagggggcggcggcggcgagagcgggcgggggacacggggaccgggagacgcgatccggagagcggtgggaagtattcgcctccgttcctcaaacacaggatgcgagcgccctttggagaagtcgcgctcggcggaaacgctaactccccggccaagtgcaaatgtaaagaggccctgagagcactttgtgcaaatatcaggccgggaagtgctgcgcccgcggagctgccgggcacctcggcgcccccgcgccctcggctgcgcgctaattcactttgccgtcacctctcgggcggggtcgggcgggcgcgggcagccggagcgcgcagagggcgcagagcgcctcgcagggccaggggccgcggccctgcctaatggagcaaaagacagatcagcagaagcaaggcaggtggggcgggagcgggagcgtggacatccggcac

SEQ ID NO: 330775 - DNA, 481 bp, Homo sapiens
  chr1:39874757-39875238
  hyper
gagctagcgagctagcgggtcgcgctgcgcgggggaggaggactcgccccccgcccgaccctagcggagccttttgttcccagccagaagtttgcatgccgggaccgtgacagctgcgggcggggaggacggcggggccgcggggccagcggcgtggtggagaatagaggcggctgcttgtcatgcagcccacggcgtggcggctgcgggccggggactggcggcggcgggcgaggcggcgcccacagcactcgggactcagctgccggagggacaaactaacttcctgagcgcgggacctgaggctggcgcggccgggagccacctgcagcctgcggtgaggcgaccctggccctcggggcgcgcggcatggcgcggggaagcgggccgtgctgagcgagcccctccgacagacccgcggccgctgctgctgcccgcccgcccgcctgcctttccgaaggcctggcgcggggctccgctc

SEQ ID NO: 330776 - DNA, 1016 bp, Homo sapiens
  chr1:39956640-39957656
  hyper
cggagcctcctccgcaaagctggatcagtaccggggacgcagggcgcacagctagggctggcgggggcggcccgactggggcgctgcctgggctcacgcgggagccaggtgggggacgcagggagaagcagccgagcaggtgccgagaaggaggcgcccgcagaagcgcatgcaggggccacggggaaggcgccaggaggcggtgaggggccgcggtggccggaacccgggccggctgctgcgggcagaggaacaggccccacccgcggggcttggctggcaccgcccggctctccagacggggctacggccgcgtgtcgggcccggtggcgaccacggcacaccacggcgaggcagccgggtggcaccactggcgggaccgggacggcgccgcggccttaggatctctgcgccgaggcccgcggcgggagccacgacggccctgaccacgctgacgcccaggctgcgggctcctcgcccggaccaaccgccagccacgccgaggtcgcacctcggggtcgccccacccgcaacacctgccgccgcccggggctcctagcgggcgcggcctccgcgcccaggccccgcccccgcgcccccattggtcagtcccgggggtgggcgggcggcacagacggctgagccggggcaaggactcgcgggaatcgcgccgcccgggtcgctgccggagctcgccggtcgcccctgcgctgcgcggaccgcagccacagccggactggtgggaacggcggcgacagacggattggctgacagtcccagccctcagaacagccccggcctcgaagcgttggcgtctgcgtccgcgtcagcgtccgcttgtcccggagccggggcaggtgcgcgcggggggcgctccagggaccgcgctgaggccgcagacgccgcccgccgagccccgccccctgctcgccgaactcagctccccgttcgccgtcggggcgtccccgggcccaggggcggcggcggagctgatgtgcgcccgctgagcgcccccg

SEQ ID NO: 330777 - DNA, 229 bp, Homo sapiens; identical to SEQ ID NO: 221325
  chr1:40149563-40149792
  hyper

SEQ ID NO: 330778 - DNA, 647 bp, Homo sapiens
  chr1:40157668-40158315
  hyper
gggtgctggttgcgcgcggagagcgcggtatgggtggcgaagtcccagcctctacctagccccgcgctagtcgtgggttccctccagccacccctctggcccttcattccggtccctccccagacgggccctcctcctttctcatggacccccaagaggcctctcgcgttctcccccgaaggacccctatgcctagccatggatcctccattccccaccctcccgttttcccgtcccgcagacggagccggtccccagccgccgccagtctccggcctcggatgttgacacaaacccgaggcggtttacactgagcgggtctggaagctttcagggccccggcaacacctcctccccgcacttgggggtctccccacagcccgggccggccgcctgggctgcactggcgtctgagagctcctgacacaaggctgtgggaaggaacccttttaagccaaactgggggcaaaaggggagccagacatccccgggctgggccacgtgcggggcagggacttctaaggatctgtcgaaagtcggggcggacggctggggattggcctaatcggagcgcggacgctgaagagcagcggtgagaggcggggcttctgtccgcgcggcgaaggtagaggtgggctgggcggggc

SEQ ID NO: 330779 - DNA, 869 bp, Homo sapiens
  chr1:40781107-40781976
  hyper
cggcgtccttgtggtgcgggccggcgccgcctattggcgacgaggggcactacatctccgggcaccccgaagtccccacccccaccacagcgctcacaaagttctcctttgtctgccgcctccctcccgccctggtctcaggttagagacttacgtcgatgccgtcggatccaggcactcccggcggtcccgggggacccggggggccccgctctcccggtggacctctctgaaaaacacacacggggtggggcagtcctcagacagtgcaggaagctgggcgtccccggggctgcaagcgaccctgggagcggggtcctaggggcgcagctcttccgcgaactcccacgtattgagaatcttctgtatagcaggcactgtgtgccattacatgcattcattatcttacagaatactcagaaccgggaggcgggcgctattacgggccccagtttgcagtcgaagaaactggctcagaacgtgaagggtccatggtcactgagagtgggcggcggcgccaggagtccgccctggatctgcccgactccttccactgtgccagtttgcccttgcgcggtcgcggtggggaatagatggagacgtggacagctcaaataaatcacagatggaatgtaaggttgtgcctagcaggctgccggccctcagtgagcggtggctcgggttgttgttcttacgtgaacgacaggcagagacagcgcctcctcctctccccatggtgcgggaaaacccgacgggaaagtgggggaggcgcagagaaaggaggtgtagggaggtgaagcgggtactatcttcccactcggagcgccccttcggcagcacagctgcccggtcctccctctgctaagccc

SEQ ID NO: 330780 - DNA, 634 bp, Homo sapiens
  chr1:40782323-40782957
  hyper
cgcgcgcccgcagcccccggcggccctcggaagggagacgtgggtaggcgggcagggccgagaggccgcctcggggcgacagcggcgtctggttggagccggcgccccctgggaggcggcgggggcggaggctgcgcagcgggtgaatgagcaccattgtatgccccgccacctgggctccccgggctgccaggaccgggcgccagctcctgccccacgctgcctgtcccgggccgggccgcgcgtctggggacgggtcccgtttgactctccggctcagccacctccattcacggtgccgcgatgggcaccatgtatgcacccaccgaggggacctgcccgcggcgctgtcctcaggtggcctctcgggctaggggtgtcagtaggcgcgggacacaggcagagctcctccatcccggactccagaccccgcaccctggaccctggcagcggaggggctgcgaaacttacaatctgcgccagagcgagcactaccacctggaggagaacaaggaggctgcggggggaggccgtagcggcggccatggctggcggcgagaccaagggggacgggtgcgtgtccgcgcacgcaccgacggcagagtctcccggcgctcctccagcgctggctgtt

SEQ ID NO: 330781 - DNA, 384 bp, Homo sapiens
  chr1:41267899-41268283
  hyper
ggtgctgtgaggtggaagggcgaggccgaggcggcggtggcgtcgcgtcccccctctccgcccctggcctcggggacgcggcggcaccttcacactttccgcttggcccgctgctcgcctttcaggccgccgcgttttcaattgttaatttggaaacggaaaaagtagccggccgggcgggggaggccgcggggaggtaatcggagccgcagcaccgccccggcccctcccgctctcggggcctggcattggcaaagccccgcccctcccagggacgcaagagccccgcccaccattccccgcccccggcatgccccgcccatttccgtaagccccgccctcgccgaggcgggctgggggcacctgggagtgccgagcagtggc

SEQ ID NO: 330782 - DNA, 687 bp, Homo sapiens
  chr1:41284015-41284702
  hyper
cgcctttactcccaatcccgactctgaccctggagacccgcacagattcagcggaccctccccctccctccccagtcccctgccacatccccagaagtccccgcctccgggtccgtgcgcggggtaggctggctgtgatctcgccgcccccgcccctgcagacttcatcgtgttcgtggcctcggtggccgtcatcgccgcgggtacccagggcaacatcttcgccacgtccgcgctgcgcagcatgcgcttcctgcagatcctgcgcatggtgcgcatggaccgccgcggcggcacctggaagctgctgggctcagtggtctacgcgcatagcaaggtgaggcctgcaagccgcgcgcggagacccgagggcgtgtctggggcacgaccagagcgggcagggcggagagggcgaggtcagaggggctgtctccgtgctgggaaggggtgtggcctgcgggggttggagccctagcaggaggcgaggtctaagcgggtggggcgaagtggattctgaattaggtaggggcgggcctaggagtccggaccggatcagggggcggggccggagaggcggggcttgagggtttcccctggatgcttctgggtttgaagggaccactcgtaccacaaagtgggcagctgaggtgggacttgagggtggggctggagcggggctagggtggg

SEQ ID NO: 330783 - DNA, 914 bp, Homo sapiens
  chr1:41326954-41327868
  hyper
agggggagaggacacgatccaagaaccagagtccgaaagctgaagctggtccggtctctttcactttacggccgaggctggggtcagagaagtgaagccaaactgtcctcccgcaggaggcaaggcctggagggacgccagggtcccagtccggtgccgggccctgcgcacacagccgccgcctccaccctcgcggagggcgcgcgcggggcccagtcgctgggtgcagggtccggcgggcagtcgggccctttctcctctccggcacgccgggcgggcgccggccgccctcagcagctcacggagccggcgggcggcgcggaccccaagtccgagaagcagtcgaactcgctctggcccaggaagagctcgggcagctcgcgcacgcggtgcagcccgagctccagctccagcgacgtcagcgcctcctcgtcgatgagttcggcgtccatgccgcccagggcgtgcgcgggcggcggcggggctgcggcgcttggcgccggctgcgggcccggggggcctcccggagcgttggggggcgcggccgcgcggccggggtacggcgtcgccacaggctgcaggtgcgcgatgcccgcggccggcggaggcacggccggaaagggctggaaggaggacggcggcccgaaggccccgtacgccagggccccgggttggcggggcggcggcggccccagcggagccccccgcggcctcagcccactgtccaggcccgggcccgcgtacggcggcagagtccggagcgcatgagggccatgggcggccgcggcggacggcggcctctgcaccaggcggtagccctcggcgagcatcaggtggtcggccatggcggcaggccggctgcctgcggggacagcgcgcggtggtcagcgccggctcccccggcccgggccagc

SEQ ID NO: 330784 - DNA, 462 bp, Homo sapiens
  chr1:41832027-41832489
  hyper
cgcccggcagactcccacgaccacctgctcacacccacccacgagcgctggcgcgcttcgggcccttccggcttcccgggcctcccggcgcccctcccccgccgccgtgcccagcccccccaccccgctctgctccccgcggaccccctcgctcccttccggccccacggcggccgcccccgccacaccccccgcgcaacttagggagctgaggaggcggggctcagggaggcccctggggcagccacgcggcgggagaggagggggcctggaggcagacagaccgacagacagggtgagggccccgcctgccacctggcgccgctccagcgggacgatggcgggcagcgccgtgccaggcggtaattgcagacagactaatttaaagagatgagacggttatttttaactcgcgttaaggtaatgaacggcgcggggggtttgcgggttcgaaagttcagc

SEQ ID NO: 330785 - DNA, 1458 bp, Homo sapiens
  chr1:41847296-41848754
  hyper
cggcacaacctgtcgctgcacacccgtttcatccgcgtgcagaacgagggcaccggcaagagttcgtggtggatgctgaaccccgagggcggaaagacagggaagaccccgcggcgcagggccgtgtccatggacaacggggccaagttcctgcgcatcaagggcaaggcgagcaagaagaagcagctgcaggcgcccgagcgaagcccggacgacagctccccgagtgcgcccgccccggggccggtgcctgccgcagccaagtgggccgccagccccgcctcgcacgccagcgacgactacgaggcttgggccgacttccgcggcggcgggagacccctgctcggggaggcggccgagctggaggacgacgaggccctggaggccctggcgccatcatcgccgctcatgtacccaagccccgccagcgcgctgtcgccggcgctgggctcgcgctgtccgggtgagctgccccgcctggccgagctgggaggcccgctgggcctgcacggcggcggcggcgcggggctgcccgagggcctgctggacggcgcgcaggacgcgtacgggccgcgggcccgcgcccaggcccggcccggtgctgggtgcgccgggggagctggcgctggcgggcgcagccgccgcctaccccggcaaaggggcggccccgtacgcgccgcccgcgccctcgcgcagtgccttagcccaccccatcagccttatgacgctgcccggcgaggcgggcgccgcgggcctggcaccgccgggccacgccgccgccttcgggggcccgcccggcggcctcctgctggacgctctgccggggccctacgctgccgccgccgccgggccgctgggcgccgcgcccgaccgcttcccggccgacctggacctcgacatgttcagcgggagcctcgagtgcgacgtggagtccatcatcctcaacgacttcatggacagcgacgaaatggacttcaacttcgattcggccctgcctccgccgccgccgggcctggccggggccccgccccccaaccagagctgggtgccgggctgagggccgcctcccgcctccgggcgccccgtcccgtccccagggggcctctgtcttcccatcctgattcccgggtccctgcccccgactctagctccccaggaggcggccccagcccagctagggacccctctcggaggccggccgccggggaaggggagggaggggccggggcaccccactgctcctgcccacactcctgagatccacccccttctcctgggcaggaagcctgggagaggaggctgaattccaggctggctgggagtagggaggagcggggtgggccgcctggtgtggacggtggtcggggaagccaactaggagatgggccagggagcgtttacaaatcttcagtttcatttgcggaggcctagccgtgaccccgcgcccaccccaaacac

SEQ ID NO: 330786 - DNA, 115 bp, Homo sapiens
  chr1:42128212-42128327
  hyper
cgggatgccttcgcggccggggtcgcagatgggcccgggcgcggctggcggctgccaggggagggtctcctcgcccggggaatccctggctgccggcggccgcggggagggtctg

SEQ ID NO: 330787 - DNA, 83 bp, Homo sapiens
  chr1:43147856-43147939
  hyper
cgtggccgactactctaattctagttccggtctctatggcggccggcggaggcaggaacggttgtaggtcgactgaattagcc

SEQ ID NO: 330788 - DNA, 909 bp, Homo sapiens
  chr1:43389629-43390538
  hyper
acagcgtggagagcgctttgatggaggaaatacaagccgatgtagtgttcccgggaaaacctgatccagaaggcttccagggagaggagattttgcgcctaagatttcaaatgaaagatctcataacactgtcagtgaaacaactaagcactgctgggaaaagatggtggcctggagaacagtcccgttatctatttaccccttttcgtcagaaaccgtagacgtcaccttacgcgggataggaacccgggtgagctacgtccccagggatgcccagcgatacacaagtcaccgtcaccccctccagagtaaaccgcatcgcctggcaagcaggcgcccaggtcgtccccaagggccagcgcctggaaccgccagggtgtgattggtggagtcttggagcccgcccctcgtcgggcccaacaatgcgcctctgattggtggagaaaccacctggccccgcccatccccaatcgtgtccgtgcgccgccggtggcccggcttaggggaccgctgtgaggtctggagaggatgcgccatcgaccccggcagtaggcggccgaaccttggccccaaatcttctaccccggggtggattgcggcccctagaggaaaggcgtcaggggaccgaccggcagctgtgccgtcgcggcactctggaccacgctgagggcgggccggcttccctgcgcctgcgctgacattttgcagtttgggaaatggcggtgctcggggacgtcgatactgacccagggcgggaggcagctgcgagtggattgtcgggccttttcagaccggggtctgaacctctgggccggggcggggctcgggtgctgcctggctctgccaacgttctgggccctcgagtgtgaatgagctccgcccgccatccgccttgtagtcctcgcgtcc

SEQ ID NO: 330789 - DNA, 1616 bp, Homo sapiens
  chr1:44872033-44873649
  hyper
agagtagcccgacacgtgggatctcccgggattttcggggtcgggaccccctctcccagcggttctactgagcaaggcgggaggacgatcgtggagacgagggctacttgactactctacttgtagttttatttttatcttagacctgccttaaactgagtaacaatttctcttctgacttaagaacaaaacttttcagtgagcacgccggtcgctgcggtcctgcggccactgccgccgcgcttgtcagcccgggccgagcgaccttctctgcccggaacccagccccgccaccgcactccggagcctccggcctcccccaccccacccccgccccccaacccggggcttttcagggctcggcctgggcgtttcgcctttgtgctttgtaagagaaagccttttcttccagggcacaacaaacttgggcggagagcttccgtgtggccccccgggcgaggccgcccacggtggtgaggccatccgaggggatgcccggttcatcccccagtccaggagcctctccgagagctcgcggcccaggtcgaccccagctggcgagggcgcgcaggagtcccgaagtagcggggactagggcagccaggaggcagggggaaagctctcgcttcccgttaagcacaccctgcattctcgggtcgtggatgcagctccagcggagagcccgtgttccggccctgagccaggcgcgcgtcgcactgggtgggtgcatggggcccgggccataggtgtgggggcacagccctacctggccggcccgggtcgtctggggtctgcgccggcccactggcccgggagccgccgagggggagagcaccgcactcgctgcccacgacgcccagcagccacatcttgcctctcgcctccgctccggactcggcttgaggggcaaaggggagagaaaggaaaaataaagaaaaaaaagggcggcagtgaggaagcagcgaggggactggggggagcagagtgggcaggggggctttgccttgcctggcctcctctttccgtctcgcgggctcttcctgcaaaggggaatgagcagaggggggaaaggcagaaagagcgtcgaggaagagcggtgctggcgtcttccgtgccgatccctcctggcccgcagagacccggcaaaagtggcgtgagttcgcttgctgcgcttcgaggcaaggctggggaaggccgaggacggggcggcgccgcgtcgcgccgctggtggccgacagggccggggccgggcgcggagcgagcggggacacacacctgttctgcgagccgcgcggtgtgcggcggccggacggccgcggtgcgggccgcagaaccctccctcccgcactgcgcatccgcagtccaggagctggaagggcccggcagccccgcgccggtccgtatttgcaggagaagcgggagtggaggagtccgcggctgcccgctgaagcggtggtgcgcgcggcggcgggacccgggtgacccccggggcggggctgctcgggggctggaggtccttggactttggtcgaaggctggcagctctgagcccctgccccgcgggccccgcgcggctgcggaccaggggcccttgcacgtgtcggttcttcctggac

SEQ ID NO: 330790 - DNA, 1137 bp, Homo sapiens
  chr1:44883116-44884253
  hyper
tggcctggcttggcttggctcggcgcgccgctcgcctggcggctgggctcgctgtagttgtgctcccgctcttcccctgccctcgctccacgccgcgccgctctgtgcggcggctgcctcctcttacggccggaatgcctaatcaccatggtgagaaaacggacaccgcagccgtcctccctcctcgccccgcgccctccctcccatcaattgtcatgcagaagtgatccgggctgccgttttctcgcggccgcccgccagcccctcgccgctgccggcagaagggtggctggtaattgatcttctgggggagggggcgcggagaggcgcgagaactggccccggggaggccaggccacggggtgggccccgttcgcttacttgcaagggacccccagcctccgccaccgaggcggcttgcaagtggtttcagaaatgttggtgatctcgccgtcgctctgcagcacttggaggccgcaggaggactccgcgcgccgcctcgagggccgggagcgcccagcccgcggccgcacacacgagggcccgtcgcgccccccgccctgccccgcctcgccctccacgtccctgcacccccaagtcgcactaagaacccagtccccgatcggtttcctctacgccgtctgagcagaagagagtgggaaccggggtgacggataaggggggggcgcccacgcgacgtcggggtgcatgggagcgcgcgggaggcgctagtgggtgcacggggcgtgagggggacacagcgcgggcgtggggatggccactgcgcggggagggttctgcctggagaaggagggatgggaggaggttgggggagcagggcgcgtggaggagggaggttggacgtgtgtacagcgcctggggacctcgctggccccttggtgcccccaggactctgaggcttctcctttcggcttgaaatgtttttcccttcctgcttttcaaatctgtaaaaatgttccggggaatgtttccgaagtccagggctccgtccttcggcgggattgctggcattcgggcaaggcgagtcgcggtggcctctgaggctcgcagccagcacagcggggctcgttaaagtctgggcaatttctggaactcttcccacgggaagttttccgg

SEQ ID NO: 330791 - DNA, 42 bp, Homo sapiens; identical to SEQ ID NO: 197503
  chr1:45097400-45097442
  hyper

SEQ ID NO: 330792 - DNA, 86 bp, Homo sapiens; identical to SEQ ID NO: 197504
  chr1:45097718-45097804
  hyper

SEQ ID NO: 330793 - DNA, 203 bp, Homo sapiens
  chr1:45098124-45098327
  hyper
cgctcctggcttgcctgggtctcttcgactctggggcccgttggcttcttcgcagtcacggcgcctgagtatgtgcaaaccaaagctgccgctctcagtttccccgtctgtctaatggaggtatggcgcccagctcttgcccaaacctctctaaaggccctgaagaaccctgggggggcaataagtgccggagaatgaggaac

SEQ ID NO: 330794 - DNA, 231 bp, Homo sapiens; identical to SEQ ID NO: 227043
  chr1:45252005-45252236
  hyper

SEQ ID NO: 330795 - DNA, 317 bp, Homo sapiens
  chr1:45284969-45285286
  hyper
cgctaacagctactgtctctgggaatagaacaaggagtttggttggcgcgatataccgcccctgaacctctagccacaataaggcttaattaatgaccggacgacttgaaagcgccttccactgtttatctcttaaatctgcaacgaaatgcaacaaaaacgcaagaaataaacaatagaagccagtcttactgcacactgcagaagccaataaaccccaaatgtagctcaaaacaaggtgtcacgcaaacttctgatttttttttgttttacactgaatctctgtcactctgactagagggcagtggcgcgatctc

SEQ ID NO: 330796 - DNA, 784 bp, Homo sapiens
  chr1:45285419-45286203
  hyper
cgccccagcttctccaataggtgggattgcaaacaggcaccaccacgcccgaataagtttgtgaacatttggtacaaataacaaatgaccaagttccttggttgtagttgcctaacttttaatacttaaaaatgtagcctcaggaaataagaggcctcaaaaaattgaataaaaactcacaactttctctccacggaaatctttagtaaaaggcgaaagatttatgcgctttgaagagaaacccgagtatattcgtgacttccgcttcgaacctcgcagggagaactaacacttaacacacttatggttgttggatgcctgcgtggtacgcactccctatatgtagtttatgcacacagatgcgtgtaagaggcatcatgctctaaaacagtgcagaaatgcgcgcacagagggagtgcaagcatcttgagggtatcttttcgtggtgcaccatgggtatgcaaatcacaggcggctccgggctgttccgcgccaccggggaagccatgggtcactgatctcctttgctctcctatgctcctctctgctggtcctcctgggacccgcaccccgtgggcggcgccgggtgcggagtcctttgcggagctggtgttcgtcccaggggttaaggtcctgtcccgccgtccttacccgcagtaagcctccgggcttagagagagggacggggaaacagacgggcacagacactcaggggcactgggacctcacaggaggcacgaccccacccctcctggaggagatggcatccgatccaattcacctc

SEQ ID NO: 330797 - DNA, 268 bp, Homo sapiens
  chr1:46632677-46632945
  hyper
ttttcctgactccgcgcccggcgcggttaattatagccccaccccgcgactacctgcttcgctcccacccgcgcgcccaggaccctagctgcgggactctagcggggaaggcacccccaattctgggccctggcgaccttgggtcagggccaggaaaggcacttccagccaagcgctggcgccgggtgcgcctcgctttacggaaagaacgccccgcgaataaatccggagcggatttgcatcacagcagccgcgagaaggctagctg

SEQ ID NO: 330798 - DNA, 1865 bp, Homo sapiens
  chr1:46767970-46769835
  hyper
cgcctgtccgtcattcgagcctccctcgcttgtttaagccgctccgggcccccctccactcgctctccggtccctcctcgccgctcgagccgatccgagtggcctccggcgctccctgtcctgcgggtcgcacggtcgctcggtcgcttagtcagtttggcacccgagaccccggttgtcggttcgctcccgtcagccctgggccgtcagacaggccgcggcgccccgaccctttcgttcggcctctccccctgccccattccctcgctctccaatctgctgtcctcccctccgcccatcggcttggcctccggaatctcgacccccgtggcgtgtcaggcagatgctggagccccggggccatcagtcaggttcggtggccccgggcctggcctggccttgccttaggccgggcctcctaacctcggcccctgccctagggcagccgggccatcgctgcccaccggttcgacatccgagactctcctgcccggcccagccgagtgtcagttcgcgcggcccacagccgcaatccagcctcagtcgcccgggcccagcctgcttcgctccagaccgggcctcctggcctcgccccccgcgcccccgagccaggccgcggtgcgggtcagcctgcccatttaggtctccgtctttactctgtccagccctgtcagtcacaaaattcattctccgatcctacgagctggctttcagcgccccaggctgggccttgccccgggcctcccggcctcgccccccgcgccccccggccgctgggccgccccttgctcttagccagaggtagcccctcaccccgcgacttaccccacaccccgctctccagaacccccatatgggcgctcaccgcccgcccgcacagctcgaacagggcggggggagcgttggggcccgaggccgagctcttcgctggcgccgcctcccgggacgtggcctccatggtcgttgccgccgctacctcacagaaccagcaactccgggcgcgccaggcctcgggcgccgccatcttggggaggtgcgcgagcccgagagtgtcgcccgcggaccgccatcttgaaaaggtcagcagttaggacggctccataagcgatatggggaagaatgtgaattattctaaagaaatttcgaagaaattagcacactttccaagtctcttaggagctactattttagataaactcctagatcaattatacttgggtgtggtatgactaaggggatgtttcttagcaaagcctcctcgggtgcaaacatcagctacccctaacctctgcctgcggctggtagtacatgccaatctgagcatgtgttcgcgaccacgatgagtgtgccgcacttccggccagatcgccggatttccgctgagtgacccttacaagtccttcttgatcctgaactgggttaggtgccgctgttgctgctcgtgttgaatctagaaccgtagccagacatgggactggaggacgagcaaaagatgcttaccgaatccggagatcctgaggaggtaaggcaaggcgatccactcggccctcttctctgccctgaagcccaggacctagcccgccaaaacacgcacggggccctcttagcccccagtttaccctctagggtttgcatagtcgggagctctagttccctcgacctttccccagaattcgtccggtgactttggacagatagatgactagtttttctctgggcctcggcttctgcattctgtgaatgtagtgaaggtttgagagcgaaaatgttttgtggactaaagtcttgtaaaaatatgacctatgtttgcagtcagtcagatgttctgaagcccgcgtttcacagatttggggagcaaacagacc

SEQ ID NO: 330799 - DNA, 335 bp, Homo sapiens
  chr1:46908450-46908785
  hyper
cgagcccagagcgctgaagttcccagaaggaccgggagggggcgcccacccacattcttccccacctgagtctgcgctgacgatttcctgggcttatctggatcttcctgcagaaagtcagtcttatgtgaccctgtacaacctcctggactttcccgcgggcgtggtgcctgtcactatcgtgacactacaggacgaggaggaactggccttctacaaggggtgctacggagatagttctgacaaaaatttctcagaggtcagtttccttctccgagcctctcccggagcggggacaaaccagggctggttctctccgggttggggcccctgac

SEQ ID NO: 330800 - DNA, 597 bp, Homo sapiens; identical to SEQ ID NO: 221344
  chr1:46913766-46914363
  hyper

SEQ ID NO: 330801 - DNA, 482 bp, Homo sapiens; identical to SEQ ID NO: 227065
  chr1:46951190-46951672
  hyper

SEQ ID NO: 330802 - DNA, 619 bp, Homo sapiens
  chr1:46954676-46955295
  hyper
cgagcctctgcctgattgagagccggccccagaacgtcctcttcctatgagccggttcccgcctggagggagcagagcgctggtaagagcaggaccatctcaggcccaggattttcccgaagtggaccggtcgccgagtgtgtttgttcccccagtcccggcgacaggtgcctgtgctgtgtgtgaagccgcgagttccagcccgcggcctcccggcccagaggccaacatccaggtgctagacaggtgagcggctgctaggagcgcaaaccagcgcacccgcggggtgtgtgggcggcgagttcagagtactggctgtggcgctgcatggtggcgcgggggtggcagtgttgttgcaggtggtgtggaactgatgggaagaggtatgtgtgcgcgcgtgtgtgtgcgcacaaccttgaagggacagtggggacgggagtccgtcggggctcccccaggtcacctctacggactccagctgccaagcgtcggggtgggaccggcgagggggaggtttctcaagacctttcaacaccccagggatcggcctgcggcttccgcggacccaagagaggcagagatccctggaccgggagccagagctcgaggagcagagatt

SEQ ID NO: 330803 - DNA, 1448 bp, Homo sapiens
  chr1:46955978-46957426
  hyper
cgcttcggatccgtcacggttttgcctcatttggaagatattacttcgcccctgaaaaaaaaaatacaaaaaaggtttggatattaagcggagacaaatccttctcagtttggaagggggcggcgcggggagggaggtggccggcgtaatgcggaccagatgcggcctggggagttgcggagccctgggcgggggctggggagggggcgcggccggcagcccagttcccagcctgcggagcgcagaggccgcccacgccctcccagcttcctggtccacgcgaaccccgcagtgctccgggcattgcccgggtctggctttggtctcgcccgcgcagatcccgttcaaactcagctgccaccaagtgcgccttttctctctggattgcgattctgcacgaattttccagttgagggtggttcggcgctcagccagcctctgccctcgaagacgcggccttggtctaggaaccttcaggtgggtgtttggggcgcagtggccctagttccctagaattcgttttgcctcccgcggcctcagccggcgtgggtcaggcgagctccggcgaggaacggcaggctggggccagtccccggagcggctctcggggcgcttctaggggagcagtcaaagggttgcgaggactgccagggtctttcctccctaggcttcccacactggatggccgtaactcagtcgttgacggcgacaggccaggggccctgatggactgtgcagggtcccgggcaccaccggctgaactttctggcggtcacaaattcccggaacctgcgcaggggcttcgttggcactggtggttcacttaaggagcttgagggaaacctcctcttccccaaattcgcaccaaatctggggccccgacttttcctggattccagccacactcggtttgggaggcagtgggctcctcaggcttgtgatttgcggcaggaaggagtcccggaatggaagaacggggaggacgagatccgaggccttttcaccctctttgcaagcatgcagttcaccaaagccgagaacccaccgggcctggagcgcagcctcagcgctggttccgacccgggccccagaaggtctttttcgtttgagaaaagtcctcggaggccggggcagggtgcgccgatattggtttactaagggcgcctccagtttgagggcgttggggaaagaggagggctttattgacttgatggaccttggaggaaaggggctgtctgtaccgcaagggttgtgtgctccacagccgaggaaattgtgcaagttcctacctggctgtggcgatggcagggcgaccagagtcctttcccctctctagtgctagggattctgtgcgctgcaggcgggtcagctctgtccaacccctttctagaaagttctatggtctgttagttttaggtgggtgtagtgggggttgttttcaatttttc

SEQ ID NO: 330804 - DNA, 313 bp, Homo sapiens
  chr1:46998935-46999248
  hyper
gaggccccggcggctacacacgcagcaggccgcgaagaagccgagcgccagcaccagcagcgccagccccacgacgagcagcgcgttgtgctcgggcaagaaggaggcgaaggcgcctgccagcgtcacgttcacgcccgccagcagcgcgcacagaccgcaggcgcagcacagcgccggcgacggcaggccgggcacccggccccgggcgcgttccgcgggcgccgggaccggtggcccctcgctcttttctgccggcggcatcggcctgcgcacgccaggcacgcatcaagctccctcctgccgccggccc

SEQ ID NO: 330805 - DNA, 553 bp, Homo sapiens; identical to SEQ ID NO: 227072
  chr1:47009561-47010114
  hyper

SEQ ID NO: 330806 - DNA, 549 bp, Homo sapiens; identical to SEQ ID NO: 227076
  chr1:47694941-47695490
  hyper

SEQ ID NO: 330807 - DNA, 2191 bp, Homo sapiens; identical to SEQ ID NO: 227077
  chr1:47696003-47698194
  hyper

SEQ ID NO: 330808 - DNA, 566 bp, Homo sapiens
  chr1:47909580-47910146
  hyper
cttgccacagcgggcgcgtcttcgtggttacaaagcgctttttccctgatgacttttttccccttttcaaaaacacttctttctccccccttcaactagcaaccctccccaggcccacccctcctccctctccgctccggtttatttaaacttcgcctcctccagcgccgccgcagcgcgcacttaatgaagttgaaggctcggtgagcccgggtgaagagggtttggaatctgttgaaaggggcgttttgtgacactgattggggcgggggcgggggcagtcgcggaccagacaatgaccgaccaggcgggttttcctgcgcacagggtcaggcgaataaaggcgccgacgctgtttaaacgaaggaccttgtaagagaaagggagaaaagattttgtgtgtggagcgtgcctcgtaaggtttcgtgcttaggagaagttgggaggaggcagctcgcctagagtctttacggaccgaattcggagtttatttcgaacactatgcatcaagccaaagaaaagcggggccagtttgggtttgcgcctaacttaattccgatacgcgc

SEQ ID NO: 330809 - DNA, 543 bp, Homo sapiens
  chr1:47910467-47911010
  hyper
cgggctagtgggcgcggcgcggcgcagggcggagcgggcaccgcctccttccgtagcggagcgagagctgccgctcgaggctgaggccgctccggaggcctggaggcttcggactgctggactagtggggaaggaaggcggtttcctccgcagcgccccggtgctgcactccgcaccgtcaccttctgggttgtttctggcgctccctctgctctcagcctcgagtcctgggtccctgcggagcgctgtcttttcgctccacgcggactctgagcggaagtcgctcgctgtccgcgactttgcatttctcctgcagcaggggtctctacccggtgccttcctcccggcacgctagcctcctcgccgaaatttcgtcgtcccggagtcggtaaccgagtcccaggctttactgccactccactccctgctgggttatttaagagatacgcggcttccgaggggttttcatcagaccccgcaagtgcgctcggctgggaaggatgcgctccgatgccgctacaggggttccgcgcgtttcaccgc

SEQ ID NO: 330810 - DNA, 464 bp, Homo sapiens
  chr1:48058828-48059292
  hyper
cggtcttgcgcggaaggcgttatcagccccgcttattagatgaggcggcgcctgcagtagagggggccgtctccgcagggtctgcagcgccggggcccgcacctcctgctccgcggcccgccgccgccagcccggggctgacctctcagagcagggcggaggattttcacagcacagcttcccgagagagcgggattaagggggaactgctcgggtgggccagagccaggggctagggggaggccgggcggaaacccaaaacctccgcagctgtttccagtttgccgccctggctggaccgcggtggctgcgtgcagagcgagcaaggctgcgcgggcctggagcgcccacggggcgcgggacctctctctgtctccccccgccccgcggggctctctctcgtcctctctgtcttggtggggctcagtctgtctctcgttttctctccctgtttctaagatctc

SEQ ID NO: 330811 - DNA, 561 bp, Homo sapiens
  chr1:48175235-48175796
  hyper
cgggagctggcgagctgaaagcccgggataattagcgctaattacatgtgtgcaaacagccgcggcagagggcgcgggctaggccgcggggccgcccctcccccggcctgaccctggcagtcccaccgcagtggaggggctctgctggcgcagctcgagccgaccgctaggggagagcgcgcaggagcacccacgagacccgggaatcggggtgcgccgtcagtgcccagagccaccgagccccgaccacacacgcgggcgcgcgttgcggcccggcaatctcgggatggcgggttacagtcgggccagaggctgagcccagaactgggggccgaacacccgctgcccttcgctgcccttcagcggggaccgggcggggtggggctgagcattctggcccctaggcttctccgactgttttggcctccggagcaacccggtgtctgcggaagattggaagcgactctccagcaccccgccgccgaggcccgctctcccaggccatgccggctggcgccgaggccgcgggacctggaagggtcggagtctggtgctggtgcc

SEQ ID NO: 330812 - DNA, 511 bp, Homo sapiens
  chr1:48190715-48191226
  hyper
cggttcccctgggccaagccgagtcctccccagcacaacagcgcggcccctcggcctccgcttaacctgggcgcgcgggctggctgggccggggccattatgcgggcgcatggccggccgcgccggggcgcagagcaaacttaaccttcatttgggagcgcccagcggccggagcgcgcggcgcagccatcgatcgcggctaatggcctcgtctaaatgcggagccgctgcctccgccccccgggtcagggcgcccccgccctcgccccccgctccgtgcaaaatggtgtttaccaaagtcaatattggccgcggcgcccgcccggggcacccgggagcccctctggcctcccccagcccaaggctggatctgggccaccagagcctcatcttggtgtcccaactagccccggccctgacaaggagtcttttgagggctagacacaggcgggtctcgcccagggtctcccaggacccgacctggagtctcaggcctccttcctgtctcggc

SEQ ID NO: 330813 - DNA, 951 bp, Homo sapiens
  chr1:48462221-48463172
  hyper
ggcgcccgaggctgcgcccggggggtggaggtggagcgggcgggctaaggtgggtgcggaagcaggacccaaaccatggtcccacgggactagaatacccaggcaggcgggagagtggccgggcaggcgctcgctcaccgatccgggcggccggcactgtcctccgtccgggggctgcgggcgggcgcgagcggtggcgaggagggcggcgagcagcggccccgccagggcggcgtgcatcctgccagggcccgcggggcgcgggggaccctcctgggcggcgcccctcagcggggcggggagcccccagttgggcacggagtttcctctggagcacggggctccagccgcaggatgctgggcgccctctggggcgtggctgactgtccctgtcggacctgggggtttctctggggccgggctccgtctgttggaagagggagaccctctagggctgggcccctcccccgggcgctcaacctcgctggccgagcccccgggtgctgagggcgtgttggggtccgggggcgcgcggggtcccggagctgcgtcgcggtccaggggcgcgcggggttcctggggcagaaccgagaacccggggtgcgcaagggtcccggggttatgctgggcacccggggcacgcaagggtcccaggggtgcgcggcgctccaggaggcgcgcagtgggacaagtgcggcggaaggcgcggcaggggtggggggcggctctggggcgaccggctgcccccgagcccggctcagaggggcggcgggcggccgcgcggccgctgcccgggctccgccatgctgctccgcggccgggagggagggagagaggagggcgggagagcggcgcggagccgggccgggctgggggctggggccgctggggcgggggaggggaggacctggcgcggggggcgggggggcgaggggccggggccgcgccggg

SEQ ID NO: 330814 - DNA, 38 bp, Homo sapiens
  chr1:48463421-48463459
  hyper
cgccaggcgcgaccgggccgcagcttccccgtgcggcc

SEQ ID NO: 330815 - DNA, 133 bp, Homo sapiens
  chr1:48559554-48559687
  hyper
cggaaacgcaggtgcggcagctgcacaactggttctacgggtggatctgagcaccgggctcacctgggagatttctaataatacaaatccccaggctccgcccctgagattttgacgccgtgggtttggtgtg

SEQ ID NO: 330816 - DNA, 836 bp, Homo sapiens
  chr1:48937304-48938140
  hyper
cgcgccgcgcacatacactctctctcactggaaagttaggagcgaggaaagaactctgaagtgatttgggaacgatctgaaagcgcgcaagttggaagtcgggttgaagccagcatagcggagcaggggtcaggcctctgcgtggccggagtgggagagcgcttctgagaacaagatggggcaggaccgaaggggcgtgaggtcgacgctccctagggatgattcggagggtgaaggaggtttgggggtggttccgggctctcggaggtgactgagggagtccctgagccaatgcccgggggtgggaggcgctaccggtactcactgagctgatctccagcgccagggcgcactgcagcgccttcaccttcggcatccgtgcggggaggggcggcggggagtgaccccggccacgggcccgagtgaggcggggagacctggggctgggcggggacggggaggagacgaggtggcggcggcggtggcagcagtggcccccaggccggggcccgcggtccagcctgggttccgccggagaagcagctgagcgcggggcgcagactcgttgtcatggcagccaggaggggcggggccggaagagaggccgcgcggggcactccagggctacccgcgctgggacgagcgctggaggcggagcttgacgaacgccgagcgaggcggagtcgggcagggggcggggcttccgaaggggcggggtgaggcaaggcagctcttctgtgacgtcaaactgcgcccaaagccggacgaaagggagctgctgtttgtataatgggacggtgctctgttcagggagttggagttcctgtaaggccgtc

SEQ ID NO: 330817 - DNA, 929 bp, Homo sapiens
  chr1:49242191-49243120
  hyper
cggtcccctccgcccgggcccccggcccctcccggggtcccagcccccgcccgggtcccaccgtccctccccgcccgcttgctcacctgccagcgccaggatctgggccttgtggagcaacagcgcgccccagtcgcggggggcgcgcggggggctctcgggcccggcgcccaattcctccgggccccggtacacggcgtacaccttctggttgtcaaaatccagccgcgagcgggggctgaagtcgcgcacgcacgacacgggcagcgcgtagcagacgttgtcctccaggaaccgcacaaaggcgtacatggtgggcgccgggggcgggccccggtcgggcagctcagcccgcggggcgggcgcggaggtggggatccggcggggggcgcgagtctcgctacggtgctggggggggcgggggcggctccccaggacccaggctccccccactgttattgttcctgaaagcaccgttctgccaatcggctgctttcgcctgggcgcggaaaagggagggagggggggaaagggggacgaggggcggatgaggggggtttggaagcgcactgccacttgcaaagtcagacccgagcaatcacagccggagcgcgattcgaatggggagggaaaagggttcagagattcagttgcaataaaaataataacaagagcattgcaggaaaaaaatgcattgattaaaaggtgcgctgcgtgcaggattatattgcttcaacaatcgcgctgccaaattgcattgcaacaaaactgcattgccaagtagagaagtgtatgagtgagtgaatgcgggataggggtgggggcaatcttgattgaatctcaaagtgtaaacttggaagccagcagaagtttggagtgttttaaatgtagccaccctacccgcgcccccagccccgcaccctccccgc

SEQ ID NO: 330818 - DNA, 931 bp, Homo sapiens
  chr1:50798667-50799598
  hyper
cgccagacgactcgccctgccccgtcgacgccccagacggtgttgccgacctccgccccgcagcgctggtgtgggcgcggccggacctcactcagcctgcactgccccgcgccgctcgccgcgtccacactgtccttgggaggacgcgcggggaagccgcgcacgatgcggcagcgccccctgccgggctccgggcgctccgctcccagccggctcggcgagtgctccgggaaaggggtccggaccccacacgcactgggttccaggacaggctctcgctcgggctgggccgactctggcccgcctaggccccgggcacgctgcagtgaaggcggtaccctcaccacagtcacagaacgtgtcggctgcccgcgcgtcctcccaaggacagtggacgggagctggggctggagagggtaacgacctgcccaaggtcacacagcaccgcagtggcacagccaggactggcacccacacctcccgcggaaccttgcaggggcccaaaccacctgggttctagagctccttgaactggcctcttgggctttagggaagagctggggacgagggaatggggtggggccacaccacattagcacggacccttgggtgacttgggcggaagacggggcgtcagggccgcctgcgcgcgcgtgacctccaagggtccttctggcgctcctccggcgctgcgtgcggcgctgggctgcggctcacccgacacaccggcggcagccgcggctgccccctactggcggaaggaagagtcgccgctccggggcccttggcggccgccgctcttcgcgcctccttggcctggctgccacccttccaccctcgggggagaccccgcgctctgtgctcactcggggaagagaggctcaatcacggcctggaccagcactagggacctaaacgctcttctcagtgt

SEQ ID NO: 330819 - DNA, 1282 bp, Homo sapiens
  chr1:50880917-50882199
  hyper
ggagctacccgcggcggcccgggttcgcatcctcccactgctcagaccgagtcggctccagcttgctttgggaagcattcaggaataaacgtggacagtagcggtcaggaaggagattcccgtttccccttctcccaggaggaaaagaggtaacgctgccgccactgccctctctttccagggtgggaacgccgcccgagaccggggtaccccacactcctccctagcgctgatcccagcggagctcaggccgcagtcccctcctgccggctgcggaagctcccagaagcggagactcaatcgcccccctgcccctgctaccaggccagagtctggagtacagatactggctccctggggcctgggtgtgcgaccccaggccggtcattgcaggtctctgcgcctccctgttcctgactgtgcaatgggcagcgggtcaggggcgcaccgtgggcgcagtacgttcccaggcgccaagggctgtgactgaccgacctgggcttccaccgcggggcctgggccatggagacgctccgggcccaggaacgggggacctcgggtgccccactacctcactcctagaacgcccaccgctcacgaagccttcctgagctctacccgaaggtgctgacagcctggagctgaggccaaggcgcttgggggcacgctgcttctccctgggcctcctatgttcacggaaggagagtttccgcaaacctctcactctcggccagcagaccccgcttcatgagaggaggagacccactaggggcggtggagaggcgaagtgatccagggtcccggaaagttggacaattccctggaccagatggctctcagtttcctcctctgtaaaatggggccggtaataagcaactctctggattcaccccggtttgctgcgaggatgaactaatataatagtctttaagtctgtgacgctccagatgttcttgggaatgagtaacgcgggtccacaggccgccccctcgggtccggccagagcatcggcaggaaccgaggagcctcgggggacccagcgtaggtccttcccgaaaccaacaccttgggtgcggtggggcagaggacggggatgaggcggccggaaccgccctacgaggagaggctgggaggctccgaaaacctggggtagggggagcgcaccggggctttagagggcgcagcggccaagggcaagaaagtttacactcccagaagcttccgcacgctttctcccgcctgcctcttttctttctaactcttccctctcctgtctcctctc

SEQ ID NO: 330820 - DNA, 706 bp, Homo sapiens; identical to SEQ ID NO: 227100
  chr1:50882896-50883602
  hyper

SEQ ID NO: 330821 - DNA, 1454 bp, Homo sapiens; identical to SEQ ID NO: 227101
  chr1:50883997-50885451
  hyper

SEQ ID NO: 330822 - DNA, 1275 bp, Homo sapiens
  chr1:50886011-50887286
  hyper
cccacaaaaagccacgggggtccagaaaaagagggtggtgctaggcaggcagtaggaagcgaagaggaaaagacataggaaagcagacctgagaaaccagggagggtgcggaagaaactagaaggagggagggcgcagcaagcggttgtccagagggcgttaggaacgcgagaaggggaaaagaaactagggcgtctcagaacctagggcgtctcaaaacctagggtgtcagttaaagggggggggattccttaagggagttgggaaggagcagagggaaagggcctgtggagaagcgcagagcgaacgaagatgcgcaggtttccacctggggagaagacgaagcaaagaagcagggacctgcctgcgtttgggtagaggcgagtaaaaaaattaaagcgtgtacatttcggcccgatgcaggagaaaggggtaaagtgcaaatgctccagaagcgggagaaaggagagtttctgtacccacgctccatacccgaggctgggcgagcggtgaaccctagcagtcgcggcgactggacacgggggttctactctttctgaaccgagacaagcccctgggccccgtgccccagagctacgatcctgctgcccctacctgcggcctggccgcgctctcacctgagccccctgcgccagctgctccgcctccggtccccgcgggcgctcccgctccaggtcccccgccgtcggcggcgcacactgaaccgaagacctcgtaggcgggcctcggggggatgatgccgttggcggcggccagcgccagcccctcggcagtgccgtagagcagctgcagctcgcgcgcctcgttctcctcctgcgcctgctgcctgcgcagcgccacctgcgccgccatgacacgctggcgctccgcgatgagcgtgcacttggcgcacaggcagtccttccagcgacagtagcgtttgtggcccttgagggccgacaccacgccatggttgcgacagcgcgcgcacttgggggtccgcgggtacttctcggctgcccgcagcaacagtggcggcccccgcagcaagccgcctgccacgctcaccggtagcgatgcagcggccgccgcggctgccgccaccgacgccaccgacgccacaggcggccccgtcgctgttgccgccgccgccgtcgccgcgccgggcacgctgggcagctccgagcgcagctccatgacaggacctgacgggaaagaaggtgggagaggggagagacctggtgaggagcacaccgcgcgctaggccaaagcgcc

SEQ ID NO: 330823 - DNA, 2096 bp, Homo sapiens; identical to SEQ ID NO: 227103
  chr1:50888261-50890357
  hyper

SEQ ID NO: 330824 - DNA, 853 bp, Homo sapiens
  chr1:50890617-50891470
  hyper
cgggaatctgggcgcgcagactcggcccgggtcgtcgcggcctcaggacgcagcccattccgcctggcacgactactgggccgcgtcttgtcagtctatcagcttctgagcccaggaatgggggtgggggaaggacggtgcgactaacgggcccccacccgaagaccgcagaacctggcgccccggaagagccctggaagatgcccaccgggaggctgaggctggagggaggagtgggtgggggtgattcgctggaggaccgggcggagagcttccagaaagttcaccaggccccggcgcgagggcgctccgacacggacaaggtctatgatagcgataaaaagctggttactcgctcccagaaaatgccacttgctggagtctgtgaatgggtttaggagagagaagggtgtcagcccccgcgagggtctcccgcgtgaagtgaggataagggagtgcttcagggataatatgtcctctaggagcgcaggacccagaccccaccttccaacacctggaggttccgaggccaagtatgtctagccccggctgcacctgggtaggtgagccatggggtcgggggaagagcgccgacaaccgccggattccgcgcaggggccgccaggcgcctgctcccagagctcctttggacaaagttttcgggaaattctattaaaccgaaaacgaaataaactatacaaatctgcctagcttttgagggggcggtggcccaggtatccttctcgcttgaggccaggtcaccgtgagatttccccactccggaccggggatcccgcagaagccaagggtgtagccacgaggactcgggaacccgaggcggcccagcagatgc

SEQ ID NO: 330825 - DNA, 1745 bp, Homo sapiens
  chr1:50892246-50893991
  hyper
ctacagttgggccccgggcagaaaaagccaaaaccctccgggacaaatgaggcggctgagagcagagggtcttcctcacacatccacacgcgtactcttagctcagaatcatttgctgacgcctctgctgtgccaggggctgggggcccgggtgagagggcccagccaagaaaatccaccccatccctattcgcccccggccccatcccccacgcccacgcccaggaactggtggcgtccaaagggactgcgttggggtgaggccggggttgagggcctagggcgcagagccggctggagacgcggcgtggggaagggggccgagggtgagtagtgtagctctgagtaaaagagccaggggcgccgatgggggacccgggaggcattgacttttgcgctgtttgcccgcggcctcggagcaagcagacgccatctgtttgccggctgcgacgcgtcccgtttaattaccctcccggcagcctaatagagatgatattaaactaaatctttctgacattaaaagtaattatccccaaaccggtggctccgggacggaatggcccctcccgcacccaccccttccctggccgcgccggattccgttagtttggctgatactctccgcccgggaatggggcgcagaggaaagggggaaagtgcctttgggagaaggaatctccacgggttgccctacacgcgttttcccgcacaaccacagactctcctgttcctatgtgaacacacgcacgtgtacacacagacacgtagcgacattttcctccagatcaactcatgagtcatgctgatgaagaccctcagccgcgcacaccctctgtggacagggagacgcgcagcttggtttcctgtccccgtcctctgacaccgctaaaatggtcattttccgtggtcatagccacggatctatgccacgacctgggaccgggcataatttcggagccagaaagtactcctgtggtggcgccgggtttctcaggcgctcttccagctaagggccaggagcccagcgatttccctacagttgcttactgaagtcgcaccattctctgcgaggcaggtccgattattccacttgtcaggtgagaaaacagactcggagaggtgagatgacttgttccacattatcacaattagtgagtaacagtgcaaaaatcaaacccgggagtaccctcatccaaagccaggtctgtctgcacagtgcaggcgcagcgggcgctgcgaatcggctcctggcccaatgcacccctccacacccgttggccgggaacccgctggtgctcagcttctatccggaccccggacctaaaggccgggcagaacaaccaactgaaggtggaggagcgagggcactggtgctgattgagcggcaggagcccccgaggcggagtcccagcggctgcagccctcctttggatcaagccctcgcgtcttccgggcaggcggaagggaggcgtctgcccagtgtcgccaggcttctcacgattttctggttgggagcatctaagcctgagacaaacgcatggagagcggtgttcaccgccccactatttgtttctatttgtgagcgtctactgagtacagccactctgataaacactcggtgtgtgctctcttgcttggcacgcagtccttgggggaagatgcgatgttccacatttcagacacgaggtagccaaagttcaacaaggcgacataacttgcctggggccagagtgctgccgaacttc

SEQ ID NO: 330826 - DNA, 369 bp, Homo sapiens
  chr1:51442594-51442963
  hyper
taagtattctgtcccgagaaagcaatatgatgtatttcccttatcgtattgatcaaaagaacgttgtggatggagtccgtggcccaggactggtttcgaaatctcagttcccaaaaaggtgctttcggcttttgccgggggtagaagtaaatagtccataggcgccgggcagtcacagtgctggagcaagaaaaggtcgtgctcacagccttcctggctgccctaagcaaccttcatcaaaaggctacgggggaaagtccctgtctcggtctctggagactgttctgcttttatatggcagtcccatgaaaacagctccacgcaggaacctagtgagaggcaggaaacaaatttcccacctgagacccc

SEQ ID NO: 330827 - DNA, 189 bp, Homo sapiens
  chr1:52081941-52082130
  hyper
ccaccgcgcccagccaataaatgcttaaattgcccctgtaggctgttagtgatctatccctacttctttgaccttatctcccaccactttctccctggctcactgctccacgcacactgacctccttgttgatccctcaagatgccacgctcactcctaacatttggtctttgcatttgctattccttc

SEQ ID NO: 330828 - DNA, 1279 bp, Homo sapiens
  chr1:52194847-52196126
  hyper
cgatgtctcaccggattaataaaaatataggcgctcacgcttttgtttaccgatatagtatctcctcctcccctcactccatcaacccccacgcgacacaactttccggaagtaagcaaaatccgttatcaaggtgaaactccggggaccaggctccacagctgccataaactggatggcacgttagaagccggtgggtgtaggtgaggcacgctggcgcccgcgggcccttctccagccgctacccagtgggaatccgcggggctgaagccccgaaaccaggctgagcgtcccagagcgcaacctccctttcccccagcagcgccggcgccgcagaagccgcgtgtccccaggcgcactcccccaaggtgaacccccgccccccacggaggcggctgggtcgcgggtctgggcggggcgctccggacgccctcccgccgctgcgcacccctcccgcgagctgccagctccctcggcctctccacccaaaactggcccaaccgccaatcgtctgcctctcacctcctacagcaggtgacccatggccaatcgccaggggtctctttgccaggagccgccagggccagccaatcggggcgacccctccgccggggaggggacgggaaaggggtggggggtgaagggggtgaagggggtgtcccgggggacgggctgaacctcagtcaggaccgcctgcaccgcagtccggggatcgggtcgaggggagaagaaaaaggggtgctcgggagcagcccccggctacctcccctggaggcacagagggcgggggccttggcgaatggctttcttgctggccacttgcggagtgagtagaccccgagggtctgggagaggggccggcccctacccctgagtccccggggtcccggccgccaggccggagcgcgaatgtcgtgctcaccctgcctccttcccgccgccccctggggtgagtaggacgacgtggctgcccgggcccctcttccttgggagttctcagttcctcagcctagatggggtggaggctgaggtcagggcctccagttccaccgagagggcattcgcccccaaatgagactttggaggaggtctctttttttctattcatttttgtggaactctgttttccttttgaaagctgtctcagaatatgattttaagcagaaaagttaagctttctcttatgtgaaagcttaattttgaccagttgcccattaatagaatctccagttgcaggccaagtgttttttggtggtggtttatttttggcacggtgttc

SEQ ID NO: 330829 - DNA, 948 bp, Homo sapiens
  chr1:53017742-53018690
  hyper
cggtatctaagatctcacgcaaaattcatctaagacttcgaaatcttctgaaaagaaaatgtgtaatcaacgttgttaatacaacagtaattcatcccattcaagtacgactagaaatcccgctgatgtgcttctttcaggtctaaacatctcattctttcgcaatccagataccaacaggagtctgaaacccttcgcagaggcgtgcaacacactaggagagcgctatctgtttacaaatacgaatctcagttacccacgtcaaaaccgcgcattaccacctttcgactggggggcgggggagagagaaggcgggcgagcaagaaacaaaatccacacagacacctctgccttctccctacaaggacgagcccggggaaacattcagtatgtattatatgcgtgtatacatttatatacattatgtagtcacctatgtctaagcaagggtgaaagaaaaaggtacacatgacagggaatcgtaactggacccaacagaaatgttcaaaccaatcccgttaactcaaaatccgccccgctggtctacaacaggtttcggtccgggaccgggagccccagccacagtgtggagttcgtccccaaagcgccccaatgccctcctcaggccgcccaggccgccgtccccacctcccttatctcagccttcccctgggacacccgaagcccgttccaggaaagaaagaagtgtcaggcccccagggggcggctgagacgctctcaggccaggcccccgacacctgcgaagcgcggcacctggggagggcgaaccgggggccgcccggccttcccgagcacaccccctcggtacccgacgctgccccgcggccggaacctcgtacctgcgaggcccgcgagctacaggcgcgcgcgacgcctcctcatctcagtggctcctgctctccctccgcctcctgctgccgccgccgt

SEQ ID NO: 330830 - DNA, 725 bp, Homo sapiens
  chr1:53067880-53068605
  hyper
cggggcaggggtgcgctgcctcaggacagacggtgaaactgaggtccagagccggacatccaccgcctgcggagggaacgagaacgcggcgcgtcctgccttgcgggccgagcggcgccagagccgcctcctcccgccccccgcgctagatccccccgccccgtctttgccctcgcgacgccgccacctccggaacaagccatggtggcggcgacggtggcagcggcgtggctgctcctgtgggctgcggcctgcgcgcagcaggagcaggacttctacgacttcaaggcggtcaacatccggggcaaactggtgtcgctggagaagtaccgcggatcggtgagtgcgcggggtctggcggcgccgctgggcccggcctcgccctggcggggcctgctggggacgccccgcagcccggtcccccgcgcggtgtggctccgaggacgctccagccgcgcggccgccaaaccccggcccccgccccgctcggccgtgacctctggcgcggcgcccccatcccgcgcccggcccggcccggcccgcggctacgtggcacggccttggcgcggaggaacccgaagcgctcgcagtcggcgcccacttcgctaccggcacctttgggcagcggggtccagaccttcgccgggaggccgggcaccactgcccagcctttgccattcacgggtgaaaaaagtaaccgtagcatcgtgcggcctttccctctc

SEQ ID NO: 330831 - DNA, 599 bp, Homo sapiens
  chr1:53098674-53099273
  hyper
cgaatgccccgagactcccggcgccggctcggtgcaggtaaggcgcccgcgccctggcctcgaattcccgccccgccactctggccgcgtcgtgctgtcgttgcgcacccagcgccctcgtgcaggcagggggagcgcagtggggagggggcaggaagcgcaggcagagccaggcgagcacgcggctcccggcccagctccccgcgtccgctccggctcctgccgcgttccagcagccgtcactcccgccgccggcccccgccgcccgccccgcctgcccctacccctccgcgcgggccgggcacctggccgccgctcggtcctcggggccccgcgctgctgtctctgtctcggcttctctcggcccctgggtctcttcgtctctgccgttctcaggctcagctccgtctcgctcggtccctcgcttccccgccgggctctagccggccgtctggtggcccgaggtggcggcgggctgggcgcggggcgcgatgagcggcgcctgcacgagctacgtgagcgcagagcaggaggtggtgcgcggcttcagctgcccgcggccggggggcgaggcggccgctgtcttctgctgcggcttc

SEQ ID NO: 330832 - DNA, 490 bp, Homo sapiens
  chr1:53168691-53169181
  hyper
cgttggtaaaggagccgccccgtgagagagaccggaccaatcacgtttgctgtgaggtcactttggaggcctgagattggtgctcgtgtctaaacggacccgatctttctgagtggctggtgcagctgagggaggttccaggtggcttgctcgggggctgcccagctcgccgtcctctgcagatcccctcgggactctcagcattttgtgggttagccgtggagacgccctgcccttcctgctttggccagtcaaccccctcaagcccgtgcccgtagagcctgcagcccttcctcacctcatcactccccatccccccaagatatagaaaggccgtgacagctgccagccctgcacatgctcttgtttcaacagcggcgattgcacatcacgtagtccccacgtgacctgtcgggcctagggcaagcgcaaagctttcggaaacccgaattattgcaaccttgacttcctgcctgtctctgaggctccc

SEQ ID NO: 330833 - DNA, 895 bp, Homo sapiens
  chr1:53308366-53309261
  hyper
cgggccggcccccgcgtgcgcgtcgcctcgccgggcatttcaaaagctcgccggcagggcgcggcgctagctccgtgtgcctcgcaggcgtggtgggcgcgtcctggcagccgcccgcttggttctcgcgggatccgggctccggctcgacgccggctctctttttgacgccccgccgccggggttgccatggttcatttcttgcacccgggccacacgccccggaacatcgtccctcctgacgctcagaaggatgccctgggctgctgcgtggtacaggtgagcaccggggtgcgggcggcgacgcggacctcggcgccacgtccagctccggcgagcgcggcgagtctcctgggacgctgccgaggcacttgctggggagtgtggcccgcgcggggctgcggtctagatgccgagccccttccaggcgcaggcgtcgctgcggaggtgcgttgtcgggggaggcggcctgggcgccgcggagcggggggtgcttttctgcgcccggcgaagcgcgtggaacttgcgccctgaggcagcgcggcgagagcccagtcccagagaccggggcgagcctcctcaggattcctcgccccagtgcgggctgctgtgagcttagacgtaggtgcagggcatggcactcggcttggcccgtagtggacggtgtttttgcagtcatgaacccaaacgccgcaaaccttgaccgtttccccacccgtgttgtggacgcagcgccccgcggaggcggtgaccctttggccgttaccacctgaggcctttgggcccggggccgggcgagtagcttagtccggctgggggaactggaacccgaagtctgagattctttcagttccgcgcgtccgcccccgtccccgtcccgtccccagcctttgcc

SEQ ID NO: 330834 - DNA, 291 bp, Homo sapiens
  chr1:53387231-53387522
  hyper
cggacccgccagggcgcgcacttggatctctgagcccccggccgccccgtcggaagcgcagccgcgggcccgaaggggcctccaggggcgcaggaggcacagaacgcgcagcatcggggcgcaggctgggagtgaaggtgcttctccggccctgcaccgtctcggctcccgctgagagctcgcagttccggcgtcgggcgaagccttcgccaattgctccacctatgggccaagcgtctgttgcctccttccgcacctcccggggacagggagacttgagcggaggaggtc

SEQ ID NO: 330835 - DNA, 923 bp, Homo sapiens
  chr1:54203443-54204366
  hyper
ggagccgccaggcacgttggcagggccgaactcacccttcccggcggcggcggccttggatggaccgtagtctcggggactgcggggccggaggaggtcgtgggcgcgcggtggcggcgcaggcggccgggctagcaggtcccgcgggcccctgtccccgcagccgccgccactcacggtgaccctgaaggccatgtgcgcgccgaggctggcggggccgcggtcggggccgggcgcaccaggggcctccttaggcctcttgtccgagtgtgcctcagccacctcgcaatgcatggcgccggggcggggcgcacggctgggggtcgcgccgggctcctggggaggggagacagcacagccagttagaatgcggaaagcggcccccgtattgtcccggggccgagtttgagcaggtcactgccccttcggtggattgcgcgtctttaacataggttagcaccacgacacctagcccaatcagaggtcaaacccacctgattccacgcaaaagccccctcgctcaggagcggttcgcccttccctggtgtggggaggaccccaggcccccgcgccgcggcgcattaccgcgaagtcccacccaaatcctcctccaccgaaaccagcctcctttgcacgaatggtgaaactgaggcctggagcgggtaaggcgcctgttccgcgtcccccagtggaacacggagccggcggcaacgaggattcccagagcagggctcgggcgaagccccggagacggctccgggtaggtcacgggctgcgcgcttcgtcgactctccggggccgagctgcgcgcagaagctggggacccgaacccaaaggcccgagggaaacccccagagactcacccgcgaccacccgaacctggaaaacaggagtcccaagctgggcgctgaatcctgcgacgc

SEQ ID NO: 330836 - DNA, 933 bp, Homo sapiens
  chr1:54204376-54205309
  hyper
cgcgcagccgggacacccacattcctatgcgcagcggaggaatcgagcccgtcgcgcgcgcaaaccggcacagtgggcaatgcccacgcggccgccgccacacacccgcacacccgccgaggcacgcccggggacggacacgccacccacactgccgctggtcagacgctcagcagcgcacaaccacacagtcccacgctctcgccacacgcgcgtgcgatgggggccgcgacagagcctccctcagcccttccatcaggggcccccaaactctccgttcccctccgcgctccctgcgccatccccaagctgccggggttcgagcgtcgccgggacgccagcctcggatctcgggccccgcacacgcccctccctcggccgcgggccgcgccccctctcacctcgcagcggcagctgcagatcgctgggcgcccggctcggcgcgcctccactggcgcagcagcccccgcagccgccgcagccgccgccgccgccgccgcgtcctgcggggcggttccccgggggacgggggcgggcccgcgtctgcccaacagccgctccagccactggctggccgcggccgcccggctcaggccaatcgcggcgcgagggcggggcatccccccctgggggtctgggcggggcccgacgcggggctgagcagagggtttgacaggcggcggccggctggatccccgcgctgcccgctgttctcagacggccgagccgggcaggacggcggggcggcgccgcggcgagagaggctgggctcgggggtcggcggagtgcgctgggcgtgaggagtgccgggctgaacccggctccctgcccgcctctccactagccccgggcaggatcctcccttctcccggtcggttttcccctccgtcagatgggaacgacgctgtctgctaacgcgaagcggacagatgc

SEQ ID NO: 330837 - DNA, 207 bp, Homo sapiens
  chr1:55352463-55352670
  hyper
cgcccccgcaccgcagctcccgtcgccacctcgcgtcccgctatccccgcgcacgccgcctccggccctgagtcccggccgcacccggcgccgctcacctgcttctggatgtcccgcacgcgctgctcgtgcaggcgcggagcgctgctgagcttgaacaccacccaggcgcgcacgtagtagtagatatcgaagataagcgagagc

SEQ ID NO: 330838 - DNA, 476 bp, Homo sapiens; identical to SEQ ID NO: 227140
  chr1:55505133-55505609
  hyper

SEQ ID NO: 330839 - DNA, 983 bp, Homo sapiens
  chr1:57110528-57111511
  hyper
cgctcccgacatgcgaggcccgtctcttcttccagtttgacttccaagtctttccattccctaggatcgggccccagtctcaccccctattttcacccccttcggttttcctcagaaagggcctcctgcctccctcggcaccctcgcctacccccctcgcagcacctgtcgcctccgcccctcactcggaccccgcgcatctggcgcagcccctcccgcactcccgcccagcgccccgcgtccccggcccccgctgtcgctgcttcgggttccgccgcaggagcctctcactcccgggagcgggcgcctcgcgctccctccctcggccccgccccgcccgccgctcgcccgttgcttcccacctgggcccgaagcgcccagcgccctctcccgggaccccgcgcccgccccgcgcccctcgcggctcggggtccgccccctcgcccgcagggcccgctgcactgtgggtaggcggcggcggcggcggctacgcggagcggcaggcggtggagcgaggccgcgcgcgccgaagatggctgagaagcagaagcacgacgggcgggtgaagatcggacactacgtgctgggcgacacgctgggcgtcggcaccttcggcaaagtgaagagttgagtacgcgctccggaccgctgtgcggggctgcctgacttgcgggaggccgaggggagaggcgggagccccgggcctccggcgggcgcggggctcggcggcaggtggagcggtcccgggtcgcgcggagctggggccccgggagggtggcgcgcaccgcctcgcctggcaccggcgcccgggccccacagggtccagggaagagggcgggggtgtgagctgaggatgggcgtcctgggttccaggttccgcgcccatctgcctttctggaggtcggagcaaggcacttctgtgttctctggacctcagtgtcctcctctgcaaaatcgggagaactggactcgttctgcgaggc

SEQ ID NO: 330840 - DNA, 711 bp, Homo sapiens
  chr1:58715252-58715963
  hyper
cagaaaagaaatgaagagaacgcggactgagcgaggaaatgctcaagaccacaggactgaaccccccggaagtctcgacgctgcccagccagccagagtccagtcgtcgacgcggatgaagttgtttccccgggacaggaagggttaaatggctgcgcgtcaactcggcctcgactggggtgtcagggagcaagagccgcttgtctcgggggattccgcttggggggttcccaggggtcgccctggcgctccggccacaacttgggcggctctgtgcggcggccctcgcctgcgcctttgcgcgccacccaaaactttgcgcacactgcagccgccgccttcccgctcttcgcggtgagacgcgcgccgccaagtgccgcaggcagccctccacagccgccgcggcagccgctgcctggcttctggctccagacttttcccccactgcctccagttcccacccaggaggctccctcgcggccgcgagagctcggcgcccgacccacagtaggcagtgcgggcacagtgttgcagaccaccacctcgccaggtccgggcagcgcccactagacggacaggcgcccgcggccgcccctaccccggcgcgcccacctcgagcctctcacgccgcggcgggcgggcgcaacatattctcctacctccagccgccgaggaccacactctccgctcagccctctcgactcatcctcc

SEQ ID NO: 330841 - DNA, 1062 bp, Homo sapiens
  chr1:59041929-59042991
  hyper
cggttggtgatcaccaggacggccatgccggcgacgagggccaccacgaccaccacgatgacggcgatgaggccggcggtgaggcgcttcatggagaacttcgggggaatctcgtccaggtaatagatgagcgtgcgctccacctgcaggggttctccgcgcacgcgcaagtccaggccgccgcggccctggaatagagactcgcccttgatgtccctctcgaagtagtaggcggcatcgccgatatccacgtcaccggcggccttctgagacgtgttctgccgcagctcgatctggatggtgggctgctcgtagtgcacggccgccacgaacttggggtgcagccgatagcgctcgcggaagagccgcctcagctcggcgtccaggtctgagtggttgaaggcgccggcggtggggcggtggcgcaggtcaatgaggatgtggtgggtgcgcaccagctcatcgcagcgtaggctcaggtcgcccttgtccgtgcggcgcacgcccaccgagttcacgcaccagcacaccgacgtctggttgcactggcgcgccttgaagcggccctcggggtcgcagtcggggtcgtagaggccatcgttgtccacgagcgcgtgctcactcggccgcaccagcgtgcgggcgttcttgggggcgctcatgcgcgccttgagcagcagacacttggaggtcagcgtggagcagtcgaccgccatgcccgagcccagcgcgcggcactggcagcggccgccggggccgtcggggctgcacacggtcatcttgttggtgggacacgtgcagttgtcctgcgcggccgtgtggccggtcaccgccgccagcaccagcagcagcagcggcagccgcagcggtggcggcgcgaggccggggccccgagccatggtggggcggaggaacgcggaccggacgcgggcggatgaggcgcggggactcgtcggggctcgggctccggcgtctgggatggtctgcaggcgtctgccgcccggccgctccctccggctcttatactctacccgacctgcccggctggttccaccaccgacc

SEQ ID NO: 330842 - DNA, 433 bp, Homo sapiens
  chr1:59281487-59281920
  hyper
cgtcaccgagattgtaaaacttctaaccgggaagaatcaaatacatgcacaacgggttacaggttaacagacagatgggagcggaaagggacattccagcgcttccctgggcgtgtcgcacagggcaactccaaccacaggcgaattttcctgggtgacagttaaactcctttttgcatgaaaaaatacagattcttattaaaacaataatcgattagactataaaactctcaaagttatttcggatcaaaattattttcggctgtttccacacctttttttctcgattgtgcagaaattcttcacaccgtctgcacagatgggcaaactgagacccggacgagtcccattgagagagagaggcagagccggggttgggagaagactgagatttctgggatccggcttggggtgtttccgctgggtgggggcg

SEQ ID NO: 330843 - DNA, 505 bp, Homo sapiens
  chr1:59612306-59612811
  hyper
ggagaaacttcagagcggcaggtgccttcgtttcccgttacctgctgagtctagtcccttccagggcacacagtgggcgcttagtaactgtagaaagaagtcgaacgaaatcggaagggggagaggcagaggccacaatcaagacacggaaacgacagtcagtcgaggcagcagagagggtttcacgcgggccagcggaggcgcagggcagttgagaagggaacttgccacggggcggaggggccgcgctccccaccagcgcggcgcgggggcgctaggccagggaccgccgggccagggaccgccggctgcgagcagcgggaacggacctgccccgggtcgcagcggtttttcccgggcggggctgaggctgcagggaggcgggcgttccggcggagggtcacggcctcgccgccgggactttcctggggtggaggtgtgagcacgtaggagccctggcctttccaacttcccaggtcagactggggctgggaccaccctgcgc

SEQ ID NO: 330844 - DNA, 263 bp, Homo sapiens
  chr1:60539352-60539615
  hyper
ggggcttaccgctagggcagcgtccccaccctggcagctcagaggtgcgcggtccgtgcttctccccaggaagctgacactctcagacccggggacgggacggggcgtggggaccgagcccaggaatccggccaatcacagggcccgcatcgcgggcggcgcctgttccgccctggtcgctaaggacgctgaaggctgtttctgggcggggaccaggtttttctccactgcctaggcaatggacccaggctctggctgccaac

SEQ ID NO: 330845 - DNA, 618 bp, Homo sapiens
  chr1:61519352-61519970
  hyper
cgaattaatgtggagaacgaggccgtccgggctaggttcccggggctcaaagacgcaaagggaaggcgacaaaggtttctcacaggtcgccgttagggagagggggcagcgcaggaaacccgtttatttaaagttcagttgtgttgggcatctgatccaggacaactcgcccaggagcccggcgggtttcagctgccaccacgaaagtaaggatcggttctgccgcgtcgccccctccttccccttgggatgtgccaggcgggcgacagataagggggcgcggcgcggggtcagccaccgagccagagggcggcgcccggttgcagcgctccacagccgcctcctgcagcctcgcggtcgtgaccttgccgagcagctcctgcgcctcaggctcggtccctgcacccgccctcactccagtccctctcagggcctgcagtggaagatccccgtggtccgggtgggtggcgatggagagcagaattgaatttatttgctctcaaattcccctaaaagctctgaaactgggaaagtccgcgggctgccagggacagtaatcactgtgtccccacccggacgcaggaggtctcgggaggagctccgaggccaagcgcccgc

SEQ ID NO: 330846 - DNA, 819 bp, Homo sapiens
  chr1:62207675-62208494
  hyper
cgttttagaatattttattttgcgtcagcgaatagagaaaacaaaggagggatgagagaacaggaaaggaaaggggcaaaaagacaaagtgttaagcggattgacccaacgctttcatcgatatcctcctcaatttccttgatcttgggtctcgctctacacgcaggcctccaaccacaccggtctgtccggatctccctccccgtcagtggcggctgtccccaccacgcgcggtctgatccgccaccccgcccccacagcccacttttcccaggcccttggccatcccgcgcccggtaggaattcacctgcacgtaaacagccagggcaaccgtcctccctccttggagcccgcctcccgcggccccgggctccctcccccgccccctgcgccaccccggtgccccgccccgggcggggagagtcggggcgaggggagggcctgccaggtgaggcgcggtcaccctgggcctctcacttccgcccaggtgaggcagggccgacaccgagcccgcccgacccgggctcccacctgctcctccagcgcaccaggtaaagcgtgaggtcccggctgtgcagtgcgcgctcgcccctgggtgtccccgcgcctggaggccggccgggggcagctccctcggggcttcccgggcctgcctgccctgcccccgcgctctccccgcccgcccgcctggagtgggtgggagccggaggtggagggcgccgccgggcgctcagaggggccgcggcgaggatggggcgcccgcggcgtgcgtccgcgctgacccgggaggcggggcgggggcgccgtcctcctgcgtc

SEQ ID NO: 330847 - DNA, 765 bp, Homo sapiens
  chr1:62784150-62784915
  hyper
cgccctcggcggcgtctagagcactcggagctgccccattgcctccgcccaaggtcgcggcccaaagggagccctggaaagttcagccaggggccgaggagtgccagggttggcactacggggagacttttgcgacaggagagagactaagagctcgattccaggtagcagtgggagcccgcggcaaagaacgcccagtcccgcaggctgcatcccagaccgcagcgcctagctcggaaaagctgggcgggggctgcaccacctgagtcgcaaggacagcacggcctccccctcctcaccagtgttctccacccccagaattggggcgcggagagccaatctgggctggaaagggagcggcgcccacctttgggcagcccgagcagccccgctccttttctgtcgcagaccccaggctgggaggcgggggcgccaggtcggcccaagctgccgcagccactgctttaaagggagccggggacgcggcgctggggactgggcgaggcgggtggcagaggcaagaggagagtggtcgagcgccggggccaacactcgggtcgcgcagggcgggtgttgaacaccccagcagacgcactgcgggggactggggtcgcagagtcccttaccttggcgagctgcggaagtcctgcgcgaggcggcccgcggtgcacggggccggggcagctaggcgcacaccccggcttcggagcgcacgcaacctccgggtgcactgtccgcgtcccaggcgcgcaccccggggctggc

SEQ ID NO: 330848 - DNA, 524 bp, Homo sapiens
  chr1:63539443-63539967
  hyper
cgcggaagagtgggggagggggtagatttgaggtgtgcaattcttaccacatctggggaaaaaaacaaaaacaaagccaagcgaagtgggcctgccagagttaactatgttcacagagtgcaattaagtgtttggaaggttctgtgccgtgtgctctgatttacggccgcgttcctgggacgcccctttagccgggcgaacgtggagggggccaggcccggccgtgcgcaccctgggagcggagccgggccgctggcgctccgggtcttgggcttggcaccgcggcgcaccgggtggcaagcacagcgcttagcggaggccacacctgcacctcatttgcttctgagcagtgccatgacccgcctgctgatggggcgccttccctttcatcctcgggattatgacaagttattaattgccaccattagccgcagcagcctgcccgagatctctgctgctctctggaggtgagaaaccgcgcatctgaatgccgagggaagaggcgctgagcagccagggcaaac

SEQ ID NO: 330849 - DNA, 1217 bp, Homo sapiens
  chr1:63785164-63786381
  hyper
ctctgtatctgtctcgcttcttccgtctctgtcctacagcttggcggtaactgacgacctgtgagcttttagctgcaaactgcaactacgcggcaaacaatttatttagcccgacatctagccggtctccggcaggaccctgcaccgcgtcgggatcggacccttccgctggggcggcctcctgcgtcaaggccagcaggaaccttcctgtcgccctccccggccgccgcttcgcctccttcccgcccccggaggttgtgcaggcgctatggtccgcctggagggagaaagccggcggccggttcctgagccgagagcggccgcggaaaaatcctctgcctccgctggaaatcgatattaggccggcgcgggcgcgggacgtcggggccgcagccagtaggttgtgcacgtctcatcatttagctaatcgagtcgaaaagtttctgtaagggccggacccagcatcagatggtaacactgattgaacaagagattagcacaatagatctctaaccgaggggaagcgttgcttttcacgctacgcgccgtaattaatggtatgaatcaattaatttgacttttattgtgtcgaaggaaaaaagcgcaacaaatggaaccggcagctgggagttgttcgtcctccacccccttccccagggaggttccaaggagacaccggggaatggacggatcaggctgggccgtggcagagggagggtaggaggcagcgaccagcagcgtggagggagtccagagagctagcctctgcggacggcggaatcgaaattaggctcatttggagactacttcgagaccggtgaggggagccctgtagccaccatcctccggcgcgcatccacacatactagtccacgcgggcccagccaccaaggccgcggcagggccagcgctgcgccccgggcccctgcctttagggctgggcaacccaagcagagcaaaggaggttcctgaatgtgtaaatttccgctttttagctttttttttttttttttttggaccttccgacacttcggttgctgaggcagttgcagacgcgacctctgcagtcctgggcgatggccagccagctcagctcgggtcggtttcgcggaaagctgtctagacggcattgtaaacggttcggagcctgcgggccacaaagctgtggagctacggaaatcaactctgagatgcgttttagggccgtgtgcaacctc

SEQ ID NO: 330850 - DNA, 914 bp, Homo sapiens; identical to SEQ ID NO: 227167
  chr1:63786771-63787685
  hyper

SEQ ID NO: 330851 - DNA, 1668 bp, Homo sapiens
  chr1:63787903-63789571
  hyper
agggcagcgacagtcgcacagtcccgcggacgctcccaggcccacgccctgactcgctcacacccacccacactcacacccacccgctccctgggccccagggcccggatccagcctgggtgggggggtctccgggcgggccgcagcgccctccgtgccccggggatgctggcgcacagtgcggagcggagttgcgcgtctctcgtccctttgttgacaattccctgaaccaacttgagtttggccggctcggccgcggccctgacgtcacgcacggtcacgtggccccgcctcccgctggatctttaagtagaaagtaatctatcaggccagtccttaaaacgggactttcgactaccggggcttcggcgtccctgacacccagccccctgcccccccgctactgtccctgcccgcgccctcccgagctgctcggcgcccggcgtcccgcgcccgcctggaccgctcctgcgccccacgccagggccagaggccgaggaaggcgggctaagtgagggggcgcggcgtggagaaccgccggggccgggagcggtagcgagcgcctagtaccgagcgccagggacggcaggagttcgcggagcgcggccgctgggggcggacggcagagcccgcgccacgcgatgcggggccgccgagtgtgagctgagcccagcgggccccaagccacctgcggccccctcccctctccctgccccccatctttcgggggcactcaaaccctcttcccctgagctccgtggcagcccccgaacaccctcatcgcccgctgccccctccccgccgccgctaccaaccccgaggagggatgaccctctccggcggcggcagcgccagcgacatgtccggccagacggtgctgacggccgaggacgtggacatcgatgtggtgggcgagggcgacgacgggctggaagagaaggacagcgacgcaggttgcgatagccccgcggggccgccggagctgcgcctggacgaggcggacgaggtgcccccggcggcaccccatcacggacagcctcagccgccccaccagcagcccctgacattgcccaaggaggcggccggagccggggccggaccggggggcgacgtgggcgcgccggaggcggacggctgcaagggcggtgttggcggcgaggagggcggcgcgagcggcggcgggcctggcgcgggcagcggttcggcgggaggcctggccccgagcaagcccaagaacagcctagtgaagccgccttactcgtacatcgcgctcatcaccatggccatcctgcagagcccgcagaagaagctgaccctgagcggcatctgcgagttcatcagcaaccgcttcccctactacagggagaagttccccgcctggcagaacagcatccgccacaacctctcactcaacgactgcttcgtcaagatcccccgcgagccgggcaacccgggcaagggcaactactggaccctggacccgcagtccgaggacatgttcgacaacggcagcttcctgcggcgccggaaacgcttcaagcgccaccagcaggagcacctgcgcgagcagacggcgctcatgatgcagagcttcggcgcttacagcctggcggcggcggccggcgccgcgggaccctacggccgcccctacggcctgcaccctgcggc

SEQ ID NO: 330852 - DNA, 403 bp, Homo sapiens
  chr1:63791878-63792281
  hyper
ctcggccctgcgcgcgtccttttggttaatcccggccagtccccggtgttgtcgtccactttgcctccctggtggtggagatgcctccccgtctcggatcccacctcatttctccgctgtcgacgtgggctgggggtcgctttgaaagacacttccttgcaaatacccaatctgttttcctggtaaacggtaaacattattgtgtcttgagtaaacattccttcgggatcagggtcctaaaataaaacaagctgccgggggtgagatagtttaacttgataaacaagaacctgataaccaccgccgagagaggagcaatggtaaccttcaccgagaggagattatggaccacacggtctccgggcgggtcccttctaatctccttttacaaggaaaactaaac

SEQ ID NO: 330853 - DNA, 1067 bp, Homo sapiens
  chr1:63792564-63793631
  hyper
cgctcatatttccgcgcatagcagcaataccggccgagcctgcgccagcagcgtgacactcagccacaagccaccgccggagactcgcagggctttttccagcgctacattcattaggcggcggggtgaacgggagagacctgccggcaactttccttccagccagttcttacccttgaacgacggcctaaagatggtccccttcctttatgtcgtggaaggcaggaaactctcggacccagaccctcaagctgccagcggttgtttaaagtcctggcagatgtcaggaagatgggcccggccgtcgcaccctcaaaagctctttttcgtttaagctttttaaacctcgaagatttagcacaaaatgggaaatgcaaatatcatagacaatgatcgcaagcacttagtggtggggctgggggaagcctgaaacccttgtttgatgttatggaacgcaggcacctgcgacaaacggcactggaaacagctctctcgttgagatttaaagtcaacactactgatatccactttttattccacttaagaaaaaaaaactaaaggaaggggggcagatttatttgcaataaaagaagaaagcgggttgatttttatggggaagattttagctttcggctacacacgcatttagacgtttctactttctctagcactcattcctagaaaaatcaatccagccctgaggcctgtggcccctagagcgttctcaggaccaaggtctgagttgggaccgcccgtatctagttcctcggaggggtggatctggatgtccggggaaaggcgaatgaagagtagagcaaaacatgtgccggctgttgagggctgtcgatgcgatggcagatgtggcctgtagggggcgacgagcagacggaaaacttcgcggtttgtctggaatggtccagccccagccccggacgcctctccttccctcccaggctctgagcctcctgacatccttgcttattctcaggccccggaagcctaggtcgaatctcgagaagctgatttcctcctttcccccgcctgtgtcctgggaggaacagagtccc

SEQ ID NO: 330854 - DNA, 914 bp, Homo sapiens
  chr1:63795363-63796277
  hyper
cgcgccgggccggtggaactcagctccgggaaggctgtggacctggaccctggggctccccgctgcctgggcgcctctagcccggcgatgagtggttctgcggggaccgacggccccatttccttcttgcctcgtgatgtgggagggaagaaagaaggcggcaactgcaggcccgaagctcccctcgcccagcggcccaaccacagtgctgtcgtgtcggggatcggtccccaagggagcccccaaccccctgcccacgccgagatcacccccgtgccaacctcgagggctcggcctgcgggactccagctgcccctgcctggagggagggaagggagaagagaatacgaattaattacgaaggaaacccaggtgtgaaaggcacccgccgcggagctgggcgtgcagcggggcgcgcggtgggacctctgctcccgtccccgtcccgcggctactcagttgcccgctcatgggaggctcgcgacggaaaataaatcccctcagagtgaacctgggaggccgagaggacccagcctgggatctctgggggaaataggggcaagtttaccacggtttaattaagccacagccctagcacgaggaccccggcgacccatccgggctgggggatggactggagtgccccccaccccaggccgcgaaccggcagcgagaagcacactctccgccatccccggccccgccgcttccgcctctgcggactccgcgtttgccatgctccttcccggggtccagggaccggagctgcggtgcacgtcttattgaaggggagagctttggttcttttcctccctgcatccctcccactttcctctcaacagatagtaagcaagactcaattttctccaaaaaagcccgttacccctttctgcaaggggcgcatgcctaggttc

SEQ ID NO: 330855 - DNA, 293 bp, Homo sapiens
  chr1:65431047-65431340
  hyper
cggggtccccttccccaggaacacacaggaaatcatggagtgcaaaccctccaaaaaacgtgtgcacaaacacctggcaaacatcgcatcttttatctagaagttccgtggtaaacacacatccaaggagcccacatcccagggaccctggggagtgactttggaggagtgtctattagtcctccgatgctcccggtcgccgacgatgcgcggatggagttggagtgagggagccagagaccagccccagtttcggttaatcagtccctttccagtgggattcgcaattcccc

SEQ ID NO: 330856 - DNA, 734 bp, Homo sapiens
  chr1:65468262-65468996
  hyper
cgctcagtaacgcagcgctgaggagtaggccaccccggagggctccaggtttcagcgcaggcttccgcggagccagctggatgcgtcaccatccgaaagtgcgagcctggccggcggcggcggaggcgggggcaccgcgcagttggaagcccgggcgctcttaccgaaagcgcgagcccggacttccccgccacgatcgatgtggccagtctgcgcctgccgcagttcccgctcgcaccccggcccctcgcagagtcccaggaaagcgctgtggcgggcgggcagtctctgcccccgggaggggacgcacgcacgcgctgctccttccaggtcccggcggggaagcgatgctttcttggcccgggcttggggccagcgggaaccgggctgtccggccgcgccgtcgcgcctcgcacggcgtgagacaacctagctttttttttttttttttttttaagaaaagcattggcaccgcagcagcctcccccgcttcttccctactaggacgcccgcctgactcgccccattgcacaattcttaccgtggaacagccgcgtgactcggcgggagcccaaaagtttcccaggtttcctcagcctagaaaagcgtgggtgggtgtcccggcctggctccaggcgccctttaagttgtatttcttcgggtaactgggttgccctttaaaatgtggagattgtcctttagaaagaaagaaaatctcacgagctcgctggccc

SEQ ID NO: 330857 - DNA, 871 bp, Homo sapiens
  chr1:65774901-65775772
  hyper
accctcccaacccacgtcgtagtagtcccctcccccgaccaccccgccccgtttcccttcaacccccctcctcacgaacctcccctcccttcctacctccctttccttccctccccgcgggccagcggctttggcgctgccctgctgcgcggcggggcgacgcggcgacacctataggattgcttccgggcactcctcagccaggaggtgctggcctggggcccggagctcggcagggccgggcggctccgcggcgttggcccagaggacgcgcgcccccgcccggccgcgtctccttccctccctccctcctcccggcgccccgagccgagctcagcccagggcggcggcttcgcctcgcccggcgaagcttctctccggtggccgctccttcttttccctcctctttgcgtcatgtcgggcacttaatttttttttttttttaattccttcttcagccctttccaccttccatctcccttttcgcttcccaggttgattattttctcttttctccgggcttgcccatgagcctcctcgggagctaccggaaaaagaccagcaacgatggttatgaatctttgcagctggtggacagtaacggggacttaagtgcgggaagcggcggggttggcggcaagcagagagtgaacgccggggcagcggcgcggagtcccgcccgacagcctccggaccgcgccagcaccatggacagctcaggtagcgctgcccgaggggagtgcagcgctgagccccgcgcggcctccggagcctcccagtcgcccggcccgaggcccccccgtggtcccccagccccggtttgcgagagagccgggctggaggcgaaggcttctaataccacctgggtgtc

SEQ ID NO: 330858 - DNA, 892 bp, Homo sapiens
  chr1:66998817-66999709
  hyper
aagctccccacctggggaagcgaggccgctcccgtgtgcgctcggcggggaggacgcggtggcggcgggactcgaactcggtcgtcgaagggcgccccgcagggtcccgtctgtagcccggacggcgagcccaggttggagtgggagggagccggcgtgcacagctgtctttggtcgggctcaggcttccgctccctgcctgctcccctttccagcctcccgccccagaaacgatctcgagcgttgccagtttgattccagagccccactcgggtgggttcttttgtttctttgttttaatgacagttcccagcccttcagcatgtcatgcgcaattaattccctggctctcacgaaggcagctggggtgaaatttcttctgcatcatccttttggggatgtttatgatgtgacgtcagtcggattgatttttctctcttgaatgaaggatgggaggggagaaagagagacggagagagagagagacgcacagatgtgcacggaggccacagacactgacatttggaattccttcagggtaaaaggacaccggaatgggagcttagaagtgtgttgctaagatttccggctgcacggaattattaagtttttcttaaaaaaacaaaaaaagaaagaaagaaagaaaaagaaaagaaccccctccgcagcgagccacttaggtgctgctttcacgccagagtcccctgttaaggtggcagcccttgataactaatctcgggcacccagccgcttctgtaagcttaaggagacgacgaggaggggcgggggaagtgcgtcaccaggtggggaaggggctgtgtatttggtgacaagcgggaggcgatgggggtggaggggaatggggacgggaaataggttctgtgtgctctcc

SEQ ID NO: 330859 - DNA, 264 bp, Homo sapiens
  chr1:67218065-67218329
  hyper
agagggccactcagcggccaagtccggccggggagggccgagggctctgtttgaggtcaccctggagaccggcctcagagtccagggagagtgcgcgggcggccgccggctgaatgaagcctgggacgcgggagccgcgccgcgcgcagtgtctgcagtgccggaggtctgggaggctccgggcgaagcctccctgctgcaggtagggtcgcctctctctgcagcgcgtctggaccccaaaggaaggatagggggcaagggatc

SEQ ID NO: 330860 - DNA, 718 bp, Homo sapiens
  chr1:67773109-67773827
  hyper
cgtctctatggctgtgaacgctgagcacacgattttatcgcgcctatcatatcttggtgcataaacgcacctcacctcggtcaacccttgctccgtcttatgagacaggctttattatccgcattttatatgaggggaaactgacggtggagagagaattatcttgctcaaggcgacacagcagagcccacaggtggcagaatcccacccgagcccgcttcgacccgcggggtggaaaccacgggcgcccgcccggctgcgcttccagagctgaactgagaagcgagtcctctccgccctgcggccaccgcccagccccgacccccgccccggcccgatcctcactcgccgccagctccccgcgcccaccccggagttggtggcgcagaggcgggaggcggaggcgggagggcgggcgctggcaccgggaacgcccgagcgccggcagagagcgcggagagcgcgacacgtgcggcccagagcaccggggccacccggtccccgcaggcccgggaccgcgcccgctggcaggcgacacgtggtgagtgaccagtgactcggggtcggggacagagagagccccaggatcccggaccagcggggtgtctgcgtgcccgggattccgtgtctcgcgtctcccgagggggcttcggcgacggcttctctctttatatatatatatgtatatatatatttttaaagtcttccaatacgatcc

SEQ ID NO: 330861 - DNA, 857 bp, Homo sapiens
  chr1:68298456-68299313
  hyper
cgcccagcggattccaaggctgcgctcccgccggctggtcccgggaggtagaaagtaggcagaggggcgtggcgtccctgtcgcccccacatgccagccctcctccaacgcctgacaccaccacaagccacggctgggaacactgggggcctcccaacccggcgcggggcgcacggccgcaggctggcgaggaggcaagcgagctcaaggggagacctttccttccacccccagccctagccccagccacagccgtgggggcggcttcccgcaacctcgggcggccgcccgtcgagggcgcgcgcgccgtttctgcctctgggtctcggtgtcccttggccccttcctccccctccccccggtctccggcgcccagcgcccagaccagtccccgccctccagcaggacactcttccctccttccttccttcctccgctccctccctccatctcgcttcccagcacccgggactcggaggcggcccccgaactcgctggccgacgccccgcgccgcgccccgaccccgcggggacccgactcaccacccgcgcccgccgcttggtactcacccgcctgccggtgcgctgccccgccgtcgccgccgggactcggtctctaagggctcctggagacggctccgacctctcctcctcctcctcctcttgctcctccgggcgccggctccgcctcgctggggtgggcggggcggcggcggccccgggctccttcctccgcgccgggccctgcctcccgcccggacgccctggctgtgctgtcccgggccggggagcccgcgttgtggccccgcaggaggaggggcgaggcctggcctgtggaagctcggtggacgtctggt

SEQ ID NO: 330862 - DNA, 952 bp, Homo sapiens
  chr1:70032839-70033791
  hyper
cgcaaccccagaatgaggagaggacttaagagcaggcacaaggttcgctgccatgactgatgtgaagcgacctgacgcacaagcggagacttttctccttggcagccaacaacctgcagcaggcaaggcgggcgggggaggaaaccccgaggaggcgctcccggccgcctctttgctgagatagcaggagcagcagcctgaggagccacgagctcagcgtcactgagctagtgcgggtgcaggggcgctcaggcaggcgcacaggccgggagccgcttctgccgctcaggcggccgcgctgcagaaagccgcgccgcgctgcccgagcgcccggggctggcccgcgagcgggaggagccggcagccgcgctccgccccgcgctgagattcgtgccacctgcctcgaacaccacggaggcgagaggaacccagagagctcggcctctcgtcccgttctcgaaaagcagcctatcgtgacggagccgggagaaggctagcgtttcaatcctgtgcaggactgggatttttcttctcataatttgggggagccggagtagaggtcagagggacaggcgaggatctcaaaaagagaccgagggttgtgaacatggttaccccctcctatcattggaaaatctccttgacatttttcacactttgaagcagctgcagctggtgtcgtcggaaaagggggtgggaaaaaagagagggggcggggagagcggtgagacacagccaagagccatgagcggcgcctcctcgcctgccaatcctggcacctgtgcgccgagccactgcaccgaggaggaccctactccgggtgaacaccgggcttgaagccacggacacccagccccagtgcagcgggttctcgccggcgggacctgcagccgcccactcgggccaccgccaccgcctcctgcagttgcggagcgctcagcccctccgagac

SEQ ID NO: 330863 - DNA, 585 bp, Homo sapiens
  chr1:70035044-70035629
  hyper
cgagaagctggtgaacctgcctattcccaatccagcgctgggtccccttgaggatcttgcgtcctcctctccgagttattaaggatgcaggacgtgtttcggattcgacgtggaaagagggagggaagcacattagcattaaggtaatcatggcaccctggctcgtggactattagattggctaccagtggtctctaatcttactgtttgcagagtcaagaatgggggcgggggttgggggactgtatagattgccttttaaaatagtgtgacttcataataacggagatggctgaaagattgcttccttacactacttctcggccatcagggctgaataaaggacccgcctccgccctctactccggctcttctctggctgtctcttccccatcaagtcataaagcgagcgggttgggcgagagggcacagctcgaggcagagaagagacggggtcactttcacaactcccaggaatcggcttcagaaaggaaccatctgcgactcccacgttcctttcgaagttctccttcaaaaggaattacaaaaaaaaaaaaaaaaaaaaaagcgatgggggtggggatc

SEQ ID NO: 330864 - DNA, 1845 bp, Homo sapiens
  chr1:72748833-72750678
  hyper
cgaaaaaaaaaataggaggaactgtatcacaattatgcaaactaagggggaaagagaggcaccttagaatgaaggctctccttactgtcgtaagcgctagagggattctttgctagaaaagtctccgtgtcagggctggggtgaagagagctgaggggcgctttgccttccctcaccggtgcgttttacctctcgaggcaccgtaagtttgaagtcctccaagttgtggtcggcgccatcatgacgccggcgactgtgagttgtttttttgtttattttcttctaatcttgcctgggtggctacgctgcagttagcgagcagccaactagttctctctgcgttttctcgggaataggtagggacggtggcggggcgctgcttttttgcggggacacgaggaggtgcaaggccttgcggcagagcagcttgcgtgtttgtggcggtcggcccgtatggattgcaggacgcccctcttttatctgtgggtgttgacactaagttgtgtgtgtgagtaggggattgtttatggtcaacatggagtgtgtgtgtgatagagagcgtgtcgtgcgcgcgggggcctgtgcacgcgcggcacgcaggcgcgctgggagggacggggcgggtcatgctgggatgtagagtcgggaaaagactgcaatcaagtgttttaattgtgtagagcccaggcggtccagttatgtaagaggcagtttaacccatttgagcctatcaggccgaataatcggcgcatccgagtcaaggcagggcagagttaaggggtttaacgagtcgcagggttgtatttcttaacagcctccacaccgcgttaacaggcttgctcctccgcggtgcagagcggtaacctccgcttccccacgcagcagcccctccgcagctcgccgggctgttttcagccctgccctggcccaaggcagaaggagatactaggcgtggggccacccctactcttttttcttctttccttcttgaactcatttccagattcaagatccttaagcttttccgggccatttgcaaatcaatgcgagaaccgaggctgagtcgttagcagttacaccaatcaatcttgttcagcgaggagtttgggaagcagagcggggaagtgaaaatggaaaataagtaattaaaaaataagctccctccccctcacacactttttcccttcctccaccccatccccctttagcagtgtttgaagaagatattctttgccagatcccagttcttcttttggaggaaatgaagcaaaacctcacacgtccgtaactcgttttccataatgctagcagggtcatttggcaaagcgcaccgaagcaagactctctgcaggggtcagcatccggctgcctccgcagactgagctctttacgaggcaggcagggagtcgttttgcttggtggtagcagtgttcagagtgatttttatcgccatgcacggggatatatggggaaagggaagggttcccatcacctgtgaccacccagactggcttacagacgaatccttaactagcaacacctccctgctgaactggcactccaaggctgggcagctaacggagacatttgcgtcaggagtcactgatgttagtattctgccttaactctcaaaaccgactcggaaactgagagtgcaatagtttcaaccgcattttgaaacatcaataaaatgttagtcatttgcggatgaatgaaaacattttctttaccgtctggtatgctagggaaataattgtgaaatgacagactctcactaatatcgatgccaaatacctaagtaacactgtcatcttgttaactgcatttttctatcttgcgtggcac

SEQ ID NO: 330865 - DNA, 552 bp, Homo sapiens; identical to SEQ ID NO: 227211
  chr1:75595799-75596351
  hyper

SEQ ID NO: 330866 - DNA, 324 bp, Homo sapiens; identical to SEQ ID NO: 227212
  chr1:75596628-75596952
  hyper

SEQ ID NO: 330867 - DNA, 253 bp, Homo sapiens; identical to SEQ ID NO: 227213
  chr1:75597154-75597407
  hyper

SEQ ID NO: 330868 - DNA, 821 bp, Homo sapiens
  chr1:75597701-75598522
  hyper
cgtttgggctaaaaaccctcattactaagaccaaacaaacaaacaaaaactcttttgatttttagcgcacccctgtaaagtaggaagataacttttccgttgccccagccgaggatgagcgtgggtaagaggcgtgacgcgagctccagggaaccgggccaccaggaagaagctataccttcgtacgcccacccctgacaaaaggtcagaaggtcgttggaccccagaccgacaggacgatcagccctgggattcatagcaaacacattcccctcttcttgcacactcgacccccagccaaaggcttataccgcccaggacatagaaattgactcaccgcccagaggcttacagctcaaggaggggtgcgcgcagctgcaccccgggacaggtcagcatcccacaaggcgcctggagtaaagcgaggccagaccaatctttcacgtcttctgctcctgtctgacgaccattcttcttccccaagcccagaaacctctaaaaatgaatcattttctccacttatgcagagatagacgctcttagatcaaggttagtattttgaaaacctgactgagagccgcctgattaggcgagggtgggtggaaagaccgcataaatgcccgcacccccgccctgcttccctaacacagctccagctctctctggatctccaaatgacccgcgcgataaattctcctcgatagtagccagacagtaccccagattcactttaaaccctaacacacacacacacacacacacacacacacactgtaattaaatatccaaaccggacctttatgtttaattccactttcaac

SEQ ID NO: 330869 - DNA, 1291 bp, Homo sapiens
  chr1:75600123-75601414
  hyper
cggttcatcagaaagtggtcaggccacagcggcctctttggacgaagacacacttgtagcattatccttctcggcatcagcttttattagtggatcggggcgggggaggggggagatcggcagacacggacagcctctgaccctctggagttggtatgtgataagcagccctagcagtgccatgtattggaagaacgatcagatgtttgtgtgtaaactagtagcaaaggacgtgccggagctggcagttccccctgagaaggtgagcgagccgacgcctggccagaccagctgaatcgcagtgtccttgaaactcgagttgtttgggctcctaaacaaggttcagaaactacctgtaacggcctcatcttcagacctggcaattttttttttttattacgtagtagcgttagtcagtaatcattgcactccctccccaaaagctcacttaacctgagacatggagactgtaatttgggagatgaagcctcgagcctaaggcgctctcaggtccatgtgagtcgtgcttttgttctatttgctgtggtgatcgtggcggtccgggagagtgggtcgggaggactgggcggctgtcgggtggaaccggagacctggctcgtttcgttcggctgcccgcggacacttgcctgccctgaggcacacctccctctgcggggctccagaaaggcctccgggatccctgggcttgccgggagagccattttacctaaaatgccaaaagaaaaccgcagggcacaaaacgagtcacgcggtttgtctgagtagactggggaagctgacaagctctcacctcactcgggaggcaggacctgtgggtatttggtgttttaagtttgaaatcatctgcagcctgtctgagggcctcagcaggacgcgcgcggggcgcccctgactatttctttgctccgaagccggttggggacaccaggcgaaagcggagctgttctgtttaaacgccctttgtgtgtgaggacgcggcctcagtgcagctacgctgggtcccgcgtagggagcgcaccccagaaagggagggtctcggccgacggtccgggaggcccccaggttggtatcttgcctggtgcttccagagggagggagaaggggaggcgaacagtcagaaatgcagaagtgcgagccgctcgagttcggggtacccacccgcccccgagctagagtttttggaaacgaaagcggtctaagcccagggacgctgcgttttcgtttaagaacaaaactccagcaaatacttggaaacacttgagtaacgcgc

SEQ ID NO: 330870 - DNA, 785 bp, Homo sapiens
  chr1:75602421-75603206
  hyper
cggcgcaggacgaagggccgctgtccccgcgctccttccagggcccagctggcccctcctgcagcagacagaggacggggcggagagggtctgggtggggtgggaagcttagctggcccgcgaggagggcagggccgcaagacttctggggtccgaataggtcaggggtcggcagccccagcgggtgcgtagccagagcttggactcggggaagagggcgagaatcgtgacctcaagaagctgggggtggggtggggtggccagggggaagggaggggaggcggtgggggcgcccttgtgggtaggtgggatgcgaaggggaggaggggtctagaaccgcctgcgcctcgcggtttcctgcaggtgagccccgagggagcgggggacgaggactcgtgctcctcctcggccccgctgtccccgtcgtcctcgccccggtccatggcctcgggctccggctgccctcctggcaagtgtgtgtgcaacagttgcggcctggagatcgtggacaaataccttctcaaggtaggatagggcctcgggtgcgaggcccaaggggagcgggcttagcgtgggagctctgggaaaagagtaatgttcctcccaccaacctttccgttcaagttctgggtgaaggttgtaggcttttgcagaaaatcagcccagtttagggcaactcatgcggtgggataaagtgagaagaaatcccagactcttctatgtcgttgcaaaacagctaatgtgtgacacatcctggtctggacgcgccggatgtgtgtggatgc

SEQ ID NO: 330871 - DNA, 813 bp, Homo sapiens
  chr1:76080152-76080965
  hyper
cgctttccagtaagtgctttgagtactccggagcaattaaaaagcaagctgacgcgccaagataaagttgtgtccccctagtgacctctagagcggagctaagctcccacaagccagacttgggaggaaaagcaaaaagcacgccaaagcctgagcgctgctgtagtccaagccaatgtattcagtaatacccttcacccctcagttctcatctgagttcctgtccttttttatataaccccaaaggctcagtaagtcgctgcctcccaggtcattgggcccattgtgttgaaatccaacttcgaacgacgccccttccttgccaccatcctcaggtccagttcccccgcgcacagccttcctcaccgcgcatggtgtcgagcccacttccacctctctgcagtgctgcagacaacctctagggctctgcgagtcccccagcgagagctagggagccgacaagctgcgacctctgcgagtccgcgctgcgggagcgggtggcttgcacctgctccccgcgcgccggctctgcgacccctaggcaagacgcagcccaggaggctccctcccgagtcgcgccccggaccacgccgcaatgcctcgtcaccccagcaacaagctcttccttgtcctccccgccatcgcttctctccgcgaactttccaactttggaagcccgggttccaaaggagcaacagggagactgcttagccggagccactgcccgtctcgacaggttggggagcaggaagtagcctgcagggactcggccggtagcaagtccccttgaccgcagggaaaaggagaggcagc

SEQ ID NO: 330872 - DNA, 772 bp, Homo sapiens
  chr1:76081592-76082364
  hyper
cggaccccccacgcgcttcctccggctgccgcgcagctcccaggcgagccctcgccgcggctctcagctcagcgagctctttgttgctgtgatggcatctgcgagcagcagcggcggccgggctgcgcgctcagctcggctcggctcggctggggcgggcgccgccgcccctctgctctcggccgcgccgctggcccccctcttgcgctgctgtggacgcggtggctgctgcggcggcggcggctgctgtgctgctcctgctgctggagggggcagcgctgggtcccctgagcgcccgcccagcgctgacctcccccttctccacaccctccctcccccacgcccccacccccggtgtcccgtctgagccgccagcccccatccaaccggctaccgcgccgtcatccagcagcctctactggaaagacaacggtggcggcggcggggagctgctggggggcgcggagagaccgcggccatctggggccgggaaggagaaagccaggcagagtctgatggagtctgcctccggcctgccttcctctgggccttcgaagccccctctcaaaaggccaggacgcgctgggcccaagaaagacacccgtcttcacaggccaaccagaactctggccacctgcgggaggacggcactgtcccttgcgacccggcccaggagccgtcctcctccacagcctcctcgaggatagcgagcccgaattccacgcgggcgatgagccccgaagcgcgcggttgcctctgcccctcccgaacc

SEQ ID NO: 330873 - DNA, 1579 bp, Homo sapiens
  chr1:77332977-77334556
  hyper
agataaataagcccgcggaccaagaagtgggtacactggctcggttaactctctctccccagaaatttcactactgaaaagattattatttgggggcggggaaggggatgtagaggtctttaggacccagcaggcggcggcaggcggcagttgtgtagatcgctgagagactacgagggtccggttcagttttaattctgtctctaatctctgcaacagccgcgcttcccgggtcccgcggctcccgcgcgcgatctgccgcggccggctgctgggcaaaaatcagagccgcctccgccccattacccatcatggaaaccctccaggaaaaagtggccccggacgcgcgagcctgaggattctgcacaaaagaggtgcccaaaatgaagaccctgatggtgagtcagttgtggcaactccaccgggcaaagagggggatccccgggctcagggtccacgggacgcaccgtggagactccgagacgcctaaccctgggccgcgaggtcgcctgttacaaagggacaactttctacccgctccgcgttccctcccgattctccagctctgcctggctcggaatcccagagccaggatgggaactcggggttgcctcgcctcctagatctccggcgagaggtccgagggggtggcggagagctgcaggagcgatggaggagtgggcagattgctcaagggatgggggtgcccaaaagcaacagcctgccaaaaactaagagggacggggaggggggacctttgcagactttcttcgttttcttagatttcaaacttgcaaggatcgcaaggatccagggccccaggaaaggaggggtgtgaaggactcaaaattccagcagcttggctggggtggctgcgccagacgggcccttccccaaagtgcaaacccacccctgtcctcggccccggcgcgctccctccctcagcccggggccgtacaccacctgccctctaccgagagatctgggcggcggcggccgaaagcagcgacgcgcccggagcatcccttgcgatacgctaggggacggtgctttctctgtcccagttgcgtgcggcggggctggggcccaggccgccccaaatctcccccactagagtgaccaccgcacagttgtccccgctgggcgcgctcctccggtgtctgcgctcagccgctctcctcttctctctcccgcccgcccgcagcgccatggtctggcagtgtgtttagcgctcaccaccatgtgcaccagcttgttgctagtgtacagcagcctcggcggccagaaggagcggcccccgcagcagcagcagcagcagcagcaacagcagcagcaggcgtcggccaccggcagctcgcagccggcggcggagagcagcacccagcagcgccccggggtccccgcgggaccgcggccactggacggatacctcggagtggcggaccacaaggtgacagcatgcccgccagcccgctcgccactcagcctggggatcccgcacacctgagccttccccctttcccggggctgggaggcgctgtgagtaggtgccgttcgaaggctggaggggagtggaccc

SEQ ID NO: 330874 - DNA, 1498 bp, Homo sapiens
  chr1:77747314-77748812
  hyper
cggagacccggaggtaaccgtgtatgtgcgtgcgagtgtgtctgtgtgcgtacaaggtccggagaagcgaaacggtcgcaggttcctacagaccccgaccctgttcccttggccacctggtccccggtagctgcatccctgggcggcgcacgcagtgaagcgtcgcgctctggcgccggtgccgcaccgaggggtatgactacgaccccttgcgcgtgcccgcccccacctccgcacctcgcgccagcccgcgcagcgtgaccggcagccgccgcagacccggctcggggaggcgcggagcgcggcgcgctgaaccggagaggcgggccggctgctgccttgcgttcgccacgctgtcctccctcctccgctccctgcgccccacccctggcggccgcgctgcctggcagcccgggaagccgcggcacagctgctcggcgcctgcagctccggctcgggggctggaaccgaagcgggggcggcgggagcgcggagaccacagcccccggggagaggcggagggggtccctggcctgggcggagaggctgagctgagtgcgcgtgagaaagagggctgcaccgctgctcggcgcggactctgccagccccagcttcagccccggctcaggtcgccgcagcccgggagcctccccgcttgcgccccaaggcacgcgcggcacagccatgaacaccaacgatgccaaggagtatctggcccggagggaaatccctcagctttttgaggtagggctagagctggccgacgggcggtagcatccggggactgcatctcaggggttcgggttgaggcagccgcgccccgtcccaccttccccacacggggcatgtaatgaaggggcttgtagaagcgcactcgcccgctcccccgagggtagtcgcctttcccgcgggttgccagggtccttgtcagaaggctgggcttagaagcctgcatctcacagatcaagtttcagtcttccagcagggttctgaaagcagcctgctcccatcgcgcccctcggatgtggacacccagggtgggctgcagaccgcggccgggccgcactctctgggggcgagggccaggtcaggtggctgcactgtcgcccagcagcgagtaaagactcgaaactgagggagccagagccctagtcactctgctggtcgagggtcggaacccctgggggaaagaggaaatgtggacgaaggcagcccttcctggagacagcttggaagagagggatgaagatgcaaaaagcaaaacccaacctatcaagtgccacctccccggtgacaggcccccagccttgctctgcgctttcgctgaatgaactcctgagcacgtttttcccgttgcctaggaagggttgggccgcaggtttcgccagtgctcgacaacccacctggagatagcgggtcggggagggagctgcgaggggggcggactcctgttgctcagtcttcagaccgcagcacagcatcatctgcaccgggaccc

SEQ ID NO: 330875 - DNA, 817 bp, Homo sapiens; identical to SEQ ID NO: 221390
  chr1:78511528-78512345
  hyper

SEQ ID NO: 330876 - DNA, 970 bp, Homo sapiens
  chr1:78956569-78957539
  hyper
cgagcacggtgccctcttctctcccagtactgctctgtgcccatggaaaagggggcggaggcgagagagaagaggaagaggcggaggtcactcgcgcgccccatccctcccaggctgccagcgcagctaggtgcagagggatcccaggagccgcgcgcgccccgcagtttccgcgctaagggaacgagtgcgcggaggggacgagcggctggaccacagccggcgcccgatcaggatctccgcgctgggatcggtggaacttgaggcagcggcggcgcggggcgccatggcacaccgagcggctccgtcttctgctcctcagagagcccggctggcggcctgggatgacaaggtaccatccctccagaggctgatcccaatgcatcggcttcgcttatctagacccagatttaatcaactcaccccctgagacacccagccacagcttctgctggctgagcctgacactgagtttggaccagattccccaagctagggagacgcatagagaaagaagggtactcgagctaacccatccccattctgagctgctctgcgggggattgggtagaaagggtctcagaagagggaaatcggcacagattccgcttctcgccgttgcggggttccctgcgggcggcactgcgagttcctcacccgggcacgtcctcactccccgtgcccgggatgagggagaaaacagccctttggcgtttgagcaattgcagaaagtttcagcgagttcgttagtttggagggaatgttgcgaggccaggccgaagggcgggggggatagtaacgggcgaaagtcgaactgtgagtaagacctggagaaggcgaccgtcctgggggtagcctaggcagttccactcgggctgggcgcaggaaaggctggctccggaattcccagcctccgggaaagctagctgctcgggaaacgccaatcgaattagctcagagaagagtggcc

SEQ ID NO: 330877 - DNA, 959 bp, Homo sapiens
  chr1:82266277-82267236
  hyper
cgagccgctggtcatccccctgcgctcagcctcggagcgccgcgcttcgcggcgctctcccaaatactcttcacccactccagaaataaaataaatgtttttaaagtgcatgtgtgtggacaggatggagagcgcgcgccggcggagcgcgcggaggacccagcgcgcagtgagtggagtttgggggtgggctaggggttagcggttgaatgggtgtgttaatggggggagctggaggcagagctcggggacctgggggtagggggagcgcgaaccgactgggaggggagagaaggggaggggcgcgagctggcgcaggccgcctccggggcgcgttccacggccgtgcgcgcgcgtccctcgccgccaccgccgcccggacagccctgcggccgccccgccggcggagccggggccggcctggtcctcgggcggctgcttggccaccgccaccgccgtccgaagggctcgagcccgtaagtatcccctttcgctcctcctccccgccgcttgggcgcacagccgcagcagctgctcaaatggagtggaaaacggccattgggcgacaatgagttatagattatctgctccacgttttgtacttagctgcctgtaatcttcttttgagtttgcccgagccccttgctggaaaactcaggagggagagatttgtcctttgacgctgtacacgctagtatgtttatatgattagcccaactggcggggagggcggatttgggggaaggaggaggaggaggctggaggtgactccagttcagacctcgcggagagtctgtgtcaggacttcgcattcccccgtctctctctctctccctctcgctccctctcactctctctccgctcacacacacgcagaggtgctggggcgaaatcgggagcttaccagagaattccttgggattgttggggggcatctcccctccgctgctgtgtgtggc

SEQ ID NO: 330878 - DNA, 966 bp, Homo sapiens
  chr1:82267247-82268213
  hyper
cggctactccttgcttccccgagcccgagtctgcgccgccagccttccttggggcagcggccaccgctcagccccggccgggagatccgaaatgtgaggaggggtcgccgccgcctcccgccccaggccgcagggtcggcgcgagggatgctattccggccgggcgctcggggggctgaggggcttcgcctgacaaactgagttggcctcgcgcccccggcgccctcccgcccgtcgcttcgaagggactcccaagtctgcgcacctctgtcaggcttttgcttccaccacccctttcgctctgattcccgatttttttttcctaagggagcgtgcggtctgggggtgtgtgcgtgtgtgtgaaagacctctctcgaagagcggcgtgtgggaaactgcgggaaaatgttgacttaaccccaggagccgcccggcgctggctgctcggctggaggcggcggcggccgagcaggaggacgcgccgagctgcggcgccgtgtccggccggggagctgcggcgctgcctcccgcgcggactcggcggccgaggacccgctcgcggccggcctcggccctctccggccggggtagccgctgccctccgcgcctgtccccgcgcggcccccacgccagacggccctccctcggggcgcgctcgcagacggaggtaagagccgcaggagcgaacaatgtgcctctgtgcccagcttcggagacctgtttgctttgcgcctccagtccgggggtggatgctggaggcgcagggagccgcgggttaatggggctcggctgttgctgttcggctggcccagggggagacccgcgctcgctcgggctgctcgctccctccccccaatctcctcttggaaatcgatccgcagaactctcagtccggtccagccggcttctccttttctcgtggagccattgtaacgctctccaggcatcagtctagttgccgggggc

SEQ ID NO: 330879 - DNA, 475 bp, Homo sapiens
  chr1:84326267-84326742
  hyper
cggccactcgccgtctcagcgccccctcgcggcccttctctacccacctcgggacttcccaggcctcctggctgcgccgcagaccctccccgtcccagatcccgccagggcccactcgggctccagccgctgcctgggacagccaaaggccggcccgggcggttcttccccaggtggtccggggcgtcccgggccgcactggcctggcccatgggccccgaagaaggcgctcacccaaggaccactgtccgagcggcttcccccggcccggcctggtgccgcgtccccaccagcccggggtggcaggttctactcgggaagcctgttttatgtcttctttcacgcccatatcacaccgacaagggtgaagctgtggaacttatacctcggctgggccccgccgccaactcctagggcacgggaactgcgcacaggccggggttccgcgaggggcggagcttcccgctctgccctc

SEQ ID NO: 330880 - DNA, 922 bp, Homo sapiens
  chr1:84543146-84544068
  hyper
cgaggacaacgtggtgggctgagcgaatacctcaatgtgcgagagaacgaaaagctcgaaccacgaccgtgcctagggaccaggcttttcctgtggccgatgcggggcagatgcagacccagaggccacccttgcgcgcgatctccaacccgacggtgcggctcctctcggacctggagctgtggggagaaggcagccttttagtgaggagccgccgcgtggcgggacgcaaggaaaaccacccgagccgctgaacagtattccgcgactgcactccagggcaccgggaccgccagggtgaggagggactctgcgttctgcaaagctagcggttcccactccacctcccactatctcagcgatgggcacgcgagcgccagcccgggcgaccgcgggggaagaagcggtccacgccacctcaggcccccgccccaggctctgccagctgggggtccaccgcccgcccccggggtcccgggcctgcgcgtcacttccggcgcgcgcgcccgcctgcgaagatacagtcgggccagggcctggcctgggcgcgcggctgcccgggggcgcgcagagagggcggaccgcgcgaagggggagtgtctgcccgccgccgccactgctgctgccaccgccgtcgccgccgccgccgccgccgccgctgctgctgccggtgctaaggagttcgctggagccctttcctcagacccggcccggtcttcgcgcccggactcctggcgccagcgctaggcgcactcaccgctctgacgggtgcagacgcgggagttgtcccagactgtggagtggcgggcacggccccagccccccttcccttccctgaccccttcttgccatcgccccagacatggggaacgcggcgaccgccaagaaaggcagcgaggtggagagcggtgagttgaaggcc

SEQ ID NO: 330881 - DNA, 706 bp, Homo sapiens
  chr1:85358571-85359277
  hyper
cgccaggcaaccccgaaaagccgcaggctagagccctgcaggcgccgctgcgccccggcctccccacgacgcacgccctggtgactgcggctcggggtaccctccctgcgcccggaccctcactcaccgctcacgttcacccgcgccgccgagcccgggagcgggggcccctgcggctgccgcatgccctcggggtcgagcgcgacggggcgaccgggcgccgggctccagccgggcgcggagaagcagcggaggacgcggcgggcgggcggagcgcctcctctccagcgacccctgcgacgcgtccagagccaaaggaaagtttggcggtgcgagggagggacctagggacagcggcccctccctgccccgccccgccccgccgggtgcgttcgacgttcccactggagagcgtccccaacctgcaaggccgcgagctgcgctcaaaggggcccgtgcgagccgcgggagggcagcgctcttgcagacgcgttcctgcctgggatcgtccccaggtgggtggtcggccggccccgagagggaaaagcgcccactaaaggaccgctagtacccacaagcctcacggagccatacctcggagctccgtattagaacgcagtccctctgcccctctgtcctcagagatttgtttgaagtggctgcgggaagtgcagcccacacccaccacccccgtgggaggcaggct

SEQ ID NO: 330882 - DNA, 897 bp, Homo sapiens
  chr1:85462482-85463379
  hyper
cggttaacctgaaaacacctgatcctctctccggaatccttgcctggggaaaacgataaggctgccgggccatgcctcctccttcaaaactttccagggctctcgggattcggaacaggaaacaccgttcacggccgactcatttcgccctcgccgtaacgcgtccgccgaagttggagccctgcaaagcggggttcccttctcttaccctttctgccggccgcgtggtgcgcgcagaccccggcccgagagcaggcgccgcagtcgtggagtgcggcgggcagttctcgggcggctgaaaggcggctctgtgtgcaccctgcaggatgcggcgcgtggccaggcgctcccgccccgcccccaaggggctgccccgccccgccccgccccgccgcctcctaccggggaccggagcttccccagttggggtcctaggggacttattccacgcttcagcggaccagcctccccgcgctcccggagaagggggtcggcgacgcggaggcggggtgggggccgtaggggatggaaccgaggcgcgcgcgagaagagccgaggaagtaagcagtcccaaaagggggcggcggtggggcccccagggaggcgtggggcacgccaagggcgccgtggggcactgacctgtggtgcggcccccaggacaggcccgaggcgcggttgcacaccggcaggtccagcacctccatgcctcgaggcatggcgcggccagggagcggcaggaggacacctagcgtgggacggctacacctgtctgggcgcaggcccgccgcccttgcactctccacccaagtgcccaacgctgcggtacggcccgctttggctcggggtgtctgccggagaagcgccttacagagggacccgggcggtgggccctgcggc

SEQ ID NO: 330883 - DNA, 233 bp, Homo sapiens
  chr1:85463884-85464117
  hyper
cgaccggcgcgcaaggaataggaaaagcgagttgccctgcgcccgcgtcgggatgaaaggcagggagccgggagggagcgtcagcgtggcccggcgggcgcggagggagggcgcacggccccagggctggactcgtaaccccagcgccctgctgcagccgccgttgcttttccctcttggtgcacgaaaggaagacgcctgtgggaaatcgaacagacaatcggtcgccgttc

SEQ ID NO: 330884 - DNA, 251 bp, Homo sapiens
  chr1:85773944-85774195
  hyper
cgccctttactcagtaaggagggcccaggcgtccaaagcccaccagggggcagcggcggcattcttagccccacttctccgcgctcaaaggccggctgagaaaacgcgagtgactacccgagggcgctgttactccacaatttttctgcaaaagctaaggtcggcaaacatggatattcggatttccattgtttttgaggctaaatcaaaagatgcctctggggaaaaggggcaacatgcactgtcggatc

SEQ ID NO: 330885 - DNA, 732 bp, Homo sapiens
  chr1:86621199-86621931
  hyper
cgcgcaacccctggtccgagcccttttcccagggaaggcatgggagcaggtacagcgcccaaaggggaggtggggtgcccgtcaggacccgcccaaaacctccgcaggaggggcaggcccgcccccgtgtcctgctcccctccccagtccccgccgcgagtgccacttccccagtgacagggcaatgatcagggcgcagcctcggctcggatgggcaacgtttgttggccttctaaccagaggggattgcctctgagcccgtgggtaaaacaaccccccgacgcccgaggttctgcagccacccccttccccccgctggcgacccttcctcacgcctgagtccagtggtccaggctgcgcacactgaccctgggggacctctagcgtcacagcaatcgccaggctggacgccctgagaagcacctcggggaagcaggacctcgacagggccctgcgggaggagaaggggaggagggcgcgagggcggcgggagctggagccagagagatcgtcggagcccagctctggagcttagggagccgctgccctggacctcgggactcgcgccagcgagcttttcctctcgagccaaaagatcgctttagcataaactgtctgagatctgctggcacgaggcatcctttcaaacacggtattttgcaagctgagaagacaaggggaagataccgcgggtactcggccgctcctaaagccaaaaagtgccaaggagcc

SEQ ID NO: 330886 - DNA, 222 bp, Homo sapiens
  chr1:87800835-87801057
  hyper
cggctcccgacccctcagctccacccaagcgccccaagtagcttcggaaactccgtttctcttcctcgaaccgtctttcctccacccccacctcgggcccgaagactggcgcggaaagtgcagcgagaggaggaagttcggagaccggcgggtggggctccaggtccggggagggcgaggaaacgcgccggaagccagggtggcggtcgtcggctggccctc

SEQ ID NO: 330887 - DNA, 1156 bp, Homo sapiens
  chr1:90098160-90099316
  hyper
cggaggagttcccagaagggctatttttagtggtggctgctcccctctaacttacccaggggaggagctgcggtggctgagccgacgctgcgcgcacagccgcctgtggttttccgcgcattgtgagggatgaggggtggaggtggtattagacgcagccgaatcctccctcagagtccgccaggtgggcgtctcaggggtgggagtggccgcgtcgtgaagcggagagaggatttctctcctggtcctggagaaggcccccggcggccggcggcatccctcgctggcgagtcccgggagcgaggtggtctctgcaggggaggaagttcccgggcggcgcggcctgcgtcacagcggggctggcaccgcggagtcgactcggcgggcggtggcgaccccggggccgggcgctgggcggcgctggctgccgctagccgggctgcgtgcggggcggcgctggaggcggctccgtccgcggccggggaggcggaggggaggagggcttgcggggctggggcgttagctgcgtcccggctggaagcccgcgaagagaagtaggaggaaggcgccgccgtggccgcggccgcagtgctcgggcgcgacaagccatgagcagcgaccccgcgggcgacgccgccgtccctggcagccgctgagcccgacccccaggcagctcgccgctccctagcaccttctccagtcgacactctcgcgcccggaggtaagggcgggggatccgcggagggatggagaggggcagcccgcagagggccacccgctcggtccgctgtgcgcgccggaccgggactcgccccgcctcactcgcgtccttgcttccccccggctctcagacaggcagaatgtggttgcccgcccggcgtgtggtgctgggaaccttccgctactgcggctcaggagcccgccaacccctaccccacccaatccgcgctagcccgagcggccgcgcgaggatctcagcctggcgcccaacgccgcgccgcagcggcaggtcctgcagactgggcgcgggggtgggggggcggtccgcgaggggaaatgcgtccgtggccggggcgatcgttgttctttcctacctcgaaaatctctgagaccccggggccagtcctttccggtctatcacccccctgccacctcc

SEQ ID NO: 330888 - DNA, 750 bp, Homo sapiens
  chr1:90308855-90309605
  hyper
cggcggaggaagcgtggagtccattgatctaggtacttgtggggaggggagaacccgagcagcagctgcaaacggaagggctgtgagcgagcgggcgggcgggtggctggcagcgaggccaccagcagggggggcccgggccgaggccgcgccacctcggcaccacgcgggcagccggtgcggcggggtcgccacggccaggggagcgctgggtgcccaccatggcagttatgcaagcggtgaccccctggtcttgcctccccgccgccctgcactccttcctccccgctgccgacacttggatctctctagctctttctctcccctgtgttttcaaacaggaagtgcacggctgtctataacgtgctgccgggtctcaggatggaggagtgaagtctcctgtcgccgtggttccagcctccggagctcgcccaagccgcgtccccagagagcgccctgagagaacagggtggccgcttggtccaggtgcgcggggtcgggtctgggtccagggagcgggtcgggaagtctgcggcacggagcactgctagtgtcggatctgcatctccagctctgtgctgcagcttcacttgcccgccccccaccactggcttctcacccggggtctctgccaaactctggctgctgccgccctgggttcgggccggcggaaggccctgggcgtgcgctgcggagccgcctgcgaggactccactagggcgctttccaggctggactgccccgggctgc

SEQ ID NO: 330889 - DNA, 171 bp, Homo sapiens
  chr1:91170461-91170632
  hyper
cgggtaagaggaaatggataacagaagtttgggcccggctctgcaaccaggcacgcccaggtagctgccactcaatggctgaagagaaggcaatgggagagcccctgcaatcgcgcagccagccgcgagggtagtagtcacgtgatgccgctggctagaattgtttggtgc

SEQ ID NO: 330890 - DNA, 719 bp, Homo sapiens
  chr1:91172120-91172839
  hyper
gcaggaactcgtggcggccgggcggtcctgaaggtggaggagcgcggggcccagctggggtacgcgccgagcaagaacccgcacggagccggcgcgccgcggctgggcttcaaggccgccgcgccaaatccctggctgcgacgtgtatgcgaatcgttaggaggaggcgggaggacagccacactgagggcctcttcactaaagaatgaagtctgacggcgggaatgggggtgggtgggggcgggaatccatcagctccacaaagtgacagggcccttttatcgtaaatcaagttcaatctcgctctcgcgaaggtcctcttttttcggcggagctcccgcaggggcgactcgctgtcccagaccagatagtagcaagagctgggagagacccaaatctgcagggagagggcgcgggctgagagccgcggtggggagcagggcctgggcccagcgcgacctgcagggctgctgcctcgggagcgcttctgctctgcctgcggtggccgaggcggcggctcgccgagcgcgctccgagctgtgcgaacagaggaagtatgtgccagttagaagggttccgccggccacctcgtcgcagccgcggcgcaaggtcttggagccgcagacctgaggcccggctcctccctcctcggcttccactaagaacttattaaatagggacgattcacagttgatctgtcactgagcactacttacccc

SEQ ID NO: 330891 - DNA, 229 bp, Homo sapiens; identical to SEQ ID NO: 227272
  chr1:91177942-91178171
  hyper

SEQ ID NO: 330892 - DNA, 214 bp, Homo sapiens
  chr1:91180120-91180334
  hyper
tcagtgaggttgagcgctgcagccaggtccatgcgatcctgcacgctcaggtacttctgccgctcaaagctacgctccagttgattgagctggtggtcggaaaaagctgtccttgcttttcgaggcttcttggctctcacagggggactctcacggctactcgtaatctcccggtctccttcctcctttgtccctaccatagaaacccagccac

SEQ ID NO: 330893 - DNA, 1493 bp, Homo sapiens
  chr1:91182654-91184147
  hyper
cggaaatctccattcatcatgcctgggctgcctgaactggcactggacaaaatcgtgtctattccaaaactcgacccgctggccccttccattgtcattgctacatgaggtccacgccactccgccgttcagcagccgccccgaaccagcgaagaaagctatcgatcgtaaaacaaaataaacaccaaacaatgttgccgccgcttaaaaaaaaaaaagtggggcggggagagaaggaagggtaattgggaagtggcaatctgtggatactttcgacacaactttttttcttttatgcaaaaagtaggggtggaaagaaaaaagatgcggggggcggggggagttaaaaaaatttctgagaaaactcggaacttgcgctccaggaacgactgcgcacgtggcgcggcggtggcggcgcggaggacccaggcgaaggcgaaggcgaaggcgaaggcgcaggcgaaggcgaaggcgcaggcggcgggaagctacgccaaagccgccgccgccgccgctgccggggtctgcccacagcctggcaccgggcggcagcggtggcggcggcggacgcggcaggtgcagcgaccgcgaagcccgggcggccgcgcgccctcggaactcccccgcggctcccgaggtggcagccgcgcgccactcggcagccccgtagccgagtttctgaactttcttggaaagttgcggggcagacacggccgcagcggttgcggcaacccgaggaggaggaggaagaggaggacgacgagaaggagcaggcacagaaggaggaagcggcggagacgcgatgccgggcgactccggccgctgccgggcgcgttcgcttgtaatccggctgctggcgggcggcgccgaccccctcccgtgacgtcacggccactaccgccgctccccgcgccgcgccgcgccgggcccgcgcccccgccaccgaggccgcgcgtccggccccgcgcccctattggccgcgcccgcgcgagcgagggacgccgacgtgccagggagccaataggcgcagcgctcgtgagcccgtcagcggactcggctcggactccgctgctcttttgagaacccgcacatccctgagcccgcagccctgagccgaactccgagtccagtggtcccggtgtccacaatcacgagtgcgaggcaaagggagagggaggaagagatcagagggagaccagagaaagggaaccaaaggggagaaagaaaaaaaaaagtagcaaggattcgcccgttttcttaagtcagaagagagagagaagaggacgggaagggacttacctttaggctccagcgcggcggccctcgcagcctccccaaacgcgcgcgggaatagtccgaagacattaagagcggaggaaggagatccctgaaggaatccacagaaaagtgtgtcacttcaggcgccggagccttgcataagcgggcgggtcggctctgggctctgatttctcgcccgacgaacccaggcgctc

SEQ ID NO: 330894 - DNA, 877 bp, Homo sapiens; identical to SEQ ID NO: 227279
  chr1:91184750-91185627
  hyper

SEQ ID NO: 330895 - DNA, 765 bp, Homo sapiens; identical to SEQ ID NO: 227280
  chr1:91189043-91189808
  hyper

SEQ ID NO: 330896 - DNA, 308 bp, Homo sapiens; identical to SEQ ID NO: 227281
  chr1:91190089-91190397
  hyper

SEQ ID NO: 330897 - DNA, 1675 bp, Homo sapiens; identical to SEQ ID NO: 227282
  chr1:91190427-91192102
  hyper

SEQ ID NO: 330898 - DNA, 352 bp, Homo sapiens; identical to SEQ ID NO: 227283
  chr1:91192369-91192721
  hyper

SEQ ID NO: 330899 - DNA, 135 bp, Homo sapiens; identical to SEQ ID NO: 227284
  chr1:91194581-91194716
  hyper

SEQ ID NO: 330900 - DNA, 287 bp, Homo sapiens
  chr1:91195118-91195405
  hyper
aggagctgcaggctcgggtccccagccaggcgggggactgcgggccgcccgcgctgcagggccgcgggtcaccgcagggggcgccggggcgctacgggtcctcgggcctggtcttttccggtccctgcccgagcccgcgcctttcccgcctttcgggggagaaacctgcctggacactggaactgggagaaagcagcagcctaattgctcttccgatcgtcgcttgggaaaggggggcttcacatttagaaacttctcgcacctttctctctcggtctctgcctttt

SEQ ID NO: 330901 - DNA, 439 bp, Homo sapiens; identical to SEQ ID NO: 227286
  chr1:91195987-91196426
  hyper

SEQ ID NO: 330902 - DNA, 1167 bp, Homo sapiens
  chr1:91316222-91317389
  hyper
cgtgacagagactaaaaagctaagaaccgccgtgcgatggccggctttgggcaccgggggtgggggctacgctacgcgtgaagggcctcagtcctcgggctttagttcaggaagaaaatgaaagctggaggtctcgtgggcgggactggaggcggccagataggcaagaacccgcaacaggagtagggacattttttcttcaaattccaatcccatccagcgatagacaggcgcgtgggtctccctcctccacgaccaccacacaatggcacacacttttgctggaaactgaaatcgaagtctctgaggcaggctggggcccaggccggcagcggggaggggcagggtccagccacctcggcgtggccttggcgagcgctccggggtcagaggccgtcgttctcgccgcgctccacagcgcgtcacccgctgccctagcgacccccgggcgaccccggcatcgcctggctgcgccgtcccggcgggccggccctctccacgccctctcctggggtttgcggtgggcacagctccctccagactgggtctctccactagcctcctccccaactgcaacgtgggaaccagagctatccgagtcacgagccccaagtgcacacaaagcccccaacggggccacggcgcctccacgcctcgctacctccagctccaggagcgcagaacgcagcgccctgggtcaccgcgtctgccctgcggagcagccccactgaggggaagcctcgggcaggaggtgagaccccgcgcacgcaagcacccccgccccaagcagggccctctgcccgagggagactctcacctcaaataaacgggcgctgccgcctccagggggaggacagcgggcggagaatactcacgctgggcccagccgcgcggggacttcgctgggaaccacgcgcgggctcccgccggggagcggagccccagcctgcagtcctgcgcccgccccagcaccgcctcctcggaagggaggcctctaccgtccggcggcggacctgcagccgccgcgggagacgctgccccgccccccggccccgcccttcggcccatccccgccccgctggcctccttttcccctgccccctccctccgctcctcaacgcccgccgggtgcaatctgctctctccgggagacgaacgcgaagcgac

SEQ ID NO: 330903 - DNA, 669 bp, Homo sapiens
  chr1:91869781-91870450
  hyper
cggctggggaccgaatcagcacctaaagcaaaataacagctctgtggatttcctaaggagaatatcctaaatccaaggcagaggccttagggccccgagagtggcacaagaacggggcgctggggcgcgtcactccaccccccgggtcccgtttcctcccaccgctgtgaaacccgcggctcagacagatgggtacgtcccccccagcgctcgctcagggggcgccacacaccggaacacaagacacaggaaccgaacaccaatcagccgactttaggggcgggccggacgcccagccggtcccacctcgcggggagctgggcccgccctgcgcccgagcgcgccgcaggcctcaccgctttctgactggaaatgcggctgaggcgctggcgcgggccggcggcctggagacgcctggtgaccaacaactcgccgcgcccgtccgctgcctgcccggcagacggctctagagatcgaccgctgcccggacggctcggctgggtccccacttccccgcgggcgtcgggcccccgtccccaccttccccgcgggcgtccgggcccctctcctcacctccctgcggacagctcctaggccagtcgagcgccgatttatcagcccctctgaggaccgccaagcctggctaagccgagctccaagcaatggatc

SEQ ID NO: 330904 - DNA, 476 bp, Homo sapiens
  chr1:92495420-92495896
  hyper
cggcctggcccgccgcaccccgcaggcccggctctcccctgcgcgctccgggctgggcgcggcgcgtgtgcggagccgccgcggtgacacggaacgccggccgccccgggccgggggaggcgcgcgtcgagaggcgacggcgggctggcctggcgcgctgcggcgctcgctcacccgctcccgaggaagggcagtgggccccgccgccgcctcccaatggcgaggctgcgggattgcctgccccgcctgatgctcacgctccggtccctgctcttctggtccctggtctactgctactgcgggctctgcgcctccatccacctgctcaaacttttgtggagcctcggcaaggggccggcgcagaccttccggcggcccgcccgggagcaccctcccgcgtgcctgagcgacccctccttgggcacccactgctacgtgcggatcaaggtgaagggccgcgcgggcctggcgggagc

SEQ ID NO: 330905 - DNA, 4450 bp, Homo sapiens
  chr1:92948158-92952608
  hyper
actggccagctccgcgcaaacgaatctaagcgacaagcagctagggtcctgccgcctgggatggaggcagcagccccagcgggcaagctgtccaagtcccagagaagccggatgcctccttcccctacgaatcagctcccttctcccggaaagactctccaactccccgttagcatttctacgcccaaggtcgcgccaattcccccccagcactgccgggtccctgcagctcccgcccaagaggttcccagtgggttcctacctggagacgcggagggtgacgggggcctccagaagtcctcaaactccgagctccgttcgcagacgctgccttcgcagctgtctggggatgcggaggctctgtctggggcttcggtcagctgcgattcgggggacaaacggtcccggggctccgccttcgccccgcctgcatttgaagtgctgtctgcaaagaggaggcaggtgaggggctcaggctgggaccggttgagtctgagggtgctgaaggctcccccaatcccccgaccagggcagccgagcgtcttcccctctccacccagaccccggccgggaaccctctcggatccgagggcaggcgcagagaggccatggcacctaggagacaaacccggaggaaccaggacagtaggaaacaaaaacagcagcaaaagggacgttggggcagcccctcccagctccggactaatggtgtgccgaggtgcagtaggcatccgggggagcagccccgcctggcccgcgcgcgcctcgcacctgctcggctaggcgccggtacattctctaaacggagggaatagtctggtcctggggagcgcggctggtggtagctgtgagccttcttgcttttgacgagaaatgagcgcggcatggtggtccggcactttccccactgcgccccaagagtccctggagccgctgtcacccacggtcactccgagggcttgctcagccccagcccggaggagacctgagagggaaagaaaaccaggtggagacgtgggtcagtactctccggtgcggcggactgggcacccaggcggagggagagcgcgggccagggaggcgcgcagagggcccacgggaggaggggcttgaccctgctgcgccgcgcttaccaggtggcacttggacaggtggcgcgaacccgccgtcgttgccgccgccgccactgacacagctcagcggtaaaacctgtcccggggccctgtctcaggcccctttcctcctccctgcccacgccccccagctcctcccctttcctagcgaagctcgctccggcaatcaaactccctggagagctgtagttcccatcgggtgggttaccccaactcagctactcatcgcctgcctggctgtgctttacggctggcgagggagggcggggacacgcggatcggtttaggggccggggatgcccagtggtcgaggacccggaaggggcaaggagccaagacctccaagagccagctaccaactggagtgaaaggaccggggggaggggggaacagaacacaagataaaactgtggggcggcgggaggacagcagcagagggattggggacagcagaggccagagaaaggaggtgggagagcaaagggacaggaaagtgaggggaacaacagacgaccaacccccgccccaggagaaactcgcatctgggtgatcccactcgcccctcactagtgccccacgtaggagaaactttgcccttggactcccggctgcggcgggcaccggtcgaggctgcggcgagccatcccagaccatggagacctaacctcgggaatcaggtcccgggaaaaaagcactttccgttctgctcaccaaaaaatcttgtcctagggaggtggagcccgatccacgaacgttgactgggaaatgctaggtgtcccgagtcggtagtgcaccgacaatttagcagacaaaaaagacaggacgccagagcgcgcaggctgcattagcagagagcgggggtcgggcccgggcccgggagggaactagctgcccggggcgtcgctctcattaacccccaatcagttcacctaataccaggtcgaaatctgagcgcagcgggagggcgtggctgcgcctgccgctaggctccagccggctccgggggcggtaccccacagtcgaggtggtctggagtaaacgaatctgccttcctcccggggtgaaggcgatggtgaccgggttcacacgtgagctgcagtacagcagttctccgtggcctcggctggttcagaaacgagggtgctgggaactctgggccggggcaggacctgcagtcctccggcttcgcgctgtttccactgccggactaggagcccctcggcttcctaggcaagatgcaggccacacagtctacgtctgtccgttggcgctctcagctcaaacgagtcctacaggccttggtccctgtagggtgcaggccccctgctccagatccccagccccattgtgtccccttctccggaggaatgggaatagacctgggagaaaagacgcctgggacgtgtcgcggggctcccgcgaagtttcccgctacccaagcgccagaatgcccctaggggtgagagtgccatccgcctccctccggggtggctcctagggctagagctttgtcgcttcctgcacttctcgtccgtacaattagacgccacaaaccccaaacccaattctttaaacagccacgaaactcggaagaaaagaaaaacggagtggcgttgtcccgagggtcccgctgcagcttggacccacgttggctgggagcgggacagatgggggcggggtaactgtcagcgccggagctgggtctgggctggcgccaccagagaccaggcggacgcggaggccgcctccccacccgggctgtaagcccacgcctctctcgcaccccggcccgctttgctggttcctgtggggagcgacagagtttggaggagataggggccccggggcctgggccgagcgcgtgggaaggcaaccccgcgctgcagctggcgcgggaggtggggcggcccctccgcgcgctcaggcctctcctcaccgtccgggcccaggaaggagggagccgagggcgctaagggggcgtcctcccgagcgcagctgccgccgcctccccaccagatgtttccttccctggtggatttggctcccctgccgaaccaccagaccgcctgctgcgcgcccccagctccagatttccagtcacactgcgcgggtcgcgccctaacccagctgccggagctctctgggctcccgcacggcggtccgcagcaggtgggaaaccgcccgcgccctctgatcgcccccgcagtgccagtgctctgcgagtccccgcggccgcccccaccagggcaggaggcgcagaacaggctcggcggacctacctgcggagtcacggcgcgggcaccgcgctaggagagttttcaaacggaatcttgctttcgggagagaccgctctatctctctgacttaaaaaaaaaaaaaattctccttccgagctcagcccccaaaaccacaagcttcacttcctgagcgttactgagtcgctcgcatagccctcccagacctgctcccaacccccgtcgggcggccgggcgcgctcctttgcgcaagtggccaggcggtggggggcctggcctttccagcccgtcccgcgcgccccttagtagtcctcccagttctctccctgtgggtcggcaggggatgggggaaattggaggtccggacacttaggcactagaaatgacttgaaagaaaatgaactattcttggctccagggagacttccgcagcgagagaagccacagattgaggacacagattgactggcgagagaggggtggggggcgccccgctccgaggaccctccccgcccctcaggcctcggtcacccgccccccccacccccgaccccgccgcctcctagggctgcaccacccccgggtcgggaccgtgaatcaccggcccgcggtgccgccggcctggagcccggcgagtggccacggcgtccgcagagcgaaacctgccccgcaggccccgaaatagcttgttgtggaaacacttggggataaatacgcccaacgaggctgaaaataccttgacacccaatccgagaggtttgctcatttcccttcggatttaggtaatggttaaatttggaagaggtgggcgagcgccgagcccccggcggagagggccctggcggcgcgtcccgcgggcgcccggcgggaccggtgggcgcaccctccctgcgcggagctcgccggctctcgaccgggtccgctcagccttcgactaatttccggtggtcggagctgcaaaattaaaggccgcgcgggggcagcgccggcggctgctaggctgactccgccctgccggggcaagccagggagagcgggacctcgcacgcgggctctgccacc

SEQ ID NO: 330906 - DNA, 119 bp, Homo sapiens
  chr1:94374262-94374381
  hyper
cggagcgacgtcctggccctctgtgacctccgtgccaggaagagggacccaggatgtttgagagttttgctaccagccttaagcaccgagagaggtgtcactcagtgcgcagctgcacc

SEQ ID NO: 330907 - DNA, 1080 bp, Homo sapiens
  chr1:94702434-94703514
  hyper
cgggaatagaatccaggcaagaacacagacccatagtgatcaggagcacggattccggagcaaaagcgcctgggtttaggtcctgacgctgccaaccactagtctgtgtgcttgggcaggtttttaacctcggtttccccgtgtgaaccgagtcgaacaatcatggagtgttctgaacattaaaagagttaaaatgtgcaaaggcttcagaacagcaggcggacccgttgtacgcgctgtgtgctaactttaattacgatcgtcaccgtctgctcccggccaccgctggcgtcctccccagctcgtccgcgcctccctcgccgggcgcgcccctagccccggccggacccttcccgtggactccagtcctggctcgaggacacccgtccctagcgcagcctgccaccgcttccactcggggccgccccgcgggcctcccggaccctggacggcaattcgcgggcgctcgcgcgggcaaccccagcccggagccacgaccgccgcggccggagcaagcgccacctcctcacactcaccacggcgctccatctcgcgtgccggacgcggacgcccgccccacacctacggccgccgccaccgccgagggctggagctcgctgcccccatcccccacggcctgcggacgcccggccaaatctcagccgcagccgcagccgcagccacagccacaggcaccaccaccactgcagccgccaccgcccctgcagctaccgccacggccgcaccgcccgcccgccagccccgccccctggagcccagcccattggcccgcgctcccgggggcggggccggcgaccgcggcaggtacgggaggcaactagctcgcgcgcagaacgcgaccgtcagttgcgcgcggccggacgctgtcccagcatcacgggctgcgtcggctgcccttttggcttgcaggggacaggcagagcgactcagagaaaagtcacctgaggactagatgcggctaatggccagatgagcagctacatttcttatgagacacttctgtggatcgcctttttcctccctcttccaggggttagggcctggggaagggcgccacac

SEQ ID NO: 330908 - DNA, 282 bp, Homo sapiens
  chr1:94713022-94713304
  hyper
cggaccctggacggcaactagccggcgcccgcgcgggcgaccccagcccggagccaccaccgccgcggccgaagcgagcgccacctcctcacactcaccacggcgctccatcccgcgtcccggacgcggacggccgccccacacctacggccgccgccaccgccgagggctggagctcgccgcccccatcccccacggcccgcagacgcccggccaagtggcagccgcagccacagacaccaccaccaccaccaccacagcggccgccgcctttgcagctac

SEQ ID NO: 330909 - DNA, 657 bp, Homo sapiens
  chr1:95285602-95286259
  hyper
cgaccacccgcccaaggtcgtggcggcgccggctcagctttagtcgtcaaagtgcacatcctgggagccgctgcctcgaggtggttgaggcgagagggcagggaagcgtctgagcctcttcctcccaccagagcaggaccccagctgacagcgggtgagctgggcagaaacccatgccgggaagaggcggacccagtggaccgcagcgcccgcagtcgccgggccaggcgcagaggcgaacgggaggcggcgctgcaccgtgcccgcccctccccggcccggccccggctccagccccagccccagccccagccccggccccggccccggctcgcgggcgctgcgtctccgcgtacaggaggcggcggcggctcccagtcaccggcccccgccggcgagcgcacgatgcactgcctgggcgccgagtacctggtaagcgctcgcagcctcggccctcgggggaggagccccggggaagggtcgagtcccccgccttcacgcaccttccctgccggacgcttccgcctttcccgcgcctcggggatcccgcccccgcttagtaccttggggccacctggcggggaggaacctggaccctgctccagtgctggggcggaggcgggggagacgcgggccgcggggcgcaaacttggggtc

SEQ ID NO: 330910 - DNA, 183 bp, Homo sapiens
  chr1:95428539-95428722
  hyper
gccatttcagttcctgttatcgtgctttgaggtgcactgaactgcagcaaacccaggggatccaaggctacgttgaaaagcctttgaccacagtgcagggagcagaagacattaatgacgtgatgtcgacacagcccgcactcaggatcctccaggaaaagaacacagagataaccccggatc

SEQ ID NO: 330911 - DNA, 725 bp, Homo sapiens
  chr1:98519262-98519987
  hyper
cggggcctcctctgggagagtaggagagcgaaaaaatcaaccaccaccttggatttcagatcgaggaaaggaagccaaagcaaaggtgtggttacacaggacatccatagacaaatcgttgcctctctaagtgggcctgagctttgcggctccagaagcgcgaggcgcggttggtgcggacgcgggggcgtgggagtcatcgctctccccgcagccctggccgagctctctgctgtcctcccgagtttgggccagagaccacggctcactccctaacgccctcgcaaggacggctgcccgtcgggccaagggcgccccgggctggaggccggagcaagacggccccgcgggactcgggagccttggtaaggcggaggctcagaccccgttcacgaaaacgcctggctcctccaggatttgtcaggtcttaagcagctccgagaaggctccgctggctcttggggaaccccgctgtgcggctcacccccgtttgtctctctcaagctctcgccctcctcccctggtcctcccttctccagatcccctgccctgcccgaggtccgggccgcgcgggctgagcccaatacgcccggagaagagcgccggagccccctgctggccggacgcggcaggcgcggcggcccgctcggtcccctccgccccgcgggctctgcccagcccggacccgcctccaccctccagtgccctggcgctgggggcgtgct

SEQ ID NO: 330912 - DNA, 1121 bp, Homo sapiens
  chr1:99126875-99127996
  hyper
gtgccttccagcctcgctgtggatcccgcgaagtggacggttcgcttcgtggcttcttcccagaccccgccactgcggaaaccgtcactcggtggcccccgactgggtcaatgcgaggacgcccacctcctacctttgagtctctcctcttctccagggtacagccaaccctttctccaacgtagccggagtccgagagtcccagttccgcccctccagcccgccccaggccaggtggggatgcgcccggcccgggccagcgctggtcccggcagttccgcgtctgcgcagcgggcgaggggctggagcggggccggccggggaggtgcaggagacgtgggagccaatgggcacgctcgggggagccgggctggcggcggcggtggcggccggctgggcgcgcactctcgggatggagggcgagcgccgggcatcgcaggcgccctcctcgggcctcccggccgggggcgccaacggggagagcccggggggcggcgccccctttccgggcagcagtggctcttccgccctgctgcaggcggaggtgctggatctggacgaggacgaggacgacctggaggtgttcagcaaggtgagggcggcggcggcgagtcccgggaaacttccaaggcaactccgggcgttgccagcattgcgccgacggctgcctctggcgcgcttgccctcccggggcggtggctctgagctggggacgagtgaggtcccccgggctgctggaccccgcctgccagctctggccgcacccggggccgcgtcgcctcggggcctcaaaccgcagccgctccctcctccgcactttgaccttccgttcggcggggctgtggcttagtggagtctgcaaagttgtgatttgttttccctttctgcttctctgacacagacatcttcctcgcggcagctcccgaacctgggaggctggtggctcaaaaccgctcccgccagctgcttttcgggcgaggccagccctgaactctgggagagcagccaagtttagagaaattattcttaatttagtgttgttgcttgtggatttgagacttgggtgagtctcgggtcttgtgggaataggttctaggaaatctccctgaacaggagaaaac

SEQ ID NO: 330913 - DNA, 1289 bp, Homo sapiens
  chr1:101004540-101005829
  hyper
acatccacctcctccaccaccggtggctcgctgctgctgctctgcgaggaagaggagtcgtgggcgggccggcgcatcccggtgtcactcctgtattcgggcctggccatcgggggcacgctggccaacggcatggtcatctatctcgtgtcgtccttccgaaagctgcagaccaccagcaacgccttcatcgtgaacggctgcgccgccgacctcagcgtctgcgccctctggatgccgcaggaggcggtgctcgggctcctgcccaccggctctgcggagccccccgcagactgggacggcgctgggggcagctaccgcctgctacggggtgggctgctgggcctcggactcacggtgtccctcctctcccactgcctcgtggccctgaaccgctacctgctcatcacccgggcgcccgccacctaccaggcgctgtaccagaggcgccacacggcgggcatgctggcgctgtcctgggcgctcgccctgggcctcgtgctgctgctcccgccctgggcaccgcggcccggcgccgcgccaccgcgagtccactacccggcgctgctggccgccgcggcgctgctggcgcagacagctctgctgctgcactgctacctgggcatcgtgcgccgcgtgcgtgtcagcgtcaagcgggtcagcgtgctcaacttccacctgctgcaccagttgcccggctgcgccgccgccgccgccgccttcccgggcgcccagcacgcgccgggccccggtggcgccgcgcacccggcgcaggcccagcccctgccgcccgcgctgcacccgcggcgggcacagcggcgtctcagcggcctgtcggtgctgctgctctgctgcgtcttcctgctggccacgcagccactggtgtgggtgagcctggccagcggcttctcgctgccggtgccctggggagtgcaggcggccagctggctcctgtgctgcgccctgtccgcgctcaatccgctgctctacacgtggaggaacgaggagttccgccgctccgtgcgctcagtcctgccgggcgtcggcgacgcggcggccgctgccgttgccgccacagccgtgcccgcagtgtcccaggcgcaactgggcacccgcgccgcgggccagcactggtaacctagccggggcccgagggaagcggagatccccggcttccgacgtccttgggcaccgtcgcctccttccctcctagggcatcccctgcctgaacgaagacttccgccgcgaagcccgatagatcgggggaaaatggggccttcgaccccagc

SEQ ID NO: 330914 - DNA, 1534 bp, Homo sapiens
  chr1:101701719-101703253
  hyper
cccaacaccaaaaccggcgctggttcatttctctgtgcactctgggaaagccactgcccctcagaccgcagttgcgagtagcacgaggatctggggtggcggggggagtacaggaacctcccggttcattctccctcccgggctgcttgtctcctccgtacctctcgcagccccttcccagcctctcctccccagagcgccgccgacactcgccgggccgcggctcaggttttctgctgctcgcgcgaaagtggctcggggagctcctggccacaagctcagcacaccgatcctcctagggctgcggggggtgtgggaccagggcggtgcgctacgagactccgggccgtcctctgcctcctcagacttttcgagagaaaagttttcaaagtctctccaccttttttttttttcaggggctcgggagaatcctctccacagccagggatcagcgtctatctgggcgagggcagtgatttatacagtagaatccaggggttaccgggctccgccccttctctctctctctttttttctttcatttgttgtttggggaggaggggttcttttttttttttttttttttttttttgcttctgccccagatctttcctggacagtgcgtctcagcagttcagatccgggggcccccagctgacagagggcgtggggggttaaggcattaacccctcccagcctcttcctgaagaaaccacccagccttggcgcggcgctgggtgacttcgcgtagcaggcagggaactggccgcggcgagcgggactggccattggagtgctccgctgcggagggaggggaccccgactcgagtaagtttgcgagagcactacgcagtcagtcgggggcagcagcaagatgcgaagcgagccgtacagatcccgggctctccgaacgcaacttcgccctgcttgagcgaggtagggggcggcgaatggcgggggtcgcgggcgcggggagcccggttgtggtagggcttaggtgtcagaaacgaatttttaagtcgaacgaggcaaacaaaaacttagaaaacatgcatctccgggcgctgaaaatttgcatctctgggctactaaggagcccatctcgatcagattgttcttgggcacttgtgatttatggagttcagaaaaaaggttaattcccaactgtggaacctacgggtgtaggggcagtgaaaattgcagttggtcggaggaataggagggaaggcgttaaattttggaaatcctatagacaaagaatatggtgggtggtgtggagcgtgggtaatggcttaaattagtactgcccaggagcagggtataaaattagttgggggaaaatgcggagcttcttggcttgagcagcctctgctgttcgcggagttgctgggattgttctcatctctattacctcattttattgcattgctgcattaccttgaaatatttaagcaacttagaagtagacttctgctgaccagtgccgtcttagaaagtttctttgtaactttctagtcctaggagaggagtcaac

SEQ ID NO: 330915 - DNA, 59 bp, Homo sapiens
  chr1:101703569-101703628
  hyper
cgcggggggaggcggggagaataagaagaagaaagaaaaggcagtcgcttcacggaggc

SEQ ID NO: 330916 - DNA, 603 bp, Homo sapiens
  chr1:101774910-101775513
  hyper
cgcagcaaacgggaaaataccaatttagctctgtttgctgcagcttcgcagctttaccaggagagggcgccgacggacctgacttttgccttgcctcgcagtagagcccaactagagggtaaacagcagccacagtaagttctagctgttgcagaaataaattacaaatacatgtaggaaaaaggacttcaaaaggctgcggtatcaaagtggcagttaaagagaaggcaacgctcagagttgcaggtggagcagcggcggctgcatcagcgtctcaaattgcgaaaacattttgggctgaagtatttctttgtagcatttcgtggagcccctttcctttgatatacactagccttccgacttccctttgttcttttttcacacgtcaggttttatcgctgacaagctccaacgcgtcaaaggcgttagatctgagggctgcagcagccttcgcggttccgcattgagctccttcctgcagccctctgcggaggtcacggccacgtgtgggcagggaaggccccctacccacttcctcattcggacccgtcacctttagccggcgaccaccttttgatctcttgtgttgcacttgtgtccccc

SEQ ID NO: 330917 - DNA, 839 bp, Homo sapiens
  chr1:103573573-103574412
  hyper
agaagcagtaggaccgacggcaatctcccacctccccaaatccattttttcttacctcctctgacctctctagcttggaagaggaaggtcaatgcgagggttgttacggtgaaatcccagagccaccgtttcgttttccacctagaggaccacggctccatctccgagccccgcactcacaactgtgaactcaacccacgaaattgcgactgcagaccaacttcgtcctttccaaggtatcgccagggatgtttgctacacagccattggggagggagagggggaaaaagtcaaagggctttttcttctaaatttgatggtttgcgttcttcgtgtctctagccctttcctctccctctgagttggccccaccggccgggaccctccggccgcgaccctctgatccttcctctgccgggccctgccttcagaatgaaggcagatgaggggcttccaccaacaagctgagagtactgtgtgcccctaaaggcttcatgccgtcagtgggctggacgagtggctccgggcagccccctcctccgcccactcccctccctgctcccagctccccctcccagggcgaaactgacaagcaggctgagggtcagacccaatcacacgactctggggcggccccaagcccgcccccgcctccctcagcccaagaatgaggactccgagcaggcccagcccaccaaccaccccccatctccccactcctctcctccctcctcgcctaccaaatccccgagaaaaaatgggagggagttacgggggacgcgtgcttggctccagcactttgggaatgaaaggaattgcaggagagccccggagcacac

SEQ ID NO: 330918 - DNA, 1194 bp, Homo sapiens
  chr1:107599205-107600399
  hyper
cgcgccgccggccgggcgaccccgcaggaagtaggaaggacgagcgcgcactacaagtcccagaagcccccgtttcctggagcccgcgccgtgccgcgctacgcccgccgggagccgggcagagcggccaagatgtcgcagcccaagaaaagaaagcttgagtcggggggcggcggcgaaggaggggagggaactgaagaggaagatggcgcggagcgggaggcggccctggagcgaccccggaggactaagcgggaacgggaccagctgtactacgagtgctactcggacgtttcggtccacgaggagatgatcgcggaccgcgtccgcaccgatgcctaccgcctgggtatccttcggaactgggcagcactgcgaggcaagacggtactggacgtgggcgcgggcaccggcattctgagcatcttctgtgcccaggccggggcccggcgcgtgtacgcggtagaggccagcgccatctggcaacaggcccgggaggtggtgcggttcaacgggctggaggaccgggtgcacgtcctgccgggaccagtggagactgtagagttgccggaacaggtggatgccatcgtgagcgagtggatgggctacggactcctgcacgagtccatgctgagctccgtcctccacgcgcgaaccaagtggctgaaggagggcggtcttctcctgccggcctccgccgagctcttcatagcccccatcagcgaccagatgctggaatggcgcctgggcttctggagccaggtgaagcagcactatggtgtggacatgagctgcctggagggcttcgccacgcgctgtctcatgggccactcggagatcgttgtgcagggattgtccggcgaggacgtgctggcccggccgcagcgctttgctcagctagagctctcccgcgccggcttggagcaggagctggaggccggagtgggcgggcgcttccgctgcagctgctatggctcggcgcccatgcatggctttgccatctggttccaggtgaccttccctggaggggagtcggagaaacccctggtgctgtccacctcgccttttcacccggccactcactggaaacaggcgctcctctacctgaacgagccggtgcaagtggagcaagacacggacgtttcaggagagatcacgctgctgccctcccgggacaacccccgtcgcctgcgc

SEQ ID NO: 330919 - DNA, 1902 bp, Homo sapiens
  chr1:107682642-107684544
  hyper
gttactggaaacggcgcttctgtggaggagccgggggggatggggagtagagggagggggccctgttgcctcagcgccccgaggtcgtggagcggcagcagctgcagccggagcagcaccagcaacagcaacagcgagcgggacggagttaggaccgctcggagcgcacaggtctcgaggtagtataaggtttgctatccttccacttgctggcagttgcagaagaagatctgctttttaagtgaaacgtacatgccacccctccgagggctgcggcttccccgggcttgcttctttgccgctcctctttccggctctcgcgctcactctttaattggcactggcccctaagtttgccaggagctcgctgcccgctcggagcagggtcccggccgggagccgctggtgggggcggggagtccgggagccgcaatccagaagcgtcgtgggccatgtatatttcatcaaacggactttgggtgcgtcgcgtctcactgccatcagtgctatgtgcagtgacatttctgacttgagtggaggaatgcgcgaaggaaacccgggcgaaattggtattagaggatcttcttggcgccaatgctaattgtcctgatttatgccccttctgactaagctcaacgtcttcatctgaaataaaatgaaagcggtgccaagcggcatagaaccgcctggccgctggttctgatccccgggaaccagaaaatcgtcctgcggcttgaaaaaaaaaaaaagaggaaaaaaaaaagaaatagaaatagaaaaaagaaaaaatatccctcagtaaaagtttaaggcgagaagtgtcagaggcagcggagcgaggaggcgcggaggagagccggcgagcaggggactgggctggcacgacctccgaaggctgagatctcattattaatatcactatatttttggagggagaggcacctttctcatcctctcttcctctccgcccacccttactccctccccctcatctacctgtcaaagtcactgatcttttgcatttcggaagaggacgtcaacgggaaggaattccccctctgggtgcgggctccgagagggggcgacttgcaggaggctccccccgggggcggaggcgaaggtaattaagcggcggggagtggcgggccggcgctgggttctcggtcctcggggtcctctcccgccggcggccgggcgcgatcggaatccccgggctgcggcggtggcggcggctcgggtcctcacgcccacccctcccgctccgcccgctcccgcctggggaggaggctccgcgggagctgccgccctccgcccgtacgccgcccgcgggctccgctgctgcggccgccgcccgaggcggaccaggctggctgcgcagggccgccgccccgcgccgtcggctcggctcccgcccggcgcaagggcaaacgagccacacggtaagtgcctgcggctcgcctctcctactgcgacccgagcctctcgcccgtgcccctctcccccgggtttccccaccccccgccgccccccgccccacccgctgcgatgcacaggcgggagggaaggctccgggtgggcgaggaactttgtaaagcgccccgaggaggcagcgcgcggagccctacgcgcacacacagcggcacacgctcacacccacacacaagtcttcccgggggtgcgccccgggccggtgatgcgtcctcttgttgtgtccggagcccaggcgtggggtctgagcctccatccgccgactgacaggggccccgcgctctccctctctcacgcacacctggccacacacatcgctcaggcggcttgtcgttattttttctttctttcgccaattatatttgtttggggaaaagcaaacaaaaaaaacaaaaaaacacttgccctattgcc

SEQ ID NO: 330920 - DNA, 2283 bp, Homo sapiens
  chr1:108506290-108508573
  hyper
cgtcatagaggattagtgctgaaatgtgtcagggagagggctctgtcctctcccttttaagttgaaagcagtttggttttttgttttgttttaacattctgaaagagaaagaggctctgaaccgagtttaacatccttctgtacaaaaattttccgacaggacaaataaactactcttccactgaactgtgacttttgagctgactctagggtgcacccaaccttccagaggtgtctggcttaaccctcaaagaggcagctccagccccaggagccgaccggcaccacagcacctgagcagggcactgcaggaaggaaagcggaatctctagtgaaacttctcatttcctgtcgctgctgagagaggctggactcgctccttctcacatggcttaggaagagctgtaaacgggagcttgccggctggccaccagctcaggggccctgggggcggcctccgggttctgctccctgttcttccctttgaccaatgtcactcctggacagataacgggaccaaacgcccttcacttcctcgagtcctcatgtatgtcatggttcctcttttaggaaaacatgagtacaagacgcaaagcaaaagaagagactaaaggcaaattaccccatcacctcgtttcgtccctccccttcgttattatagaagagcttgatcaaattccctttgtcgcgccacacacacgcagagtaggtgaagggcaccctaagacaacttatttctttcccgcctcacagaaagcctttacgaaatcctcacaccatctccggacgcaaagctttcgcattcagcttgaggagctaaaccatttcaagccaaggtaggaaacgccaaagtggtgccgaagtggtcccaaagcagaaggctgggaagcagggcaagctcagcgcacctagacgtttgcatttacacaaagaaattagccgcatgattaatgggagctgccggctggaggcggggcgcccgtgccggcctcctcacctgggacatctgcggcctcaggttgatctccttcaggttgatggagtgcgcccggaggttgttaagcagctggcagagcaggactccatcgcggagggtctgcgcaaggtcgaacacctgagccgagtcccaggtcacccggtggttggtgggcagcaccttgcaatggatgagccactgcgcgcactgcttccacggctccatgcccgacggctccgggacgcggctgggccggggcgggcggcaaggatgcggccgccgccgccgccgccgcggttcctccgcgccccgccgacgccaacagccgccggccctttccccgcgcgggatcgagggagcaggagccgcggctgacgggtcgcgggcgccgcgctaggctcggctccggtcccggcccgggtgcgccgcgacccggccgccgctgcagcgagtcccgcgcgctctccgtgcgccccggccggctcggcggcggctgccgcgcacaggcttccgactccagcgcccggcccgccactgagcatgcccagcacgccggccggtctcgctgcggtccgcaagtccccagacgcgcgggtgggagcgcgccggcggccggggctggggtctgtggccgagggcggggcgcgggggaggggccggcggaggggggcggcggccagaaaggggatcccgcgcccccgcctgcagccttgcggggctcacgcagcccccggcgtcctggggtcttctctcggggcggcttcccggctttgcggggagtgtggctgaatactgtaatacgatggggtcccccaggaccccctaaacaacaaatgctcaaaggagcgacggattaattggggcacccagactccccagagcaatgaaaaaagtgcctagagcatcagtagagcacggcgctgaaagttttagagatcgtcgccccctcgccccttgcagctctatcccctccattctctatagctgattcctcagcctattcctcctagttgcccctagtggtgttttggcaccctcaaagtgagtgagagtgcgtgtgtggagacgcctgcggaaaccgccccgatccctgagcctatttcctcgcgaggtgattttcacttggagctggtttgcccctgcactgtcaggctcggaactgtttgccgttgctgttctggcccttttgctgaccccacaaaaacctgcttgagaaaggcctgtgccacggtgctagactgcgcatgcgtcggcgactggcggccgggtttgagagcaaagcgcgttagccctgggcagctcctgcc

SEQ ID NO: 330921 - DNA, 741 bp, Homo sapiens
  chr1:109203593-109204334
  hyper
cgcttctgtctttgtacgggccgtcgcttccatcatcctgcggtaagcagcatgcccaaccgaaaaaacaaagctcgtcgcggagccgccagcgtcctcaactcagcgccgccctgacgcccgcgcacgcacggcctcgctgcgtgacgctaccgccgcggctacgccggcgcccgcacccgcgcctcggcctccccgcggggctcgccaacctcgtgcgctctcacggtcggccttgggccccgggagcctcatggtgcgccgagctccgtccctctaggctctcagttccaaggcgtcggttttgcgtctcgtaacggccgctgtggcgcatgcccagaagccattttcaaggtcctcttccgaaccttggcgaggacccctgcgcctgccgcgccgttgaccccgctagcgtgcggctgcgacgcggcacggtacggcagctgttggcgaaggcccccaactccgagcgcgtccgcagaccgcgagccggaaggcggcttgggcggctgttgagttcgtggcgctcccgaggcgtggcaaaggcctaaaaacggtcctggccagcggaaggcggcaagaggagcagcaaggctccacgcgaggcggccggcggctggagtcccagtcagcctccgctttcatcccagagcagtccacgggggccttaaaggaatgtaggctgggtgaagttggcccagtgacacctgcgttcagaaaaacgttctttccgctcccaac

SEQ ID NO: 330922 - DNA, 1085 bp, Homo sapiens
  chr1:109656101-109657186
  hyper
gcgcttgggaaattgcggctaaggcaaactcctcgcttaaactcggatcaactacagtgtcagggcttctcttctagccggttgtaaaagcacggatggatttggcgggatgtaagatctccaggagtggccttcgtaggagggaacacgtactggggcctcttccaggcgacgacgtctggagggtgatctctccatcttctttctctcggttcacacgccacgtgtgcaacatcggagatgctcataaaataacccctggcccgaaagggcagtagaaaacggaaatttgttggctggcttggaggatgcttccactgtgttcttcacacgagccccgggcctgcctgttgggccggttgcgcaccccgggcgcgcgctctcccgcgcccacgccgcgcgcaccagcggcggcggctgccatggcgacccgcaggtgagctgcagaggcgcgcgtggtccctgccccacccgcgcggagccagagaggaggcggttgtcaaggcgacgtgggtaggaggagaggacagagggaggaggaaggatgggcggtgttggcgtagccgcagggaggtgactgaagcgagcctggcctcttgcatcctccgcctgtgtacctccctcccctttttttccgccttctgccagcagaagcagcagccgcagcacctgagccgctactgccgctcactcaggacaacgctatggctgagcctgggcacagccaccatctctccgccagagtcaggggaagaactgagaggcgcataccccggctgtggcggctgctgctctgggctgggaccgccttccaggtgacccagggaacgggaccggagcttcatgcctgcaaagaggtactgccgcccccctacccgatcccgctttggtcacaaaagtcttggatccaggcggagaccttggggacccaggcgcagagagtttcagacgccacggagtttagatttctttggggatgaggcgtggggggagggaagaggagccagtctggcgtcatgaggaggccagcacattggaggactcacggatagatcatcctcacagattgggatgctgagctcagc

SEQ ID NO: 330923 - DNA, 857 bp, Homo sapiens
  chr1:110008905-110009762
  hyper
cggcgctgggcagtttgcaatccaggaaaatagggaaggataaacctgaagcctgtgcgtccaggtgcgcctggctagggtttccgacggccgcggtgtctcggtggggaccggtcccggaggcttcggcgaggaggacccggagtcccccccgccccgcggcggaactaaccacggaggcctctggtccctttaaggtgcccggcgagcggagaaagggagcagagggggcgggaggagggttcgggagcgcacgccacgtgacccggcggccaagttcgctgcgagtttgacagaagtttgaatccgagtcgggggctttctgctgccggcggggcaccgcggcggccgcagcctctgagagcacgaacagcagcgcccccgcgtcccagccagccagccagccagactggactccggcccaccgacggccgctcgcgctccggccccgctcgcctgctctgccccggacctgcagctccccgctcccccgccgtgtccgccgcctcccggccagagagccaagccaccacgccgcgcccagcgctcgccgcgccagcatgtcctcgaccgagagcgccggccgcacggcggacaagtcgccgcgccagcaggtagtccctgcgcgcccaggactctcacccgcccctctccacctagatgtcgggctgcacacttatcccacccctggaccgcgtgtgagtggggcaaggggaccagcgccttcccagggttccccaccgccctgaccccccggccggctgtgtctccgcaggtggaccgcctactcgtggggctgcgctggcggcggctggaggagccgctgggcttcatcaaagttctccagtgggtgagtc

SEQ ID NO: 330924 - DNA, 208 bp, Homo sapiens
  chr1:110186004-110186212
  hyper
cgtgccccttgcaggtgggtagcgctgagagcagagcagcgcccgcgggactggcctgaggatcccgcaggcaggagggaccccgcgggcctttccctacctgggaggtgcacggttggccaccagggcgcgctgctggactctccccagaaatcgggcggaggtttaggcctcagagtcacttaaacttgtaaccctaccggtagcc

SEQ ID NO: 330925 - DNA, 140 bp, Homo sapiens
  chr1:110527029-110527169
  hyper
cgagccccggacatttcctaggaatcgctgtaggatgtgtcgtgtggggctctggtctttgctcccaaacacccctttcatgcgcctctgaggccttgccaggaaccccgcagcccaaagaccctccgttccgcagcatc

SEQ ID NO: 330926 - DNA, 1773 bp, Homo sapiens; identical to SEQ ID NO: 227383
  chr1:110610426-110612199
  hyper

SEQ ID NO: 330927 - DNA, 634 bp, Homo sapiens; identical to SEQ ID NO: 227384
  chr1:110612459-110613093
  hyper

SEQ ID NO: 330928 - DNA, 1278 bp, Homo sapiens
  chr1:110626374-110627652
  hyper
cggttccccctccgccaaaaccgtatgatattttagggaagcccctctttattcattagaaatcggctgctttgagtttggcccctaaaaacttgcctcctgccccggaagatttattttattaaatggtccacacctgaaagtaattgagtctcggcgtgggtgcggggactgcggagggagggtccaggcgcggcagcggcagtggcggcggctctcagctcctctccagcttcgcaccctgtgcctccgggcgccctagtctccccgccacgccgcgacctttcctcggcctcccgctcccgctttgcggaaaggtccggggcgcgtgtaggggaaggagagagaggtatgtggggcgagcgggagttgagcgtggatgtggggaagggggtgcgtcctgcgtcgcccccgcaccctcgcgtggccgggcgcagatccccgtgcacgggtcctccgcacacccttgccagcccgcagggattgttcgccgcgttggtgactccttcccaaaatgggaataaaagatcgaaatagctagtaagcatgcaaagtttattgtcaacctcaagtctctataaaaccagatcaaagggaacaggcgtttggtttcttcccagatcgctggggggcctcggggctcaggaagccccaggagtccagcccgctgccgctcactgcgctcttctctccagccgggtccaagggctcgagcatcgcaacctgcggcctgagttggccccgggcgcacgcgagggaaatggatgcagtgcccgtgaacttggggcctgaataattgataacaacccgctgggtgcccgtcgcgcggccaggcctgcggggagcggagccggaggcagcaagcaaaggaaacgcacgagccgggagcgcgggcgcgcggggccacgaaagaccgaccgactgtccgacgggcggtgggacaagaggacggatgctgtgggggggccccggaacccgccgccacaactcgcggcccacgcgggtcgcagccgccagccgtagggagctgccgagcagcgacgttccgcattccatcgggttcccgcgccctactgggcttgtgcggcgcagtgcctgcgtgtgctttcgttttctcaaggccattctgataaaacatacgtgctggttccctttcttttctcagaatgattcttcaaggcgaatgactcgaaatggagatttcttctaacaccgcgtgatcaccgacaacttttgcaggacgggatgaaactcctctgggtttccagtcagatgtgc

SEQ ID NO: 330929 - DNA, 553 bp, Homo sapiens
  chr1:110672768-110673321
  hyper
cggctcccacgcctcttgctggggagggtggctcatttttcacgggtgccgcgtgactttccagactgtattttcagcctcggtttgacgtcaggctctcacggtcccaaaggatgggctttgtacatttccaggccgcagaccggagcctcccatccctttgggcctcttgggcggtccctacggccacctcccgcagctccctgggggcgggggaccgctggatgagggaggaggggaggtactggggggaaagggcggttggcgggaaggaagtccaggtgagacaggcccgcgttgggactatcgtgcgcggtatgtcggccggcaggtggggctggtccgggcgcaggaggcggtagagcaggagcagcagggggagccaggctggccgagctggggggtgagcacgtttgtctcaggcagctcatcgcctgacacccccgggaacgggctctgccccaaggcctaaaatgagggaagatgaggaaatgggggtggggacgatggagaggatggaaggggcggcgggggggtgcggtggtctgcgcgg

SEQ ID NO: 330930 - DNA, 1201 bp, Homo sapiens
  chr1:110692968-110694169
  hyper
ccccttgcaactccctctcccgccccacgcccaccctctccgcctacgtcggccatcagagcctcgctcgctgcccgagagcctcgcattgacgccggcccgcgcgtgagtcaagcctgcgtcacggcgccccgccgccagggtggcctttcggaaagcgagggaacagtgcgcgcagcgctccgcccagctccgttctgctccgcagagccggcgctgccagggcgcagggagggcggcactcggccccagtcttcgcaatcccgcgcgctctctccgccgtgggacctgggtccccgcgccgctcccctgagccccgagcgcgcggcgggcgggagccaggttgggactggtggtgaggcagggagtgaggagcgagcggagtcgcgtgcgccggcgcgcagctccgggtcgccccagccccagccgggggcctgtggcccgggggaggagctgtgcgtccgcgacccgtcggggatcgcagctgctcggccggagtgcacgggccgagtctgcgcgactacccacgcgtgacaggtgagtcgctggccgcgccccgcctggctttaccgggccggccactgcaactttccctgttctggccccgccccagccagggagggctgaggaccaaggtgtgaggcggcgctgcccccgcatccgcccgaccctgcgctcgtcccgggctcctctcgccgctccagccgccgttgcctggcgacggagccccggggcccgctctccttcgcgcatcggggtccccagcggcgtacgcacgggttggacaccgggcttcagcttctggtgctcagaagggcccaagaactccggaggaaattgggcttagctgcggaggcaagcgcccgcggagaaccggagggggcctgtccggcccatccgcggcttgaaactgcgcgcccagggcgcagttccactgggagcctcttacgcagctggagaccccagccccagccgctcggcctcaggcctgtgaccttgacagtaacattggcaagcgaagcagaactgtcacgcccgagatgaatatttaattctcagtcctggggctggtcctcgctggattcggagctagcagagagcccttcctccctcgtgggaagcgcatctggggaacggaatggctgagacaggggacgtgcgtgtggtgcccatctggagggggcgccgtcctggcgggtcg

SEQ ID NO: 330931 - DNA, 1205 bp, Homo sapiens
  chr1:110753530-110754735
  hyper
cgccgccgccgcctcgtgttgaccgcaagcagcccgggcccacggagctccggctgccgtgagagtgtcggcctggccccggcagccgctcggaggacttgttgctgctgcgctgccgccgctgcggggaagccggctattccggggcttggtgcggtcttggagccggagggtggcccgtgtgagcgcgagcgccccggaccttcgcggtgcgcgtggactgtgcgcttcctcgtctttggtcggggtgaaggcgggggcgtgtccccggcccagagcgtttgtgtgtcccgtcgtagcgggggaccgcgtgtgtgcttgcttctacttccccgggtcctccctctctgcgcctccctctctccggagcttcctgccctaaccccaaccacctgtgtaccggagaaatccaactcctcccgctccgcgtcctagggggataggcaggggcaagcccaagccgcagagggggccgccaccgcctcctgcctcctcttcgtctcctccccctcccccgtctgacgctgcctcctcgggaagggtgtttggagggcagcggccgccccaagccggagccccgcagcgcttcttatgatcagctcggtgtgtgtctcctcctaccgcgggcgcaagtcggggaacaagcctccgtccaaaacatgtctgaaggaggagatggccaagggcgaggcgtcggagaagatcatcatcaacgtgggcggcacgcgacatgagacctaccgcagcaccctgcgcaccctaccgggaacccgcctcgcctggctggccgaccccgacggcgggggccggcccgagaccgatggcggcggtgtgggtagcagcggcagcagcggcggcgggggctgcgagttcttcttcgacaggcacccgggcgtcttcgcctacgtgctcaactactaccgcaccggcaagctgcactgccccgcggacgtgtgcgggccgctcttcgaagaggagctcaccttctggggcatcgacgagaccgacgtggaaccctgctgctggatgacctaccggcagcaccgcgacgccgaggaggcgctcgacatcttcgagagcccggacggaggcggcagcggcgcggggcccagcgacgaggccggcgacgatgagcgggagctggccctgcagcgactgggcccccacgagggaggcgcgggccatggcgccgggtctgggggctg

SEQ ID NO: 330932 - DNA, 1267 bp, Homo sapiens
  chr1:111216715-111217982
  hyper
acgatggcgatgccccgggccggcccggagctctcggggtactcgaagagcagccacacctggcgctggaagtcgcggcggggcaagggccgctcctcctcccgcaggaagccctcgtcctcgcggaacttctccatggcctcctcgcccagctggtagaagcggatctcctcggagaaaatgtcgatgggcacgttgaccggccggcggatgcggcccccggactgatagtagtagaggatggcgtcgaagctgggccggttgcggtcgaagaagtactcgttgcggagcgggtcgaagtacctcatgcgccgcttggggtcgcccagcagcgtctcggggaactggcaaagggtcttcagctgcgtctcgaagcgcagcccggagatgttgatgaccacgcgctccccgcagcagtcctgctcgcccgcggccggcagtgagggcggcagcggctcgtagcggtcgcagccgccgccgccacagccgccttgaggcggggcccctccaccatcggccacctccggctccagcaggtggtccccgggcaccacggtcatgtcgggcggcagctcgcggcctgcggcgggctccgcgtagccgtggttcaccagcgtgtgggcaccgccgctgctcgctgggcgctgaggagggtgggcgcggtggcgggctgagggcggcggcggcgagcgcagaaggctgaggcgctcgtccatgcggcggggaagaggcggcagcggtgaggccaggtcgctcctcctcgcgctccccgccctttcgccgcctccgcccccgagccgagcccaccgcctgttgcagccaaagccgcgatgctctgtctgggtctggcgcggtcagccgggctcccgcacggggacgcctcctccctccttctcgcgctctccgccccctcccctgcggggcgcgcgcccgcctccgcgtccccttaggattcccgcccaccgcgcgggcgcgcgtcccgctctcgggggcagccgccgggcctgcatttcttgcagccctcaaggcccctcggtgtcagcgaaagagccctcatgttgtacctcggcgccccgcgggaatgcccacccagcagagccggcccacggggagtcaggctgccggcccgggcccctaggctccgcccgcttctggtcagcgcccctcgcccccggcccgcctggccgcgtcccagtcgccagggttttcggcccgtgggccgggagagctcccgccgcggccccgcgggcgccggccccctggcctc

SEQ ID NO: 330933 - DNA, 1060 bp, Homo sapiens
  chr1:111505946-111507006
  hyper
cgtcggccatcttggttttcatctcccgtggagatctactcggtccgcctattaaacttgagacgctggggtcccgcggagccgctgtgtcaggctctaaagaggttttacatttcccagaggaaagcgctctatgggctttaagcgccgcggagacaagcgcttcccgcctgggtggcgcactctgcgggctccaactcctctcaactacacagcgtccggaaacgacggccgactccacatccctaagacggacagaggggcagccgtggggaggattcgaaaccggtacttaccaacgcgaggcgttgcctgaattttcctctgcgggtttcaggaagaccctccgtaggttatttgacattttagtggggagaaaggggacacctcatccagaaaagtgggaagcgtggggccgagtttcccaatggggcgagaaccagagcgagggaatgttgggctggagttgcccacagcaactgtgaggggttcgaccttaacggagggcgacagcgggctctcgagagggtgtatccccaggcttcgggacgaggtcgcgcaccgcgcagaaaccggaaggctcctggcggtggactgcgccctcacagccctacgctgagagagaatcggcgtgagtctccgccctcagagcctacgacaactctccagactccgccggagcaggcgcagggggcgtggccttggtggcaccacccccaacagagcctggtcagtgctgaagactgcgtcagtctggctctgccgccccgcccactgaagccgatagctggagcaaagctcggtcgggcgtcttccggggtcgtcacgtccggttgccaaggtgactggctcgctaaagcccaacccttatgatgcaatccaatggcaagtgatatttgctatcttttcttccggatcaaggaacaaatcgcaaaagaaagctctcccgacacctacgcaaaataaaatgtttccggggtcaatcataaattttctgcttctgtgctcgccgctagcgtacgtttttctctcccgtcagtgcattaaaagacatcggcgc

SEQ ID NO: 330934 - DNA, 733 bp, Homo sapiens
  chr1:111746591-111747324
  hyper
tttcaggcacactgcggttgcaccacaagcttcctggatggaaggacacgtggccccggggccccacaacggcttcctgtgtcccgccgcctccccctcgccccctcaggcctggcctcgccgtccccgcccccacctgaccctcttcccctctccgcgcgctccttcccgctcacctgcccccgcgcagcctcctgagtccccttccaactgctcccggatctcgacgccccgtgccgccctccaccgggccccagccgccagccctagccccggctccccggtgcccacgccgtccccccgcgctctccccggccggcactaacccccatggccgcgcttcagtctcaggctggctcgaaggcggcggccgagcccatccatggcccctggagtgcccggctcccgctcccagctccgcgctggccccgcccccctatccttgacctccgcgggtccgacactttcactttcacgcggggggaggcctaggggacaggttcggggcggcgcggcgcaccttccggactccggcccaacccccgggcgcacctgggcgggcccgctctgccctcgccctgggcagggcagcgtggggtggaagagggcgctcgacgcgcgtccgggactgggcggcgccacctcgttcccaccctccgtggggctcccggggaggcttgacttagcgaacaccctgcagtccgcaaaagcgcatgtcctggctgaaatcacc

SEQ ID NO: 330935 - DNA, 820 bp, Homo sapiens
  chr1:112532952-112533772
  hyper
cggagtgtaccgacgcgggtgtgagcgcgtgtgccagcgagggtgggcacgggggtgagcgtggcaaggtgagctgggtttgggggtgggggaggagcagggagtacggcgtgagcgtaagttcgggggcgtgtgtggctggggacccacggagaggtggcagggagggccggcgtgtgcgcgcgtggggtatgtgtgcacctagctgtgtgtctatttctcgctgactgtccacagggcagcagcacctgcttgagaccaagcccggcgacctggcaaggtggggccccctaccgcgcaatctttgcggctggcccccggctctcagctccgagtgcagaggctgaagaggtacccgggggacacactgcctctaaccccacctatgagccgctctcctctcggaggacgaaggcaccatcagaaggtcgagattcgccctcctctcccgccacgtctacccactacctagaccgggagtctggacttgggagcgtgaactctcacccgagccggtccccttacaactggagcccgcccagcccctcagtccctccctgaagcccatgggtccccactgctccgtgcctcgtcgacccaggatggggagtgggaaggtcagcatgtgcccacagggccaggtgtccggcccagattcccaccctcagggcggcggcgcgcaaagggcgcagtccccgccgctgggcggacccgcggctccggctttcccggtgtctccagcctcggtgcccggaatcctggatctcggcctggcgctccggaagcgaggcagctccgtgccccagcagggacggggaac

SEQ ID NO: 330936 - DNA, 637 bp, Homo sapiens
  chr1:113256965-113257602
  hyper
cggccgctccgggcagggggtccgcttctttgccaggccagcacgagttggcaggctgaagggcatctaaatgggaccctcctctaccccgggcgtccccctccccgctcctggggaagctggcggcctcctggtgtcgcgggctatttctgggtgtggagggggaggggaactacggtaagagggacagggaactggggcgctggagccgggaagcgggtgagcgagtcttcccaaccgctatgtcccctattaaaaagaaccccgctccttcgtgaaaccccttttcccttagcctttaagctgccgggccgcgacggggaactggccaactcatccttcgccgggctctccgccctccgggctctggggcagaacagggtcctgaggcggcgtgggcgagggcagtcaatgagcgggaaggacgtgaagaaggtgacacaggctgccccccactggaaaatgggttgggagggggtgcggcccgaagaccagaggatagcaaaggtccacggaaaagggagctcctggcccggacgcggcgtggggaacgcgtcctagcgccggggatgcggagctggggagaggggtgggagccccatcctggtttgggtgccccagggggcgctcactcggc

SEQ ID NO: 330937 - DNA, 818 bp, Homo sapiens
  chr1:113498720-113499538
  hyper
cggggcccagggtccggctcccgtccttcgctcgctgcctcgtttgcttgttccagtacccacgcagctagccagtcacgtcgcagctcaccactttgtctggccgggccagcgaggctgccttataacccgccggggccggagcatgcgcgcagggggcggagtcgtctctcccggccgccgccccctccccgccacacagacatccgaactgcagcccgcgcctccacacgctttcagccgcgcgcgccctctagctcgcccgcgcgcgccggcgccccctccccgccacgtgaccggcgtcccagtccgacccgcgcgctgcgcccctgctgagcggcgcggagctaccacgccctgccagactcgcccttgggtccctgtctgacgagctctaggcaatctgccctcgttcgggacacaaccatcggtctcacccctcagtttctgccagagaaaaaggaaaagtcaccgagaggcctgaccctgacgggtgggggagatgcgcgtgcggagtagcgggaagcgactgaggagcggggaatgggcagcatttgaatggatgcgggtgccgctggcacccgggaagacgctgggggccggcgctgtagagccgggcatgggctgggatgtgtttggattccaatccgggcctgacaccagttcagtgacctcgggaagttccccaaccctccgggcctgtttcctccctctgaagtggcgacagtagtagaaccgacctcgtaggctcatcgggaggtcctgatgggagaacccatgcaacttgccaccatagagccaggcccgcggcggttggc

SEQ ID NO: 330938 - DNA, 1489 bp, Homo sapiens
  chr1:113932580-113934069
  hyper
cggaacctcggccggctcaggactccgcacgttgtcttccaatctaagcacaccggcccctctctgcgccccgcacaggctcagaggctccgcccgcgtctccgcctaactcgccggccacgcccccacttcggggagctcggtccctctcggattcgagttttcctcggctccagccgccgcgcagagggcctctcccggccctgcgacctacagccccttccactcccctgcccctcctctgcgccctccctcactctccaaacttcttttttccaccctctctaaacttcagtcattctagtgcccgcctcctccactcgcaccgaccaaccagtggtccccattctcgttggcggtccgcctcctgcccgccgggggccaatccctggcgcgagagtccagggccggggctcgttcccaagcgcccagcctgtgacggcagcgcgccgggcgccgcgcggcgggagggggcggggctctggatgagggatgggcgagggccgggggaagggaaaagggaggaggaggaggttgcggctggtttgaaagcggcagtttcctggcagcttgggcaggcgttggtctccgcgctacagctccgcagcggccacgatcgatcccgcgacgggtctacgcgcgcttctgcgcgccccccacggatttttcccgttcccggctcttcccccttcacctccccgcccccccgcctcagcctttcccgccgctcgggcgctgagcccagggaccagccggcggcagtgaccccgcccgaagccccttctggaacctcctggggacaattcccttttcctttcttcagcctaacccgcggtggccctcgcggagtccggtcagccccggggagcgcagccgggaggggcgtccaaggggcgtctcgcgtctgggaacggccgggcccccagcgggctgtggtcgcggggtgggggccggagcggcgaggccccccttaccgggctgcgcgggccgcccagggcccccgggctgagacggggccggagcggcgccccggccgcccgcgcggggtctcccccatggtgcagcggggttcgggatgtcgaagacgctgaagaagaagaagcactggctcagcaaggtgcaggagtgcgccgtgtcctgggccgggcccccgggcgacttcggcgcggagatccgcggtggcgcggagcgtggcgagttcccctacctggggcggctccgcgaggagcccggcgggggcacctgctgcgtcgtctcgggcaaggcgcccagcccaggcgatgtgctgctggaggtaaacgggacgcctgtcagcgggctcaccaaccgggacaccctggctgtcatccgccacttccgcgagcccatccgtctcaagactgtgaaaccaggtacgccggccctgcgtatctgtctcggggtgttggggagaggggcttcagggtgggcgtcctgggagcggcggcacctccccaccgcgtattgtccc

SEQ ID NO: 330939 - DNA, 1221 bp, Homo sapiens
  chr1:114695957-114697178
  hyper
cgtcctgggagcctggctgtctgcggggtcccccgcattccgcagtagtaatacaggagggccgggggcttctaccccaacctccgctccccttcgggtctctcctggctgtgcaagcgatgggccagagggctggacgaggctggctcccaatccagaatcccgagctggggagttctctctaggttctggggctcctgggaccggggctttggggaagggagatcgcaggacggatatccaggaagggagggggccctgggtctcccgttacctgcgcctgccgcgctgggactccgctctgggggctgcagctcgaagctccgacaagtctccacgtccagcccgagagggggcggccgggcccggcacagcgaggcgaggaccgcgagcgcctcctggcaccgaggcccgccggccccccacactccgctcatgccctagacacccaggcttgccgagcagcagctcgaacccgcgccccggccgcactggggcggggcacgacggccccaagaagaccctccctgcagcggccccctgcggctccgctctgcttttaatcacttccccgcagggtccccgcccctcacgtggcatcccgcggcagctggcgagtctggcgcctcgcggccgccccctctacactcagggactggcctgagtccggggggtgggggtttcgaggcgggaagccgggctgtcccgaatctcggagggtgcaaggccaggaaagagtccgggttcccactccgcattcactgcctggtgtgaccttgggcgtctctgagcctcaattttcctctccgtaaaggaggtgtaatgattttaagtacttcacggactccctggggatagaaagatcgtgtttgtgaaaacactgggtaaactgccacatgccacacgaatgacagagaaatagataaccccgtaacagaaagagcgacggtcaggcagggtctgggaggaccttggccgaggttcctgacgggagcagttagactggcccccgagtcccagcttcggaggtagaagaccccaagacaggcgggcgatgcgaactgcaagactttccgagctccgcaatcctgcggtccgcggtacccgcatgttgctatggcgacgggaggcagcggccgtctctctccatggcaacgggagggaaaagtttctggcaaacaggaatggggggtcatttcaagagggcgcagggcgctcagt

SEQ ID NO: 330940 - DNA, 612 bp, Homo sapiens
  chr1:115212647-115213259
  hyper
cgggtatcactcgggtccgctccgtcccgcccccgcaggccctgccgaaggccccgtcccggctgcagccccaccccctagccccgccctccctggcaaggctcagttcttattggctcctattcccacccctcacgctatgcccgcctccgacaccgccccggccggcggtgaggggaaccaccacgcctcaagtccgctgtatggccagaaccttgccaggacctcggtcactgcagttccagcaggcgggcgaccagtgtcaccgtcgtccggccaagccctcgagccagagctccatcgccttcgcctgccgtcgcatcggccccacggagacggccctatgcttcatgtgaaggtttactcttcacaactactcaacaagataaagcctggcttaatcagggaatccaagcactgtttcctaggctgacctcagtgagcaaacaattgcactacggtgccaacttgaaacgtcaagagaagcaaataactctcgcggcacctcaggcttggaatctcagaacgggggtgccttgatactcccagtgcgtgaggtcagcccccacgccctgttgagacacacatgcctaagcgctccgcctgcaacac

SEQ ID NO: 330941 - DNA, 877 bp, Homo sapiens
  chr1:115631850-115632727
  hyper
cgcctccgcgtttgagcacccagccctccccacgagcgcgactcggacgccgcagtcagcagctcggggaccccggccccgcgcccgccacccggccccctgccctgaccggccctcccggctcctggtctcacccagaagagcaggttgaagccaagcagcaggtacttgatgcaccgcaggcccccgcggaagcgccccatgctgcggcccggcggcgggatccccagtccccaggcccgcgctacgagcgcggggagcggcaggctccggcggggagggggcggagcggggaggaccggggcggggcctccggggggcggggcggggcccggcggggaggggcgcgtggaccccaagcggcgtggctggcgacgggtgggggcgccagcgggtggagatcgagcagcccgagggagcacgttcgctcttctcccggacccagggaccaccttccttccctccagtgggcgcaccgccgccggctatcggagcacctgcagggcgggagcgcccaccggggactggggacccatttaatcagcgccctgtgcggagaccggtttgaggcccgggcgatgcttgagggataagcacttggtctcgtggctatggaaatctaggaaggtgacctcgggtagaagagctaagtggggtcggaggttgccccgaagctggcaggaccagtcgcggggcacctgactgagtgtccagggctgcggctccgcggcgcggagcaagcacacaagcagcttctaggggaccctccctccggcccctcccccctcctcgggggactcttaccttaataggcaagaactgagagagggtgcgggaggcggcgccctgagtcctgtgggctgccctcaacccagcc

SEQ ID NO: 330942 - DNA, 803 bp, Homo sapiens
  chr1:115880147-115880950
  hyper
ctctacctgaggttgtccaacgcggctccgtggagggccccggtacgccggacggaccccggcgttggctcgcagacttcctgcgttaacccccggggccctcagtcacgactcccagcccttccgagacgcgctgagggaactgccccaggtctagcgcgccccgttccgctcctccccctacctgggggccgcgcagcactttccctactcggcgctcacctcagccagcgcgctctgcgctccccccgcggtgctggccgccactcctcccgccctggcgcgccagctgccggcgcatccctctccgcgcccattcgctctccctcacttgcgcgttatccacttctagccctcgagctagaccctggcatggccgtgggcttctgcaggcgccagggctgctccctggactgcaggccatcctgggactagggactccacgaccagaactaacgctgttccctcggtccgactcgtcctcccgcgagggtcccgcgcccccacacccactcgggacatttctcagggctgctcttcggcctgcgggagcctcgggggtaaccagagagctcgccagaccggtatccttgcaaactctcccgcgaagcccagccacccctgcccgcgcccgcgctgcgcccctctcgggatcggctcggggcagcctgactcaccgctgcgctcccctccggctcccagcgctctctgctgtgccggagcgccgagctgctctcacacaggcttcttgaattcttagcccctcctcccgtactcctgagtcacacgctccaaatcctggc

SEQ ID NO: 330943 - DNA, 61 bp, Homo sapiens
  chr1:115881153-115881214
  hyper
agtttctggggcaccggcaggggtcgttgggccgactggctggggctgggcggagttgctc

SEQ ID NO: 330944 - DNA, 1132 bp, Homo sapiens
  chr1:116184428-116185560
  hyper
cgaggtgagggggacgccggccgagccccgccctccgctgcaggtgggccggccccgcggcggggccggcagcgctagctgttcttggctcgcggccgcgccgggctcgcagggctgggctcgggctgcggggcggcgccgggacaggaagcggaaagcagcagtgcagcggcggcggcggcggggctctgcctctccaggagcccagcgcaggccgcagagccggggccgctgtgagccgagaccgcgggccgcggagctcgggcggccggcgcggaggtgagtcccgcgagaggccgagcgctgcgcggcggcggtccccggggcagaccgttggctgggagacgcccccacctcggaccccgcgtgcccctgcgccctcctcccgcattcgccccgccggacttcgaccccgggtggccggctcccgcctcgggccgggggctccctcccctcctccggagcgctccgggtagtgcttcctctgactccactcttctccccatgcgttgcgcccctcctggccctgccgtgcgatctccgccgcaccccactccttggggtcccggggttccctgctcacacctcggacgtccctttctccccgggctggcctttggagtgcgccccttcggtgcgcgtgccggggcggcgggcaggccggcagggagtggccgagcgttggaggcaccgggcggctgcagcagccgtgcagggcgggagccgggcgcgcaccggggttcccacccctggcggggctcgacccgggcgccgcctggcccttcgccaggaaccgggacagagctggtctgtgtgcacacctcgctcacaaaaaattgagccggccctggaggcctggggggcgagtccggttgcgcctcggagagcgcaacaggcaggtaggagtttactttcaaaaacgccggggtggagcagaggcgcctggcgggtctctgcccaaggtgtccctgctggaggaaatctcaccgcgccggggcagccttcgccaccggcaggacctcatttccttctgcagtctttgaactgccccaagcatcgcgcctagagaagtgtgaagctttataaaaatttaaacgcgtccgtggtggcggcagcagtggggcggagccgc

SEQ ID NO: 330945 - DNA, 543 bp, Homo sapiens
  chr1:116370923-116371466
  hyper
cgtggccgcgatcccacctgcggcgtccgcgtccgcccgctctccctgaggtctgcaccctgagaggaggggcgagcgagccaacttggggcagggatcaccgtgtccacaggcgcccactggtgtggcgtcctgagagtgcgtgcgtgagcgagcgagcggcttatcctagactgaagacccagggaaacagatctgtgtggaggatgtttctgttttcagcagaacagacgcagcccccgagtcagtgccgtcagaagacacgtcagtcaattcagtggaaaacacttccagtgtgaggcgttcgccggcgccccttagacgcggccgggtctgaggcgcctgccgagcgaggtggcgcggcccgggagctgtggtcgaagcccctgggcctggcgtgtaggctgcgcgggcggcggcgggctgggggcggggctctccgccctccgcgcgggtccgcctggcccctcccccgcccaccccgcgcccgtcccgcctcccccaccttctcccagaggaggtgacagacgggcctgtaatttg

SEQ ID NO: 330946 - DNA, 996 bp, Homo sapiens
  chr1:116381152-116382148
  hyper
cgataggatctggcccgagggcgcgagccctgcgcctcgccctggcgcgggagccggcggggacgcggttgacccaggccgcatactagactggacacctcgacttgcagacggccacagcgggcctgtggccctgggcctggggaacaaccgcaggcctgtggggtcgcgactgggtttttgtgcctcttccggccaaatgccaaccgcgctattcctcctccctcccttcgtccccttcccggacaaacgagcgatttcgaacaacgaatacatctgggttttcacgggggcggggagacgcggggtgcacttctcgccccgagggcctccggcgaagcaacccggcagccgcggcgcccgagggcctggcgctggtctggggctgcgccgggggcgcctggctctggggtgcggccggtcaggaatccccatcctggagcgcaggcggagagccagtggctgggggcgggaaggcttcttggacccctcgcgcttctccgaaatcgtaaagaaatgactaaacaaacgtgggggagcctttaaaaagaaaattgactccgatgccctcgcaggctcccggagcaccatctgtcacgcagacagccacacacataggggacctagggacacggcgacgtgggatcagacaatgcgcccggcagtctggcgaccaccttgcgggaaaatgccggcagccgggccgctgagggaggagaggatgcagagggaagggaagagaagggaagggcccggggcggggcaggcggggactagcgggtgcagcgcgtgttgtcccggcgggagctgcatctctgccggcaaagttcgggcgctcccggaaccggagctcggcaggctgcagctgtccccgggtggcctggccaagtccgggcatgtcggtgcttagccttcctctaacttaactgtgccctcttggaaacgccacctggccaggcttctctggggcgcctggagcactggcccggactgtgc

SEQ ID NO: 330947 - DNA, 670 bp, Homo sapiens
  chr1:116710669-116711339
  hyper
ctgggatcgctgtccgcagcaccagccttctcctgggacgtgttcagaaagagggaggctacagtgggcggggagagaagaaggaagagaaggtgggcagaaagggggcaagatgaagcggcaaggaggaaggaaaggagaagctaaggagggaggatggggaggcggcgacaatggccgcgctaccggtcgcccactgtgctgcggtgggtcggggcccactgcccctcgctggggcacctggggagggggcgctggggcacctggagagggcgcgcaggagcagcgggccgagccttctgcggggatggggtgggaagagaagaaatgaagacacagaggagtagaacaaagaggcgggagcaccccgccaggggaccgggaagggtcgaggaaaactgctgccgcgccccactgggttttaacaacgcccgggatgggggaagggctcccacttgcgccccaagcgcatgcggagaaggttcggcagcgcctcctgccggccgcccggagggtccgcggtggcgccagccccgatcgcagccgcgcaggcccgagggcccctacccgcacggtgaattgtcttccacgcactagtattttctcctcgctttcaactgaatggcggcattggtttcactatttccttcctggagctgtggttgaggcc

SEQ ID NO: 330948 - DNA, 777 bp, Homo sapiens
  chr1:117452644-117453421
  hyper
cggagccaggggcgcacgtacgccccagcgctgggatttatcggctcgcgaggagagcggagcaggcgcgcggcccaggcggaggagcgccgactctggagcagccggagctggaagaggaggaggaggagaggcggcggggaaggaggaggagggggagagtcgctcccgccgggcgagcatggggcgcctggcctcgaggccgctgctgctggcgctcctgtcgttgggtgagtgtgcgcggggctcagcggggcacacggggactggcgaggccctggagggctcggcggggcgcggctgcagcgcgcggcctggggcgccgagggtgcccgggctgctcccgggaaacccggccggggtgcgcgggttgttcggcccggcggggagcggccgcggggccgcccggagcctggcgcgaatccgctcgggccccgcgcgcggggtgcaagtggccgctccgccaggccgagcctcgcccccaacatgtgccggggggagtggcccggggccgtctttcccccaggtctccctacctgttggccgccgggagcccggctcaccttgaactcccggcccggaaggtgctgcggtcccggcccgggtcctcggctcgagagcggaaatgtgagcctttgatatgccccgccatagccgccgccggccgggtcgctcttcacccaacccgcgcggagttgcctttccagggaagcgagagaatcctccaacttccttccacgaaggtcacagggtggcccggagcgttacaatggaaat

SEQ ID NO: 330949 - DNA, 287 bp, Homo sapiens
  chr1:118149482-118149769
  hyper
cgctgcgcgtctctcagaaacttcttgggaatgcggtgtctgtgaaacctgcttcctctccttttgaaaatgaaacttgctttactgcgtaggtgaaaagccacggcaagtgggtcgactcggacggataccggtgcggctgccccgggaggtgtcgcagttcggggactcccttcgcactggtcgcgaggcaggagggagcagggtgggaggcgagtcagaggagggtgacttacctgaagaatacaggttggtagcctgcacacctgaactcaacgctggcgggc

SEQ ID NO: 330950 - DNA, 443 bp, Homo sapiens; identical to SEQ ID NO: 227455
  chr1:119522353-119522796
  hyper

SEQ ID NO: 330951 - DNA, 432 bp, Homo sapiens
  chr1:119528626-119529058
  hyper
cgggctccgtgcgatctggggcctcccaagagaaaacttccccgggacaggacgtctgccacgcgcagctaaacaacttctgttttttccgccgtggggaaaataaaagaaccttacaaattctaaggcgtcataacccctgcaagaacttctaactgtatgaaggcccacgcgagattttgacaatagataaatgagctgaggaaatagggtctggccagcgaagggaaacacacagtagccctgggtgcctttctggaatgcccacgcaggggtccgcgtggacaagcacttgcattcaaatacaggaaaaggcttggacggtcgaaataaatctccttttaattttcttttcatcgactaataaaaataattccccagcactaaactcaaataccgtaacgggccacaaaaacacggagaattcataaa

SEQ ID NO: 330952 - DNA, 712 bp, Homo sapiens
  chr1:119543781-119544493
  hyper
cgagggtgattctgttagcctcgcaggcccttctcccacccgtcatttgaagtcatcgaccccggggcagccccaacagttctgtgcgggcctgcgcgcaccgccctcaccttgcgcgccaggcatctcacctcagccgggcaggtgcagaggtgacaggcgcggcagccgcggttcgtccggccgaggggcaggaggaggctggccgccgccttctgctgcccgcaggctgagggggcaggggagggggaacagggctgggaaactgccgtcagcgggtcccggccccgcctcccgaacgcaacgtccaggaaacctcagaactttctattgtctgagaagcttcactgaacaaattgtccctaaaactttagagctgcgaagagcggatcagggcaggttctagtgtggccctgtgccccggagcctgcctgccataaagtgtgaccggaagcccccccccccccgcccactgtcagaaccactgaggagagaagagcgcggcgccttagtgccgccctgcgtcgtggtcgggaagccgagcaagcggtgtggacgccccaggagcagggggatccaggcctaaactcatgggttccgaatgggcaagggagcagaatcaagcatcggtgggcgcttatagaaagcgcgtctgtcttggaacacccttaccagggtacccaaccccagcgccaggtttcctggccttgca

SEQ ID NO: 330953 - DNA, 1138 bp, Homo sapiens
  chr1:119548810-119549948
  hyper
tccagatgccgctgcgttcaagctctcccagcacccgcggccgaagtaaataacaattctcttaatgctaaggcagcaaggagagggcactgcgaactgcagacttttcttctaaggatgaagaggacattataaaactgcacactacctccctaatggcccattcgtcctagctctgtctagtgaagtagagagcagaaaaaaacatctagctctatcaagttgaaaacattttcacattcaccttaaactggtgaagcaaacgggttttccctttactaacatcgctcttgtttttccatttagtctttgggaacgtagcctcaatcttaaccgcgtatgatcgtttccactgcacctgtgcgggagagacaggcgcatatccccgtggcgtcggatctctaaattatctaatctggcggctgcgtacgactcagggaaagccctggccgcgagctttttcaccaggcttgagctcagcagccgggcccgcagtgttgccgccagtggggaggcagggaggctgtcggcgcgccggagccaggcgggaaagggactacagccgcccgccgttgtagcgcaggaagcgggcggtgccaacacacacctcgcagctctgcacgttcttcgtgtcttggaggagagtagagcctccgtgtgaagctccgtccgcacctgacgaagaggagggcgtcttgcgccactccagcgactctgcgatgttaagacgcagacccgctgctgcgcctgcctttgtcggggcgggcgggcagccgccgctcggagcaaggtggggctgcggggagggagagccgcggggcagatccctggccaaggtcctctagaaagcccgctctgcgcccaaacgcgccgctcggtccgtgggccacttcggacctgacgctgccggtgaattcacgcgctccgggacgcgcggggacctttgacgaggtttttgaactggggatcgtcccctgtaacctggccgcgttacctccccaggtgagccggactcgcgggtgggttcggcagccggcgatgtggcaaaaaggcaacctcgccttatttctaggggcttggagatgaagagcggctgagtgtccccgtctaccccaacccgggtattaccctcttttcc

SEQ ID NO: 330954 - DNA, 813 bp, Homo sapiens
  chr1:119550506-119551319
  hyper
cacagcccaggaaacgggaaaggccactgtctgcttccctttcgcagattctatccgctggcacgcgaaggtcacacgggctctcaatgctaatttggaatgggaagcaccacgaagggttgaggtagcctggtggccctgactgcgcagggtgcggacagtgagcccgtatccagcttcgctgccacgcgcctagcagcccggcggccccggcccggcccaaggaggaggcaggccgcctgggtcggcttccgtggcctgggggtaagctctgattcaccccaaggtgaggtccccggggatgcccagattcgggccgggaaacgcaccgggagagaaccaccaagcgctcttggttatgaaccagagcttataactgtggccgcagctagacctaggggaggcctgagcgccgaagcctccgtttcctcgaccggaattcgtgagctattaaacatgggccctagcggggcccacgccctgtcttcctttgctgacaaggctccgcggggtagtgggcgggagacaagggtctcagaacagaggggctggcccggcgcggcgggccaggaactcccgggcgtgtgtgtgcagtggtgcggggtgggggtggaggtgaggtctcctttagttcctgggatctgggaatcccggcttctcgatctcatccggcgcggagatcttaagggtcggtggaccagttagtgtgtacggcctcacccctccgcctccagctttcgaggctctccgcttcagagctccaaaggaaaacttctgcgacttcaagaacgtcctgcgcattcacatggggtc

SEQ ID NO: 330955 - DNA, 198 bp, Homo sapiens
  chr1:147775411-147775609
  hyper
gacgcctgcgagggtcaggacggggcgaaggccattccgctgcccttccagcttcggaatcacccaatgcacggcaagatgtgccggcaagatgtgcctctcaggttttccgaggctttggagcctgcacaattgttctacaaaaggcagtagctccgccgaacgttggatcgtcccttggtctggtgataccagaac

SEQ ID NO: 330956 - DNA, 84 bp, Homo sapiens
  chr1:150586185-150586269
  hyper
cgacacttcagacatggaccttaacgtcaaaccaggattcatgatcactaaatgactttccttttgtacgtgtgagcaggtggc

SEQ ID NO: 330957 - DNA, 430 bp, Homo sapiens
  chr1:150669495-150669925
  hyper
cgcaggctgtagcttgtgctgtattttagaaggacacctgttctccccaccccacccccgtcctagtaggtgaaaaacttagccacgcagagagcacaaacttcctgatccttcgatgcagagaaggaataacacatcagcttcctcaggatcactaggcaacctaccttggtgtttcttcattgcgccaatcagaaatcaccaaggttgagtcccgccaatcggagctcacagggggaggctctcccccagctattctgttgcgatccagacaaacaccaccaaaaggaggcaggtttgcgttcaacctgacagctggtcaatccaatgaaggaaccttggtggaagagaggaaagagggctgcgctccccacccccattaaaccagccaatcaaagcgctgagtgagctaacatgggctgccaatctc

SEQ ID NO: 330958 - DNA, 77 bp, Homo sapiens
  chr1:150947664-150947741
  hyper
cggcccccggtccccgccagggtgggcacattcccacttccagccccacggggcgcgggcggaggagggtgcagccc

SEQ ID NO: 330959 - DNA, 797 bp, Homo sapiens
  chr1:151020083-151020880
  hyper
cgactctttcaccaccccttgcatcccaaaccttcggttctggcagagttcttgccgcagaggttccttaggagcaccccgcgcggcccgcgcgagcgcgcctgcgcgtcgaaccccacccccttccccgcgggcctcggttcaaacgacccggtgggtctacagcggaagggagggagcgaaggtaggaggcagggcttgcctcactggccaccctcccaaccccaagagcccagccccatggtccccgccgccggcgcgctgctgtgggtcctgctgctgaatctgggtccccgggcggcgggggcccaaggcctgacccagactccgaccgaaatgcagcgggtcagtttacgctttgggggccccatgacccgcagctaccggagcaccgcccggactggtcttccccggaagacaaggataatcctagaggacgagaatgatgccatggccgacgccgaccgcctggctggaccagcggctgccgagctcttggccgccacggtgtccaccggctttagccggtcgtccgccattaacgaggaggatgggtcttcagaagagggggttgtgattaatgccggaaaggatagcaccagcagagagcttcccagtgcgactcccaatacagcggggagttccagcacgaggtttatagccaatagtcaggagcctgaaatcaggctgacttcaagcctgccgcgctcccccgggaggtctactgaggacctgccaggctcgcaggccaccctgagccagtggtccacacctgggtctaccccgagccggtggcc

SEQ ID NO: 330960 - DNA, 154 bp, Homo sapiens
  chr1:151566699-151566853
  hyper
cggaggggaagacaatgctttcagagcacgtttagccggtgaacctgaaaacgaggatttttttcatttgcgaagtggaggtactcctgcgcgcccaggatgcagccactagagggcagcaagtcttccagcacctgtgcaggtggccgccgcc

SEQ ID NO: 330961 - DNA, 648 bp, Homo sapiens
  chr1:151693837-151694485
  hyper
cgggaaaggcgatcctttagagacccaccccccaagcccccgccccggagctcacccctcagttccctcagcccctagcccctgcttcgctgaaggggccgggcttgggggcagggcggggccgggggcggggcctcgccggctcgcggccggtcgccttgacgaccgcagcaagatggagacgctgccaggcttgctgcagcggcccgaccccggggcgcttagcgcagcgcagctggagcagctgcgaaaattcaaggtgggtgcgcccgcgcccccatccagcgtccaccaaagtgtagctgccccaggactggggccccagactgggaagagagccgccgagagaaggggagcgggagcctgttccctgataaagtggggagggcgcaggggagacccccggcggacctctaggcgtctgatcccagcacagagcgcgacgggcatctgagagtgcaggaagaactaactcagggactcggccagagaaatgggccgaaattactgccagacacatccgaccttagtaaaggcccctcatcctgaacaagcggcagaatgatattttatctgtaagaagatgggtggcttaaactttcaagcatcctggggaaagacttgggttaaatgcgcacgccgtttccc

SEQ ID NO: 330962 - DNA, 214 bp, Homo sapiens; identical to SEQ ID NO: 227502
  chr1:151801436-151801650
  hyper

SEQ ID NO: 330963 - DNA, 588 bp, Homo sapiens
  chr1:152080384-152080972
  hyper
cgcgctcctggcggcgcagctgctgttcttccctttccggacggagctgctcttcctctaggatttttctgtagcgttcttggcggcgcagctgctcttgctccgtttcttggcgcagctgttcctcctcacggaattttctctccagttcctggcggcgcagctgctgttcctcctggaggaattttctctctcgttcctgacggcggagctgctgttcctcttcgcggaattttctgtcacgctcttggcggcgcagctgctgttcctccccttcctggagcagctgttcctcttcacggaattttctgtcgcggtcgtgacgcagctgttgttcgcgctcctggcggcgcagctgcggttcctcctcgaggaattttctgtcacgctcttggcggtgcagctgctgttcttccctttcctggagcagctgttcgtcttcgcggaattttctgtcgcgctcctggcgcagctgttgttggccctcctggcggcgcagctgctgttcgtcctccatgaattttctctcttgttcctggcggcgcactttctgttcctctaaacggaattttctgtcacgctcttggc

SEQ ID NO: 330964 - DNA, 420 bp, Homo sapiens
  chr1:152487830-152488250
  hyper
cttccaggtttgtcgtgaggagctccgcgatgtcctctcaacagagcgccgtttccgccaaaggcttttccaaggggtcgtcccagggccccgctccgtgtcccgccccggcgcccaccccggcgcccgcctcctcctcctcctgctgcggctccggcaggggctgctgcggcgactcaggctgctgcggctccagctccaccagttgctgctgcttcccaaggagacgccgccgacagcggagtagtggttgctgctgctgcgggggcggcagccagaggtcccagcgctccaacaaccggagctcaggatgctgctccggctgctgagaggcccgcaacccccagcgctgcgctagagaaacccgcccagcccagagcgggcccgccccgctgcggctcccacgcggggctgggcctc

SEQ ID NO: 330965 - DNA, 77 bp, Homo sapiens
  chr1:153438391-153438468
  hyper
cggtggcgccaccgagcacccacctcgccagagttgcgaggcggttccacgtggctgggccgtccttgccggttctc

SEQ ID NO: 330966 - DNA, 976 bp, Homo sapiens
  chr1:153651442-153652418
  hyper
cgagccccggggtgagcgtccccgtcccgctcctgctccttcccatagggacgcgcctgatgcctgggaccggccgctgagcccaaggggaccgaggaggccatggtaggagcgctcgcctgctgcggtgcccgctgaggccatgccggggccccggcgccccgctggctcccgcctgcgcctgctcctgctcctgctgctgccgccgctgctgctgctgctccggggcagccacgcgggcaacctgacggtagccgtggtactgccgctggccaatacctcgtacccctggtcgtgggcgcgcgtgggacccgccgtggagctggccctggcccaggtgaaggcgcgccccgacttgctgccgggctggacggtccgcacggtgctgggcagcagcgaaaacgcgctgggcgtctgctccgacaccgcagcgcccctggccgcggtggacctcaagtgggagcacaaccccgctgtgttcctgggccccggctgcgtgtacgccgccgccccagtggggcgcttcaccgcgcactggcgggtcccgctgctgaccgccggcgccccggcgctgggcttcggtgtcaaggacgagtatgcgctgaccacccgcgcggggcccagctacgccaagctgggggacttcgtggcggcgctgcaccgacggctgggctgggagcgccaagcgctcatgctctacgcctaccggccgggtgacgaagagcactgcttcttcctcgtggaggggctgttcatgcgggtccgcgaccgcctcaatattacggtggaccacctggagttcgccgaggacgacctcagccactacaccaggctgctgcggaccatgccgcgcaaaggccgaggtgagacgctggcacaccccgtcccgccgcttagccgcagggcctcccctctgacctgccggaggcatcgggactttctctctcatctgggggcactcttctttctcctcgcc

SEQ ID NO: 330967 - DNA, 936 bp, Homo sapiens
  chr1:154297543-154298479
  hyper
cggtgctgtgtcgttcattcaaggagagttgagatacagtgaaatgagccagggcgaggagggagggtgaaggaacggagggcgggcggctccgaggagcgagagtcgggctgagggcaacctggcgccagggaaaattctggttattcaccacttctacagctctcctgccgctccctgcagaggatgctcgttttgcagagaaggcagtgttcctctattcccttcttccgaattaaaaataccccctcagagcgatctagcctcccgaattgttttttcttttaagatgcggatggacgtacgtgtgggggcatcccagcccagccacgccgaggctcggaagggctaagaccctcccactgccccgcacaaagatggctgctccctcctccccgctccttctcccctccccaaaaccccctcccgccccccggcccccgccgccggctccgtcacttccgccccgccgtggccgaaactgacacaaagtagcgggccgaggccccgggggagcggggccgcagctgggggggcgggagcccgtggggagccgagccgagcgccccccgccccagcccccggcatgggcagtacggggccgccggggcgggcgccgagcgctgagcgctgaggtgaggcgaggcgaggcgaagcgggggcgcccgggagcgcggggccaggagggcagagggagatgcggccgcagccgcggggctggaggggccggggagcgggtgtagactggggagcaccgggggccaagatttgggagctgcggccagacggggcggggatggcggccgactggagacgaggggctgtcgggttcccggggacggggcagagcgggggtctgcgtacaggatgggaggatggggtgccgaaggggcgcgtggagagcaggagagcggcgcgagtgccaaggagaagctc

SEQ ID NO: 330968 - DNA, 1133 bp, Homo sapiens
  chr1:154474305-154475438
  hyper
cgcaatttgccgccgccgcccccgggcttggcccgctccgacacggtcttcaggttcagggggaactccttgaaccacttggccgccatgagggggccccggccggctcggcccaggagcgtcggggccgtggagcaggcgagcgaggaagcccagcccagacacgcagaggcgccaggggtcggggaccactgcattccccgtgactggggcgctggaggccgcggcgaggccccgcgacggctgctccgtgcgcccccggccggccgtcgcccacgcccggcagggtggggttctcacggctcggggcgccgagcgggcgggcgctagcctctgctccggacacggcaggcgacaggcacgacgcgcggggggccccgcccgggctcgtcttcaacgcctgcccggcccgaggacaccgtggctctcggaggcggcgggcgccgggggcttccccctgctctttcctcctgcggtgggagaggccaggcccacggaagccccctgcggcccagcccacgctcccagggaccagagaggaccgagcggaggcggcgggagtatccccggcgcagcgacagacggtggacggacggcgagcggcccatcaactccgcgcgcccctcccctccgcggctggcgcctcccagccccgccacctcctgcccagagctgggggcggcggggtgagcgccatggcagaggcgggtcgggctgcgagctctggagaaaggggcggcggccgcacgtgcggatcggccgcgccccactgagcagagagcccccttctgccgccgacagcccgcgtctgcaccgagccggtctcggccgggcgctgccttcacacgcgcccaggagtgtcacgtgcgccgctcacccccgggaaggaagcccctcgcccacccactccgctctactccactctttctgcagacgttatttttggcggtagggcagaggttgcggcccgaggtccgggcgcagggacaacggtcgccagctcctgcgctagttccgttactcttcggtggcacacggtcctgggcagcgcgaggctcttcccgccgtggccgccggggattggctgccggcaagccccgccccgtgcccccgggctcagagggggcggagcg

SEQ ID NO: 330969 - DNA, 760 bp, Homo sapiens
  chr1:154971620-154972380
  hyper
cgtacccgttcctccagccattcttcggcctcagttcctttccatcattcgccctcaggccttcgcctaccccagcttcaaagaagcgaccgtaacctcctagctggctgggttcgagaagccggggacctgcgcctcctggtggctgatcggaaggaggctgagtgcagaggggttgtcttgccttctctgggacgtggagttttggaaactgttcccctgagcttcctgaagctaaatttgcctcccccggccttggggggcgcagagatcccggcggcgattagcgctgcgcggcagccggctccaacccagaggcccggaataggcgcggagttataaatagtgccacccgcaggtgttggggggagtcggcgggaggggggtacccctggcggccacggccccttcaggtgggttgggcggtcgcggtgggagcgctggggggcggggggcgtggggggtctgcggtctgagcgcccccagcggtttcctgggcggcgggtttttcgagggaagcggaggcagcggaggatgggggggagcagcggagaagaggtgggcgcctggcgcatgctgacgctccgcttgcagctcagccccccacattccgaaacaggcccccagacccactcacgcaggaccccgcccaggcaaagcctcgcctttcttaacacctgaaggcctcattcccccaggttctgcaagcatctaacttctatgcttctacccttcggcgcacgtggcccggccagtccgc

SEQ ID NO: 330970 - DNA, 515 bp, Homo sapiens
  chr1:155043346-155043861
  hyper
cggagtagactgggagcgactagttagcagccctttccctggattgagaactgtgggggtctcacccggctcccagcggccccaggccagcctccttttcgcagaaccaggcgggcgcgctcgctcccgcggctggggctggcgcgcggacgcgccgctgataacgcatgtgcgaaagagacgcggggcccagtcagctttctccgcactcagacgcacgccctaactgtcgggcgctcccacttgacacggacacacgcccctgccggccgcccagccccttgcaggtgcaagggcggatgcctcagcgaccacgggagccgggctggggaggttggtggggggcggggggagtcttaaacttaggcccgcccagccacaggcgctcaggcccagccggccttccctatacaactttcctcatagcatgcgcgggcggctgattcagtcccggggcgcgtccccatggaaagccagggctgagtccactcatggggccgagacgggctgcaggc

SEQ ID NO: 330971 - DNA, 87 bp, Homo sapiens
  chr1:155055094-155055181
  hyper
cggcattcgcctttctgcaagagaggcgagaggctataggggatgaagtggagcaagaagagagaacagtacgaaggggcagggcac

SEQ ID NO: 330972 - DNA, 333 bp, Homo sapiens
  chr1:155161748-155162081
  hyper
cggggctggcttgttgtccggggctgaggtgacatcgtgggctggcggggtggtggagcccagggctggcctggtgactgggaccgaggtgacatcctgtccccaggtggcagctgaacctgaagctggttccgtggccggggccagagtgacatcctgtccctgagtggtggaggagcctgaaccggggctgtggctggagagtacgctgctggtcatactcacagcattcttctcagtagagctgggcactgaacttctctgggtagccgaagtctccttttctccacctggggtagagcttgcatgaccagaacccgtaacaactgttgc

SEQ ID NO: 330973 - DNA, 903 bp, Homo sapiens
  chr1:155164146-155165049
  hyper
cggacacagaactatcctttggggagcagagtggtattggggacaggtaggcacgtagcggggggcaaaagcacacgtgaggtgcgtaatgcgcgacagccaagaggtgtgtgcggcagcagtgcacgaggggaggaagctatcccaggccgcggcagcacgtggaacttgggtcccgcagtcgcaggctgcgctctaggccgacggaagcagttccgcctgtattcagaaaacagttctcagccccaaagacacaggttggaaagaacactttaaaaacacttcggcgaggcacgggattggagcgcatcagatcagcaggcgagagaccaccgctctcgcccgcgcgccgcgcggcgcccgaggcgcagctttgtgtgcggcgagaccctggggcaggcgctgggcggggtggggacatctgacgtcagcgcgcccgggagcgcgggccggggaggcggggagccccccaactcgcaggccggagaaaacacgagtagctaggtgggcggccccaaacctcaactcccggcattgccaagcaacagccattcagttcggttgctgggacacgcgtcaccatggcgacggctccgcgccgcgcagtctgagtacttaaagagcaagcgcgcgcaacgcccgggcgtcggaaagcggccttctgggactccgcaaactcccgttctccctcccccctcccccttgccattccctttgccttccgggcgccaagtctctctggcctccaaggtgaacccaactccccagcgcgccccgggttcccgggtcgggccggcttcaggcggtggggagcgggatcccgggccccgggcgggcgggagggacgggacgcggtgcagtgttgttttttcccccgccaatattgcactcgtcccggcctcc

SEQ ID NO: 330974 - DNA, 200 bp, Homo sapiens
  chr1:155881090-155881290
  hyper
cggtcgggtcacgcacttcgtcttccttcactcgcggaggctccggcactgacctgtgacccctcccgcaaccgagtaagatggcgccaccggcgcccgagtcgcggaaggaggggcggggccactcagtgacgcccacagcctgccccgccctcttcccgcccctcccaggtccctaaaacccagttccgggacccacc

SEQ ID NO: 330975 - DNA, 35 bp, Homo sapiens
  chr1:156036276-156036311
  hyper
cgagctgcacggatcgagagcgccccctcacttcc

SEQ ID NO: 330976 - DNA, 665 bp, Homo sapiens
  chr1:156215233-156215898
  hyper
cgatgcctccagtgctgttcgagagcagtgaggtgtgtcctctcctgtgcctccgccttccccgtccccactggaggggcctgggaacccaccgggagtagcaggagaggccggtgcacaggaaggagttgagtgcggcggcaggcacaaagaactggtgcaggtggccgtgcagccaggaggccggcatggagtaggcggcataggggaaggcgcagcctgcggtgaggtgggggcgtgcagctgaggcctgaggggcgcgcccctatgtcccgcgtcccacccctcgccccgctccgggacgcccagaccccgcgctcccgcgcctgtccggctcacccagactgtagaggctgagcgcgccgtagtcgaggaagtagcagatgtggcgcatgcggggcgacatggagctgaaggtgtgcgcgcagcacgacgcgaaggggtagaggcaggcgggcagcaggaagaccagcagcggccagtggtacggctccgcacggaagccggggccgcccgccagcgccaggagccgccacaggaagtacctgcggcgggcgcgtgctcaggccgccgcggacccccgcgactgccgctgcagcccgtgggcctggacggtccctgcccgcctgggtaccccctctgagctcaaggccgcggcctggggc

SEQ ID NO: 330977 - DNA, 229 bp, Homo sapiens
  chr1:156326789-156327018
  hyper
cggccgctggtccctgctctcaatacctgaatgaactatttggctgaaagcctagggtgaggtgttcgggggacggagagcagggcgtggacttcgctccgccgctaggtggcgggctggctcaggacaggtgagcccggcagagagtgccggagggggaggagcccagcagggaagggcagaggggcaccctggcggtgggaggggatctgcgtaggacctcagcaac

SEQ ID NO: 330978 - DNA, 701 bp, Homo sapiens
  chr1:156357856-156358557
  hyper
gagggaaggttctccggaagcagccgctgttctggcttggcgcaagtgcgtgtggacgacagcaggatttcctgcccagggacatctggataagaggcccaaggtccccaggagcccccaggtgcttctgccctgtgtggccagagccccctcggccaggagttagaagctgctcctctgacctctggaggacccggcactccgaaccccgcgcagcctgggaaaggcctgagattccccgctattgggattcacatcacgacgcggcggccccaactcggggaggaattagacacggcgtgagtgtcccaagtgcggggcggtggccgtcccggggcagacgagcgcggctgccgcgtccccccacctcaccccgatattccgctcccaccgtcgggaactcccccaccgccgcctccggccctgcgcgccccttctcctttgtctggcccgcccactcccagccggtccgccgcgccgccccgcgcgccccggcccgtgcgcccgccgccgccgcccaggaacaatgcgggccaatgtctccgggcgggcgagccggctatgcaaatgcccaacggcctgtgagaatccccttcgccgccgcctgggcttccacggcctgaaaagggctggcggccgggcctgggtgggggaggcggccactgcatagggatgagctgttgtcccggagcgcccgggac

SEQ ID NO: 330979 - DNA, 1526 bp, Homo sapiens
  chr1:156390054-156391580
  hyper
cgcggctctagcccctcgctcaagcctctccctcccgcccgtgaggccggctttccccgggcccctctgcgcagtgtatggggttatttttactttcggttatctagctttatgaagactccacaccactcatacagctagataaccaaagataacaaccaaccccgcctcctggctgctgtcgccgcctcttccacgcagcctcccggccgccgccgccgccagcacctccgcagcttcccggtcgcccgtcagcgggagtaggagggaagggacacgagtggagttgagggggagggtgaagagagaaatgaagtccgagacaaaacaacaacaaaaacctcagacacggagatacagacacgacagagaccgaaaaaggcgtggaaaggacgcgatgacccgtggcgtcgaagtcggggagttgaccccgatccagacccaaaaagtttctggtgccccatttcccgctctcccattcgggccaggagcaggagttccgctggtcccaggtggaagggacgcgcgggcttttcgtgccacccgggaagaccgcagcgacccaggcagaggcctccccagcctcgccgggtctccactgcccttctctggaagatcgagggcgcatccgacagccagagccctgccttcggcggagcccgagcctggcgcgggatggaaatggggagccgcggtgccggcccggccacgtcgccaactcagaaaggcgttggaagcgaagcggagcccttgtgggggaaagagccggattcaagaggccgactaaaaggggaaatgggcagccaaaccccggaggtaaaaaccccagagatgtcctaataggaagcagggaaatcccggcgacccaaagagagaggaaaggctgtggggggcgggtgggggcgacccagagactcccaagcgagtctctcaaggagagaaggaaacagcagagaccccacccgggaagagatccgggagagtacccatgagaggggcggaggggaggaaagcagagggcgacagggcaggtgaccagagtcccaggccctgcagagccccggataaacggctttgttcaaagaggaccagagatcacccagggttgtgaaaatggccgggggttcgaggcgagcggtgctctaggggtgggaaaggggtgcgatcaggaacgggaaaccgcagccccgaagagggtgggggctcggccggcccctcgtggcggacgcgcgggcacgccggattccgaggcgctcgcccacctcgtgctccacgctggccaggccacttacatcgagcccagggtgcccatccgtgctctcccgcgcggtcctcccggccagttcccgcccctggagcgccagggccctgagttccagatgccggggctcagcgggcgccgggcagaggaggctgccctgctcttagcctccgccgagcctaggcgagcagggtggagcgggtctcacctcctagctccctcctctgcctctgccgcggctctggccccggcgcgctccggctcc

SEQ ID NO: 330980 - DNA, 933 bp, Homo sapiens
  chr1:156405338-156406271
  hyper
cggggccaggccaaaaccaggctggaacccgccggcagggcccccgaggcgcctctgcctgctctctccgttcttgccggcggcagcgattcggactcccgctttcgacaaagtctcagctccgcagcagcacccggcgcggactcgctgggcgcgcggactgagctccgggtggaaccaggaccctcgcgccctcgccctcgccctcgccctcgccctcgcccgagctggaccaccgcgagcaccgccgacgccagccgcagagccgcgggtgcgcggggaagaggaaacgaaagcgcgggctccggagctgaggtgagaagtgagcagaaagtgaaaagagaatccatcggaaacagataaaaaaggaaaaacaaaacccactcgaaaagaaagaaaacgttacaacaaaaaggataaagtaacgctaaatgaaataaaaaggagacatactaaaaacgttaaagttgttaaactaagtgatagaaaaggcgaagaaacaacagggctaggaaagggctccgaggcgcccgcagggaagggggccctagacggggcgatgaggcttttgggagcctccggccgcgggcgcggcggggtccggcgggtgcgcagcggccggggctcctccgcgcgctgcccgccgccggcacccggctcgggcgaagagccggctggacggtcagccagccccacccacagagagtcgcgggagcccgagggccgggagctgcgggactccttcgcccccacctctgccgcccgccgaacccgaccccgggaaatcctcctagccgccgcctcccagcgccgggtctccccgagcgtgtgctctcggctgcgaggccctgcatgcgcagtgtctgggttcgcggcgtcaagcggagcctcggtccagcctgggcagccgagagcgcggggactgctgaacgc

SEQ ID NO: 330981 - DNA, 195 bp, Homo sapiens; identical to SEQ ID NO: 227568
  chr1:156468708-156468903
  hyper

SEQ ID NO: 330982 - DNA, 811 bp, Homo sapiens
  chr1:156593638-156594449
  hyper
cgaggtcattcactctcatcgtggggccacggccacgctgccctgcgtcctgggcaccacgcctcccagctacaaggtgcgctggagcaaggtggagcctggggagctccgggaaacgctgatcctcatcaccaacggactgcacgcccgggggtatgggcccctgggagggcgcgccaggatgcggagggggcatcgactagacgcctccctggtcatcgcgggcgtgcgcctggaggacgagggccggtaccgctgcgagctcatcaacggcatcgaggacgagagcgtggcgctgaccttgagcttggagggtgaggcccttccgctcccgccccattcctgtgtagcagcgggtccgcctcgcctgggtctcccagggctccttcccagtatctcctccgcacccctggggaccccagctccctctcccaggccgcgccgcccttcctccccctccgctcccatccgctggccctccccaggatccccgccaccccctaggtgtggtgtttccgtaccaacccagccggggccggtaccagttcaattactacgaggcgaagcaggcgtgcgaggagcaggacggacgcctggccacctactcccagctctaccagggtgagcggccgaacccagcacttcccaagccccgcggagctgtctcaggggcccgagagagggcgccaggcgagctcagtctggctcctgcctatgacgcctcttatccccgacctccgccgtctcccgccagcttggaccgagggtctggactggtgtaacgcgggctggctgctcgagggctccgtgc

SEQ ID NO: 330983 - DNA, 656 bp, Homo sapiens
  chr1:156626490-156627146
  hyper
cggaactccatccctcaccctggttcctgtctcttagaaaaggcaccagcgcccctgcccaagagcccctccaggctcctgctaccccctcattctctactagctcttttgcaccgccctcctgtcccccttagtcccgcccctctcggcctgcggtagtggaaggagaccagccccttccaggggacctggccctctgggttttggggccctaagatgcccgcccttatgtgccgcaggcctccgcttctgcaaccccggctgggacgccttccagggcgcctgctacaagcacttttccacacgaaggagctgggaggaggcagagacccagtgccggatgtacggcgcgcatctggccagcatcagcacacccgaggaacaggacttcatcaacagtgggctgggagacagggcgggaggggcccctgccatatgctctcactctctctcactcgcctaaccgccttcctcattaacccatgcacttattccttggttttctcaagcgtgcattccctcactcattcgttcactccccttctcattctctctcccttcccaccctacgcttaggcagtggccttcgggaacggagagtggaggttcgcgcagtagagtgcgcctgtgtgggccgggccgccgtgcagggggcc

SEQ ID NO: 330984 - DNA, 812 bp, Homo sapiens
  chr1:156646447-156647259
  hyper
cgacgtctccatgtgtgccacgcgctcctggtagccgcgcactgccccgcgccacgcctcgcccagtcgccttgccagctcctctacctccggggccggcgcgggaggcccgcggggcggcgcggggcagcggggggcacaggcagcctgcgcgttcaggccgacgcgctcctcctcgtgcgccacgcgtagagcctctagctcgcgctccagctctgccacctggctactcagccaggcccgggcgcatttctctgcctcgacggcgcgccggttgcgggctacctcctccgtcgtccgctcccgggccagccgcagctgctggcatcggcctgccacgccctccagctcttcagccaggttgtcgcgcgccacctcggccgcgtgcttctcccgccagcgttggtcaacgagggcccgcagggccgccagctcgtcgtcggcatgcgcccgccaggaggtgtccgcggattgtgcccggagccccccgagctccgcgctgagcagctcattctgctcctccagcgccttgacccgggccaggtaggcctccaggcgccgattgagctcccacatctgaaacgactcctcccccatgcagccctccatcctgctcgtctgacccactgaggatggacagacgcggggcaccgggagaagggagcggctcgcagagcttttaggacggaagagaaaagagaccgacggggacaatgacggggcggggcggggtgggagtagcctgagcgactgagagtcgggagtgggagcgaggctattcatactcccgccaggcgggcgggaagaggggc

SEQ ID NO: 330985 - DNA, 173 bp, Homo sapiens
  chr1:156662234-156662407
  hyper
agtggaaatggggacgggcaaggcactctagagggccaagtgtcacggaaagagaaggaagttagacaggagaggagggggagggggctcctaggtcccatccttccataaagagccgtgggtctgaccccgatgcaggggaaaccaagtgtaggcagcaaggatgtgtcctc

SEQ ID NO: 330986 - DNA, 178 bp, Homo sapiens; identical to SEQ ID NO: 227587
  chr1:156814886-156815064
  hyper

SEQ ID NO: 330987 - DNA, 478 bp, Homo sapiens
  chr1:156818577-156819055
  hyper
cggagtacaacttgcgggtcctggcttcctgggtcttcatagcctcgctgagctccgccctcacctgcctgtggtcccgaagaaattggcctcgtccggtcccgcccccgctccggccccgcccccggcactcacgactccttgtagtacacgatgaagctgagcaggtcgcgggcctccagtggctcatagcgctcccagcgtagcaggatgcggtctgcctccgtcacgttggacacgaagcgcagggtgcgagtctggcctgggtggggcgaggggcctgctcgcaaccgcgcctgccagctgcttgagcgcccaccctgaccccgcggcatcccattcccagtgagacctctgaggagaacttctcagagtgtccccctcgagctttctccctcccccgggtgtgcgtgtctagtgtgtggccgcgtgtccaccggcactggggttggggtctcacaggcggcgcggtctccgt

SEQ ID NO: 330988 - DNA, 140 bp, Homo sapiens; identical to SEQ ID NO: 227590
  chr1:156862997-156863137
  hyper

SEQ ID NO: 330989 - DNA, 341 bp, Homo sapiens; identical to SEQ ID NO: 227591
  chr1:156863345-156863686
  hyper

SEQ ID NO: 330990 - DNA, 578 bp, Homo sapiens
  chr1:158083079-158083657
  hyper
cgggcaaaggcaccgagctcttggtgtggttctcctgggataagcccacagtcacaaacttgtgcaggaatgggggtaccgggaagcagcccggtgttccaagccttttgagattctccggacctgcgcgccgcccgctcggcagggggctcggcaggcgcgggcggcgggtgggggcgggaggctctgcccgctcggtggctgccgcggcctcctccgcgctgctctccacgcctggcttattatgcacgaggcaggcaatttgccttcctccccggggacccatctcggagacaagaaggtagtttgttctctgtaatggcttctgctggagtgcggcggggcccaggcgcgagcgggggcacgggcggggagttggcagcgaaggatgcgcccggcgccccccggcggccgcccggagcccgaggtcggcgcgggaggagcgctgactccgcgggccgagccctcccctgccctcctctgctcctccgtaactcctgagctgtggcctgcctttctgctgcctccacgtccctactcttcctttctgccaccccgtttgcttcttaaaggttgtc

SEQ ID NO: 330991 - DNA, 567 bp, Homo sapiens
  chr1:158150571-158151138
  hyper
cgtcccacacgttgacccaaagtctcctttgaaacaggaaattgagacacgccggttgtgaaacctactgaagtgagcggcggcgccaggattcctgggaccccgacctctttgcagctcgcacagctaagggcgagggcgcccttcggcagaagcagcaaaccgccggcaagcccagcgaggagggctgccggggtctgggcttgggaattggctggcacccagcggaaagggacgtgagctgagcggcgggggagaagagtgcgcaggtcagagggcggcgcgcagcggcgctccgcgaggtccccacgccgggcgatatggggtgcctgctgtttctgctgctctgggcgctcctccaggcttggggaagcgctgaaggtgggtggaacgagggcgcttgagtgcactcgcgggagggcggagagagggagctgggtagggacggggagggcaacgcctgatggggactggtgagacccgggacgcactggcgcgatctaggtagaaaactcgctgctccctggctccggggagaggcagcgcggcacagagttcgctggcatc

SEQ ID NO: 330992 - DNA, 915 bp, Homo sapiens
  chr1:159894400-159895315
  hyper
gaccacaccctgggccgttacaacagatgagtcacccaccgccctcccgccgctggggtgacgcagtggtctgggcagcccgcccgtccgcccgcggccaccaccggctttcccagcagcagggggcacccggtgggggcagcggcgctcgggcagggtaaaagcagccaccaccacccccacaacctcacacagggcaccccggggcgcagtcagggctgcagcacccagacccccgaggtcaggggaccgtcatagagatgactggagcttcacagaaggtcaccgtgcgacccatgcagagccccctagccccagcccgtgacctcaagtccccagaatagcaagctagcaggaacaggaatgaaaagggcggcctcggggactcagagggcacgcagtgctcacacgtgctcctggaaccaggaagtgaagggtcgcgcgggaaagcccaggagcacgagctggcccagggccggcgccacgacccggggtcactcggggccagccagctaaagtccgacgcccttttttcccctcgccccagtgaggactcagcgatggagcccgcgggtggggctcagtccctgagtccctgctccagacggacgccctgtctatgcatgggctaacctcgcctgacctcatcgtccaacaatgtcgggtcagggcttggggacaggacctgacagcacggggcggggtaaagtagtcaccggacccttgcctggtaccagcccttgatccccgagctcgctggagcaagttcaaagcgctggcttcttgctttctacacagcacgcacatgtccccgacccccgtacccccgacctgctcaccgttcaagcgggctggagagcggcgcactgactcaaggcaagggctgcagctgcaagtggtgcgccctgcccagcc

SEQ ID NO: 330993 - DNA, 374 bp, Homo sapiens; identical to SEQ ID NO: 227605
  chr1:160040181-160040555
  hyper

SEQ ID NO: 330994 - DNA, 75 bp, Homo sapiens
  chr1:160040592-160040667
  hyper
cgcgcagcacacggtgcccacctgcagcggctttctctgtaaggaaagataaggccggaaccctcagcgaagtgc

SEQ ID NO: 330995 - DNA, 733 bp, Homo sapiens
  chr1:160370125-160370858
  hyper
agtgtcagccccaccgcggattcccaggatcggggagggccgctgggcatctgaaggcgcagggctgggggagcggcgactccgggaagagcggggccgcagacaatggacgcggcggtaggaggggcggcggctgtgggaacagccgggaggcggcacccgggagctcgcgctcccccgccccctgcaccccccaccctcatcccctccccctccgccccctcccccctgcgccgccggctcccgatctgattcctgatccttgattccttgatccttggtcccgccatgggagcctgagcgccccctattcccccctggcccccagcccccggggccttgagggggaagaggcagcggtctgggacggagcagggggtgaccagactcaagaacccccccctcaacatcccccatcgcgcgcgctgcctgtccaggagcgccgagttcggagcgacccggagcgctgcggatacaaaggcgacgggccgagcggggcgcccgcggagcccacccggcagttcgcagcggcgggtgagtgccgggccgcgggggcgcgggcaaagtttgaaaaaaaaagaagaaagaaagagagagaaaaaaagaaatggaaaaggaggaaaatcatgcaaggggccagggggtgcccgaccccagagcgagcggggtggcttatgggggaaggggggctggactccgggcaacccccttccggtccgcttccccactgcac

SEQ ID NO: 330996 - DNA, 396 bp, Homo sapiens
  chr1:160983499-160983895
  hyper
cgatcagctggctcgggtcctctgaggatggcagaaagtggtaatggcagggtaagacaggctcgctttcactccctggctccctcccgccctctctgcagaatttccggttctacctgctcagctcccccgccaccccatcttcccagtgcaagggaaggtcgagccttccagcgcaggacttacttcaggggcccagcacccacttcctgccagccagctgcttcctcctgttccgcccctacattgtgaaacaaatgacgcagccggactttagacagaaaccctgcttatcagggagtccaggcagatgaactctgggttctcaatgccaggaaaaccctagtgtgtatccactctcacagtatgtgttcactcatactgctttccacaacc

SEQ ID NO: 330997 - DNA, 933 bp, Homo sapiens
  chr1:160990384-160991317
  hyper
cggctgcgcagcggggttcgtggatgctgggtggccgttggaggggcaggctggcccttcccaggtgcgtgtggagcgcgcgctgggtagatgagtgtggaagggtccttggcccgacggccctctccagtgaggacgaggagtgtacctctggtgtgtgcagatgggtcagctccctcctggtggccgtgaggggtgcggtcacaactcaccagtgtgggggaggggagccagccactcacccagctgtgagagtggtgaaagagggaccagccaggggtggaaaagataattcgcagaacgatataggaaggtttctgagctcctcccctcccgcgggctaggggcgtggggagagccttcctccaacctctgacccgaccaaccgattcctcccgaaactctgggaacttacacaacaggatcgccaatatgaagaggcacaacagtttcctctcgacttgcgcctttgtccccatcgcgatcaggctcccgacacaacagccgccgaaggactcctgggaacagacacagctccgcgactacagcgaggggactgagagccagccgccaggtggaaccccgcccggccccgccctccgcgcctgattggccagctccccacccctgcacgttccgattggtgtaaggaaccgctgctcttcagaacgagtcacctcggccaggtgttaccccgccgccactccccgcctcggcgcactggcgcctttccccacaggagctgcctcagattggcccaggagactgtcgcgtcaggagacgaattccgcaccttcagcaggtgacggccccctgattggttggtgttcccgaagtagcgacttcctgactggctgggttctcagttggagctagagggctgagaagtacctctaaggaggaagtaggaaaggcagtcgtggtgtgggattt

SEQ ID NO: 330998 - DNA, 367 bp, Homo sapiens
  chr1:161195526-161195893
  hyper
cgctcacaagtttttttccgaccttggagaggcctagtgatctaaagccttccacttaagtctaaggggccaccaatcaagtcctgcccgcctctgcagctccagggttgaagctcttgggccgtcagacctgccactcattttcttcctcccttcccattggcccatggtaaatagcgaggcttttttttttttttttttttttcattgattgggcggggcccaatcagggttgggttgggtctttgacagctttctttgccagattcaaagatggcgcttacggccacgctaagaatgcagcgtgaagctgcagttctgccatcactcaagatggctgcccccatcaagatgaccggggtgtgcc

SEQ ID NO: 330999 - DNA, 187 bp, Homo sapiens
  chr1:161196150-161196337
  hyper
cgtcggaccatgtggaagtttctgaggctggggagccggataatggggggtggggcccgttggggggtaaaggggcaatagcgtcctttcacaggctaacctcggctcttcccagtcctctggactaaaatggggaacacattgggcctggcaccaatggggactttgccccgccggagcccccgcc

SEQ ID NO: 331000 - DNA, 746 bp, Homo sapiens
  chr1:161275470-161276216
  hyper
cgatcacttgtccgagttcaggcccatcatgttcttgagggcgtttttgaggctggttctgctgggggacttgacagcaggccggagctccgggctctgctcatcctttcgtagctccatctcgatgaccatcacctttgggcctttggcggactccacccctaacccccgatcccccgcccggcccgctaaccgctatttcttatccttgcgagactcccccagccccttggccttcttctcactgacagctttggtgcttctgctgtggtccagcattgcatacagcactggcgtctgggggaggggcgcacacatcagtcaccgagcgactggggcttgactgttcccatcccacccctcactgctgcccggcggctcccagggttctccttcccatcttgtctaggccccaagtcccgctaacctgccgcccgcgcttcgacgcgtcctttcctggcttgtgcaatttccccttctccatagcactgcaagaagagagactgctgtacgtttggcctcgccggaaccccttgcaccgcggacacagcttcctcttccccttggccctcccacccactggagtagtctccgcccagatgggggatagtggggagagggggaggggagctaggctccgccccttacctgagcctcctctgcagggccgcctgcctgcgtagccagcagtaccgaaccacgtagaaaagcagcagcagcaacagcaccaccccgaggacaccccc

SEQ ID NO: 331001 - DNA, 571 bp, Homo sapiens
  chr1:161368929-161369500
  hyper
cggcaatcagcgcaaagcgagataatcaccagcgcactcttggatctgtatacaggtttgtaaactatgtggaggaaaccgacccatcgcagtctcggccgaagaggccggagccggagccagagccagagcctgagcagggtctgaaaaaaggaccggccgttcaggactaggccctgaactacaacttgctcctcaggggtccgggtcggaagtgacgacttcattcactgagcagccatttccggttcccagtgtgtccgaagttccttctgggtgtcagaaaagacacaaaaactgacagggcggaaccgcgacacggtgcctgatgatatcaaaaggtctcacggctccggagggacccagtcgcccacagccgccaggggcgccgccggctccgagcccgttgtcgagagccgctcggctgctggggtctgcccttcagtccttccaactctcctcggacctagagttccgggatctcactgcgatctgggcgaattcttacgtagaattcgaaaggatatggggaaggaaaaaaacaaaaacgggaaccactttgtttccgccc

SEQ ID NO: 331002 - DNA, 678 bp, Homo sapiens
  chr1:161369566-161370244
  hyper
cggtggcaggttttccacaaatgactctgaaaagtcagaggctcaccactgtgtctctgacccacgagaaaagtacccgggcgggccacccacagcttcgggatcggggcgcgcagggaagtagccagcaaagcaggtaagtcccgggctgctcgcggcggggtcatgactgagggcacaggggtgaactccatggtgcttcctcaggaaacttccggcgcagtcagggctgcagccagagcccggagatagttgggcagggctccaggcgtccccgaatgctcgtcgtggagttttcctgatcctgtcgggtccctaaggaacgcttggcggggagcgtggacgccctggggccaggccaccgcggtcactgagagccacccccccggaaactggagaaaaacggagtagaagagacctaggggacagacttggccgggtcaagggaaaccagctcatatttggaacaaaatacgccttatgtttgcccagcactgaatttagaagcattttcacattctcgagtttaactagttttgcaacagtgccacgagcaaattattaaacgtgttttaaagatgaagagactgaagctaggtaaattggacttgggtaagatggaagcgctacttaacgttaaggagagtctgcgaccctgatgttctcaggctgtatctc

SEQ ID NO: 331003 - DNA, 835 bp, Homo sapiens
  chr1:161409868-161410703
  hyper
caagcctccttccccggcgcacaggcacgcagccacaggccaagctgcgacgcgagctccgcgcgcgggatctccgcaaaaggtccgcccgatgcgttgggcgggaatcgagcccgggtcaactgcttggaaggcaactatgctcaccactataccaccaacgccgcacggcgcgggcagccccgccgcgccggcccggggctcccaccagcgcgccgccgacgcccggggcaggccggccccgacgcccggtccgtccgcccgcccgcagctccgcgctgccgcggcctctccaaaggccgccccgcgccccaccggtgcaaggccagcgcggctgacccgttacgcccgcctgcctctgggggcgctctcgctcactcgccgcctcgggcccccagagcccttccccaacaggtgcccgggggggaaacggccggcgccggcagggtccccactcctacgcttcccaccgggcgcagggccccgtgtgtcgcagaaagcctcttccgacaaccactttgagccggcagctcgttgggcgccgtgcagggccagaggaggcctcccggctgccgctaccaagccgcggacgagaagaaaagacaggaggccaaggaggcccagaaggccaaagggccaggcaggccaggcccgagatggcaccctgcgactagctggagggcggaggaaggagaaggagggcccacaggctgggtccgaggcggcggcccaaaaagcacggctgcctccccgtcggggaatcgaaccccggtctcccgcgtgacaggcggggatactcaccactatactaacgaggacgacggcgacggtcgcc

SEQ ID NO: 331004 - DNA, 126 bp, Homo sapiens; identical to SEQ ID NO: 227630
  chr1:161494853-161494979
  hyper

SEQ ID NO: 331005 - DNA, 156 bp, Homo sapiens; identical to SEQ ID NO: 227631
  chr1:161509889-161510045
  hyper

SEQ ID NO: 331006 - DNA, 143 bp, Homo sapiens
  chr1:161510105-161510248
  hyper
aagtcgcattttgtgaaccctgggtttttgaaactttgactgaaaaaactgcgtgcgatgctatccgctgggagcgctggggccttggcgctcaaaaccagccgcggtgctaaccgcagggagctctggtagcagacctccgc

SEQ ID NO: 331007 - DNA, 459 bp, Homo sapiens
  chr1:161582200-161582659
  hyper
ggacatgaggagtgcgggggggaagagaagacggcggaggaaaatcccccggcggtgctcaactgcggctttctctctcggctgtgagccggctccgccctccggcttccagagcaagtggcttctgcgttcaccgccccccgccgtttgtggggcggggccgattcataagaatcggttctcaccaatggagggcttagcatgtttaacctcaggatcataaacaaaagacactgctagaacggtcgggaaagtcatacgctttgcttatcttatatatagatttctaaaattccaaaccggggacgcgttggtggtgtagtggtgagcacagctgcctttcaagcagttaacgcgggttcgattcccgggtaacgaaacgtttttgtctttccttctacgaaaaacttttctgagccggagcctccagcgcgctgtgtattcgttttacgcctcaac

SEQ ID NO: 331008 - DNA, 431 bp, Homo sapiens
  chr1:161591323-161591754
  hyper
agggctgtgagccgcgccctgaagcacggaaagctaattgtgtcactggtttcaaatcaacttcaaattttttggagacgtaagagtgctgagcattttttcttcagtgaagtgacttggcagcccaggtcgccaacgcccgtttctgtagcgcgatcggttagcgccttcggctgttaaacgaaaggttggtggttcgttcccaccccgggacagaagtcccacttttgtgaaccttgagtttttgaaactttcactgaaaaaaaccgcgtgcgatgctatccgccgggagcgctggagccttggctctcaaaaccagccgcggtgctaaccgccgggatccctggcagctgacctccgcgttgtgtggttcccaatgtcctcttctgccttagtgctgtacgggtaattttgaggtatttggtttttcc

SEQ ID NO: 331009 - DNA, 562 bp, Homo sapiens
  chr1:161695645-161696207
  hyper
ttcgagggtgagccgctagtcctgcgctgccgcggctggtacgacaaggtggtctacaagcttcactactaccacgacggccaggccgtgcgctacttccactccagcgccaactacactgtgttacaggcgcgtgccagcgacagcgggcgctaccagtgctcgggcaccatgcgcatcccggtggagagcgcgcccatgttctccgctaaggtggctgtgacagtgcaaggtgggagagaccaggggccccgggagggaggcaaatgagcattgagaaattctgggacaggagctcggcgagaaaagaaggggcggaagttcaaatagctgccacttggagggtttctcttagactatggacgctgtctcctctcctttgccgtgaagcagcgcttgatccgccgcctgcttggaggctggtccctttccccgacgcacatcctggcttctcactctggctggggactcccacagagagggcagctctggcaggggcaggggccactgtgggactgggacgaaggagcgactccctagcgtcctgcaaggcaggcgcagc

SEQ ID NO: 331010 - DNA, 69 bp, Homo sapiens; identical to SEQ ID NO: 227637
  chr1:161697227-161697296
  hyper

SEQ ID NO: 331011 - DNA, 903 bp, Homo sapiens
  chr1:162039148-162040051
  hyper
cgaaaacaaaacaataaacacggcccctcccccctctccaaaaacaaaaacaaaaacttcaaggccatgccgccgcggccatcagtagctccggctcagaatttgaccgttaaaaaaaggaaactaggctgagctagggcacctcagatcccggcagtctggggccggggcgaagttgccggcgtcgcgcggccgggggcgcgggcagggccgggcgcgactctcccggggactttcacctgctcggctggcagcgcgggcagcgcgggggcggacccggcggcgggcggggcctctgagcccggcgggaggagccggcctgggcccgccccacaggaggagccgctcgctggcggctgatccagcgtctccgtgacaggcaccctgctccgccgccaccgccaccgccaccgccaccgtcgccttttcttcttcgtcccgggcggtgcgttccactgctctggggccggcgccgcgcccagtcccgcttcgggccgcaagccccaccgctcccctccccgggcaggggcgccgcgcagcccgctcccgccgccacctcctcccctgccgccctcctagccggcaggaattgcgcgaccacagcgccgctcgcgtcgcccgcatcagctcagcccgctgccgctcggccctcggcaccgctccgggtccggccgccgcgcggccagggctccccctgcccagcgctcccaggccccgccacgcgtcgccgcgcccagctccagtctcccctccccggggtctcgccagccccttcctgcagccgccgcctccgaaggagcgggtccgccgcgggtaaccatgcctagcaaaaccaagtacaaccttgtggacgatgggcacgacctgcggatccccttgcacaacgaggacgccttccagcac

SEQ ID NO: 331012 - DNA, 457 bp, Homo sapiens
  chr1:162792156-162792613
  hyper
agcctgtggtggaagatgtgcgaaagggatgggggaacgctgtggaccggtgtggagtctaggacgacaggtggtgggctctgtccccacgcgcctcgcggccagcagaggccccctcactgcggccgccgggcgggactggcgcgggcggcgctgggctgggcccgggaggctggcatccctgggtgctccggtgcggtactagggggcgacggctgagccgtgggtggagccgctgggtcagtctcggatagaaataaactgggaaactgctgtggtctctgttgcttgcgtgctcggttttcgtgcttatcacgctgatgatgaggaaggtggttttggttacggagtgagcaggtgaacgcctccccgtggaccccaccggactgggtggggaactcacaactctgacgccccgtgactgcatcccctagctgggcagagacgcatttggctc

SEQ ID NO: 331013 - DNA, 55 bp, Homo sapiens
  chr1:163378364-163378419
  hyper
cgcacgcacacacgcacacacacgctttttaaaaaacagaaatggctcggaaagc

SEQ ID NO: 331014 - DNA, 331 bp, Homo sapiens
  chr1:165086756-165087087
  hyper
cgccggccgttctctccgcaggtgcccggcccctgcctccgagtgcgcctcgcggagcgcaaagcgctgtcacgactcggtggccgaggtgattaattagcggcgtggccgtgcgggggacgcgtgctggcctccacatctgccccgtgccagcaggggtcaatatgcggtgtcactgctttccctctcactccctccaaagcctaattggctgtgacacgcgggccagctgttgtgagaggtggagcgcggcgggcgttttccaggacggaggctgagggcaggttgacgggcctgtggagaatgtgtgctgcttcctgcaggcgaccac

SEQ ID NO: 331015 - DNA, 956 bp, Homo sapiens
  chr1:165204497-165205453
  hyper
gtagcgacggtgtccgtgcgtttcttcactagtgcatgtgcgaggagggctggaggcatgagcgaaagagggaaggcaatctcggtctccaaaaaatccaggggactctccctttcagcacaagcgctcacacgtgcgctcgcgcggacacacacacacacactcacactcacacacaaataaatccccagcacctgcctcggaaagccctctctcgcaggctggcccgaaggcgcggctccgccagcggagagcctttggatttaccgtggcattacttttaattaactctgcggcgcggcgcggggagcgcagggtgggccctaatcccgggcccgcctgacgtcacctgggaacgcgcggcggcgcggggcggcgcggacccgggacgacctcgccgcgacctggcctcgcctccgcccgcgcggggctttgctccgcgggaattaaaggaaggagaaatgttagtacacttttaattggaaaccgagttcttctttcagagcggcttgtttactcaggattgggcattagaactcaggggaggctctaattgaagtgacggctttggagattatggggaacatatggccctaccgccgggctctttatctgcattttctcataaaactgccgtccgtgtgtgtttctgcgcctggcctcttgcatttctaaggggcctttgaagacagggccgaatgcgcgcgggggcttcaggcactttgcgctccacggcgggtcccgcagcccggcccgagccggccctggaagcttcgccctggactagactggcaccgacgccgcccccagcctgagcgctgagagggaaaacgagagctagaaaggaaagaaatcggactggtgactgcctggcaggggtgtaattcaaactgttgtgagcagacggcaggagggagttgccaaggtaacgggtgattcccacccgccgccctttc

SEQ ID NO: 331016 - DNA, 529 bp, Homo sapiens
  chr1:165414053-165414582
  hyper
cgcagtgaagcccaagggagatacttacctccatagcctgcgggaaacttcatgaagtgagaataatttccatacatgtttactcgtcagttcatgttcctctcctgtgcagcttctaaatattaccgcctctctcggctcccaggcacagcccggctttcttcaacttgggctaacaagagtggtcatcgcttcctagcagcccggggagcacaggctgggccagccctctgggattagtcaggaatctgcctctagatcggagagtccacatagtgcgtttgagacggctgtggcggcagcagctggtgcctgtcagtaatcacgcataatgctgccgccgccgccgccgccgccgtcaccgctactcttgccaccgccgtcgctgctgcttgagatcctgttgctagtttgattaactcagggttgggctgctgcgtgcgactcttccagctcccggcgcgtccccagaggtccctaccgggtggcacgatctattatctaggaagccaatcgatgtatgaccgcc

SEQ ID NO: 331017 - DNA, 805 bp, Homo sapiens
  chr1:165737832-165738637
  hyper
cgcgatctttcccctggtggcacaggggaccccggggcccttcctcccggggactgatcaaacgtctgagaaatacccgctctcaccctctgcgagcagagccgtgcacacagagataaaaacgatgaggagagtgtccgcgaacatagtgctcatctcgcaccttcgtctctgcactctcacccgccagggggaaagcgctctacagccaggaaaagtgaagcgaaaacggcttccgtagactccgccaccaccgagtaacagaccaactctgacagcccgaagatcgcacttccgcttccggggcatagcaccggaaaggctcgtatcggagaacggtgtggccacgagagtctagaggaaaccaacccgcaactcactggagctgaagggctggtagtcaggccgaatctcgcgagaattggaactatttcagagccagaggaggatagtggcggcggcgaactttgcccggtagattttactgactggggtgctggcgcgcgcctttttctcggccagaatccagttattgggatagtcttgacttctacctcagcccaacttctgtggtcgtaatattagtttagcttgggtttgccgtgaagtaagaagactgacttccgcaaaggtactgaacgactgggtgtaggtgccagggcatggacgtgaagctggaaccgcgaaatgagttagttgtgggccgctggcctcaaggagcgaacgtcagcgcgaagaggagaagcttgtgcatacgctctgataagggttttaatagaggtattaccacagtgctgcgtgacac

SEQ ID NO: 331018 - DNA, 2034 bp, Homo sapiens
  chr1:166134181-166136215
  hyper
cgttgccacctgctcagagtctagttctgaaaggaggcgggtgcggagttatgaaaatttggtaaatataaaagtcccggacgcgaccgcccgtagcctgcggcccctggcggttgaggagccgcggcgatccttggtcttcaccgcagcagccaagcccggcgcgcaccaaccggcgctgctgaaagttggagagctcccagctcgccgatagaattcggcggtgggcgccaggggaatcccttccagtgccgcaattaggaaagttttaaaaagtaaggaccctagacagacaagagatccatcctttcctttagcataagaaacaccccgcgccgcgccagccgaacgctgctcgcacaaggctatccgcccttcttggccgggacgcactcggtgccttccagctccccaccagaactggtccagggggcgcggaaacagagaggcaactgtgtccggcttgtggttccagacggaaacgcctccgggctccctggcccgggggacaagggttcgaaacttcaacagtcgcgagggcaaggacagaactaccaactcccgctcggatgcccgggacctgctcttccaagcccgctccggtttctccaaaggacgcgcggcacagcccatgcgcccccggcactccactccactcctctatggtttcccccaaactcttcccggggagccccacaaagcacagacggcgccctgaaactcgccaggcactcgccagccatccccacctccgcctctcgaaccctccttgtcgcgttcttcccgccccgcacctttctcctcgcgtttctgggaagtcagaagcaaaccacgagaaaatgccttcgcaaggagcctccctacacccgccctgtcactgaaacaaaagcgtagggaggagggaggtgggagaggaggcgggaggaaggtttagaaagacgatggggacagcagtaggaaggagctggggaggggggtcaaggtggcaagcagagctgggggcccagagtccgctcccgtgccgcgcggcgagtcgcttacatgcccaggtcgctgtaggtgttgaagaactccatctgattgcacgcctgaatccagcccaccacccaggtctcgtggcgggggatggggggcatgaccacgcgggcggaggctttgaagtagggggtcttgtagcgcaggacgatgggcgaggtctcctcgatgcgcgtggggcactggtcgatggtggcgcacacatcgtacaccacgatgttctcgcgccggatccgcgccttgcaggtgatgctttggatacagcccatcctgcagcccggtgccggcacggcgcggcgtggggcagcgcgggggcccgcgcgggcagccgggggcgcccgtcacgccggcatggcgacgcgccgctcgctcccggtcagactcagctcgcacctaggagcggggagccgccgggcatccttggggaagccccctcctcttgcagccgcgcggggtccccgctgccccgacgtccgcccacgcccgccccctcgctccggcagggcgcgcggagggtgcactcctaggaggcggcgggtgccctcgccggctccagcgcccgggcggagggcagggaggggagcggcgctgcgaggaatggtgcccaccccgggccggagccccccgcccctcgccggagaggaggaggcggcagcggcggcggcatggagccgggggagggcggcggtggcagcgcccggtctgtctgcctccgcggcggcagcagcagcagccgccgccgccgccgccgctgcatgaacctctgcaccacggctgccccccgcgtgcagcgcacccagcggcgggcgagcgggcggcccaagaggcaggcggaggcagcagcggcggcggcggcgaccggagctcccgccggccccgccccgtagccggaccacaccgacactcctcggcccggctgcctcggcccggggggcgccaggaggctgtggcccggggtggagagccccaacggctggagcagcacaggacgtgctccgc

SEQ ID NO: 331019 - DNA, 375 bp, Homo sapiens
  chr1:166916749-166917124
  hyper
cgcaagcctgcacgcctgaatagcggcagctggctttggagaaaaatgggacaactgtctcctgcccggctttcaagagctgccattctttctttccaggggctgagccaatttctcggtgccacccactctcgcgcctgcccccagcccccgtttcctcccccgctcgggccggcgcgggtccacccgactacaatgcagcgcgcggctgacccagctgctccggctcctgcccggggtaaccacggtaaccgcgggccgccaggaatgcgcgctaattgaaggccgagtttcctcccacagtgatgagcaacaagtgaagcaaaaatagtgaggcggaataaaggctgcgaggagggggcggcgggcgcgacc

SEQ ID NO: 331020 - DNA, 740 bp, Homo sapiens
  chr1:167599123-167599863
  hyper
cgaaaagagaggaaacaaaaagaattaaaggaccactctaattcttgaagggacaggaaaaagaaagaaggcgcattaagggagggagacgttgagaaggactgagaccgtggcaaagcccagggtcctgagaaacttcgcgagacagaggggcccggtggctgcccatccccatgtttgggcacatggagtcgtggctcccgctcttgagtcctgccctgggagggacagtatctgtttagatttgcgtctaaatttaaaccctgatcgtcggcctccctccccgctccccaccctcccctcccctccccttcctccctccctccctcctcctccttcctcgttctctcgcgcagggcccccgcggccggggcagtcccgcagccgagcgcagccgggcgcgcgccaccgcccactcgccctgtgcccgccgcagcccgaaactggccacggccgggagcggaggggacagcggggatcgtgagctccggcccgggcgagcgggtgcgtctgccgcagagtcggcacctgaaggacatggaggtaaaggaccccggagggagacgcggggctgagcggtgagcggtgtatcgggcgccccttccccgggcggctgcccctgccctgagcatggagcacgcggctcatcgctgctgccaactagaagggcaaatgcctgctgttccgacgcctccttgaccaactccgaaggatcgtccctggtcccacctaggacaccc

SEQ ID NO: 331021 - DNA, 263 bp, Homo sapiens
  chr1:168311912-168312175
  hyper
cgtcctggtgatggggtgggacggcaggcgccagcctccgtttttctgcccgtgggtatgtgtggttgacctccttaaatcagagccaagcgcgtgacccagaactctgcacaatcacccacgcccacggcaaagcagatgaggctctagagcttgcaagtctttatctagggaactgcgtcatcctcctcggtcggacaccaggtggcagcaaagctccaactcatcagtcaccccaccctccgtccaggccgtcttctgac

SEQ ID NO: 331022 - DNA, 328 bp, Homo sapiens
  chr1:169074766-169075094
  hyper
cgccgccgaccgggcaccaagaaagtcctcggtggctgggtcacgtgcagatattgttgcctggggtctagactggcctgagtctcaattggtttctacgggacaactcactgcgggctaccgccctgggtgggtttggcaattgtcctgctcgaggtggttcaggccgcccacaaggggcacagccgggcagtcaggaaccggggctgccggctgggctggcctgcaaagaagagggaagggccggaactgcaaccgcagtggcggggagtgcgagggggcggcaggtgcaggagcgggaggcggggcggagctgggcagagtcctc

SEQ ID NO: 331023 - DNA, 477 bp, Homo sapiens
  chr1:169396432-169396909
  hyper
ccagctataccagacgtttatacctttaccctctatcccaccattaacatctccgcatcgtccttcccttctctccctctatatccctcttgcctgtgtaaaatgcggcggctgggatcacagagatggccgggggagttctcctctcctcctctttctaagctcttcacattgaggcaaaggagaccccggcacctgcctccgcggcagccaggaccacactgccatggcaacagcgtgcctctgcgtcctccatccgggcctctctaactacgagagcgacaaaaatctgcgcaggcgcatgcaatatcctcagaccaccgacccctcccggcacccatcccggtgcttgcgaagggccagtgaagctgaggtttctaaggggacgactaaggaatccacgcatcactaacgttatagagactcgcgaagtgccgctgtgttggttgtgaaatttccctcttgtagctgtctctc

SEQ ID NO: 331024 - DNA, 308 bp, Homo sapiens
  chr1:170629362-170629670
  hyper
agcccaccctgcctcgaaactccctgcggtgatgtcggggctagaggaatccagggcttggtccctgcagctgaggcctacgggatatcccaggaaagagcagcctctccgtagtggtgaagagtctctcaagccttagcgctctggtgacctccgcgggattctgagaaaagcactgcggaacggcgggagcgggccctgctgcttgcttcgcgccccccacccgcccggggaccgcgactaagtccccgacgcagctcttcccttttcctgaataccctgggactctgctcccgagttccagctcc

SEQ ID NO: 331025 - DNA, 573 bp, Homo sapiens
  chr1:170630196-170630769
  hyper
cgatctgaggacgctgaccccctaaatgactgaggacgctggatctttagggggaacatcgtgtcttgggggtgccaaaagtccccagcccttacccacacctttgtcacgacgggcaattgggtatgtgtaggggaaaaacagcaacgttaaaacgcaactgtgtaaatgaggatagagagtgcgaaaggagggagaggcgaggagctgctctatttctagggaggttttggggagactgatcagctccaaggacagaccgctgggaagggaaaaacggcccacatcgaactggatgccggatggaaacctctctgcgctattagactgcgtccagtacagcagatggcacgagcacgtgcggcgctcagcttaggctctcggaggcagctgagttggaaatcccgacggaaagcacccacaagctcccactctgcgctggcccacccgcgtgcacgcccaccccccacgcgcgtccctggctcagaagcgcacagatgtttactgcttagagccggtaccgctggggagatcgagcgacttgcgcggcgcacagtgcggcgctggcagggc

SEQ ID NO: 331026 - DNA, 64 bp, Homo sapiens
  chr1:170631085-170631149
  hyper
tcttgactataggacgaaaaaaaaaaaaagtctagcaatcaagggagtgcgggagtacggatgc

SEQ ID NO: 331027 - DNA, 794 bp, Homo sapiens
  chr1:170633373-170634167
  hyper
cgggcacgttctggagcggcaaccggcgctgggcggccgcttggacagcccgggcaacctcgacaccctgcaggcgaaaaagaacttctccgtcagtcacctgctagacctggaggaagccggggacatggtggcggcacaggcggatgagaacgtgggcgaggctggccggagcctgctggagtcgccgggactcaccagcggcagcgacaccccgcagcaggacagtgagtgaggggcgcatgcccacgggggtgtgtgcccgggacagagggcggggacccgtgtagggcagctagagcccgtccgcggccagaaagacaaggtcctgggaccaggagaggtgatggcagacttcaaaggaagggccagtcacaggggaaaccagatgagaaaagcgggtctcggccgagggcatagccaaggaggacgctggagagaggctccaaggtccggggacactccgaggccctgcggtctcaggcagggactctgtccgcggcggactctctttacttcggctaggcaccggctcggttcatcccgcacgcggggcggcggggctgggctgggaaaaggtcttagcggggtgcaaactcagagagccagcgctgtttgggaaagcagcaggttaaagatgctgagtcgggttggaagggcttctctcgggcagcgtatgacggcttgagggagggcaccaggcacagggagcaggacttggcgctgctcaggctgcactctccacgcgggcaccgtaaggccgggcgcgaccgggaggccccgagagaacgccc

SEQ ID NO: 331028 - DNA, 330 bp, Homo sapiens
  chr1:170637507-170637837
  hyper
cgaaaccagattgtcctaataagaccttttgttggaaacacatgtagtcataaaaaggtagacggaaagtcaattagacacgcgcgcacacacgcacacattcacaagccggtgctaagtgtgcacccggcgcagctggctcccgggccgcggcgggatgcaaatacaaaacagcgacgcgggaaatcgatttgtcacaaagggagaggtgtaaacgcagcgcaaaggaattgcttgcccaatctaccagccacactctctcgggaccttgccccgccaacttctcttcgccagagaaacgcccaggagagcgggaacattttctagggc

SEQ ID NO: 331029 - DNA, 376 bp, Homo sapiens
  chr1:170640317-170640693
  hyper
gaaactttcttaacgggcagagagagaatacacggaaactcggatgcagtaataaagttgacataggagtcggaacagggggctctttttggatctcacctttactggggcttgaggttgtggaatgggtggaagagtaattaactgaatgaagaattttaacgttgaaaacagagcccacagtatttttggttatagtggtgtggtctctgcctcggcaaagaaacaaacacccccaccccatcttcgcagttctcctctctgctgtagcgacgccaggcgctgctttccgccgggtaaattagcggcgagcctcgccagacgctttcctccttgccttctttcgccgaaagggggcgcgctcctcccaggctgc

SEQ ID NO: 331030 - DNA, 346 bp, Homo sapiens
  chr1:171220542-171220888
  hyper
cgcagctggtgccccctcgagaggggcgctgccgcagttggtaccccgtgtgagaggcgctgccgcagtaatgacttactgataactcactgacttgaccgcgcgggttcttttcttaccttcgttttcgggcggttcgtcgcgtttccttcacagcattcctcacacagttcctcacacagcgcctcacatggggcaccagctgggggcagggctcctctcgaggggtcaccagctgtggggagtctgtcccttgcagacccctgacccaatgaccggtgaataaagtacgctgacacacagatattctgagggtcccaggtgcttacaggctccctgccgagtc

SEQ ID NO: 331031 - DNA, 1563 bp, Homo sapiens
  chr1:171810215-171811778
  hyper
cgcggattctggagaagggcgtgacagaggagatttcctttcgggaagtgtagtctggcagcggtgccccggtggtggcggcggcggtgctgctgttgctggtgatcgtgtggtggtgttagcggcgatagtgctttccactgggctttggcttggtagccgctgaaagagaacaacgctgccgctgctgctgatttcatgccatttcctgacccggcgctgtaacttggcctctgagccttggccacagaacgcagaggccgtggcatctggccgcagctgggctgcagtgcgtgcgcgcctggcctggtggtccgatgggaagcccggggcggggcagccgcggggcgggggcggggcgtcgcggagataggccacgcccctgcccgcccgcgcaggcgcgctgcgggtcgttagctgtcagagccaagcggcgggctggcggcgggctccgacgtctgcgccaggacctggctggctgagcccggcgcagcagcagcagccagggcagcgcggcccctactccctgtcaggtcgtagaggcgagcagggaccagctggtcgccggcccctcgggcaagatggggaaccgggagatggaggagctgatcccgctggtgaaccgtctgcaggacgcgttttcggcgctgggacagagctgcctgctggagctgccgcagatcgccgtggtgggcggccagagcgccggcaagagctcggtgctcgagaacttcgtgggcaggtaagcgcgcagggcgcggagtaaggatgcggcagtggggcgaccccgctgcgggccgttggaacgtggacgggcagcgggagccagagggtggatggaccaggcgctgcggtggaatggggggcagagtggaatggggggcagagtggcggtgtccgtggggcgggcggggtcctccagctctgggcatcctccgtcccctgccaccccccgcctggtggccctcctgcctgcctttcatcgtgcgatacaaagccatttcctccctgtcctccagtcggggagtcgggggaggggtccgccccgggctcgacccccaccccctcggtgcgcgccagccccgggcagcctccctgcgtagcgcgccgaaagcttcccagtgcccctctcctgttttcccagctcaacacccccctccttttcctgtcgccctccgtgaggctccctgtgaggctgtggggctttatcccccgagccccctcccttaggtggagatgctttccttctcgccagggttctcgttcctctcagctgtctactgttgcctgcctctagctggggaggcggggtgcgaggagaaagacgtcgtttgttgtggtgaagctttatccagagacgcttccccaccattctcctcccggagagtcgaagaataaaaggtggtgtgtttgcgtgtgcacctattcacagcttcaggcaattgtgagagagcccgaggcacagacttggcagggggtggacgtggacttatgttgtccaggtgccatgtcattcctgcatcatctcggaactgaccagcatctttctcgcactctctctgc

SEQ ID NO: 331032 - DNA, 283 bp, Homo sapiens; identical to SEQ ID NO: 227702
  chr1:173638744-173639027
  hyper

SEQ ID NO: 331033 - DNA, 108 bp, Homo sapiens
  chr1:173683937-173684045
  hyper
cgaggataaacaacctctgaggttacctgaatgccccagcaaagggcacgactacttccggagccgcaccggaaccccttggcggattatgtgggttcctgcgggaac

SEQ ID NO: 331034 - DNA, 333 bp, Homo sapiens
  chr1:175048476-175048809
  hyper
cgccactgcagcggccacgggaccttctccctggagacctgcagctgccactgcgaagagggcagggagggccccgcctgcgagcggctggcctgccccggggcgtgcagcggccacgggcgttgcgtggacgggcgctgcctgtgccatgagccctacgtgggtgccgactgcggctacccggcctgccctgagaactgcagcggacacggcgagtgcgtgcgcggcgtgtgccagtgccacgaagacttcatgtcggaggactgcagcgagaagcgctgtcccggcgactgcagcggccacggcttctgtgacacgggcgagtgctactgc

SEQ ID NO: 331035 - DNA, 227 bp, Homo sapiens
  chr1:175161560-175161787
  hyper
cgcagagaggaagactcctgagagtcctcgcgaaggagggaaacacaccagaactaaagttgtgaaggcgcaagaggctacttaggaataattccttgtatctctggggcaggtctcatccttctaaagacaggagtgactgggcgtcttcttccaaacagagggcgcttaaaaatgtatttttaaaaaacataacagaaagtcctgaaactcacctttcggtccgc

SEQ ID NO: 331036 - DNA, 1011 bp, Homo sapiens
  chr1:177133329-177134340
  hyper
cggatttggggagaagtcaggtgcacagaggcgctagtatgcaagtgggtgtggagaatggtccgggagtggggcggatccgggaggtaggagtgggggaggggaggtcgtcggcgagtgggtgtgtagagcgagctggagtggggggtgggggcgccggtccagcgcctccggccgcctcgacctcccccgggactcacccagcacgaagtagggcagctccgtgttctccaggtcgtccaccacgaccatttctcccgggaagtcgttgcgcaccgagaagaggagcttgggctccgaggccgaggggctgtgcatgatgctcaggtcgttctcgcgcaggaagggcagtgccgacaccgtgatgcttttgagcttgcactccagctccttggatggatccacgtcgccggcggccgtggccagcaccgccgccggcccccagcagcaggcgagcagggcgcagagcccggctaaagccatcttgagccccggccgccttcctcctagcgctgcgatggtgggggaggaagcgagcggggagggagcgagggagcgagcgcgggaggcgggggaggttagggaggggatggagagccgggagagccctggaccccggaatgagatgccgcttgcagagtcctgggtttaagctctgatgtctggagagccccggattctttgtttcccggagctgcttatctggagaagggaaagcgggggaggggggagaggagaaaaagggaaggaaggacgtcgaaaggaaagaggaagggagctgaggattctagggaatcaggtcagcccccagctggctgccggtgctcctgcctctctcctccgttgcatcctccaacacgagcaaggctcttggctatgaactacctgcacggcatttttaatacattgatctttgcaatgtaaaatcttccctctcgcatcatcatccagaaggcttgagagaggcacacacagacatacaccttaaagggcgcttctgcaaagctgcgc

SEQ ID NO: 331037 - DNA, 692 bp, Homo sapiens
  chr1:177140120-177140812
  hyper
cggagcgcggagtcggagcggggacgcgccgggctgcagctctgggatgcaatccgcctgcctcgcaagctgctcgccgctgcgctggcagcgcttacgctgagctcggaggatcccattaggacttgcccggggatgtgcacctgccgtgcgctccgaggtcagtggcaggtctgcaggcagccgagggagcggtgaagccggaagacctgtctctgcccatgtgcaaggcagtgatttcgggtgagagagcgggtgggtgagtctctttagagttggaaagaaggcaaaatcttgggtttctcctcggcggagggacaggggactcccccagttgggtcttgcacttcccttacctctcccaccccgcgtgcgccccggcccagtgccgaagccccacttcaaagatgctctgggagaccgggatcctggctgctcagcgggaaggcagcaggcaagtggtctaacgttggcggcggtggcggtggcggcggcggcggcaccgacagtaaagcggggagcaagagaatttgaaaagagacatccgctccctctcacacgctgagggggaggcattcgcgtttccccaaatgagaaagaaccacaagaaatcatgaagtaaaaactttggaaagctgccactggagatgttgcacaaaaacctggaatcttttaggagtctcctcccagtc

SEQ ID NO: 331038 - DNA, 443 bp, Homo sapiens
  chr1:177150742-177151185
  hyper
cgcagtgaggactgtgggggcagctaatgtctgccaccccctcactcggtgttcagccatttatcatcaatacgtcgttaggcaggagcaggggcaggtggctgacgggtgtgccggcggctggcggggtcttgggaggcgccctgcacacgcctcttctttctgaaatctccgacctttcggatttgagccgcgagggaccgcggagcaagggcagcctcctccggaagcctcgggtcactagagacccctagaggcgaaaagctgtgttacaagcccccggccgcagaggcgcaggcgggattcttgccccggaggttgccgaggagtggccggtacctttcctaaaacccttatctgtaagtacactccggcaagctcgaaagggacagcaggggagccatgtgtgcgtgcgcgtgtgcggagaaggaatggggagggac

SEQ ID NO: 331039 - DNA, 1424 bp, Homo sapiens
  chr1:178062419-178063843
  hyper
cgcggacagggcgcagggcgcagaccctgtgcatatcccagaatcccggacccactgccactccactctgggaaggaagaaggcgctcccccttgggtgactgtaagataaagcagcttcttcgatctctttgtccaataagaaagaaacgttggcccataaagaaagaaagaaacaaataaataggaaaggtgtgagaaggaagggaagctcctttcttttctgtttaaatttcccgcacccttttacctccccgccttctcaaacggtctttactttgagcagcagagacccggaccgctcaatacccggctatccctgggagggtacttggaaagtaggcgggacaggccggatgaataattcggtgtccgacttttcctgcctgcggcgcagtccctccccggcttcgttactcgagtgcacacgcggccgggctctcggccctcgattgcttcagcctatcaccctgggatgccgcctgccgctgccgccgccgccgccgccgccaccgccaccgccaccgccaccgccaccgccgtggctgccgggtttgtgggatccgccgcggagcaggagccagagctgtggccggagctgtggcctgagagtcagggggcgggcaggctcattccagaagtgggggccgaggacaggcgggctagaacccggggccaccgccccctacccctcctcaggctgagggaacgggcactcggagcttctgaggcggcggcggcgggagccggtcagagggggcggcccctggcggcgacgcccccaagcccagccctgcccggccccgctccatccccagccagagcctggtctgaccgcgagagacgccggcggggctgaagaaggcggctccgaggaggtgggagggcgagcctcccctcccgggttcttctgcgtcctctcccgggagggacccacacacacctgagcccggacccacccttggtcggggccacgctggatcctcctcccggcctgggtcccgcccgccgactgcaggtgggctgcatcgcccgagcctcgggcagtgggcgacggggaaggaggtgagaggtgtccgcgccggctgccgctcgggtccctgccctcgctgcgcgctctcctcctccccttaccgcaggcagggcgcggagccgcgcgccagcccgccccgaagccgccgcctcgtccccctcccgcctcggggcaccatggagctctctccgtcgtccggaggagccgcggaggcgctgtcctggccggagatgttcccggcgctggagtccgactcgccgctgcccccggaggacctggacgcggttgtcccagtcagtggagccgtcgccggtggcatgttggatcggatccttctggagtccgtgtgccagcaacagagctgggtccgggtgtacggtaaggaccacagg

SEQ ID NO: 331040 - DNA, 995 bp, Homo sapiens
  chr1:179712201-179713196
  hyper
cgcgtttacatttcttaggcaaaaaggcagcggagctaagcaggggtgtttggaaggcgcccgttgcgctgtttgactgcgtggcttcacttggcccgcgtgcatcagcctctctggcgggggattctccccggactccggccagcgccaatcaggtcgcgcggtacctgcccccagccctggccacctggaggggcgatgaggctccacgcccggagcagggcagtcctcggagcgccggggaggccgcggagcctcacgtgtgccgccccagccgctggcgcccggaaggacgcgctgcgaccccgtgggagccgaacgcgggagtcgctgcccgagcggagctgctcagccgcggtaacgggtcggggcctcatcgtgcaggggagcgagcggaggggcggggcggggcgcgggcgggctgaggagccgccgggctcgggctccgcgcggggatgtgtctggccaccgcgtactttcgagggcgcctcaacacccgggtaagcgcgccccggctgcctccctctgcccaccgcgccgccttcagcgtagcagttccccactgggtctgggtctgcgccctggctctccctctccgcgccaggggcctctcgctccgaggggcgcggcgactcgggggcatctccggcctcgtggccagaccgcgggtggcggtgctcgcgcctcggggccggacttgccgggtccctgcccccgggccgtgccgaaggcgctctactcagcgtgtctgcagcgacccgcttctctgcgctttcagccgggccggacctcacgcggacgccgctgctgctgctgcgcctcgcgcccgccgccacccggggagcatgaggccggggcaggggacccgggtagggtgggggccgaccggcggggtctgctgggccaatgcgccgccgtcggtcagtgagtccggattcgtgccggcaactgtgggcagccttgagaccggggctcggtttgctggtgatttttcc

SEQ ID NO: 331041 - DNA, 1090 bp, Homo sapiens
  chr1:180123493-180124583
  hyper
cgatcctgtggggtcttggtggtcgcagaccaagcgtccctcttctcacatctaattcacaacgtctcatcgctccgcgggagcccaggaactgccctacaacagccgaaatccgggtcgtctattccaacggactcctcttccgttggatacgggggccgtgagaggccaaacaacctccgcgaggctacccccgcagcgaccgctcggcgggcgctccattcctttaccggactgtacacctcgcctcctggggcctgaggcgggaacccgggtcgcgctgctccgaggcctcggcggaccgcgaaaggatggctcaccacccggccagggccagcccctgcaacaagctcagccccgcccgctcccgcgcccaggagcggccggcggggcggggtggctgggccggcctcgggggcgggggctcgggggcgggggctcaggggcggggccacgtggctcctccttgcgggcggaggcaggcggtgccgcggcgccgggacccgactcatccggtgcttgcgtgtggtggtgagcgcagcgccgaggatgaggaggtgcaacagcggctccgggccgccgccgtcgctgctgctgctgctgctgtggctgctcgcggttcccggcgctaacgcggccccgcggtcggcgctctattcgccttccgacccgctgacgctgctgcaggcggacacggtgcgcggcgcggtgctgggctcccgcagcgcctgggccgtggagttcttcgcctcctggtgcggccactgcatcgccttcgccccgacgtggaaggcgctggccgaagacgtcaaaggtgagaagcgggggcggcccgctcccccgtgccccgccgcccggacccctccacctgcccggtgggcagcctcctactccgggagcgcgtccctcttccagtcacctccgcccacctcttcctctccgcgcatcccacgcccaccaccttcatgtttctcagctccatttttgcctcccgctcccttgccttttcctcttggccctcatcccgagcttctttccctctccgcggcctgggcccccagacctgccctgctcgcccggttcgtccccc

SEQ ID NO: 331042 - DNA, 1580 bp, Homo sapiens
  chr1:180199369-180200949
  hyper
cgggcgggggagggaagaggaaaaaagccagagctgcagcaacagcgtctcaacctgggatgtgcaccaaccccggagagcgagatcaaagggactggaaacagactggggactggcggggggagggggccggccagcctgtggagtcctccctgagaagcggagggcccggcttccaccgtgactccagcggcctgcttggggttttaattattattttgaaatttctgaatcgagctagagcgagagagcgagagatctccgtagactgcgactcgctggctttcgctccgagatgatgcagagtgcgactgtccccgcggaaggggctgtcaaggggctcccggagatgctaggtgtgccgatgcaacgtaagacacccccctttctcgctgatttaattctaacaagacagctagcagcctcagccgctgcggggcgggccggacgccgctcaggggccgggaggggctggcggccggggcgcagaggcggtcacagggcaggggcaccagccagagtgcgtttgagggggccaggctcttggctgtttggggccgaatgtgaacgcctcctggatcatgcttgaggcgagccgagtaccgaaccccgcatctccagcccaaggcttttcttggaacgctggggagagtgctgtttggggacacccaggggtacgagctgtaggccaggcctgagggcgagggtggtccccacaaatcttctttcgccggcgtgacggtcagcgcttgcaggaccgctagtgcaacttcaccccagctggcgggaagttggagagcgcgtctctcgcccctggggctggcggcggagaagccccggccacactcttagtccctgcggcccgcgccccgggcgtgcgtgccgggtgagtccccagccgctactgcccgcggcgcccgccgcgtgcgccgcgggaaactgactgctccttgtgagggaatctgctcgcgcattccagctagcctaggaatgcaggggagggagaagcgaccgcaagttgtgaattccgggttcagcctttgcgcacgcgagggcaggtgctcagggtggctcgggtttggaggggtagagacgggggtgtgtgggagctttgctagcctgcccgcccgctttcttcccgcgcccgaaattagcgagacagccggagctcgcggcgtgtttatccccaagtctctctctgtgtgtatgggtgtgcgcgcgcagagattttcccgaagggaatccgtctctgtgcttcactcctgagcgagagtccccgagagggaatctgtgcagaggccagaacaggtgcccagtcgtcgcgcgcgcgcgcgcgcgcgcgcgacaagcgccgggagagtcctgcccctgtggcttgcacgctcagcagggcgccccgggcaccctggagagaccaaggagttcctcgctccgcttgccaaggggttgtacttccgcctgcgacttctttagtggtgcggtagctacatcttcggggtttactttaagtaagggccggctcatccagggatggtgactacctacaaactagggcgcacgagcgcgccctcctgcgcctc

SEQ ID NO: 331043 - DNA, 953 bp, Homo sapiens
  chr1:180203912-180204865
  hyper
cgaggtccgggctcgtggaaaaccagagctaggcggggctacgcagggctgagcaggagtggcgtcctagggtctgggagcgcgacccacatgacctcgctacgaccggggcagggctcctccgccccgcgggcagatgccggcctgggtggcccggggaacagacgatgaattctttaaatgagcgtttgctgcgcacccatgggcggctcacgatcctgggcactcgcccgggaatcccgggcgtgctctgggttttgggggactcgccggtggaggtagatgtggacagggcggccggcccttcgcgggtagccggctttgcgcttactgcgtcccgcagcggtgggtaaaggtcgtagcccagaaggggacaagggagggaccgcctctctctccccggtgcgctgcaatagaggttcctgcgccttggcccttgcagtccatccgcccagaggttcgcgcccgttttcggagcttattatctcaggtagcccagaggtccgactgagctggaattagccaggcctgggacccctttgctgccctttagagtggtggcagggacttttccagcaaggataggcgcggcaggcgcgagtgcggacggcgcgcccattaggaggaggccgggtgaaaacctctcttcctctccagacccatttcgttccaagcatttggaatgacaaaattaaaccccaaccctggcggctcgagtctaatgtgactgtttaaccctgggaaagcgatgctcccattttcgaaggggctcctcctcttcggagcggggaggccgccggcgggtgtgcccggcccgcgcgttctgcgggtgttcgagcctcggctccccactcggttccgcagcttagtggaccttgacgagcgctggaaacgtgtcaggctccagagagacagagtctctacctaggcggctgaggatgtcaattaaaatc

SEQ ID NO: 331044 - DNA, 640 bp, Homo sapiens
  chr1:181059009-181059649
  hyper
cgtggccttctgagcccttggcccccctgcggggaggaggtggagcagcgggcgtccccgaagtgagggccaggcccttcccggctgcgaggacgcccagagaccgcgggcgctgagcgcgttgggcagactggttgcctctgggcatcgcaaactgcccccgggcgcatctggcttatctggagacctgggagcttgaggctcattggaagaggacgatcgttaacttttgtgtttgtgtatgtctgtgtatgtaagtttgtcttgtggcattaagactattttgctcttctggaatgcaccactccttccccagggtttaagagattgggggcagacagggactttcctctgccggctgcgtggagaaggaagcggctaaaaggtttgggccggggagttccccattcgttctccggggagggagggactttacacctacccctcaccggaaagctagacccgcttcagggccaggagtggcgtttccgcacaggatttcctaagacgagagggatttagccaagagcacagacttggattccttctgtccctccccacctttctctcccaatgaagaaacgtttatatcctgtgattactctaggaaaggggcgtattaacggtcctttgcttcccc

SEQ ID NO: 331045 - DNA, 36 bp, Homo sapiens; identical to SEQ ID NO: 227731
  chr1:181286826-181286862
  hyper

SEQ ID NO: 331046 - DNA, 913 bp, Homo sapiens; identical to SEQ ID NO: 227733
  chr1:181451414-181452327
  hyper

SEQ ID NO: 331047 - DNA, 552 bp, Homo sapiens; identical to SEQ ID NO: 36581
  chr1:181454729-181455281
  hyper

SEQ ID NO: 331048 - DNA, 110 bp, Homo sapiens
  chr1:182361452-182361562
  hyper
cgcggggcgcgggacccgagggaactttgggcgggcctgggctagggcgggtgccgcgcgggcctggggacaggccggggttcccaaggcctggaagagccgcccgctcc

SEQ ID NO: 331049 - DNA, 854 bp, Homo sapiens
  chr1:182583799-182584653
  hyper
cgtctccaaaaaaaaaataaaataaaataaaaggaaagtgtttgaaaagtgcttaagtgctctgaaaagtctgagatgctgtgcaaatagtgcggcattatccttatttttgttattaaaatgagcgagacttgccctgaccagcgacgaattgactcactcagttttgggggagggggcggaggagtgggaggagcgggaggagaggggccacgcttgtcttctccgagggatgggaatttccacccagctggaagtaataagcgcccgaggctcgggcctcactgtctccacccccgctttccctttcctctgaccaagtgacaactgctcggaaacagacaggacagagaatcttaaaatagagcagcaaatatccgcggctcgccgccccgggctctgtggcaccatcagcagcttgcgcaggacacagacgtcggctcacgcgccgcagccctcggccccggaagagccgcggccgcggagcagcgaacgcgtgcctgccagggaaaagcagtcaccaggaacgcggcgttttggtcggctgcccatcgccagccctgtccgcgcgagatgccctgctccgaagctcttgtgagctccgcggcctgcggctccggaaggcgaagctcttccaggaagcagcggcggccccactggccctctcaggctgcggagaaagggcgggaggccgcggggctctccaggactcagtggtttcggagaaactcgacttcccaggctcggagggccagtttgggattgttatagaacaaaacgtgggcggcataaagtgctccgaagtggagatcaccttgaagactgggcccttggctctgtgacccagcagaccc

SEQ ID NO: 331050 - DNA, 114 bp, Homo sapiens
  chr1:182911469-182911583
  hyper
cgccccgatctcctgttgggctcttccttggcggccccttcggcggagctgaccttcctcttgggtatcctggcggcaggcagggcgcgtgccgggtgcctgcgggccgtggcg

SEQ ID NO: 331051 - DNA, 1318 bp, Homo sapiens
  chr1:183385926-183387244
  hyper
atttttagcctaagccacctcgccctgtctttaccgctgtggtgtggttttcactaaacctccctaggagggctcgcgcagtcctcaggctccggataaacacgtgtgcccgcatccagctccggcgcgccctgcatttcagcaccgccgcctctggagagcgccttgctggcgggccaggtcagggcctcccacacgctctctcatccatcccagcccactcgcttttccctactcctcgcttctctcagtttcaagaaaaagcacccccaacttctaacttctcaattcctgcttctaaagtgacctccgcgtccctctttccgtgtctaaacgctcatgccccacgcctttgagtcctacgagcagctgcgaagccgcgtggcttcccaccggtggcgcgagacctccaataggcatctatcgatcacctttcccctaccgctgctggaccccgaaccagccagccggatgcccccgctcgctctctctgactccacgccccaaagcttctaagaaacaaacgcgcgataagtcccctccccccaacacgcacacgcatatactcacacacagtcattcgcacattcgtacacacactagacgcctcaagccttccgagtgccatcgccaccctgggcagagcctcagccaacttgggccccgatccttcggctccggctcgcgcagggcctcccgcagcctccgcccggccccctccccgtcctaggcagcgggtccctgaggccgaacctaggcggaaaagggccccctccctattcactcagcatccacctcgcgcgggcaatacacggcccacaattcccaaacactggtccctgggccgcccagaatcaccagccaaatccgaaattaatcttgaagccccagcccctgtcaccggtgtgtcgggcgcgagtgtgtttgcgaatcccaggcacatacatgatttaactccttcgagctttcggcccatcctaaacaaacagcacgttatctccagccccttcctcccctactcggcgccccaacctctgcccccatcccggtcttcgccagcctggtagccgaaccaccgcaccgccacactccagttctggtatctcgaacccctgcccagccccaaatgatactcatctctagtcccctcccatcccccacctttggccccctgcgagccgggtctggccccggcaagtgacgcctcggaaacgcagtctgcgtaccctcccctgagtccaaaatgaaggggccgacctccaccagctggatgagccggcccacccctccgaaggggcacacgccttcccgttcgatc

SEQ ID NO: 331052 - DNA, 867 bp, Homo sapiens
  chr1:184005520-184006387
  hyper
cccagggcatcttcgtctctccccgggacgtggaaccccgatgcaccggcagggacagcccggagcgctcgcaggagaccaggcccacggtggtgccatggttgggcacactccgcgggctccgcccaatctccacccctaggtccaggtccccctaggagagctaggagcacatttccagcctggagcaggagcccggcaccggaaagtcagagcagcgcactgcggcgccccagccactgcggagcccctggccaaccgcagttacgttccatctgtcgtatctacatgggaatacggcgacaggcaccctatcccctcacgtcagggctagcagtatgaggtggggaaagaggaaacctcgagagttaaaagcgagggaactgaaagtccccttgaggggtgtcccccatgccccttgtgggacaaagccccaattcgcaggctaccctccagagctccagcggtccggttctccccatcagcaccctctgcgcacactgacccgcgcgtccctccgcagcctgaccgcccgatccgccagccaccggcgcgggcagcgagggggtgtgtgcgccagattttccgcgtgcccccccgcccctccagcggctccctcgccctgcagctgctgctccgggcgctgtccgcgctgggcaggccgcccccgcgtcccgccgcggcggcccggggcccgtgcgcgctcaccagatggccatcctgctcttggggtagtccagccgctccaggcagccgaggaagtgcggcagcgtgtgcgccgcgttgcgggcgaggaccgccacgagcaccgtggggctctgcaggggcgactccgggaaaaccaccggctcctctccgtcgtcctcc

SEQ ID NO: 331053 - DNA, 259 bp, Homo sapiens
  chr1:184633170-184633429
  hyper
cggctcctctacactctgcagagctgttttcccccttcagagctcctctcctccgggagggcttgcctcgccccggtccaggatctctgccttcggttgaagcgcagcgcccccagccgtccgcaggagggatcgacgcctctgtctccccgaagtgagggcgctcgctgcggagctgggggtggtctcctcttccccccatcgcggcccagcaacctgggggtccgcgtgacttctccctggccgggggatggaggat

SEQ ID NO: 331054 - DNA, 151 bp, Homo sapiens
  chr1:184722819-184722970
  hyper
cgttttaatctgcatctcctacgtttatggaggttgagtaacttttcatgtttatttaccacttccatttcctcttctggcttaaccgttcatgcctttctcccatttcctactggttcttcgcttttttcttattcatgtgtaggacctc

SEQ ID NO: 331055 - DNA, 360 bp, Homo sapiens
  chr1:184943416-184943776
  hyper
cgggcgggcgggcgtacctcggatgtaagcgcacttgccctcgtccagctggctggaggctgagccgcccatgaccgcgagctgcctgtgctgagcgcggaaactgcccggtccgcgcccgctgctagctcctggaggttgatccgacggcgaacccggctctgaaattaagagcaaacttccttcgagaggcgagagacaggaggcaagaggcgtcgccttctggggcgcctcctccaggtccgcgccttctgatgatccgtgggccggcccgggggctgtcttcccgccctcgcctagctggtgagctccgacgggctggcaaccgaggaggtcggccagctcctcctcctcgcccac

SEQ ID NO: 331056 - DNA, 121 bp, Homo sapiens
  chr1:185014263-185014384
  hyper
cgaactcatgagaaagaagtctgagcccaaaccccagaagccggccaggaaggtgtaaagggtgggccgaagccagggcagaagaacccaagcagaaggttgagcacgaggtggctgcgcc

SEQ ID NO: 331057 - DNA, 495 bp, Homo sapiens
  chr1:190447265-190447760
  hyper
actccccaaataaaccactacgaccggtcacattacgatgaccaaatcatcagcgatttgcacgaggcggtggggggtggggggtgcgggcggtgatcgaagggctgaagatgcggaggaggccgagtcgctaggcgctttcgggggcgctgtgccggtgaggcttaggcaaggggacggggaaccgtggttagatgcagcagcggcggcagcagccctcccaggtcccacttctttggcgttcctgctgcctgtgactcaagacaattgacttccacctgaaccctcagctccgaacgccttgcattagaagctagagctttggaggttctgaggacggtccctggggagcaagtggtaggtttcgaggcgcccgcttcccctctgattcctgcagtaactgagagagagtgtgccagaaatggctttgctgccgaatgcattatcttgccattttcgtgtcccaatactgaacaaacgatcgcctgatcgatc

SEQ ID NO: 331058 - DNA, 857 bp, Homo sapiens
  chr1:196577279-196578136
  hyper
ggccctcccatttccgtctctttttcagcaatatttacagaacaatcctccaccacaccactcacctgtcgtcgttttgccatccttggtcccctagcagcaaatctcgaaacctgtacctgggaggcagagggggcacttcgctctccaaatcaaccatccttcctcaaagagtgggaaacatcaaacaacaaatggaggagaggagggagaaagaaagaaaatattgcggagtacagggagaggactaacaagacgctgtggccgagagagggatgggagaaggggaaggggacagggagggggagggggtccgcttggagccggaagctaaggcttgaaagggggctggctcctctttcccgagggtgtaatggggatgatgcaaacccaacccaggagcaaaagtctggctctgacaagaatcaacgctgccaaggaaccgcccccaggctcggcaccgcctctggtccccaggactagggggaggcgggtataaaaagttacttcgccgaaaaagacgcgcggtgcctagaaagaggggagaggggtgggagtgagcgccgcttgatggtgaagcactttccttaaaggcagttgccagatcctcccagagggcagcctcccggctactgttccctcgggcgggcttgcatccggcacagccctgagctggcgggaatcgggggcggtgggtttcggccccagacgcggccaacccggctctccccgcaatctccctgtggagatggagctggaggcccagccaatgagactccccctcattagcatagcacagtgacggcacgggggtgccttggggacaaccaatgggggcgagctaattagcggattgc

SEQ ID NO: 331059 - DNA, 467 bp, Homo sapiens
  chr1:197881313-197881780
  hyper
cgccgcctcccgccgagaaccgagttctagttggggaaacgtctgacatctggacatcaaggtaagaccctgatggagatattttagtcggagcagttttctgccctcggagtgcgcccggacgcccgggagtttcagggacttcttgggagcctaccggaggaaggcccggctttgctccaagccgcgtccctacctgaggtctccacgggaggagcggtttggacgcgccccaccggatgggaggaggtgcttggggaagccgggccgtaccgccggtctgactcccggcttttctctgccagtgcaaccaccattacggcgtgatccactccttttcctctaagaatgctgaacggtaccactctagaggcaggtgagttatgtgccaggttccttctgatgttctctgccccttgggccagtgcgtataccatgtgagtgtgtgtgcgtgtgtgtgcgccttc

SEQ ID NO: 331060 - DNA, 870 bp, Homo sapiens
  chr1:197882002-197882872
  hyper
cgcgctcctgaccctccggggagctgctgggggtgtctctttcttggaagggatggaaggggggccgagaagacactgtttctcacacgtgtaggggttaactggaaactggcttcacccacatttttttgttgttgttcagtcctaacccagcgcagccgtttctgcgcctgatctcagcggacgcagtgcgggacttctccctttatttctgcagagctgagggcaggcggcgcaacaaatctcaggtaaaagagcatcagatttcagaagagctgtattctagacttggcgcaggcccctttggggagaagagcccaggggctatagagaacagaggtttgaaggaagcaaaagctggcgagaggttttttttttgtcgcgaagggtgagggtaggcagagaacgcgcgaaagggcagggccttggccgggaagtaccgcccagcgaaaggctggcaagggtgcgcagctggagcgtggcctcgggtacccctttccaggcagccgaactccccgtatcccagctctgcttggctgactcccatttgtcttgagggaggatcccctagtaggactgaatcagaagtgcgcccgtgcagcagccccagtatggatctgccaacctcagtgtagggggaaattttccacatggagtatctcagtctccactgtctggagaaaggccccagcgtgtcccggcaatccgctcaccttccatccagcgcagcccgggcatccagggccaggtggcgcggcactgaacgcatggttcccagcctcaggctgacgctgacgtttcactgggccttgggtgctcaggacagtgccagacgctggatactgttttaagagccgcgcctttcaaacc

SEQ ID NO: 331061 - DNA, 1190 bp, Homo sapiens
  chr1:197887294-197888484
  hyper
cggtcgtttttctgaatcgaaatgtctgcagctggctatcctccgtcgcagctgattccgaaagagcagggagaggaactgggaggaggtgggatggggggtggtggcattctcttctacagacctcaaggttcccttgattccggggcaggcgtctccccggcgaggatccgcagctccgagggcaagctgggcataagcaataggaggacggcgcgctgccgaggcgtccgagccaagcaggagcccaggtggccttagtctctgggcctgatgaccggacctgtggagtagattccgacgcgactgggtcatttccagttctctagacgctcggggcttgggacccctaaccgagagaatctcagggtttctggcatcccgactcagtccctctaaggagacagcactacgtttagcgccaggacccggcgggtgtcatgtgtagggggaaatcaaataaaacatacggaggagcgcggcacccagtcgaaacgcatgaactttataaccaacccttaaacaagctaatcaaccaccactgtttctactatccataataataaagtcatgtcctcttaataaagaaaactaattacttatctaagcgcttccctttccagattactaacggggggggggggggactacagaagtctccggaaattatttcggccaaacatagctgtgtagatcctttggtaccacagtaggacttgtagcccaaactaatcaggagactgctctagcccttatcagctgggttttgggtccggccaagtagcccaactggtgaacgtgtctatatttgtaacactcattcagtgccggggcccctggtcggagtaaagggctaaactttactttttcaggcccgctgaagtttcgtggggaagatcaacccatttctgctagtcgtgagggaaatgtccggaggttaactccttttccctttttctggtcatcacttttaaaaacaaatagtagcaacccaaacccaaattttgcagcggggctgggctcctcaaggtggggccactggggcatcccgagtcgggtcagtgggacccagagggaagcataacttgggcactaaacagattttcaagacaaaggtctcagtacgcctgttgatgctagggaaagaggggactgtatacagcgggctggacagcggaccctctttggga

SEQ ID NO: 331062 - DNA, 55 bp, Homo sapiens
  chr1:197888735-197888790
  hyper
ttttattttgtgtgcgtcgaaaaccacaatttttagcttgtaattatttgaattc

SEQ ID NO: 331063 - DNA, 548 bp, Homo sapiens
  chr1:199998214-199998762
  hyper
cgcatctttttcgtcgggcagaaccgccgcggtgcgcaggcaaggagtccttcccggcagctccgcgcagctccggttccgcgtccggggccgcagctagagcgcgctcgggccggagacgcggactgcgcgcgcacgggggacgcgcgctcgggggctcgcgcccgcgcgggcggtcttgggctcctgctgcgcgcagccccagctggccgctgccaaaatagagttgagctgggtcgggagaccacgcacgccgatccctcacagtctcccccacaccccatgggtgaattaaagagggtaaggtaggggaaagagacgctgttgcacttttctctgcaaccctggaagaactgtgtttccagctaccgcacgcgcaactcacatcgcaagggaccgaggcggtacactctgagcgtaaacagagaacacctgcagctctggaatcggtcccaccgcagagggctgggaaccggaggactgtcggtccagcccataaggggctgctggggactaaacctcaagaaaagtaccgaagaaggctctcc

SEQ ID NO: 331064 - DNA, 748 bp, Homo sapiens
  chr1:200008298-200009046
  hyper
cggagaggaggggagagagaagggaggcgagagaaagaggagagagacccctgccgatcctgagccagagggcggtggagggaggggaaggagtcgcccgagccgtccgggagcagtggcagcggcacagccggggcggcaatagcagccccgcggtcgcctccgctgcccgccgggagctcggcggttcacggctccgcgccccgggcagctgcgtcctcgccaccgccgccgcctgcgcccttgcggagccgaaccagagggccgggacgctgtcttcctcgcctccttttttaaccctgacctcctcctcgcagcttgggggcggctccggagctgcgagaccggacagggctcagaggtcctgcccggcagccccgaggaggcggaggcacgctccggcgaggcgagagggttgggttagcaggcatcccggtcgccccttccttcttttcgccggagttgaatctgtgctgcccgtgtccaggtgctgggcttccggaccgacacggatcccccatccccgcccgcggtcgccttgtcatgctgcccaaagtggagacggaagccctgggactggctcgatcgcatggggaacagggccagatgccggaaaacatgcaaggtaaggaggcgccgcgcggcgctccggctcccgctgcttccccacccccgggctcgccctgcaggcttcagcctcccgccccgcgcgggcgcgggagtagccccgctgggcgctcgcagccgc

SEQ ID NO: 331065 - DNA, 387 bp, Homo sapiens
  chr1:200009765-200010152
  hyper
cggtgctcttccatcctcgccccttccagggtgcaggatgtgcgggccggcgggcctgtgatcccggaacgcttcctgccatccccttgcgcgaacttgaaaggactgggaggtgttgagagcagagttcagggctggtgcactctgcggtgctgagtgggcggcgcgcccgggcgctcaggccgggggacctgtagtcgccctaccgcggaggggaaaatacgtagctggagggcgtgcgccgtgcgggttgtgatccgttaccccatcggtcatcctggggtctccccaagcctctaggtagggctgtgagagtcccctagagctgaagccccggaggctgacctgtgggtctggctgctatgggaacccggttggtccaaagaa

SEQ ID NO: 331066 - DNA, 939 bp, Homo sapiens; identical to SEQ ID NO: 227787
  chr1:200011380-200012319
  hyper

SEQ ID NO: 331067 - DNA, 697 bp, Homo sapiens
  chr1:200271204-200271901
  hyper
cgcgtaccaaacaacgaagctcctgcccttgggagtttatacacaggctatgttaatatttgcaaagggccccgagtgtctaagcggctaatgaacgtcttgggtcggtttcctcaaaatccagcccattgtttccccggtgagcacgatccgaagccttatcccataacgcactgtagcccgaatctttctgccaacaaccgctgaaactaccagaggttaaagcaattaacatgagatgcaacctcaccgtggcgcagctccgcgcgcccccggctgctgcgacccgggaggggggagccccggagcggctgcgcccggccccgcacccccggcagagcaggttagctccccctgggtggcaagcctttgcaaaacaaaaccgaaaatgagcgttcgctctcctgacagtcttgcctaaaagaacctcgtctatactgcaaaatcccattaggtacacaagtccggtcggcattgtcacttttagcgtgacttcaatttacacattcaaagaatacctgtccggagcatgggacctggtagaaaggttaggctctctccgaaggaagttcaactcaggatttccctcccccggtgctgcacacaccatcaacggcaaaacctcccctcccagttgcagatctagacttgctgagaaaggtgctggagatgtttccaaggtcatccccagcaccgc

SEQ ID NO: 331068 - DNA, 255 bp, Homo sapiens
  chr1:200379717-200379972
  hyper
cgcatatcctttgcatttatgggaggagcctgctttgaaaccgcaattagtggtaccgttgcaacaaaaaaaaaaaaaagaaaaagaaaaaaacttgtcttactgccaaccttcctgaaggctactggaagaggaaaccgagcgtaatccaggtgcagcagtcctgtaaaacacgcccacacacatacttcattatcattacatcttatttaaatgcccccgtaccttagcctggctaatcagtctgtttgccac

SEQ ID NO: 331069 - DNA, 309 bp, Homo sapiens
  chr1:201228906-201229215
  hyper
cgcccagagagccgccctcttccgggaacctcctgctccggagccaggaagggctgccctttccccaccaggaggccaggcacgagctccaccagggtgtggacccccagggaaagtgcgccaggtgcctgggatgctcaatgggggacttgttccaggactgggaggctggcggggtgggggctgctgcttccctggagcagcacctgtcccccacccccacctcccgcgtcagtggagctgttggcgcttgcacccggcttcccaagcgatgagacacggctcccagccagccgccccaagccgctg

SEQ ID NO: 331070 - DNA, 496 bp, Homo sapiens
  chr1:201252452-201252948
  hyper
cgagcaggaaggcgcccagcgtcccacacaggggactcgcagccctgcccccaagagcgctggctccgcagcagcagtgccctgcagctccgcgtctgagcagcagcagcgcgcggcccggtggagtgggtggtgcagggcaggggtggtatatcctgtctgacggagggcgggcctcgccagtgccagagagggacgaaccagggtggaagcgccaggagcagctgcagggagccctcacgcggaccacgcactctatggccgtagggagccgctgagagcgagaagagcacgctcctgcccgcccgctgcaccgcacctcgcctcgcctctctgctctcctaggccccggccgcgcgccacccgcctcccgccaccatgaaccactcgccgctcaagaccgccttggcgtacgaatgcttccaggaccaggacaactccacgttggctttgccgtcggaccaaaagatgaaaacaggcacgtctggcaggcagc

SEQ ID NO: 331071 - DNA, 482 bp, Homo sapiens
  chr1:201368376-201368858
  hyper
cggctccctccggcgctcacctggacagcgcggaccagtccttcctgctgacagccatgctgcaggagccccgcgtggccgcccgcgccccgccggccgccgcctcacctggcgcccctccccttccagcccaggtgggatcacatggccgcttatctcacccccgcgcgccccggccgcgctccgatttgccgacccgggaatggcctctgggatgtgggcgtcccagacaaagccgcattgattgcagcccaggccggcccggccgcgaggccgcaagcactgggtggaccgtcggacggatcgcgggaccgaacgacggacgcccggggccggcgtggggctggtcggctgcccggggcgagggcgggagacttcctgctcagaaccagtccgaccagcttggcgctgggacgcctccccgcgctgtgccgcggcccggggtgccgaggagctgggctgggggcggggacccctgccgg

SEQ ID NO: 331072 - DNA, 656 bp, Homo sapiens
  chr1:201449645-201450301
  hyper
cgttcagaggcagccccagctgcggggcggggcggggcggggcggggcggggcggggcgcggagctgttggcagctaagtggttgaggttgagcggccgggtggaggccggcacctactaggaggctgggctggtccgcaggttctcaagcccggctgagcccgggcaagcgtcagagaatcaccagagcagcttgtcgaatacagattcccaggccccacccaggccaaccgaatcagaatctctaggggtggggctgggaatccatttttaaaggcttccccaatgattctcagaataaaggttgggcttggaggcggggccggggctgggcgtggcacggaggcgaggcgcggggagggccggaccttccagttgttaatccctgtgttcctcactccgccacactcacctccactgatctaagtcgggggatcgttcctcgctgggtgcccccctcacttgatcttagccaaaaggtcgagaagcgattgggagcccctctcgaataatttctgtggcccttgattcagggatcactcccacacttaatagcagctctaacgccccccaacccccgctacccaagatctctatcctcaccctccagtcggcctcgtggtcttcctgtccctccccagcctctcaggtgaccc

SEQ ID NO: 331073 - DNA, 387 bp, Homo sapiens
  chr1:201915641-201916028
  hyper
cgcagcagcctccctgaagcccagggctagtggaccccggctggtctaatcagcggccaataagacccgacaactgccaggcccggagaggagaagccaatccccaagctgggggcgggcctacctcgctgtcagagctgtttgaaacttgaggacattccagggaatcttggagcgctgcgtgaccaaatttagtacagagcagtttagccttttaaagacaaggggccacgcaatgagaaaaagatacaaaaatgcgtaggctggcagaagcagatcacagccacggagagccagacaagcagggacgaggccatgagggccggtgaactcgccagcccggggcacgttcaagagcgtattttactactccatcaccgggtggac

SEQ ID NO: 331074 - DNA, 160 bp, Homo sapiens
  chr1:202112280-202112440
  hyper
cgagaaagggcagaggtcatttgcagagcatgtttgggaaaggaagccagtgttcaattgtgtaaccacaggatgcccgcccctcgagctttccatctgccttcatgcctcaggtccaatgaagtgacgtcccctgccttctaggacgctgagaactgtc

SEQ ID NO: 331075 - DNA, 415 bp, Homo sapiens
  chr1:202183289-202183704
  hyper
tggagggagagggccgctcagcgagggcgggacagaacctctcccgggctgggagtgcacggcgcggtgcgcccaggtaggcttgggggaagggtgccgagctccggaaagttccacaggtcctccgcagccctggggagcaggacccagaaaccgacgcgacgggtggggcgctacccgggccggccctaatccccttccattgttctgggagccgaggccgcctccccacttccggaccctttcagccatggagcgggcggcgcgggcaggggcgggcaggggcacggccaggcgggctggggtgggcaggggcgcgcgcgcgaggctggtccccgcccccggggccgccgcttagctcccgggtacgtgcgtgcagctaggggctccactgaaccacctggcgtgggttcgc

SEQ ID NO: 331076 - DNA, 138 bp, Homo sapiens
  chr1:202613487-202613625
  hyper
gaggctgacacccacggtgagcaccaggaggggcagggaggaccgagagcctgggcagcactcctgtgcctcagtgtcacccttgggcctcaccctcaacccccaacctcacccgataagacctcggggccacagctc

SEQ ID NO: 331077 - DNA, 252 bp, Homo sapiens
  chr1:202936089-202936341
  hyper
cgtcccaggggtggcgatcccgagctccagcgcggaggcatgccaagggcagaggggtaacctggcggagtcccgagcccggatgtgcgggatcgggaccccagcatccacggtgggcccagagccctgcggggcggggtcggcagcgacagcccctggtccggagctgagtggccagaaccagatggggaggggtcccccagtggaggatactgaatgagggtcttaccgtctggatccccatgacggagc

SEQ ID NO: 331078 - DNA, 201 bp, Homo sapiens
  chr1:203086994-203087195
  hyper
ctcctccttcttctcccttccgcgggaacccagcacctagcgcggcggagcagggaactcaggctgcgggactggggtctggccctgcccagctcctcgcccacgcccaggcttccgttaggccagcagggggaccccgagccccggacaacagccctgagctgggcggctgcttctggctctagatcccgctgctcagcc

SEQ ID NO: 331079 - DNA, 58 bp, Homo sapiens
  chr1:203242491-203242549
  hyper
cgtctgacttactctgggtgtgtgtggacgggcgtgcatgtgaccgcgtctgtgcacc

SEQ ID NO: 331080 - DNA, 382 bp, Homo sapiens
  chr1:203595808-203596190
  hyper
cgaaccaggaagtaaccgcaagaatcgggccaccttaacagtagagtaatggtttggcctcgcgccaagtcccacctctgttccagctcctgctcctcccctctctcttcccgcactgcttggggagagctggtgagcaagagtctggcccgagttagctagagctgttgccatgacaagcattttcttaagaaagctctgctgttgagatcgtccaaagctgggggctgggagggggggcacgaacttcgtggggcaccatccctccgaagagagcaagatcagagacacccgcccagctctcctgcaccctttttctttcaggaacctgagaggtccttcccattggaggggcagggggaggagacccagcccactcccc

SEQ ID NO: 331081 - DNA, 289 bp, Homo sapiens
  chr1:203598471-203598760
  hyper
cgaaaatcacgccgctttcgccgcggcctcccatcgtggaggctcagagtgcagctattcctgcagccggccttcctattttcagtaatctgattaggggtcgatgttggtgggctcggggacggcttctccgtgaggtcgttatttagcgcgcaccgggtcgcctgagcccggggtcgcggccaaaggggtaatcggctcccgcagtctcagcccttcccccggggctcggggcaggattgactgcgcaaccctgcggcccctgtgctctccgcggcctctgcgaccc

SEQ ID NO: 331082 - DNA, 790 bp, Homo sapiens
  chr1:204042251-204043041
  hyper
gcagcagcgagccgcgagcgcccttctccagtcccggcttggaactgaactgtgtgagcacgggtcctggaacccgggcccagaaccggcgagcccaggtctgagcccagagctcagcggtcagcctcgtaggccctgactcggaatcgagccgaggcgctgaggttggagccggagagcgtgagagccgaagagcagggagggcgggccggctgcgcgtccgacgagtcgcagagcaggaccgcggaaggcagggagacggccgcaagcccagggcagagggcagagggcagagagcggcctggctcggcggagagggcgccgcccggccggaaccaagctcgccgcccgggacggcgggccccgtggggcgcggacccagggtggccgtgggtccgcagcgactccccggccgacggcggggggcgtgccccctcccagcccagcctccccaacccggcccgcccgccgcgtcgcgggggcatgtgagcgggaagcctaggctgccagccgcgaggaccgcacggaggaggagcaggagcgcggagccgcgagccccgagccccgagcccggcgcctggctgagtagtaagtgcacccctccccgccatgatcgcgccgtcgcgcccatttccccagctctctgaagtttgacacttgcgcccctacgtttctgggcacccaccggctctcttccctgcgagtttccaccctgtgcaaagtttttcgaggagagacggaccctcacctacccccaacaacgctgggcagtggcggctcctccctggcc

SEQ ID NO: 331083 - DNA, 494 bp, Homo sapiens
  chr1:204347108-204347602
  hyper
cgggcaattagcgcggtgagtaattacgatgcctctcctgccgggactgttaacgggcagcgctgggtctccgttcctcctggctctgctgccctccagcctggcggagcccggagagcagaagctggagcggggaggatccctccccgaagggagcaggttgcagtgcgagcaggggtgttgcctctccgctcccagctccgatcttgcacttgaaccaccggcggggccgggggcggagccgcgccgccgcctcggaaggtaattcacagccccgagaactcgccggcagcgccaagtcccccagtccaggcgcaccgcgcagagaaccagtttgactaaaagagctttgaatcaggaacctggtggacatgtccagccactgaacggaaaaggggaagtgattaaacctggttctacttggtgggaggttaggagaggaacaaaggtcaaaggcacggaagcgtggcggggctgtgagcagcgaggggccc

SEQ ID NO: 331084 - DNA, 887 bp, Homo sapiens
  chr1:204653955-204654842
  hyper
cgcacagactcgcgagctccaaggaggagaaagtccccaggctctggagcgcttccagcctgccagtccgcccgtgtcacgccctccctaacctcactgccacctctcggctcctccacatctccagggccccactctacccagcaacagtttgggggaggttctggcctctccaggcgaaggcccaggcgccctctccctggccgcttctgggcattctccagccctccgtccctctgcccctcggccgcctccctctcccaagtctccggctcccccgcaggcgtctcggcggaaggcagcggccggccctcctctggcccccacccgggtcaggcggagctgcggtgccggggcaggagccaggagccctgaggcggctgctccggccgctcccgccgcgtacgcctcggccacgccagcgacctcggtgtccacgattccccggcggcggcggcgctgcccaggtcagccccgaagctgcacactcaccccgtgggcgccgggcaccgtctgccgtctgctgcccgcgcggccgcgctccgctcgccttccgcccggggccgggctggggacgctggtccgcgccctcccgccgcgcgcgccgtctgcacaggccggggaggctcggcgggcgccctccccaacgtggagttatcctgggagcggctccagggcccagccggtgagggcgatggcagaatcccaatccgtccccaccccctctccgcgccctgggcgcgtcgcggccggaggctggcgggcgagagccaggcgctccttgagagcgccgcgcgttcgcaggtgcccggagcaggccctcgcggcgcccggcaccccctccacgcgcgcccctcttcccggcttcgcgctcgccctcctcactc

SEQ ID NO: 331085 - DNA, 898 bp, Homo sapiens
  chr1:205312591-205313489
  hyper
gtccatggggacgccgttgtcgtcacatcccccgatggcatagacctggcccccggtctccagcagggagcagtagacccggcggctgggcagtggcgccaggcgcttccactggaagtccttgacgttaggcacctccatggcagccttggggagcgcccgggcgccgggagaggtgcgagcgcgggggtccaccggctacttggcgccggctcccacggcccctatcgccacctccatctggctcccgagcgccggacccagccagaccccggccagtgcttcaccgtgccccgagtctcagcggtccggcggcgtccacgcctggccctgcggggggaacgcggtgaatcaagggcagctggggccacgcgccctccggcgggcagcggatgggctccgcagcccctggtcaacttcactgggaagacgcggcggcggagggcgccccccgggggcagcaccacaccctgcactgcttggtccccgccccctccccacccgctgctcggacactgccgaagcaagccgcaggccggggctttcaggggttcggggtgccgggcagtccccgggcggaggaaggagttagcgtctctcggcgtcgacgcctctctttccccgcgccccctccccgcagtctcggcgcccccgcccccgcatcacttacgctgccaggcccggggagcgcggcggcgaggcgcagacgacgcatcactggggagcccggagcccccgccccgctgcacgggagccggggagagggcgctctgtccttccccagtccgcgcgccgctgtcacacatgcagatgaggagatgaagtgaacagcaggaaggagaagcggagccgccgccggggaggaggccggcgagcctgctccgctccgtccccatcc

SEQ ID NO: 331086 - DNA, 481 bp, Homo sapiens
  chr1:205399716-205400197
  hyper
ggaatggcagaccacgcggacgccaacagtttacgcagctccccagctaggtgcaaagtggccaaaggaagagccggtcttccacacgcacacctccgcgcccacactgccccaggagcttcccactcagccgggggacccccaagcagccggcgaggcgcactgcgcacgcgcactcaggccgcggctccagccgccctccctccgcagtggggcgccccgcccccgcgccgctcagttttaaactcgcagcagacggaactcgacttaaaaataactattttgacagttcagatgtaaatatgtgagtgacgcgtggggctgtttttccttcacacttcccctcacccctcgctccctaccccagctcaattcggctgaggctgagatgatgggagagcgccgtctgcaggatgctccctaaaatgcagcaggaggaagagacttgtcctagagagcccagcgagcttgggggtggggc

SEQ ID NO: 331087 - DNA, 857 bp, Homo sapiens
  chr1:205424702-205425559
  hyper
ggggacaggaggatcggctacctccggagccaaggctccctctcacactccccccaatcccaccagcggcaaaatcctttaaaaggaacaaaggcaatgggggcggggagggggcttcctctttggtcgacctagggcggcggctgacgcagcccgccgccggtcagctttcaggtgagtgcctgaacccgcatcccgcccatgccttagggacccctcttcgcccagccaagcccggggcggggaggaaagtccccctcagccgcactcgggcccccaacccggccaaggggtcgccaactcgcggcactttctgcctgtttgttttcgctcagtactcacagtttagatgctaagccggctcctcttgcactcacttcctttgtgtctctctctctctttctctctctctccccctcaccaatctctttcttccctccttgtccgattctctgctgtagcttccagtggagaaaaataattattcttcaatgggttagcacggggcgcacgcacacacgcgcgcgcacacacaccccgccgaggtacccaatcaatgcacaaatcttcggggtccctttaacctctgcggatgactccgggagttaattatgaagcctatttcggcgcggcataaatatgcattaaggtaggaaataatcgatacgctgaacttctgggaactggcatttagacggactccgtctcgccgccccccactccctccatggccccacgagccacctccacagcctcgcgccttcccggggtcgcaacgcctatcacaagcttctacccgggtttcagggggcccctgtagtggcgtgggcgccgcgccggtgccgggagaccccctc

SEQ ID NO: 331088 - DNA, 889 bp, Homo sapiens
  chr1:205425562-205426451
  hyper
cgccctctgcggtcggggcagaccctcagccggagcttcttcctcccccacccctgcaggccgggcccaagctgcgacacccccagcacgggctcagcctgtgaacaaactccgagctcagtactcggaggaactggcgagagcgggacggctacctgcccgcacgcccgatttccgggcacagctagaaagaccgggacgcgattcaactcccaatccggtgaatccgcctagcgccttcgggtcctgccgcccccggccagtcccgacccgcacacatatgcaggcatttgcacacacgcgcgcacacacatgcacgcacatgcacacacacatatgcacaccctcgcgcacacagacactcccgcgcgcgctcacgcccgcacacactcagggttataacaaaggaagaggggccagcgctgccttacttttgtctctcttctctcttttgcagccccccagccccggggccggcgtgcccggcccaccccgccctccgcgccccccgacggccgcggtcagccggcattccggagcagcgcgtcggagctgcaacttcgcgcctaagcgcccgcacctcgcagcccggcgggcgggagacaaaagctgcggcgccgccgccggaggccgcgcggccaaggtgtgttcgctaattgtcaggaaatgtgtgtgtgtgcggccgggagcccgcaggggcgggggaggggacggaggaagaggagacccacccctcctacccccgccactcgccagcgccgggtacccgaaccgggattagagaataaattatctgctctcttctcattgggctgtggctgaggacgccgtcggcggcgccgggctgggagctctcccggctctttgcattcaccgcacagctccggct

SEQ ID NO: 331089 - DNA, 748 bp, Homo sapiens
  chr1:207627531-207628279
  hyper
cgcccacctcgtgccgggccgtccctcccgcttgtcccaccctcaccggcgccgcgtcagcccccaggccgcctgcaggtgtgcgctcagaactagcacgtgtgccggacactatttaagggcccgcctctcctggctcacagctgcttgctgctccagccttgccctcccagagctgccggacgctcgcgggtctcggaacgcatcccgccgcgggggcttcggccgtggcatgggcgccgcgggcctgctcggggttttcttggctctcgtcgcaccgggggtcctcggtgagctgggagggggagcacggaggtggggacgcgtcccgggcagggaaagtttctgtgccgcgatgcaaagcagggggccaaaagcgagacggtgggggcagtgctcgacgcgtgtccgcctcccgctagctttgagggaccactgcaataaaccgcctggtcctgattgtccccactggcccctccgggagctgggacctccagaattggaggctgcgccacagaggggcgctgtctggtcggcccggtgtggctggcggcgtgcgggtgctcgcggtctcctgccgggctccccgcccccaggattctgcaggtgctcatcgctctctggccggcggtcagcgctaccgctcgccacgggaaacctacccactgcatgaggcaccagctagccacgtgaggctgtttctgtacacccgaaccgcgctcttgcccagcaaaagcggcagaacctc

SEQ ID NO: 331090 - DNA, 793 bp, Homo sapiens
  chr1:207669309-207670102
  hyper
cagggcctcacacgcgggatccatcggaagcccgagcattgtcaagctctgctgctgcacctgggtcagcaaggtgggctctgccagcgaaactcgttagaaacaatgcaaatggggagtaaacatgacctcgcccatgaaggggaagctgtggtcaaaagcattttgtcccggaaccccgcagccctccccacactctgggcgcggagcacaatgattggtcactcctattttcgctgagcttttcctcttatttcagttttcttcgagatcaaatctggtttgtagatgtgcttggggagaatgggggcctcttctccaagaagcccggagcctgtcgggccgccggcgcccggtctccccttctgctgcggaggatccctgctggcggttgtggtgctgcttgcgctgccggtggcctggggtgagaggcgggcgggcgtggggaggcgcccgggcggacgaggaacccggggccccgcagagaactcgcgtgcagcgctgagctgcgctgctctgcgcgcccgggtccgaaggcagcgcgatgggtgggctgagcgcgcgacccggcagggcggcgggtgtaggatccttctgcgcactggagaccctcgctgcttctgggtaagcgtggagttcccaggtgcaggggcttaagtcgtgacgagcgcagtggaaggcgcagatgctgagcgggtgccgcacgaaattccttgcctttgtgtattcacagcctcggctggctatagccaagacgtggcgttgatcctagtgaaagggaacttggggatcc

SEQ ID NO: 331091 - DNA, 632 bp, Homo sapiens; identical to SEQ ID NO: 221560
  chr1:208084078-208084710
  hyper

SEQ ID NO: 331092 - DNA, 433 bp, Homo sapiens; identical to SEQ ID NO: 227855
  chr1:209381129-209381562
  hyper

SEQ ID NO: 331093 - DNA, 582 bp, Homo sapiens
  chr1:209957603-209958185
  hyper
cttccctttctgtccgacatcaaggaccctcggaagatgagatttctccgatccacacaccccacaccagagcatgttatagtgatttgctaaatgaggcataagtctgtctcacatacgttctttttccacgtccgctacaggttcgggggctcagaaactttttgcggcttcctgcctgctgccagaaaggcagctagtcccccacgcccagccgcaagtaacactggaaaacccgcctgcgctgggaagaccctcgcagcccgctctgctccagtcccgcaggcaccttcttgcgcatgcgcacccactcgagtgccgccctctttccccccattccgtgacgtcatccagccgctcgcgcgcctcgcgttagaatcactagctaggcagccttactgcgcgccggaagtttgggccaccgtgcggcccgccctttccggccagactgaacgcggccccatctgtcggcttaggaactgggaagggcggaagtaaacgagaaaaggcggaacctggtgaaactggtttcccgctgctgccctcattttgcttcgccgaacgtcctccctgtgttatgac

SEQ ID NO: 331094 - DNA, 257 bp, Homo sapiens; identical to SEQ ID NO: 227859
  chr1:209979378-209979635
  hyper

SEQ ID NO: 331095 - DNA, 1077 bp, Homo sapiens
  chr1:210110997-210112074
  hyper
cggagatctgagacgagtatgtggctgattcgggcaaaacaaaacaaaataaaaccaaacgaaaccaaaacagacttactattaccaaatctgagagtcagtgggtgggaatccttttcaaccaaggagacctgtccatggtcctgaccacatcatttgccactcgcctccttcatggacaccgtttgctccaagtaccggacgggagggcgcccggcgccaggaagcttgggcttgggcccccacacgagctcggcgcgcttcgggcgggtctcgggcgcgggcccgtggctctccgggccgggcacctgtttcgaatcgaggcgcgaggcgcggtggggcggtggggtggggtggggtaggttggggtgggggcggggtggcgtcacgtgccagcggcggccccgggaaggttccatttcttccgcggcccgcactcgcggcgctcggggcccctccctcgccccgcccgcggcgcccctcgcggccgcacagccgggcgactccgggccgggccccgcccctctcgctggcggactcagcgcgtcctccgccagccctcgcgtctgctgcccccgccatccagttggtgcggtccatggcgagcgcatcatggcgattgaaggtaagtggaggctgacagcggggagcgaggaccgggaccacccagctggcggggggctcggaggtgcgccggcaggccgaggcgctgacggggccgcctcctgtggtctggagccggctgaagacgcgcgggggtcctggccgcgtctcgggaggcgggtgggcggagcggcgccgctgggacgccgggcccgactggctcgctcgccccggccttcgtggttttgccggcctcccggcggccgcacgcggggcaaagcgggctggcgggcaggtacagcgtccgggccgccgcctcctgccggccgcgcggagtggaggtcggggtgaggccctgcagaccccacgggacgggctgggaggagcgaggggccacggggggctcaggctgccctttcttttctttccccggccgcggcaaaccatccttccgcaatacccaccttcctgcca

SEQ ID NO: 331096 - DNA, 179 bp, Homo sapiens
  chr1:212838662-212838841
  hyper
cgggccggcgggcacctgtcactgatgggaagagctcctgtttccttgccttgtgccaagagggcccaaggcagacctgccagcagccacgagatggcgctgcgatccaggcgactccgggccctgcagccaccctccccgaggctgccccgcggaggacccaagcggtcgtggaggac

SEQ ID NO: 331097 - DNA, 785 bp, Homo sapiens
  chr1:212873467-212874252
  hyper
cggagggaacgcgaagcccacccacgcgaggcgacgcccgggggggtggggaccaggggggcgccatgcagcctttggggtccttcggcggctgccggggaactcaggttgagaaacacagtgggtgttttggggtcggtgttttttcccggtcccatcgcggcatcttcctgcgcctcagccacgccctgcgtccgccccccggcgcgggggtcacagtcccgggggactttctccgcggcgatcagtcatccgggcgccactctcgctcctccagcggccccgaagccgcggctctggggtgaagacgccggcttcaccgagtcccaccgcgcaccccgagccacgggcgccccagggactctgcagggagtgcctgcccttcccgtctcgggtccgccgggctgtgggagggaacgaggcggggcggccccgagggtgaattcccggagcggagggtgggcatggggaggatgtcccggacaaaaacggtgacgggcttccctgagagcgaatctgccacgtgggacgtcactagtgacaggtttggggatctggacccgccatgccacggttaaacggcccagatcatttttctttttcaagatttatctgctcgtgccaagctggggaccgggttgaggtagggcaagtccctgtccacctgcctgccagtcaaaagatgcgaagccaagacaattacccgtggtcctagcgaaggaaacactagcggccacaggctgtggtctgcatgctgtgagcaccgggaaagataaccgcgattc

SEQ ID NO: 331098 - DNA, 892 bp, Homo sapiens
  chr1:213124073-213124965
  hyper
cgtcccgaggtaggatcttggagctgccgcgcgcccttcctgcgcgccgcccgcctgcagccagtccctcccggtgataggcgctggaactcggggaaaagggggcggatggagctctttccactagatccccgccggggtccgggagggcttcctggaagaaagcgggccgccttgcaagccaaggctgctgcagcgccctcgcgccagctctgggcgctcacatgccagcacgttcgtggctcccctcctctcttggccacatctgaggacccaggaatgtgtggagccttgcgggaacctcctgttccttcatgctacacaagctgtctttcttctccccacatcttgcgctccgcatcccccaagctccttgtgcccctccatccccaaccccccgggtttaggtgtgtgtgaagcttcgtggcacattttgagctgcctttctaggtaatcgcagggctggaagcccgtcatcgattctcagggaggctgtcagcgtgcaggggggagcggggagtgtcgtggagacactccgggacccctcactcggttccgctgtgcgtccacttagctgtggtgtcagctgtgtctccgctgatttcaggcaccgccggtaagcagggagcctccgcggagctcccgccgccgctcccccttggtgagtcctgccgcagcgagaggcatggagaaggccgcccccgcggggcgctgatcccctcgccgcgcccgcgcgcacacgccccccgccgccgccgccgctgccgccgccgcgcgcccccagtacctcgctccccgcccaggccccaccatgaccggctccgcggccgacactcaccgctgcccccaccccaaaggcgccaaaggcacccggtcccggagcagccacgcg

SEQ ID NO: 331099 - DNA, 1085 bp, Homo sapiens; identical to SEQ ID NO: 227886
  chr1:214155980-214157065
  hyper

SEQ ID NO: 331100 - DNA, 831 bp, Homo sapiens
  chr1:214159503-214160334
  hyper
cggttagaacacctgatacaacagtcaatagttggaggtgtgagtggtgcgtgtgcgctcctctgtgttgcttccgtgatagacgcgtggggggagtgtgtgggggcggcaaaaggggaaagaagaaggctggggatgctcccgcaatctcttttcttatcgccgacacctaacctgaccgacctaattttttttctccttttcactgtttgaaattcgtgccaaaagtttcctgccgggatagactcggacatactaacatcgctattcttattcaaagggagggcttaatatcctctttacggtttggtgaatttgaggctgaaattgtaaattccctaggaaggagtgtgtgtgtgtgtgtgtcgcagaagacattggtagtgtttggccagtgtacttgtaacacacctcataaataccctgttgtcacgacacagcatgattcaacctttgatctgattaaatttgagggacacacgaagactacttgtcctcctcctacttacaaaaatgagtgtctaatagactatgtatgaatgtttctgcttcgcagctcttgcaagtcccagcttttataggatctttaggtcataaacgcggctgctttattaaaagccgtttactgtgcccggtgaaagggacgttctagctgcggctgaggctcgcttgcatttgtaacttgcaaagcccaaggagatctttaagagccacattatctaaagaaattttgctggttatttttcaagcaagaaatgtcaaaccaaagtaaattttctagggctttattttagagcctgcgatttatgcgtttgaaatttcttgcctaat

SEQ ID NO: 331101 - DNA, 149 bp, Homo sapiens; identical to SEQ ID NO: 197947
  chr1:214161237-214161386
  hyper

SEQ ID NO: 331102 - DNA, 554 bp, Homo sapiens
  chr1:214162300-214162854
  hyper
cgctttccgccaaaccccatccttccgatctccccaggctaaaactccggggccggtccccttgtcctttctctttgtcttgtttattatagctgcctttcttcccggctcttccaatttgcttgtcatttgcatacctttcacttctccttttttaaccccagcagaggaccgggaactgggaggaggagagagggaggtgggggggcgctctgttactttcgtctcaaaacgctgtcgaagccgaattgtggaaatccggcttggaggggagcggtgatgggtcccgggaaacgcgcgcggcgcccctcttccgagctcctggacccagggctgggtcaagttgagtagggtaaggcggcaccgggaggctcggggggtcgcgtggcggtgggattgggacaccagcacgaggaggaccggaggatcgcgggccgggtaagagtagggggttcttgggcagcagaaatgggaggcgatgaatctcccagccatcgctggcagactatggtgttgggcagcttcggtctggtctcgtctgggtggtacctacc

SEQ ID NO: 331103 - DNA, 203 bp, Homo sapiens
  chr1:214387644-214387847
  hyper
cgagctccagagtagaaactgcaattgtgtatttgaaattctccagtcaccaaatccaagaaaggtgaagaggaactgccccagtggcgtctgcgaggcgtttcctctataaagctgtcgtccctagctctggtcagtgctgaccaagtcaccctggcctcctccccggcccctttttctactgcaggaaaggctggagcttc

SEQ ID NO: 331104 - DNA, 279 bp, Homo sapiens
  chr1:214453844-214454123
  hyper
cgttcgcagcatgcctcagagactcggtgagctgggccggccaatgcatttcctcttccgtccatgtaattccactagaggagcagagggcaaactacgttcccattaaagccacaaggtttaaaaacctctaaccttggaaaagcacacttcaaccctctgcacaccaaacttctctactgtggtttcccctctgccgctttctccttggcgttccccgatcactgcctctagggtctttacaagggacagcgaacgtaaggtttcggagctggcttc

SEQ ID NO: 331105 - DNA, 1585 bp, Homo sapiens
  chr1:214724215-214725800
  hyper
cgttcccaaaacgcagaagggaatggagagaggggaccagggtgtgggtttaaccacaaactccccagactgcgctcaccttccagctcgctcccgggaccagctttgcgcctcaccgcgggcagctcccaccgcgagataacacccctgcggcccggccaccccgcgccccaggctgccctgccaggcgtcccggggcgccaatcgcaagttggcgttgccagcgtctgcccaagtcatctgcagggcgcccggagcgccaaggcggcctccaacctcgggcccaactcccggcttggacggggcttacctgcttacatggcccccgtggcgccccggagtcccgcgcggaaaggctgtccttcgcggcggcggagccgattccccacggaattgattccagtgactggcggaggaggggcgaagggaaggagccgcaggaggcgaaaggggagggaggtttccgccgcgatcccggcgcgagagtccgagcagaggcgcaccgggggagaaaaggagaaaaacctaagcacggggctgtcccgcccgaggaggccggggaggatggctcagctgggaggggaaggagcgccagtggccacttgatgtctgtctagggctccccgaggacctgagccaggagagcaggcggctgagcccggagaagcacagcaacctgcccccgagtctgcgcccgctgcgctcactccgccgagaaaaagttggaaagaactttgaggggccgggagagccagagcggcaggaaatgcgagcggccgggagaggagggaggaaggggccgtgcgagtgggaggggacggagcaggcgccggcggccacggctcccccaccccagagccgggctccgcggccctgggggccgggaggcggagggagcgctgggcgcgcggccgggggcggggaggaatgcggcccgggagggcgcgcgccgggggcgccgcgggcgcgcgctgaaacgtggagccccagctcccgagctcccgagctggaggcgcgccgtccttggggacgtcacagcgctggaatccgaggaatgccgggctgcaggagctccttctgcaggcccggagaagtcgcacacttttaatggggtagttttggaaaatgttttaaaaggtgggggccgaggacggaggaccggatgaaactccctggagtaagagacgtggaagtggagagagcaaggcgaccgcagccaccccaaccctgggctgctcccgccgttggggagaaagaggcaaggcaaggaagagcccacctagacttccgaggaccgcagagacggggcggcggcaggaacttgctcaccccgacctacattcagaatagtccaccttatattggggaaccctccaagcaggacgtttcatgcagccaccccacaggggaaaacagaccaggagaaagtaaggtggcctcaccaagtaggcaatctcagagatctctccctagaatctctgggtactggacccggtgtcttagccttctctccctgccccctcccgccccgtaggaatgataaaaagcagcctgtgtgctgagagttggaaaatgtcgttttccc

SEQ ID NO: 331106 - DNA, 1910 bp, Homo sapiens
  chr1:215255075-215256985
  hyper
cgctgagaaagtgggaaggaagagagtttagaaacggattgaagttccactacatcacgtgtgttgttagagaattcgcctattacgacgacagcaacgtctgatctcctggctttcttcccctccttggtgggttccgttccgtccccctgtcgctgcgagtttggctgtccctacgccggggtcttggagtttgggcggggtctggtacctgccaaatacggatcctgatggggaggaggtcggggagcgctaagttcaggctggagtctgagttctcccaccctgctgctcccacccaccgcgcttagaaacctatgtttccagcaaaggggtcttgctctgagagaacctaaccgggttttcttccattccctttgcatctctagatgtcttcgccctggctccaggtgcgttccccatccttttcggtcccggacgttctgcagattatagcgcccagctcatgtccagcaccgccggaggtgaagtggggcgagctggtgactccttaacccttcccgaaggtgtagactggaagaagccagggtcttcattacctcccctactccagggctctcaaggcgccaacggggacacttccctgtacaggtctggggggccacgagggcgaggaggacgccctagtgcaggggtccaaggactcgcgtcccagagcttggtcccacacccggtcccacaccccgaacgctggtcgggaaggagataggatgcagcgcagtgtgatgtggatgccagacagcgagagtgaggattttgcggggtggggatgggggttagtggaaggggctgagaggggaggaggcagcaggtgagccaaggggttgtgcccccaggaagagggaagagaggatctttagaagggagcatcttgcaggggcgacgcaggcaagggtagggctaggaggaggtgcggggaagcaagccctggcggtgagacaggagggggaggaggcgaagaggagggagttccgaaaggagggaaacgagccggcaaggggcgacaggagcgagccgggaagggagagcagcggagggctgcagagctgcgggcgcccggaccgtgccacacaccccccgcggggcacggagggcattgcggggggagacacacaaagacatgcgaagaggggctgaacgaggctcgcgcacaaagacgccggggcgcacggcagctggggctgcacccaccgcccccgcgccgcgccgtgccggggccgggccagcgagcagcccggggctgagcgcgtggcggcggcggcggcggcggcggcggcgggcaggcgcgggacccgggtcgcccgcgctctccgggtgacccgggcccggcagcaggcgcgcgcgggggcggcggcgcccaagcccaacttggcctccgcctcgccctctgcccagcccgccggtgtcccctccttcccgcgatttcgtttcttctcacgctcccccccccgccccctcccgcgtccagccccgctctccccaccttgtaaaacaaagccggggaaaatgcctgcccgtgcagctcggagcgcgcagcccgtctctgaataagaagtgagtacaatggcgtgtttgtaaaaaaaagcttcaagtccgtctttttcaaaaaacattttgaatgctgcatgcctcatgcttcccagcgcctcgcgggagagacccggctatagagcaggaggtgagaccccccctccggtacccccacccctctggccgcacgctctcctgccccagccttttctgggaggactgcaaatgccccctctcagcaagcggccgtttcccatcttcgcttcgcgtccaaagtgttgggtcataatctggatttggaggcaaacccttgccagatcctctccacgccgcttctcccccctctcccgccggtgccc

SEQ ID NO: 331107 - DNA, 592 bp, Homo sapiens
  chr1:216774207-216774799
  hyper
cgccgcgctctggttggacgcaggctgcatcctgtttcccggacacatttattcagcccaatctttcctgtctgaacacagactgttgatgataaaatagcatctcaaattatgagggagaaagagctgcttcggcgttcctccccggttctctgcctggattgggctcccgtgggttgctgaggccctcgcggaggcctaggaagcccggcagcgcgggcggcagcagcgggttggggagcaaggccggcttggaacgcgggctcctgcccactgccacccgcaggctgccccgggctcccgggcgggcgctcggccaggggctctgctcgctccatggacagctgggtggaaaggacgccccgtgaaggacacccggccgtcggaccgcgcccacccctgggcctcccaggggctccctccgcagactcccagggacttcctgggagccaccgcggagggcgctgcgcgcgtccggagccgacgccgggcttcaaacagaaaccaaagcccgctccaacgccgcgaaggaggggggctccaagcatcctagaaaagaaagctggagggagcgcatcagagacacaagtgc

SEQ ID NO: 331108 - DNA, 1430 bp, Homo sapiens
  chr1:217307433-217308863
  hyper
cgggcgccccgggtcctgtctgaaccagactgctgctgcaatgtgagctcgggagggaactggggatgcgagctgggaacagaccgcgctccagcccccatggtttgtgacggggaacttcgggcgcacacaccctggggagtaggtctcctccaaatggcaccgacacagactggcgctggatcttctctccctgctaatctatccgcaaagaccgcctgggcacttttgggggaatgtggccaaaaggggactctaactgcgacatctacagaggaaggagaaactggtggtgcctaagaagttgatctcgatgcgcgcagtgagggcacagggccctgcgcgccagagaagcgaagccagcggtctccacttacttgttcttaattcctccctacccccgctctggcctctcattttcggcctcatggatccaagacccgaggttattttcagtcacaactttctccacaccccgtacccccaaaagtgtacctcagctcaggcgggaaagggcactttgacccgccgtgcgcgagtttccagccagccgctgcgcgcctgagagaaagagcgcctggctgcggctccgagcgcacagctcttccccgcgtgtttggcgcggctacgtttctcttgctccgggctgaggctcgaggaacctcgccagcctgctgtggtcccgtccccttgacgtttgatttctaaaaccgcatagtctgcggctctggcatttagaaaaagaggacaaggtcaaggcctgtggaccgaccgccgcgatccgcttgcacctttgctctcacagcaagcgagtcctggccgcagccgctggaaaaaggtgccgcagcgcccagtttacctggaattcagggacctgaccctgactctatttccggctagtcccagcctctccttcctctcctttccccgctttccgcccagggcggttctgagattttgattaagagagatctgtccccgcaccgcagagggatggtgccaaatggccaggcttcctgggcactgcgtcctcattcccaggtcagagctactgcgaaaggaaaggtctccatctggacgcacctcgtcccctcccccagcgcgcggggcagccctctagggccagctcgggcacgcgcttttccccctcctcaccccctgctccgcccagccccgtacagttttattctttatgaaacacacacgcccaccccgcctcccacgtaaaggccagtcttgactcattttgcgcccagatgcaaactcagctggaagttgagggtagggccaaagaggtgaggggagggtaagagatacagcgaaatagagaatgagaagggagaaatcaaagggggaggagggacaagagaaagcgtgtggagctggaggttgaaggggcagaggcggaggccaaggactgagcaaggggc

SEQ ID NO: 331109 - DNA, 634 bp, Homo sapiens; identical to SEQ ID NO: 227904
  chr1:217313026-217313660
  hyper

SEQ ID NO: 331110 - DNA, 1354 bp, Homo sapiens
  chr1:218337471-218338825
  hyper
gtcctaggacaatcggatttcaccgggtaacgtatatgcaaacagacacgtcccgtttatttcattgtttgcactgcggagactctccgccgctctccacgcctttgttgacctaccgccagcaaagttgtgtggttataaatagatagaggcagctgattaagaagcggggggagtgactttctctgggctcttacggatcaatcaccgctaaggggatgcaggttgaggggaaggaagaaagtaaatcgcggggcagtttgactaagtgaaacccaattccttcgccccaaagctgtggtggccagacgtgcgcgaccctctagacccaaaacagttttagtcagcaacgggtcatcagcaggaccgagaagactgggtgggaggtctggccggtccgaaatagggaagaggtgcgggctcatcaccgaggcggtagggctcggcttatggtctagagccttgaggcgctcccgcgtgagccccgctgcttccagtccgccctcgcctggcccggcgcgggtcgctccctcctccccgtcctgttccgcactttacccagcaggggtcccaggtcgagcagggccaaccctgctcgcgcagcgccggacccctccccgctgcccggggtgcggcggcttccctccgcccaaacggggggtgtctcctccatcacccctgccgcggcttcccagtcggagtcgcgctgcggggcgagggaggctcgctcctccgcggccggggcctgggggtgccagtgcgcccccgagtgagcgggtagggaagccgaagagccgccgacccgctgcgcgccctccagtcccgggcggcgccgggacccagagcggccccagcccgcgccccagcggggacgcgaacggcgtctcgggacggcacctcgccggggccttgccctgtcccgccgcgtcgcggcctctccgcaccccacgtcccgggagccgaccgggagactctcacggcggagttccacagacctcgttaggttaaaggaacctcgccttgccccccactaatcggctagagagggaggccggcgaaacaaaagccgtagaggaaaattaagcgacttccccctcggcggggaacttggaggtgggggagcggggagcggcgcggggcgcaaggagaaggaagtgctgagctgggttgccgacgaaccccgggcagggggaggtggggggctgcggcagaagaaagacaaacatctggggatcggaccatatgccggagctttgtcttgtccttcaaagttcggctgcccttgaagtgatttgtcaggcggcccacgggtgacagggaggatgtgcagcggggagcgggggcgggacatgcc

SEQ ID NO: 331111 - DNA, 472 bp, Homo sapiens
  chr1:218519313-218519785
  hyper
cggcacccgaccgagtaccgagcgccctgcgaagcgcaccctcctccccgcggtgcgctgggctcgcccccagcgcgcgcacacgcacacacacacacacacacacacacgcacgcacacacgtgtgcgcttctctgctccggagctgctgctgctcctgctctcagcgccgcagtggaaggcaggaccgaaccgctccttctttaaatatataaatttcagcccaggtcagcctcggcggcccccctcaccgcgctcccggcgcccctcccgtcagttcgccagctgccagccccgggaccttttcatctcttcccttttggccggaggagccgagttcagatccgccactccgcacccgagactgacacactgaactccacttcctcctcttaaatttatttctacttaatagccactcgtctctttttttccccatctcattgctccaagaatttttttcttcttactc

SEQ ID NO: 331112 - DNA, 463 bp, Homo sapiens
  chr1:218520063-218520526
  hyper
cgcttttctgatcctgcatctggtcacggtcgcgctcagcctgtctacctgcagcacactcgatatggaccagttcatgcgcaagaggatcgaggcgatccgcgggcagatcctgagcaagctgaagctcaccagtcccccagaagactatcctgagcccgaggaagtccccccggaggtgatttccatctacaacagcaccagggacttgctccaggagaaggcgagccggagggcggccgcctgcgagcgcgagaggagcgacgaagagtactacgccaaggaggtttacaaaatagacatgccgcccttcttcccctccgaaagtaagtacttattttgacttccatcccctgaggtttagctctgcccggagctctcaaaaccgcagcagctcccgggatcgcccttccctctcgcggttcccgttcgctcttttcccgttctcctgtccttcacccca

SEQ ID NO: 331113 - DNA, 87 bp, Homo sapiens
  chr1:218520772-218520859
  hyper
cgattggcgtggagcgcgccgaactggtgcacgaagggttaaaaaaagtgtctcaaaactagcctctccggaaggcgccccctttcc

SEQ ID NO: 331114 - DNA, 564 bp, Homo sapiens
  chr1:219347007-219347571
  hyper
cgaggctgacacacgtagaataccattattagcaaaactaaactcagtacagttacaactgcctcaaacttgaccccaaagtattgaaagctcctcagagagcgggccagcagcgctgcgcatgcgcgctcccgggcgtgctcccgcgcgtgcctgcgtatttgcgtgcgcggccccgcgcggcaacgcaggggcggaaccgcatgactggcagtggcatcagcgatggcggctgcgtcggggtcggttctgcagcgctgtatcgtgtcgccggcagggaggcatagcgcctctctgatcttcctgcatggctcaggtggatttcaattttacgtcctggttttctacagctcgggaaacatcctcccctcggttaccccagtattgcccaagtggaggtgtcgccgggcccaaatagggcccagtgggtggctcccccgtcgccagccccggctgtagatgcacgggcagcgccacctgcccccagcctcccccgttagtcttcctctttctatcgggcggtcactggtccaccaccctcgctttggggccttgtgtcccgcc

SEQ ID NO: 331115 - DNA, 1082 bp, Homo sapiens
  chr1:220101064-220102146
  hyper
cgtggggtgagaagaaagggaccgggtgggaggaggaaggaagggccaagcggtccaaaggatgcaaccgaaaggcacctgctacgtttgcgaacacggtcgcccccttctcccgcttcctttccaccgaggtcccccggagggttacggccgagtccgagcctggggctgtcgggtccgccgcgcgccgcgggtcctccgcgccctgaggccccccgaaagcgccggggacacagccctccgccagctgctgccgctgctgcaggcggcgactgcgtccccggaggcagcacgcgaaccaggcggcgcagtcctggaagatgagcagccccaccacgttgaccaacagccccaggacgccgacgatgagcaccagctcggggtcatcgatgcgctcgggccgggccaggcgcagcacggcctccacgaagatggtgaagcagagcgcggtgaggaagaccgcgttgctcagcgcgcccaccacctcggcgcgggcgtagccgtaggtggcgctgaagccccgggtggggcgccgggcgatgtagccggcgctcaggcccacgcacagcgagatcaggtcggagagcatgttgaaggagtcggagagcagcgcgatggagttgcccaggtagccggagaccagctccgccacgaagaaggcgacggtgagcaccagcatgaagagcagccggcacgtcttgccagagtagcggcccatctcgccaccagccccgggcgcccggcgccgcccaggggagcgcagcccaccccgcgcgcagccacaggtggggggcgcggcgcggatccgtgaggcccggtacccgcctcccagattgtctcgccggccctgccccaccgctttttataacgcgaggccgagcgccaccagtccccgcacgtccagagtctaaaggagtggcgggggcagtatctgaacagcccgtgcaccgcctcccgcggcccttttcccctccctcgcggcctgggcctgacttggcaggtggccacgagccgatgtctctctttgtgggacaggactgtgcagagaggggcgctgcggaggagagggggcgtgtctggac

SEQ ID NO: 331116 - DNA, 320 bp, Homo sapiens
  chr1:220700617-220700937
  hyper
cgcgggtgcctacaggatgtcttgaggcaggtgggtggaagtgtgaggaagccacctggaagagggaggacagggcccaaatcagacacagctctccatcctccctaaacaggctcgcctaagtgacacttccttgtgtcccaggaagtgacgatcagccagtgtagatgttgtgactcgcgggtctcacccactccgagggtgctgcagggcgcccagagcgagacgtcttccgccggccccattcccgaagaggccgcgccgtcgggggctgagacccacttgtactgagtctccagccgcctccctaggctgctggc

SEQ ID NO: 331117 - DNA, 944 bp, Homo sapiens
  chr1:220701527-220702471
  hyper
gctccgcgcgcagccggctcgggccgctcctcctgactgaggcgcggcggcggcggtggctgtgaccgcgcggaccgagccgagacattcgcgccgggggatcgggcgccgccgccgctgggccccgggcgcgtggatgcggctgggtcgggcggcgccgtacacctgaggcggagaacggggcgcggcgcgggtgacgctgtcagggccgcggttcctgacgcccaggcgctcgccaggacgagccaggcagtgatttgaggcaccggcttcaccttcacccatggtccggagagcctagcggggctcgccaccgcctcccggctccccttccacgcctcatcctgccagcctcgccgccccgccagcgccgggcaaccgcctcgcccgaagccctccctcgttactgtccgcataccccggcggcgccgccgcgggaagcggctccccctcctcttcctccgcgtcctcttccctctttcccccgccggggccgcttgttgcaccgccccgcggcctgcgggagccgctcgccccggccttgtgctcgcgtccgcacccctttcctgtcgccccccggggcccgcaccacagcccggccggcgagaccccggccagaccccgctgcccgcacaaaatgtcggcccggacgccattgccgacggtgaacgagcgggacacggaaaatgtgagtaaccggagcctccctcgggagcagtgggggcgagaccctcctctgatccccacttcacccgcgcttgggccgtcccccgtgcctcggcgcggccacccgcggcagggtctccacctggagcccggcgtgaccctcacccactgctcagccctattcttcattccaaccccatttcgcttgtttcccctcaagggtgagggtagggaaccgtaagtggcgccctctcgctcggaggtggtcctccaggggc

SEQ ID NO: 331118 - DNA, 714 bp, Homo sapiens
  chr1:220863507-220864221
  hyper
cgcgccgtagtctgcacagtttggccggcaggtgggatgaagggcggggctggcggagcgcgcccgccgcctggtaggccagttcggagcggagccaacgctatcccgggccccacggccagggggcgctgcggcccccccaatcccccgccccgtccgggctggggcggaggagcgggcggggaccaaaggttggtgtctttgcgctcggaccttcgccagaggggccgggacatcatgacggtgggagccaggctccgaagcaaggcggagagcagcctcctgcgccgcgggccccgagggcgagggcgaaccgagggggacgaggaggcggccgccatcctggagcacctggagtacgcggacgaggcggaggcggcggccgagagcgggacgagcgcggcggacgagcggggcccggggacccggggcgcgcggagggtgcacttcgccctcctgcccgagcgctacgagccactggaggagccggcgccgagcgagcagcccaggaagaggtaccggaggaagctgaagaagtacggcaaggtaggggccctgcgccaccactgcccggggggcgcgggtgtggtgtcccgcgggggagcgggagccgggtccttaccatcgactcacccagtttctccgggctgcacctgcgacccctccgcccccgctcccattccctcgccggagggaagccgcgagttgcgagtc

SEQ ID NO: 331119 - DNA, 807 bp, Homo sapiens
  chr1:220921368-220922175
  hyper
cgacctgccagaaaaagtcgttcccaaatgtttgtaaatcctccgttgggcaacccgccttcacgttctgcggtgatcttgtcgagcgactaagcgtgcagtattagcagagaagggggtggcagagtgctggcgctgaaggtcatgttgcatgggtaactgtcgtgttgtaggggcggggaagagggaggagacactgaccaccccagaggccgccccattagctcgcttgctttgggcggcgtcgctcccacggcgcccagggtacccccgccgctgtctgcctgtcttcctccattaccgcgcaggcttggtcaccgcattaaggcattcccgctctccgcggaactgctctgccgtctcggcggtgaaagtgtgagagggtccgtagttgggtcaactttgactcctctcgcctgcccggatccttaagggcctcctcgtcctcccggtctccggtcgctgccgggtctgtgcgccggtccgcgcccgccctcgctctgccatgggcgcttccagctcctccgcgctggcccgcctcggcctcccagcccggccctggcccaggtggctcggggtcgccgcgctaggactggccgccgtggccctggggactgtcgcctggcgccgcgcatggcccaggcggcgccggcggctgcagcaggtgggcaccgtggcgaagctctggatctacccggtgaaatcctgcaaaggggtgccggtgagcgaggctgagtgcacggccatggggctgcgcagcggcaacctgcgggacaggtacagcacagcgcgggcgcggggcagcgc

SEQ ID NO: 331120 - DNA, 42 bp, Homo sapiens
  chr1:220950193-220950235
  hyper
cgcggctgggtcggcttccattcctgggtccgcagcgccctc

SEQ ID NO: 331121 - DNA, 1868 bp, Homo sapiens
  chr1:221051890-221053758
  hyper
cgaaccccacgtgatccggagatgtggtggaggggtgaggctaacatttcctacaacctcctgcaaaggatggaagcgcgtgccgctctcccgggtttcgggaggcagcctgttttgtagcctctgaggctccggggaaaggtttggctgcgtctaagagagacgtttggagccatccgtcttattttgtttgaaaagtcactcgttcaatttgtcactgtgtgacagctcagaataaaaccaatttgcggccgcccctcctcctcgcttcccggaggatctcctgggaggcacgaggcggacgcggtgctgagttgggccgggactcagggcggcaacatttgggcaagggcccaggaaagatgaggggctttgccgaggacacggactcctggaataaaagcagaatgaggtcaagagaagggaagcaaaggggccaaagcgcgctccgctctccaccgggaggcgggctttgcagagccctaaagagtgagattaccgtcccttccccacgcccccaactcgccccgggtgacaagcgcttcaggaaagctcctgtgatcaaccctccttgccccgtggcggttcggagctgcagaagttagaagagagtcagagccctccggagcggctgcctggcccctacgcagagtagcaagaagcactgcgatgtgcgctactaagcccacgcggccgcagcaaaaactttggcgtggccggggcgtggctagggtccggccaggcccccttgttcctaattcccctccactccccgctcccattggtcacgaggatgaccaatgagcgctcggatcgaggtcctaccccgggcctgactcgaaagctcctgccaaaactttgggagtttttagagacgagtttttttttttttctattacttttccccccccctaactaacggactattattgttgttgttttaaatttagctcttagggcttagctatttgggttttcttgcggtgtccggctcccgtctccctggctcccccgcccgccctgcggccccagcgcccctcgctctcatccagcccgcgaggagtgcgggcgccgcgccgcctttaaagcgaggccagggagcgaggcggtgaccggccgagatccggccctcgcctcctccctcggtggcgctagggctcccggcctctcttcctcagtgcgggcggagaagcgaaagcggatcgtcctcggctgccgccgccttctccgggactcgcgcgcccctccccgcgcgcccacccacccagtccggctggactgcggcagccgcgcggctcaccccggcaggatgttcgcagccgggctggctcccttctacgcctccaacttcagcctctggtcggccgcttactgctcctcggccggcccaggcggctgctccttccccttggaccccgccgccgtcaaaaagccctccttctgcatcgcagacattctgcacgccggcgtgggggatctgggggcggccccggagggcctggcaggggcctcggccgccgccctcaccgcgcacttgggctcggttcacccgcacgcctctttccaagcggcggccagatccccgcttcgacccaccccagtggtggcgccctccgaagtcccggctggcttcccgcagcggctgtctccgctctcagccgcctaccaccaccatcacccgcaacaacaacagcagcagcaacagccgcagcagcaacagcctccgcctccgccccgggctggcgccctgcagcccccggcctcggggacgcgagtggttccgaacccccaccacagtggctctgccccggccccctccagcaaagacctcaaatttggaattgaccgcattttatctgcagaatttg

SEQ ID NO: 331122 - DNA, 37 bp, Homo sapiens
  chr1:223936543-223936580
  hyper
cggcgttcaagcatttgaacggggtaggaaaggttct

SEQ ID NO: 331123 - DNA, 591 bp, Homo sapiens
  chr1:223936605-223937196
  hyper
agcctcccaccccaggcctcggccgctgcgctagtgcgtccggcggtcccgcccggcagtaggacagagggagcgagggagtccgggaggaagggagagcgggtgcggccagtctgacggttgctgtgtttgcagatcaccagcgccgcggactcggaggccatcacgtttcagaagctggtgaaggggcacgcgtactcggtcaccggagccgaggaggtaacggccggcgcggatgtgcaggggtcctgctgtcctgacacgatggccacaggcacagtttgtggtgatgcccaggggcccgcgcggccccacggtggtccagtttacactcgggccccgcactcctgaagttccgcgcgggaggagaagggcgtccctttcgcagctcgggcgccgggtgcgccgcgctgccacctggtggccgcagtggccggcgccaggggccctggttttacttgttttagatgttaccctgttttacagttacaaccttactattttgataagctaaaaataataaaacaatgcatcttcatagtgttttatactctataaggtgctttctcttttgatctcgtaaaagtattc

SEQ ID NO: 331124 - DNA, 154 bp, Homo sapiens
  chr1:224528768-224528922
  hyper
gtctctgtggagcgcggcaccgccttggatccagctccacctcctccccgtgccctccccacgaggcctgggagcgggtcctgcccggctgcgcaagggtgggggtcgcgcagttagctgcctttgggatgcagagcacaggggacccaccgcc

SEQ ID NO: 331125 - DNA, 884 bp, Homo sapiens
  chr1:224803454-224804338
  hyper
atgcaacggaaggacgttaatggagaattttgcagggtctgggagcagagcagtaaacgcagccctaagcactgagtatgctacagtttggtaaaatccatccaagcagctttgggatccaaggcttgcactgtatccccaaccaacactaggcaacgccccaagtccccacacttcccactccgataggcgaaactgcaagaaccgggaggggcggctgcggcgtttaggcgcgaggcacacaccatacccttccgcagcttcccacctcctccagacgcacgtgtttaaagagtccctgctccaaccggtcccgccccacctccgctcggcctccagccctgcttgtactgctggcttcaagtttcctccgagaggcgggcgtgcacagctgcagtggcggcggcagcggccaccaagcgcccggcggcgcttcgccacccacctttcctcagcccccggcgctgcagtctccgcccgccggggagggcgcgctcagcggaacaggagtcgagggtggggcgccgagaggagggaatcccgggtcgcaccgctacagttctcgcagtggcaaaggcggcggcggcggcggcggcagcggcagcagcaggtggagcgagctacagcgtttggcctgaaacccactgctgcagccacccgggctggagttggcccgttgggtggagccagtgctcgccccggtccgacccccggtttccgggacacttgggttgcggaggccggctggccggagtcacggttggggacgggcgcgcctcggagcgcacggctgcgctggaagccgcgtctggggcgcaggaccaacgggacctacctcctcccggctacctaaagactccttctctcgggaaagagcgctgccc

SEQ ID NO: 331126 - DNA, 940 bp, Homo sapiens
  chr1:224804868-224805808
  hyper
cgccggccatggccttcactttcgctgcgttctgctacatgctgtctctggtgctgtgcgctgcgctcatcttcttcgccatctggcacgtgagtaacacgctttggtctctcttctttcgccccaatttcgctaaatttccccgatttcaccccactttttccaccttgcgggcgtgggcgaaccggaaggttggaccttctgccgctccactgtcccggggcaggaggcagttcgctgcatcccgccgggcgcgccttcggtgccctggctggaggcgaggggccgctggtgcccaggtaggacaccctctgcagggcccgactgggcgtcccgggtcccgggcgccggggagtggcggctacaaccacaactaaccccttcctctcccgccccgtcctctcctgccggcgggaggcgaaggagaagcgccgccgtcggtcccggcaattagtcaagtagctataataactaaacatttaaaatgtcagcatctgtggtgggttgcatttagatataattggagacaaagtggaaacacgacgggagcgccttgtaagaggtagggagaagccgagcccacggagaggaaggagaccaggcgatgggggtcgaagtggaaggcggtgggggaaaggcgagaaggagaagagcaaggaggcgagggagactgggaagggcaggcatcattaaggccatggaggaaagtcacgaagagagaccgtggagagcgacgacggtgtcctccatctgccctcttggcgtctgaagtccgactcctgaagaccccctgcaggtggcgaacctccgctaggcccccagcgtccccagcccacacaagcttcctgtcacccttcccggggctacgccaggtggagggcagccgtggatcccagttctttaggtgtgggtgggaatagaggagcgcaagcttctgaat

SEQ ID NO: 331127 - DNA, 597 bp, Homo sapiens
  chr1:225117220-225117817
  hyper
cgtcggtgtcacatcgggggccgccgcgtacccgcggtggaatctcgcaagagccagggcccctcctcacctgcccggcacccaggatcccttgcgccgcgttcgggaccccacccccattgtggcctcttcgccagggcgcaggcgtggctcttggtcaggcggttacggccaggaggcgtcggagcctggcgtggtagggctgtgctgcgcggtccttcccattcaccctagtctggcgctcgccggcgtgggcgggccggaccttcgccgcttccaggaagggccacaacggccgtcggaccacggcgcggcgggtaaggtcgtcagcgtcttcctgtcagcggtcggcagagcctcggcgggcgggcggcgcgtggggcagccggtgtcgcactgggagggctgcgtgggcgcggagggcctgggcgctccccacccagctgctgtgggagcgcctccgagtccccgcgcggaaccctcaccaggcagatgctggcgcatccaccaggcgccggcgccgccacgccggtagccccgaccgcaggagctctcaacgcgaggttcttcttagttgctctccctcaggcaggccgc

SEQ ID NO: 331128 - DNA, 936 bp, Homo sapiens
  chr1:225614356-225615292
  hyper
cgtggcatagagcaagacgctcgaatgacgttggacagcttccttttcacacctgagccccggtagccccactaggcaaaatgcaaacaggaaccccgggccttgctccgcgccctttgcttcatgaagcaacagaaaggccaccttcctggctgtaaaggcagaagcgccttcttccccataaacatccttgggcagctcatcattcccctcctgctcgttcttctccctcttcccaggcagcctgagaaacaaaacttaaactggacttgttgcctaatctaaattaggatccctctgctcttctccgtagctccatcttctcccacacaccagttactacaatgcgtaactacagatctacacgtgtttacgtgcaaggtccccgggggcctgttcaccctggcactgcccaggcgccgcgcctcgcgctgcaggtgtccacgcgcggaccacggtatctaccgcgccctcgtgtgaacacccgaccgggccccgtaatcactctgggaaagcgccttcaacaaagccctccgaaagcaagtgctttactaagtgccccttgaggctactggcagtgcgaggctggctgtcattagaacatttttctgaaccctcaaaaaggtgaaaaagcaggaccgtgctttagcaggaacacgcacacccgcctaaatacccgatttttgagactgtccgggcgaaggaattcaacgcataggagcgagcagccatgcagtgtgcctggagaatcaccaaaccgcgacgaccacgaccctcaaagccagtgacaagcagcgcgaatctaagcccacctcggccgcagacccttccccgtcccgccaggccgccgcgccctgtcagcctcctactgcaggaccgcggggccgcctgctcatctgtcagacgggcgctcggaggggccgggagccaggctgc

SEQ ID NO: 331129 - DNA, 175 bp, Homo sapiens
  chr1:225632716-225632891
  hyper
cgttgcagaccaggcacgtgagcaggaagtgggcagggcttaaaacacagagaagtcataacctctgcggtttggttcatgttgtaatatgaaaaccaggaagcttatcttgcaggaggctgatgtgtaaaagttcagaatggagtggagccctccctcttggcaccctatgcgc

SEQ ID NO: 331130 - DNA, 886 bp, Homo sapiens
  chr1:226411104-226411990
  hyper
tccttcggggatgtggattgcgccgtccgggcgggtgggcggggaagaacacggagggggccgggacccaagttcacgcctccctcctgcatcccgcagccggcggaagcgattattccccggcgtctggcggggccgggggcgggctcgcacccggaggagacacgggtctccccgagcccacctttgatcgcaccgccccgccttcccagcccctggcccgggagggtataagtgcggcccgcgcccctccgagcggcgcgctgggttccggagcgatggccacagccgagtcccgtgcgctccagtttgccgagggcgccgcgtttccagcgtaccgggccccccacgccggcggggcgctcctgccgcccccgagccctgcggcagccctgctccctgcgccgcccgcgggccccggcccagcgacctttgcgggcttcctcggccgggaccccgggccggccccgccgccccccgccagcctgggctcgcctgcgccccccaaaggcgcggccgccccgtcggcgtcgcagcgccgcaagcgcacgtctttcagcgccgaacagctgcagctgctggagctcgtcttccgccggacccggtaccccgacatccacttgcgcgagcgcctggccgcgctcaccctgctccccgagtccaggatccaggtgagggcccgctgcgttcgcaagtgcgcgctggagcggaggcgctgcggactctaggtctggactgcgggctcctgaggccacacccgggacgttgcaggcacggtgcttcccctgaggctctgcgtactagactgaaatagggggtgatatcggcacctgctgcatagggtggttgcgaggcctgtgtgaaataatttaggcctgcactgaac

SEQ ID NO: 331131 - DNA, 1039 bp, Homo sapiens
  chr1:226736491-226737530
  hyper
cggccgcctgagctcggcgcggagcccggagcccgcagccgacagtctcctgctcccgtacgctgggcgccagctccggccgtgctgcccggctgcctgagagcgcgcccggccatggagccctcgcacaaagacgccgagacggcggcggcggcggcggcggtggcggcggcggacccccggggggcgtcctcgtccagcggggtggtggtgcaggtccgcgagaagaagggccccctgcgcgccgccatcccctacatgcccttccccgtggccgtcatctgcctcttcctcaacactttcgtgccgggactgggtaagacacggctgccgcgacccttgcgacccccaccccgccgcgggagggcgtggggggagagaagggcgcggccggagacctcctggcggggccgcgcgctccaagtgctgcgaccacgcgccaccgcccgctcctggcgtccccgggcaggtggcagaagcgcgtggagtgtgcaccccagaggggagaggctgcgctggggtctccgacccgcaggcggggccccaaagagccggaaactttgcggccaatgttggagcccgcagcggcggccggaatggctctgccggcttcggagtagggctcccgtcccggcgccccgatttctgctccttctctccgtcgtgtgcatccgtccgcgagcccacttccccgagaggaatggggtcggatcagaatgagctctagggcctcggcggcgaggatcaaactcccgggcgtcgaagtcagctgagccggggaaagaggacgagccgggctagatatacctgcagccccctttggttcgcggagtgcggaccgcgtggggacgagaactctagccagagtctcctccgcctcattcaggggtacctgcacttccgccagcaccccgcagggcgccagggggatgggggatgattttattagtttggatgcatgtggccagagatgaacccatagctccctcggatcccttctgttcctgagaagtagagagtgcgccgatgtaattctgtg

SEQ ID NO: 331132 - DNA, 138 bp, Homo sapiens
  chr1:226814281-226814419
  hyper
ctgagctcctgacccgtcttccttttcttcgggcaccttgtaatgcacccgaccgtccagaagggggcagcctctgcaggcggcgccaggctatttcagacgcctctgtaggcggccctcttgatctcactccagcac

SEQ ID NO: 331133 - DNA, 2262 bp, Homo sapiens
  chr1:226924738-226927000
  hyper
cgttctgcaactcgcgctgcaagatccgcagcttcctcttggcctcctccggccctggcggggagagggtaccggctgccaccacctgctgccggtcccctcgcaggcgaccagcccaacttgggctgctcacgctactgccgctgctgccgctgccactgccgctgctactattcagcctgcgccggccgctccgccagcccccggggctccggggctcctcgggggacagcgactcggctggggggaagaggaaagaggcgcctctcccggggctgaaaacgctgccggggctcagcactgccctcctcgggggcgggggcgtctcgctgccactgggccccgggccgccgccgctcttcatctcgttggcgctattcatgatcaccaggctattgagcgcatagcagtacacagccatagtactgggtcccgcgctgcccgccgccgcggctcccgctcctgctccgccgccggcgcctcctcctcccggcgctcccggctcagccccggaggcccggcagccgcggctccgcgcgcagatggggcggcatggcctgggcagcgggctgggggcacgaccgcgggctcagcccccgcccaaagctccataaacaaccgtgcggctgtggagatacaaggagaaaagtcaggaccctggagggcgcgcggggggagttgggggtcgcctgcagaacccagagagagccccgggaacacaatctatccgggacccagcgccaccggacatctcacctatggggacggcgaggctcggcgagggcatgccccggctgcctcggtcgccagcgcggtttcgggtgtgcttccccgccccccacctcgccccaggctgcgatgcgctttatgaggtcccttcaaatcccaatcctaatactcgtctcgcggaccggcgagaagcgaggtccaagtccttggctcctaagtatgctgtgtgcggggcgcggctgactcagctctcccgggctgaggacaccccagccaccgtctccgggtctccccagcctgagcaaacattggctatccagggcaacccggcagccctcgccctgggcttcagggtctccctgctccaccctctcggggcatcagagaccgaccggctcggagggaacctaagcgggacctgccttgcccgagccgctgccagcgcccggatctgggagggcgcccgcgtgcccgccgtttaccttcctgaccctagccttggggctgtgtctctcggcctacgaaggcctgggcgggcagcggggccgcagccgaagcatttttcagggctagccttgtcgcctatccctagacaagtgttttgtgagtgtgggcgcaccgaggttctacacgttctctttaccggaaccagtacttgctgcccccctgccgtcgtcccctatgggggggtgtctgtgagtgtgtgtgtatacacgcgtgtgtgtatacgccgcacgcgcgcggagcgagtccgctctcagcgcgccctgttgccgaggacgcgactgcccctgcgggctcccggacccgcgcccactcggaggaacttaggggcgtgcatggctgcagccgggcagcagccctaggtgcacagagcctctagctctgcaaacctcccaggagccggcgctctaacaccccagggcagcgccgcggagcgcagggcttctccgcatcccgggcagcctcgcccggcgccagcagagccgccccgagaccccagcctggggactcctggagcgcgctgagggaggcggcgcggagtgagcggcccggaaggcgggtaggagaaatgcggagacctcgtctctccctattttctccccaccgccactccatgtcaccctccaaaatcaaacccccttccctgcctccccagcccacccctttgccctgtttcggaaccaggaacgccgagattcgctccagagcagaaagtgagggaaaagagggttgttcagaggcgagagccattaaaaggccgccaaacttacctgcagtttctcagattctcaggtcctgtgtagactacatgcccagaggcgcaaacctcgtagggacgagatggctttaaaagtaaaaatgctcagaaattattttctcacaagctatggaagacaaaaaagaggagtgcgaaagaggggggaaagctcttcggttcaggggcccggcgatcccggcagtggcgacgccaagccggccctgcacgcccttttcgaccgtggagatactgcccctgtcagtgtctgctcc

SEQ ID NO: 331134 - DNA, 998 bp, Homo sapiens
  chr1:227505256-227506254
  hyper
cgtgcaacgtaatcctgaaacgaatccggttgcatcattaatgaataaagtccgatttgcatcagcaattcacttcccgggaagaagaaaaacagaaaagggaggaaaaaaacagaatgcatagaagggggagggaaaaccaaaaatgttgctgcaaatcctcccaaccaccacttggataatgcatcagcggcaatttctccagcgggaaagggagggggcgaggtccctgaagcagcccctcggctcggagcacgccaagtcttgcccggaggcggcttttcgtttctcctcccgaggtccttctttctttaaggctttgcagtcagtcctattttcaacggattccggtgaaaactcttcattttcctcccggcttcaccctagggcctgaccggcggcgcggccgggggtggaaggcgggctgcgggcggcactggcaccgggctccggagaagcggctacttggccgcccgagcccactccatgtcggtggtcgctcgtgggccgagccgcgccgcgccgcgccgggcagagagcccggtctccccgacacccgcaccgggccgccgcgccggaggctcccgacgccccaggcgggggggtgcttctctgaattcaaaggacacaagcagcagcagctgcggcggcggcgcgggcggctctggcagctacttctcccccttcttcacacccctgggctaagggcatctttccacagcgaggagggaggcggcccggcgcaggaggaggggtcgcttccgcggctgaggagactagaggctgcggcagcccggctcccaaccactcccttcctctcccttccagccctcccccgccttccctctcctctcgcgctcgcgccctgggctcagcgaggctcctccagtcccgccgcacagaggcggaggcttgcggacgagtctggatccaatatggcggcctggccccccggccccggcacacgcgcgcgcacacgccctccactccccgccccc

SEQ ID NO: 331135 - DNA, 1280 bp, Homo sapiens
  chr1:228195275-228196555
  hyper
cgagagagaattcgccggagactttcctcaaaaaccgtatcttacacacaaacacacacacacgttttaaaacaaagtcgatgagacaagactgaacagctcggagcagcgtggttacgtaaagaaagctgggacccggcggggagtggcgcagagccggcggcggggcgcactgggggccggccctgggccccgcgcgcctccccgccgcagtccgggcacgggggtttccaggggccctctctgcgagccctccgcatgggtccacctggcaatgaggggctgctgtagagagagttaagggtgagttaagcacggggtgtgaggggctccaggaccctcaatcagaaagcgctgtgctgcgccctccacaccagaaaaggcgcgttccgtgagaccctccccagcctggcgatggaagtgcagataaaccaaaggaagggtcccgaaaggtctctctcaggcctcccacctccactgcacatatcctgtgggagggggaacggtggccacactttcgccagggcttgtgatccctcagagccctcaccaagcaaggatcaccccagttccgaattaagggcgctctgagatgcccaagattgaggaacacaagtgggaggaatgtgggcgcgcagggccgggcgcagcgctggtaggacccacagttggagagaagcctccccacaagcatgcacactcccccccatccttctccgacggcagcctggaattataataattacgccgaggggaaggggggagacccagcgagccgaggtacatctaatccgataataatttttctcttcgagatggttcaggagcgggggctcccgcggtaggggcgccgggccaggagcagcggggaggggaaggggcagccctaggcagctgaagggcctggaagaggccacgaggccgcggggacgcgcttcggggacccccgcgcgcccctatttccgcgtgccccatttcccgtgcggcacctgctgcgcccagtggcccacctgagggtcaggctcggggctcgccttggggtgcggggatactgacgcgcgtccagacggccgcagggagccaggggcagcgcgtccgtccgagagagccccgagggctgccggcttacgcaccaggcttctaattagaacccgccgccgcgttcctgagcgcaaaaggaagctccttcgccccgcgcccttcccataaatgtcgccagcctcctggcaaccccgcgccctaggatctttgtcttgtcggccctgagggttcctagcctc

SEQ ID NO: 331136 - DNA, 559 bp, Homo sapiens
  chr1:228225442-228226001
  hyper
cggccgactccccgccgcgtccggctgggagcacaatatcccagcgacggcgacaagattaagcacaaggggagagtgcaaatgcgcgggcggttcacacgcccttcgcggtgctgaattaaagcgtctgaatggggatttcccctcgcgccggacggcctggcgcgcggcgcatacttccaggttgctatgactggcctgcgctcgcctaatcaccgactagggggaaattcatataaaatatcgccggccattgtgggcctaactcggcgtgacagtggcgcacaaagccggattcaagcgccccagcgggtcagcacggcgcccggccgcgcgggccgcccggcggtgtcaggggccgtggccgcggtggggcgcgggccgcattccgctctcaggtggctccggggccttttgtgcaggccatgattaccaaatgccaccgcgacaccccctcccggccgcctggctcctcctggggccgcaggaatgagggaaggtgggcagcccccgaggggaggcgcccgggcgtcggctccggcgggctccggcggggacc

SEQ ID NO: 331137 - DNA, 581 bp, Homo sapiens
  chr1:228463167-228463748
  hyper
cgaggcacaagggcctggcgtcttgttcagagcaggggagctggaggtgggagcggggcttaaggaagcttcctggtttcctcgcttaaagtcgcacccgggagggtgcgcagctgcggcccgcgtgtggccagggccgcgctgtttggattgggatcccggggcgcggtgccggcagctctgcctgggcccggctcagggcaggcgccggggctgtgcgggccctctgtaccttggcttgtccgtggaggagggcgagggccgccgtgacctcccctctcctgcgaccccagaggcgcctgtgctgttcaaaaagaagctggagccgcagacggtggaggagcggagctcggtgaccctggaggtggagctgacgcggccgtggccggagctgaggtggacacggaacgcgacggccctggcgccgggaaagaacgtggagatccacgccgagggcgcccgccaccgcctggttctgcacaacgtaggttttgccgaccgtggcttctttggctgcgagacgccggatgacaagacacaggccaaactcaccgtggagagtgagccgcgggcgggaaggg

SEQ ID NO: 331138 - DNA, 571 bp, Homo sapiens; identical to SEQ ID NO: 227971
  chr1:228633576-228634147
  hyper

SEQ ID NO: 331139 - DNA, 369 bp, Homo sapiens
  chr1:228644877-228645246
  hyper
cgagggttccctgttgttaacagaacacgttgcccacctcgcaagtatgcagcccaatcagtccccagggtctcggttcccgttgcgcccttccccatggccactgcgctcattcatgagcctagggtgatcaggcctccggcctataaagaactgcaggatcagtgcggctcttttctcgagatagtaggtggctctgaaaagagcctttatgtccatcaaaggggccccgggggcggcgggcggcctcacttgcccttggccttgtggtggctctccgtcttcttgggcagcagtacggcctggatgttgggcaggacgccaccctgcgcgatggtcacgcggcccagcagcttgttgagctcctcg

SEQ ID NO: 331140 - DNA, 600 bp, Homo sapiens
  chr1:228645306-228645906
  hyper
gccgcgttgccggcaagctccaggatctcggcagtcaagtactcgagcaccgcggccagatagaccggggcgccggcgcccacgcgctccgaatagttgcccttgcggagcaaccggtgcacgcggcccacggggaactgcagccccgcgcgcgacgagcgcgacttagccttggcgcgcgccttgccaccctgcttaccacgaccggacatttccgagtcaaggaaaaaagacaacggcaaccgaaaagcgagactaaaaacaagagggcagtgaaggccagcgagcccttatgtatggtacagaggtaggctagaccgcggcgttcgattggatggctatggtagccaatcagaaaaagaacctggcactcctaatttgcgtattcctttcccagcgatgacgtagaacaacgtttgatccaatcagaagtgagcaaatcctgagccttcatttgaatacaaaacgtacaaatagagttactccgagcgccgcgcgtttctgtttggagagactcagccatcatgccagacccgtccaaatcggctcctgcgcccaagaagggttctaaaaaggctgtcaccaaggcacagaagaagg

SEQ ID NO: 331141 - DNA, 118 bp, Homo sapiens
  chr1:228646027-228646145
  hyper
cgtcaatgacatcttcgagcgcatcgccagcgaggcctcccgcctggcacactacaacaagcgctccaccatcacgtcccgcgaagtgcagacggccgttcgcctgctgctgcccggc

SEQ ID NO: 331142 - DNA, 321 bp, Homo sapiens
  chr1:228646213-228646534
  hyper
cgttcctcggcgtcctgaacccaaaggctcttttcagagccacccacacgatcaagaaagggtttcgaacacggtgaagggttatgtaacctaatgtgtctccatgcaccctagcggttgccgggtgcggccgaatctgagccgtgtgtgtgtgtgtgtgtgtgtgtgtgtgcgcgcgcgcgccggcacagaacgagaaaaactgctcgttacagaaatcggggtagaaactgctcaggtgatgtagctcagtaatgttgggaggcgatcaaggaccccctctccatcccctccctccgcgcagagctattaactcacgac

SEQ ID NO: 331143 - DNA, 568 bp, Homo sapiens
  chr1:228646866-228647434
  hyper
tgtcttttataagcaagtggtgcattcctggatgttgagcgcttgcgcccggttcaggaccgggtccaaatgaggttggcgtgcgccgtgcaggtgaggagtgcgggtcacctccccccaaaagaccctgtgccaacctccccaaccctacccgccccccatgggcgaggccagacgtggcgcaagaccacgggctctgaggccatgggtgttgtcactttcccctggcggtggtgcctggctctgcatttgcttaagacttttccatccctgcctggaccagacagacatgtttagatttaagcaatgaacattccgggaggatattttcctggcaggataccgcgatggcaggatgtttgataccgaatcgaagcacggcgtcaaagcagcgtcctgcgcgggggagccggatgtaataagcgaccccagctgccggtaactttaacccttatgggagtgggggtgggggaaggggttaatttaggaggaaaagaattccctttttctgagcaaatgtagctgcctccctctttagccacattattttctgcgaggcgttagcaac

SEQ ID NO: 331144 - DNA, 104 bp, Homo sapiens
  chr1:228651978-228652082
  hyper
cgccgggcagcagcaggcgcacggccgtctgcacttcgcgggacgtgatggtggagcgcttgtttgtagtgcgccaggcgggaggcctcgctggcgatgcgctc

SEQ ID NO: 331145 - DNA, 555 bp, Homo sapiens
  chr1:228652216-228652771
  hyper
cgtccttcttctgcgccttggtaatggccttcttggagccctttttagaagccggagccgcccgcgatggctccggcatggcgaggtgacaagagcgcctagacgaacgcggatgcggggccggcagggctatttgccatctttatattcaaattaaggctccaaatttgtagtgtctgattggacggcctgactccgcggccgccactgggaggaatttctgtaaatagcagagtccggttcttctttcctattggacggcggtccaaccaatcccaaggcatatccgccgcgcgccggagctgaggttgcgcatctttgttcaaagcctttgttttaaacctggagatttttgtgtctgcagcggatctggaggtagctaaagagaaactgaaaaacggttgcaaccccaaattgaggtcttctctggctgtgaggcacatacatgggggcattttttttttctgaggcccacagctagggaggggtagttagtgcttatttagaaggggaggtggcggtgggaatggcagtttgcaacgaccttaacccttc

SEQ ID NO: 331146 - DNA, 1547 bp, Homo sapiens
  chr1:228870708-228872255
  hyper
cgatcagctgcagttagacttaaggaaaaaagctgtctgttaattcaatctcattcgcaggacaggcctccaggacacttcatttttccccctgggtggagccgtggccagccgggggctccacggagtgaataggaggcggctcaggcttcctggctcgcgtgggcgccagaaagcggaacctcccgggccagtcgcgcggtggtcaccctcttgggagctggggaggaggctgcggaggctggcccggctccttcgggcgtcgcttcccggaccgggtgcgcggggtcccccggaacgtgtgttccaggtcctcccgcgccagtgttcgcagtccccgcctggtcgcggcggcgcctcgggcgcgggtgcaggcgcgcggcgcgcaggcggggggcgctgtggtcttggcgcggggaccgagccgctcggccagacccgcctcttttccctccccgccagcccgcccgcctgcccgccccccacgcgtcgtgtcgccgggaagccgggcggagacagagcgcttgggatccacggcgctcggaccgctgtcctccaacagcgcagggcagagcggctggcgccgccggagcgcggagccacgaccctccctggccgcctttgtctactggccgtgcggcccggaaccgccactctccagggccggggacgcgcccgcagctgtcggtgacagctcctccctaccgcaaccctccggggcggaggggcggtcgggccgggccctgctagcccgcgaccgcaagcccgcgctcgcggatcgatgcccccgcagcagggggaccccgcgttccccgaccgctgcgaggcgcctccggtgccgccgcgtcgggagcgcggtggacgcgggggacgcgggcctggggagccggggggccgggggcgtgcggggggtgccgaggggcgcggcgtcaagtgcgtgctggtcggcgacggcgcggtgggcaagacgagcctggtggtgagctacaccaccaacggctaccccaccgagtacatccctactgccttcgacaacttctccggtgagctggccggggggccggggccgggggcgcgtggccgcggtccacccaggggaaggaaggtggcgcgagggtcgcgaggttcccaagggggctgcagggccccgggcgcggctccagctgggaagccggacaaatgaggagtgcaggacgtttcctgagtctcagggaccgggcaagcgcggagctaacacgaaaggaccacggcggagtgggcttggagagaggagggcggagcggcagtcagagccttgccaaaaaaaaaaaaaaaaaaaatctcacaatttaagcaacagataagtaggagtgaaacaggttgagttcagggtgcccggtcagtttgttgcatagagcaaagtttcctgagggcgacgtcgctggcgccgctgcagagtttcaatcagaaggtgacgcgcaggtgcctttacctgagcgtcgctcctttgcttttaggcggctcagctcacaaggggcgtctccgctttaaagagccgcggagacgcc

SEQ ID NO: 331147 - DNA, 853 bp, Homo sapiens
  chr1:229542853-229543706
  hyper
cgcagtccatgccacgggggataagtttttcacaagtggctttttttccccacagtgaagagacgtggcctgggtctggagttcctcaaccggcaaaatacgacgtgaacagctcctgcacccaaaaaggccccgagttaactctgctgcataggcgaggcaggcaccgcgccgccagtcggggacgcagagcgagcgcgtcctctgggatttgaaggccgcccccgtcaaagttggcattcgggggcctgcgtgttccggagctacggagcggcaactgaggcaggagctcaggactggggggagaaagagagaccctggaagcgattaacgtgccccttgctttacagatgtggcagataagacacgagagggagctctggtccccgaggggctgtcccgggagggagcgaggtggggagggggagcaggccctgccccgagcaccccgcggactgagcgtctggcgtgcacggcggaggggttaccgcggggaggtgacaccccagggtggtgagggcacgcagatgaggctggcctgaggggtgcctgctttggggaaagcagtctgtggagggagggaaggagggcgatcgcggccccacgcgggttgtgctgctgaggctccgcgccgcaggaaaggcaccctagccggattcgccctcggacgccccagctgggcacactcacgcggctctcccgcggcttctcgggaattcgcctccagggcaatcagctcttcgcacaaacgttcaaaccaaggtaagagctatcagatccagccagatctgcttcctaagcctggccagggccctaagcacccccacccacacgctcagaggcgggcgacgcc

SEQ ID NO: 331148 - DNA, 1382 bp, Homo sapiens
  chr1:230561209-230562591
  hyper
gcctcatttgtttccggagagacacccacaagccagcccacggagagtctggactcgcccgccccagcacccacgcctcccccgcgcccggttccagcgccgcccccgacatccacccgcgggcagccccttaccgccggtatcctcgaagcgcgggggcgggcggtcccgcagcgctgcgctccagcccgcgccggcctcgtcctcctccggctcctgtgcgtccggggcgcggggcggtggcggggcggcccctgggggtcccgggggctcgcgctcgtcgtccgaggaggcggccgaggaggagcgcgaggcggccgaggtgctgtagaaggggttcccgccgctgtccgggccggactcgccgaacacgtcgtccgagatgtgcaggctctcgtagcgcgcgcgggcagcctcgagcagcgccggcgccctcctccgcgcgcccccgccgccctcggccatggccccggccgccgcccgcgcgcccgcccccacagtgcctcccagccgcacacgccgggccctgggcccgcgccgcggcccgccgccccccaccagcgcagcccgcagcacagcgcccgccgccccgtgcccggccggcccgccgtcttggccgcctcgggcccagcgcccggggaagcgccctcggagctcgggcgccgcaggctgcgggccgcggcgggaggcgagccgcgcgcggggctggcaggggcgacccagagcgggcgggacgcagaggctgcggccgagaccaggcgccgccgccgccaccgccgccaccaccgccaccaccgccgccgctgcgtctcctcggcgcccgccgcctccctgcccgccctctccacggcctccggcgctcggctgccgaccttcccgggcgcgagccgccagaggcgggccctgccgcccctcacctcccgcccgccggccaatggggagcccggcccggacagccgcgggggagctgggcgggcccggcgcggggaacgcccccaccctcctccgcggggcggggcggggcgcgcggccggggctggcggttagggggagggccgccggcggcagtgccggtctcctcctacagggacgcgcagcccgggaccgccacgcgcagcgcgggagggggagggcgggaccggggaacaggaggggagggggacccgggtgcttccagcggtccgggcccgcggacggagtgcgggccgatcccgctcactgtccccttccgcagtccgcgtgcagctccagggagctgtccgccccggtggttctgaaccaggcgccgccgaaacgctccaggtaggcggcgggcccgaggtcaccacacccgcggcggcggctgctgccgaggtttcctgggggtcactgccagctgcgcc

SEQ ID NO: 331149 - DNA, 40 bp, Homo sapiens
  chr1:231053145-231053185
  hyper
acttgctaataaaccgcctctagggggcgctgacatacac

SEQ ID NO: 331150 - DNA, 1334 bp, Homo sapiens; identical to SEQ ID NO: 221615
  chr1:231175065-231176399
  hyper

SEQ ID NO: 331151 - DNA, 1900 bp, Homo sapiens
  chr1:231296814-231298714
  hyper
tggcgctacgactccggtctttagtctttgtttggagcacgggagaacctgggacggagggaggcatgacttcaatattcatatcgttgttaaataaacgatttcctaatttgtatctgtttcatgccagcgtgaaacttctgtaggcagagccggctgcgctgccagcactttcttctgctcgtccccacccacctctgcctcccccacccagccttccctcggcagcagcggggaagaacagccgagcagaccaaacagccggggccgcgggtgggaggctgttcccgcagctcgtggctggcgttggagaatgtggagattttcccattcataaaaggaacgtctccgcttgccgccttcccgtccgccgcacaccgccacatccgcagcggggtagggctgggtctgggggcgctgggttcccaggggtctacccgggcgcgctctcgcctttctcaggaaaccccattttgtgagcggcaccgcgtgtcctctctcagtccgtgcacacagttgacctggagcgcggatgagcacccttggttgaaaggaagagacaaaatggcttgtggttcaattcataaataaaacctcacccttggacttcaggctgcccgacattttgggacttggatttttttgctttatcgtagttttaggaagcgactgtcaggccatgttgcctatccatttctaaacgactggctttttaggatcccgttttcacccttctatggcggtgggttgggggtggggtgtggaactggagtggcccagggagacgatggcaggggcggggcggggcaggtcgttgtactgattcaagatacaatctccatccaaataatggattgttattaacaatgatcctccctgcaaaacccttaaaattgccccttgattccctagcagcaagaggcgagcccttattcgctgagctgaagcctcctcccccctcctccccattactctctgctctggaaattacaactcctcggcgcgccgcgcggggaggcagcggcagcggcgggagggaggcggggaggggattcccgagccagccggacgctcgccctccgcccgccggctgcagcgtcgcgcggcccaaggtcagaggcgccgcaggagcagcagctgggaaccagggaagcgggtcaatcccggccgcagggagaaagccccagggcgcagtcagccggcgtccacagccgcccaggagtagggtgagcggctgtctccgggccggtcgggtcccgccgaggtggccgcggccccagcgacccggcgggtggcggcccaggggtcggcgagcaggcagctggagccccaccttcggctcccgggcgctgtccgccgcctcgtggtgctgatcccagccccacggctgagcggccttcgcacctgcctgtctcacctcgctatcaccccgataaggagttgggccggggcagaaggggggcctcggggtagccgcccaccggagccaggggctgaagcagcgagcgcacagcagcccggccgctggtcctggggtggagaggaggcgcgcgctgcagccggcggcggcgctggtgctgattcatcacctaaagctcctcgcaggccaccgcgagggcagccgaccggctccggaatctggccgcaggttgaagccgctggtgcgggaccctcgggcaggaggtgaggaccccctcccttctctcgcccctcaatcatcttagggcggtggctacaggacagagagaggggcgtgcccctcggctgtgaagtgggcatgcccgtgtgatgcccccgcccgtcgtctcaccggggcgcaccgcgctggtcctcctccgccagtctcccgagctccggccattcatccccagcgcagagcagcgctggcagccggcgccgc

SEQ ID NO: 331152 - DNA, 966 bp, Homo sapiens
  chr1:232765040-232766006
  hyper
cgggaagacccggagaggcccaggagctggcaaagtgggaagaaaggtcgcggtgagtgagaagagcgctcgccggaggctcccggtcttacaaagagggatccgtcccggtgagggcgcgcgctccgggcgcaccccctctagaaggggaattagccccgcagcaagttcggcgtcagctggccaggcgcgccggggaagctgcgtcgggcaaccgcgagcccttccagagagcgttagtcagagcgaagttctgggcacctggagaagaccctcctcagtgcctgtgtcgccgagacgggaataacctttcagccgatcgataacttggagagaacaggcggcggcggctcctcttccagccggggatcgggagcgcgggcgcatctgcgtctacaagccggaccctgcgccgcgaccctcgcacccccgcgcccctcgcacccctcgccgccgtcagccccccaaagcgccccgaagggcatccccttccccttcgggacagtccccgcctggccgcaggcatcccgaaccgaccctcgccacgctgcccgtcggattccccgacacgaaccttcgcaacgccgtccgccggaacctgctacagcctgtgcgcgccgggcggcgcgtacccgggctgccgcctcgccgcccgccgctgcccggggctgcccatcggcccggactctccccgcgccgggctccggcggaggcggcccggacccgctggctgcggctggagctctcggcctgcgctcgggcggccggcgggggcgcggtgctcctcctccgtcctcctcctcctctcgctccgccagctcctcccgggctcccagtctgccgcgccggctcccgatgccaccgcccgcccgcccagcggcaccgccccccgcccgctctgcgggctcccattggtcgctgcctgcaggccccctcggccccgccccacgattgggcgcggacgcc

SEQ ID NO: 331153 - DNA, 554 bp, Homo sapiens
  chr1:232941054-232941608
  hyper
cgcccgagacccgctggagcgcttccgcaaatctcgcgagatagcaggcagcgatgccttttgctccggtttctcgtgagaccccggggcttcagcttctcgtttgcggagcccgcggcggcgtttcctggggcaacagcaatggcggcctcgctgtccgagcggctcttctcgctggagctgctggtggactgggtgcgtttggaagcccggctgctgccgtcccccgctgccgcagtggagcaggaggaggaagaggaggaaaaggagcagggggaggcctcgtcgccgcgcggtctgtgccccgccgtggccttccgcctgctggacttccccacgctgttggtttaccctcctgacggccccggcgctcccgccgccgaaccgtggcccggtgtcatccgcttcggtcgcggcaagtcctgcctcttccgcctgcagcctgctaccctgcactgccggctcctgcggaccccgcttgccaccttgctgctgcagctgccccctgggcgcccgacgcccaccccacagctcctgggggcctgcgacatttc

SEQ ID NO: 331154 - DNA, 1282 bp, Homo sapiens
  chr1:233749409-233750691
  hyper
cgcgcgcgaacacacacacacacacacgcacacgccgcgcgcggtcagctagagtttggctactggacccaggaagggagggagcgggaggagctggtggctgtcgggtcggggtctgggcgccaccgagcgcccgccccacctctggagtgcgcagaaggcggtgcgtcccgggccccggcagcccagcccaggcgctctggccaagtttgcgcgcggtctccgctgactctcgggttacctgagccggcaaccacgtcagcgccacatcatctgggctttttatattgcaaggaaacaggaaaagaaggaagaaaaacatcgcccgagagagccaatcgcaggaagacggcgctgcccggaggagcggggcgggcgggcgcgcgggggagcgggcggcgggcgggagccaggcccgggcgggggcgggggcggcggggccagaagaggcggcgggccgcgctccggccggtctgcggcgttggccttggcggcggcggtggagaagatgctgcagtccctggccggcagctcgtgcgtgcgcctggtggagcggcaccgctcggcctggtgcttcggcttcctggtgctgggctacttgctctacctggtcttcggcgcagtggtcttctcctcggtggagctgccctatgaggacctgctgcgccaggagctgcgcaagctgaagcgacgcttcttggaggagcacgagtgcctgtctgagcagcagctggagcagttcctgggccgggtgctggaggccagcaactacggcgtgtcggtgctcagcaacgcctcgggcaactggaactgggacttcacctccgcgctcttcttcgccagcaccgtgctctccaccacaggtagggtatcctgcgcgccccctggccgccccggccacctcgcccacaacccacacaccccggccccggcgccccgggcccctctaaccctcccaccccaccccccacctttcgccatcccggctcctccagcccgcctcccctcactgtcctcccgaccctccgaccttccccttactggcgtccccggcctctgcctgggtgactcgggagggcaagccctgcggagccggaagccagagaggtgactccagacgtgacttggttgttgccgtccgtaactctggggaagtggtccctaacttcggcctgggtggctgcaggtgcttcctccccttgagttcttttttcgcaacccactaagccaaactgtcgggtttgaatgtgtagcagcacctggccgccgtgcggcaaggcag

SEQ ID NO: 331155 - DNA, 1271 bp, Homo sapiens
  chr1:234040262-234041533
  hyper
cggcagggtttgagtcaaaagagaagggtggaggagcgcgtccggtgccccaaggcttccaggcggagcgcgggcgcgaggtgcgggctccggggcggagcgcacgcccgggaggcgggaagtgggcagcagcgcccccgcctggcccctgtgcgccccgacccgacgcctccccgcccgaccaggtgcctcgagagcgcacagctgggagggctctcccggtcgcggcgagactcacgcctgcggtgtgctagggcggcggcgacggtgacgggcgtggggcgcggcgctgcctcggctgccgggtcgttgcggcgagcgcgcgggccggcctggagtcaccgggctgaaccgccgcgcctgcatcgtgccgcacgccgcggaggcgctcgggtacagaccgcgcgggcgcgcacaaagcggcccggggcggccggcgcggcgcagaccctcggtgggcagcgcactccagtcttcccaggctagcggctgcagggagctccggcccgcggcccctccgcctcaagtctgggagctgccggtcccactctgtctttgcctatggggattcgagagtttcccagcggcgcacccaggggcaagagcattgccgtgtgagtagcgccccgggcgtgggtgagcgagccggcgggcgggaggccggagcgccggggtagccctttgcagctgggacactgggcagtctgaggctcggggaagggcggcgcgcgcggtggagctgctcgggaagtttcagtcattctttccctcgccactcgccccaacccgcactgccccgagacgcccaggatagggcactggggacagctgcccggggaagtgggtgagtggcggcgggaagggaggagcgcgggctctgccgcggcgctcgcccccggagggccccggccgcgctcttgctctcgccctgggatctgctcctcacgaatcccctcctctctgtccatgctccccctgcccacccacctgcccgtggcgcctgcgaccgcagtggcatgaggaggtcaccggacgtcagcccccggagactgtccgacatcagcccccagctccggcagctcaagtacttggtggtggacgaggcgattaaggaggatctgaaatggtcgcgctccgtggaggatctcaccagcgggccggtggggctcacgtccatcgaggagcggatcctgcgcatcactggctactatggctaccagccctgggcagcgagctgcaaaagtaagaccccctcacgtcatgtttcccgt

SEQ ID NO: 331156 - DNA, 586 bp, Homo sapiens
  chr1:234349884-234350470
  hyper
cggggctgggcgtcccggggaggagggcggagcaggtgagctgcggggtgggagcagggagtgcacttgtacgtgacgttggagtttgcagcaacctccaagtaggaggctgtgcgcgcgtgtgtgtggagtggctgcgcggccggggaggatgtgcgctgcagggcggccgccgcagtgagcaacgcggcaaccggagcccggcgggcagccggggaggccgggactgagaggggcgagccgctggtgctccccggcggcagagggccgcgtcggccacgggcccgggagagacgcgctccagccggccccaggatgtaggcgatcggcggcagcgctcctgcaggcggccggctcatcatgaagaagcactcggcccgggtggccccgctcagcgcctgcaacagtccggtcctgacccttaccaaagtggaaggtaatgcgcggccgcctcgccccgggggtccctgcaccctagccggggaatgctgccaccctgaggggggctgtctggctgcggggcgccggggctgggggtactgctcccccaggacgcggctccgcagtgcagagcgccgccgcctgc

SEQ ID NO: 331157 - DNA, 186 bp, Homo sapiens
  chr1:234736252-234736438
  hyper
cgatacaaagtgaaaaaataaattttttaaaaaagaaagggaaaaactacaatttgaccattctgaccagcctccttgttccaactggcctcttgatttgtataaagataatggggtccggcggcccccttgatgcatgaattgcacgctgggcataatgaacttattgtgcgaaagcactttgga

SEQ ID NO: 331158 - DNA, 162 bp, Homo sapiens
  chr1:234812061-234812223
  hyper
cggggagagggtagagtggtgactggtgggaataaaggattctggatgggaagccccggaggaagccactgaccgcagtgcatgctgggggttgtagttctcgtgtactccacgggtaaacaagtcagagaagcaggcagaggaaccaactcagtaaaaccc

SEQ ID NO: 331159 - DNA, 1411 bp, Homo sapiens
  chr1:235811934-235813345
  hyper
cggcacacctcactcatgagcagacgacaggactggcacgttttaatggagcacacgggcgcagcctaggcggccttttgctccggctgagaggcacgggcccggtgccagcatttgacagtcctgggaggcgacgggtagaggagagacgcggcagccgcggggccggggagacggtgggaggcccggcgtccatcatccactttattacttgatcaaactttaacattttcgggtttcctaacaccttagccccaaatactcgaaatgaagcaaatcttaaattaaggagtctttccccaccacgctctgtcctcctccccacttcaccctcccgccgtttcgcgttatttccaaggcaatttaaaaaatcaagccaaacaaagctccccggttgctgccgggcgcgcgcggcgaacgaagcacatttcagttcagcaccagcctcggggacagacgccatcaaggaggtgaggaaaaccaccctcagctgcggtggctccagcgtcaccccgagtgctcccgaggcggcgtctgggctgctggggagccaggagggcttcctcaggcactcgccagaaacatttccccaaagaaaacgcccaaccagccacgccatctcctgccactgaggtccttttccacgggggacgtccccgctgggaaaacagcaaacgctctgtgacctacaaatggaagaggggacccccgagcccccgcctgcctcatgccggagggaccgggcgcccccagccccggaagcccctggacgcgctccgagggggctgtccacacccgcgcgcgggcttccccggggcccggcgggaggtcccgggagaggaggccgagggaaccacaggtctttgtgtcgcgtgcagcagcagctggcggcgtgaggaccacaccggcgccagagccgtctccctaggtccggagactttcaccccgagtttcccttccgcgtctggctgcaccgggctgggctctccccgcggacacccggggctccggccgggcgcccacttacccggagcgggatcacgcgcgggcttcgtctgcagcgcggtgctcgcggggggcggccaggccgagcggcatcgctccgcatcggggcgcgggccgggctcgggtgcaaacgcgcgcctcgtgcccctcccgccgcccgcggggtctccgcgtcccgtcaccggccccgccccgcgccgcgcctcccgccctgcagggcccgaccacgcgggcctgggggcgcaggcggaccctcccccggccctggacgctgggggcttctgctcggccccctgtgccgtgggggcccagactggggaagggagagccggcgactctgcgaccctcgcccccgttccacgctggccgcgcccactccgccgcggggtctcgcccgggaaatccc

SEQ ID NO: 331160 - DNA, 399 bp, Homo sapiens
  chr1:235813668-235814067
  hyper
gaggggtctggggacggggccgcggtcagcgcgggctccccgaagcctcaggtaccgccctcgctcggggtgagctccagcgcctgggccgttggggcgcgggccgcttcccaccctgcaccaagggacgcctcggaagcctccggccaaggcggggaacggcggagaaacgcggaatacctgtgcgaattcgcgcggccgcgtcgccactaacccggcgaaggctgacccgacgttgctgagtgacggggaccaggggccggcgaggcccccactccggggggagcgaggccgggagggcggagggcgcgtgctggaggcgggggtgcccttcgcgccccggttctaggagcgactgctctccaggcctcgtccctgtggcaccgcaggcttttgcgc

SEQ ID NO: 331161 - DNA, 1249 bp, Homo sapiens; identical to SEQ ID NO: 228026
  chr1:236227506-236228755
  hyper

SEQ ID NO: 331162 - DNA, 694 bp, Homo sapiens
  chr1:236444211-236444905
  hyper
cgaaaggatctggtcagctaagcctcagatttctagcacactgagaacacttgtaatcatcgcttcacatcaacaaccagccagcacctcacgactgccagagccagagcctccatccacgagccacaacgccccactcagacccccccagtctcgtattgggacttacctggcgatgccacttggcagacacagctcagctgggtaaaaataaagcaatcttgagcaagggaaggtgctcgaggaagagtaaaagcccagaaagctctagtccgacagttcgagtgaagtcttgccccctcccaatcccctgcgcctggcggggcctcgggggtctgcggagtgcccccaactctcagtctccctccctcactaactcctgaagggaaggacgtcaccgtttctctgggcgctcgctcccttcgcaagacagccgaggtggttcatgcccgtcccatctcccgccacactcccagccgcttaacacatccgagaggaaaaaacgaaaacagctcagggggaccgtcaccatcttcctcttttgactgccattacccggagtgtcgccgtccccccaccctgcgggcggttcgcagatgtttcccgcactggacggtcaggtctctgctccccgggttttctgctcgccagaaatcacctcttttctggcccggccctgcccggccctccccgc

SEQ ID NO: 331163 - DNA, 998 bp, Homo sapiens
  chr1:236558377-236559375
  hyper
cgccggcgggcatctcagcccaggcctgtgtaaggggagttctggtgtctcagctgagggcgtgagtagggagccaggaaagcgacccgcgactgcagccgtttcttaaggccagtccttcgctcgcagtctgtcccgggcggcagtcgtgtcagccccccgctaggacccgcccagggggacgtgggtaccgggcaggacgcgcgctctgggcgctggggacgcccgggacactcggggccccgccttgcgtcccagccccgggtcgcggcaccccggctcccgccccgcgcctctggagggaggtaccgagggacgcgcagcgaaggggctttgctaattgccaaagcaggaagtgagctcgtggaagaagcgaaggaggagaagaagaagggaggggaaggcggaggagggcaggggcgcgcagagccacggtttgctccaggcgcgtcggaaccgcaggacttttcatccccgtggtcccacggtcctcccgcgccccggaggcctgccagccccgctcggacgctcgtttgcccctaacccgccgccatggcttcaccggacgaccctctgcgcgcaggtaaagggacacagcgccgcgcccgctcctggagcgagcaccgcggggcgggagctcgggaggcgctcgcagcagccgcagggctatcgaggccgggcctcggcgacccccgagggaggcccgggaaccacccccgacccaggcgccagacccggagtcgcacggggctcccagtccagccccgcgagcggctgctgaccgcccctcccgcgctcgccagggcccctgccccgcgtcagccaccgcgcgccttccccctgcccatgccgcagcccccgtggcttttgttctggactcgggatgccaggttgagacacgtcctgcaaacctctggcagaaatgggcgcaagggggtggatttcgttttcgcctcccgggctttttctttctccccgctcacatgccttctcattac

SEQ ID NO: 331164 - DNA, 786 bp, Homo sapiens
  chr1:236849524-236850310
  hyper
ctcagagcgtgggtggcaggcgtggctctgctcggggccggccgctcccctcacgttcccggaggcctcggcggaaggcgtgcaggcggcctctgggcggcggctgcaggggagacagtggaggggcccggcgcccttgtccgcccgcacgtgctcggggcggggcggctggggcccgacgggcggggccgggggcggtggcggcgggggcgtggccgggcggccacgtgacgggcggcgcggctattaagccgcgcggcagctgctcgcagccggagctggtgcttcgcccgagacccagcgcccaggcgtgtcgccccgagaggagccgcgcgaaggtcaccccgcgcccgccgcccgccgcccgccgcctccgtgggtccgtttgccagtcagcccgtgcgtccgagcccctcgcgccccgccgcagccccggccaaccgagcgccatgaaccagatagagcccggcgtgcagtacaactacgtgtacgacgaggatgagtacatgatccaggaggaggagtgggaccgcgacctgctcctggacccagcctgggagaagcagcagaggaaggtcagcaggggcccgcgggccgcccgcgcgtggtggggccgggtcccccgcggggctcccgtgcgcgtggccgcgtggcctggcgactggcgagagggcgctttgtggaggtgctgtgctgtcctgtgccctcgcagccccgggggccccttaggaaagaggacacgtccggggacaggcaggacactgggcgtcgtgtgtgtgcgcgcgc

SEQ ID NO: 331165 - DNA, 1508 bp, Homo sapiens
  chr1:237205156-237206664
  hyper
cgtgcgatccgaagtgccgtggaagttagtgccctagcccagtccaggaggaaggggcgtcgtgccggcggttttaagctcggaaggggcaggggaatgagcccagggaccccagcggggcgcaggtaggaggctgtgcgctcgccgggtgcgctccggccccgattcccagcgcagccagtaagtggcgctgggcctcgggtttggcggcccggaggagcgggctgcggattacctgcagcagcggggagccgccgagctcctccccgcccgcccccacaccccacccccaccgctgcactaaccccggctcagctggctccgcgcacttgctcggaggagccggggccgagcggaccgccggctgcaggcagcgagcgcggctgggctgcggggctgcttccccgcgtcctccgggcccgggccgccctcctcccgcacagtgcggagcagggaggccccgcgcctcgaccacccgcgcccgagcgtccgcgcctcctcctccgctctgcaggcggggaccgcccggcgctcggcacccggcagcgcggccccctccagcccccggctcccggcagcagaagcagaaggcagcgccaggggccgccgccgccgccgagctccgcggggctcgggagccggccccggcgaggaggcgcggaaccatggccgatgggggcgagggcgaagacgagatccagttcctgcgaactgtaagcgccgtgcgtcgcgtgtgctgtcaggggaagggggcgtcagggcatccactagcggggtccgggcagagtgacagcgggcagcggggactcgcgggcggggcgagggggtgccccctgaggatgcgggaggagcgggcatcaccaagtgtgtgcaggtgtgcgtgttggggcgagggaaggcaagggcgcgtgtctgtgcgcgcgtgtggaaagctagaggatggagcgcggctagccggcggcaggcgcccgggctcggacccggggcaccggggacaggagcgtcggagctgcgggaaccgggagaggaggggacggccggtccggcctgcctggtggcacggctgggacctcccgggcggccgggggcagggtgcagagcagggtggcccgtgggggcgcggggagcggcgggaactcgggctgtttctgggaataccgccgccgggaggtttcttgggctttcgggctggacccgcgcgttgtcacggagcgaagacgttggttcgcttactccgtgtagcgtgcggcgcagctgaccgggggcgggggtgatggtgcaggacgctgcgcggaggtttcccccaagtcaaggtgctgcgaaagcggaggaggagtcgcctccgtggtccccgcggttcccggggctggtgccatccgtggtggtgctgtgaccgcttgcaaagcgtggaaggcatgggaagcgagcgtgtgtttgcgtgtgtgcgcgcgcgcgggtggtggtggggagaacatcgtgaacgtgtcgttctctaaatgctggcttat

SEQ ID NO: 331166 - DNA, 1257 bp, Homo sapiens
  chr1:239549378-239550635
  hyper
cgtcctctattacactgctctgcagaaacagactcactaaatgtcaaaaagtagatgcatcagactgttccttagagaaaggtttgccatggagtcgtatattgtaactgagctgaagttcactcatcgataagttgtgcccaaggaatcgaattccttccagtccttctaagcagtccagggaaaccaatttaaaagcgaacacaacaaaactaacagaccggcaaaatctatctttgaagcgccgcgggaggcacaatttgggaacaggtgaggccatgctgggtgggtgaggcccccctctctcctgcttggtgttccgctttcagccaacccaccccaggagtaccctgggatctcctcgccccctgccaggcggagaacgcggagcccagcgggcacgcgggaatggagctaggcgccggcagggcaactgggcatgctcagaagccgggcaggttttggtctcaagcacgcagcctgtgcattacaccagctctctcagtccggggaggaggaggagcaggaggaacgcgaggaggaaggagaggaggagcggccagcagtagccacgaccgccaccaccaggcagaggaagagttcgtggggaggaaaagacctctcctcccccttggagcgccttctctctgcttttggagaaagggaatacacgataaagaaggagacggaaagaagagaaaaagtgaggcgggagacagagggaaaagggcgtgaacagaaagggccggagcgtgcaggggagcacagggcgcgggggcggcactgccgagccgggagcgctgccgcttgggcaggtgccgcggccgctgcccggaggcggcatgtgacgcgcggccgcagctgcccgcgggcggagcgctctcagaccccggagcgcacaccgcggggccatcggtgccatcgcggatctccaggctcctcatcagtccgccggggccgcagcagcgcttctgggaagacgggcgatgaactgaagggcggctccgggcaggggggcacgatcttaaggacagtcgctccctgaacgcggagccggaggagacgaagggaaggtggagcggacgccacccgcgcaccgggcaggcgcggagaccggcgtgggacagccacctggagcgcagctgccaggtagggacggcgcccgccacccaggcgctgggcagagcgggtggcggtagcggctgacctggtttcttgccttatctcgttgcgaaaggaggaaaaagttttcggcgc

SEQ ID NO: 331167 - DNA, 2065 bp, Homo sapiens
  chr1:240254939-240257004
  hyper
agagtgcatcttccagctgacgatctcttcggtcggggacaatgcattcgattcgcacggtggagattaaagtccccgagatagaggaaacgtttttcgcgcccaggttcagcgaggagccgcgcgggggcagagggggcggcggcggcgggcggggagccaggcccgagctgcgttctgcgcagccattggtgggcgccgcgctctgcactgagcatgttcgcgccccgccggcccctagccgcagccgcagccgcagcgacggcagccacgggagccgccgcgcattatgcaaagcggcggcagatgcgagcggggccagccgggcgcgcgtcggcctcccctcccagcggctccccccgccgccgcctgactctcccgggagactccctaggcccggacctggggccgaggagggccgggatggcctgagtgcccgcggcgcggcggcgcagcagcgggattgcaccatggggaaccaggatgggaagctgaagaggagcgcaggtgatgctttgcacgaaggcggcggtggcgccgaggatgcgctggggcccagggatgtggaagccacaaagaaggggagcgggggcaagaaggcgctaggcaagcacggcaaggggggagggggcggcggcggcggcggggagtcgggcaagaagaagagcaagtccgactccagagcctcggtgttttccaacctgcggatcaggaagaatctgtccaaggggaaaggcgccggcggctcccgcgaagatgtactggattcccaggccctgcagaccggggagctggacagcgctcactccctgctcaccaagactccagacctcagcctctcggcggacgaggccggcctgtcggataccgagtgtgcggacccttttgaggtgaccggtccagggggtcctgggcctgccgaggctagggtcgggggccggccgatcgccgaggatgtggaaactgcagcaggggcgcaggatggacaaaggaccagctcgggctcggacacggacatctatagcttccattcggctacggagcaagaggatttgctttcagacatccagcaggcgatccgcctgcagcagcagcagcagcagcagctccagctccagctccagcaacagcagcagcagcagcagctccagggcgccgaggagcctgcagcgccccccactgccgtctcccctcagcccggggccttcctgggcctggaccggttcctgctggggccgagcggcggggctggggaggccccgggcagtccggacaccgagcaggcgctgtccgcgctctccgacctgcccgagagcctggccgccgagccccgggagccccagcaaccgccgtcccccggcggcctcccggtctccgaggcgcccagtctcccggcagcgcaacccgcggccaaagactcgccctcctccacggctttcccatttcccgaggccgggccgggggaggaagcggccggagcccccgtgcgaggggctggggacacggatgaggagggtgaggaggatgcttttgaggatgcgccccggggctctccgggggaggagtgggccccggaggtgggagaggacgccccgcagaggctgggggaagagccggaggaggaggcgcaaggacctgacgcccccgcggccgcttccctgcccggcagccccgcgcctagccagcgctgtttcaagccctacccgctcatcaccccctgctacatcaagaccaccacccggcagctcagctcgcccaatcactccccgtctcagtcccctaatcagagccccaggatcaagaggcggccggaaccctccctgagccgagggtccagaactgccctggcctccgtagccgccccggccaagaagcaccgggccgacggcggccttgcggccggcctgagccgctcggctgactggacggaggagctaggcgcccgcacgccccgggtgggaggctccgcgcacctgctggagcgcggggtggcgagtgacagcggcggtggggtgtccccagcactggccgccaaggcgtctggggcccccgcggctgcggatgg

SEQ ID NO: 331168 - DNA, 433 bp, Homo sapiens
  chr1:240775035-240775468
  hyper
acccggggtgaaaccggcgagacgtccactcagggctttcggtcctgaccagccacggaacaaacaacgtcaattcattctaagtgcctggtgaaggtagaaatcagaaaccgtgtctgtgtcacgttagtcgtgacaagctgcgtacctgcaatgacgtgatggaagcctcctcctcgggtcccttctctctctctctctccctctccctctgccttctctgagttctctagtccacagcggggtctaagtttggtctcccgccgccgctttcagttcgaccgcagccagactgcagcagacgcccataagagaagcgcgccggctgagggtgcaggagaggcgagagcgcgccccgcgccgcgcggtcccaggctggctgctcctgcagatgtgaaaggagcccggagacttagctctgaatcctctcggc

SEQ ID NO: 331169 - DNA, 1229 bp, Homo sapiens
  chr1:241519651-241520880
  hyper
cgggtctcccacacagagccggagtatatgcttcgcctactttcacctgcctgcgctgccagccaccggctgctctcctttctccccacttcgcttcggaagtccggaggtaatcctgcctaatttttgcaagaagacaccagaatatgtcccggcaacaagaactagtgggaggtcaagccttcaggccattttacccgggtcaccgtgggtaaaagcctaactgcagaagcctccagagcaaccagccaaagaggagaaaacaggcaagcccctgctccccttgctcgctctcacggcagcagcaaatggcaggcgagcctgtgccccgcgccgcggcggccgccggagccgggcagcagtttcagcaccgtggaccgcggggtgcgcgcggcgcccgtagcccagccccggcgcggggctcccgggggcggccgccctgcgcccgcggacgctcccgctgcgcagagcgagggctgggtgcgggccgggggccgggagggctctgggtggcgctgcctcctccccgcccgccttccctatttacctcctccgccaaggtcacggccccgcggcgtctcccctcccgggcgggctgggtgcaggcggtgtcagctggcggcaagcggagcagcgaggcagggtagcttcatcacactcgcggcggatgcggattccgcgccgccccggctctagctgctcaggcgaccgccaccctcgcctcgccgccgcccgtgcacaggcggctccggcagccgccactcgcgcccgctcccctgggccgcctcgctggctctctccctcctccgcttcttctcccggggactgggaccagccgagcgcgcgcgggagtcgagacgcccggcccgtgcgcgcgactgggaggagggaggaggggacagtcacgtgggacaggggcgtccgaaggtgccggctcggatgggctcggctcggccgccgccacaccgcccgggcctcccgggcctccccggcctcccgccctcgcgcccctcgggaggctgtagtcctgcccccggcgcggccagcccgcgctcccgcacaccccgcccgctcgcccgcgcgtgtgtacgtgcgccggaggcctggagagaccggagtttaacgcccagtgtaagccggaaagggaggaaggctgtgcgatgggtgggtgggtggtaggtgggtgggtggtctagtgaatggatggacagatggacggacggatgcac

SEQ ID NO: 331170 - DNA, 756 bp, Homo sapiens
  chr1:241587098-241587854
  hyper
cggcagcagcaggcagtcctgagcggccgctgccatcgcgccggctgcagcggaaaggtacaagcggtggcggcaggagccgctgtgggagcagcagtggcggcagtgggagccctgtgccacgcgtcccctgtgcgccgtgtccccaaggcagctgactacacctcccccaccctcctgcagcagggtggatcccacctagcgggactccccacccacccctccaggccttctccactccggactctggccacttgccaccgttgtcgcccgccgccgctgcagggagggtgcacggagggagcagaccgtctccggagcccgccgccctgggggctgcagtgatggggccgggctgaggcacctgccggcggggtagcagggcagtcgagcacggagggaggggcgggcctccaggggacttcagcgggagccgggcctggggcggtgccgcacttgcacacggagtgtggggggccaggcctgggaccaggagctggggccgggcttcggcgcagaggcaggaagaggaagcggcacccgcttcggggacccagccggcggccaggccaccgcgcccacccggccgatggcaccgtgttcctgcgcctcgggagggaggaggctctgcgcgggactgcaggttctgccccgcatcggagtgatcgctgagcctgacgctctcgaaggctgggcctggggcccgcaatctactccggaggctttcccactgggcagggtcgctagcagggtgag

SEQ ID NO: 331171 - DNA, 1492 bp, Homo sapiens
  chr1:242687211-242688703
  hyper
cggtcattaaggcaagaaactgcaggcagagaagcccccgaatccgacctaggacgtcggcgcctgccaggatcccctcgcctgccccccgcgccccgcgcgcgctcatgccaccaccacggggagggtgcatgcggcaggtgcctggccgaggcccccgggagcgagtcgcccttacgtgctccagcttgtctttcctccgaagccagacgctggcgctgtagtcctgctgcttgacgctgctgtagaagttcgcgcccactcgggtcaggcttggggagggctccttggggcggcttttgagcctcatctgctcgaagccctcatggggggaggccgagagccactcgtgctgccggatctccatcctgacatgaccgggcggccgccggcgagcagcggactcgggacgggcgcgcggggagccgggcgcggagggcgagcgggaggcccagcgggagccggaggtggagctggagactgagctggaggagctggaggagcgagcgggcgcggggagcgcggggtgctgagcgccagctgggagcgcggccgggcgggagggggcgatcgcgggaggcgcggggcggaaggagggagggcgaggtgcgggcgggggcgggggcgggggcggagggggacggacggggagaagggggacgagaggggacagggagggaaaggaacctgctccggggagacagaagtgcccggtgcggcggcgacgtcgcccggcggctgcggtcccgagcgggcgctccgctcgccggctccttgcggcacctactgggacccgggccggctcccggggcggcggcggcggcgggggtggggtgcggtgggaggggccgcggctggcccagccagcccgcgcctgcaggttggtgcagtgaggagccgccgccgcccctcccgccgcgcccaggcccgggcggccgcgctcccgctccgcacccgcctttcccgagcaggctacacctctccctggcgcatctttactggaaagccggcaggcgaggggagaagtgagcgccgtctccgcgcctcctcggtcctgctggctgagcgcggggatggctccggagggagacactcaggaaaccacctccgcccttcccccatctctatccagcggcgccccctcaccctgcccccggctcgcttgggctgcgccttcccccattctgaaagttcactaacttcccaccccaagggacttagagcagagggtgcccagcattcccccctgaaaatagccgagagacatgtgttttctggagccgtacacgctactttcatccgatggtgtggcgatgcaaatacgcccgggggcagtagcccctcgggcaggcacgcgggaccggttgctccccagccctcggtgtccacctagaaccgggctccccgggccgcacccattccgatcctgggagggtgatccagggctcctctgcaacgctccgcttgtgcggtgactgttccttaggtggac

SEQ ID NO: 331172 - DNA, 655 bp, Homo sapiens
  chr1:243646223-243646878
  hyper
cgtgtgtggttcgcaggctgtggggggcttcttgcagcgggggctgctgcctaaacagactccgcgggccccatgatggcaaaccccctcgccccgttcatgacttaatgcctcctagaagaaaaggctaaaaacaagacacacagaacaagaaattgcactctctcaaaacgacagtcgccctgaaacggacgctggaagaggtttccaggcccgtggcgacggtgaggggggtgaaggtcgcaggtggagggcacggggcggcggctgcggagcccggggaggaggcggcgggcgcccgggtcttcctcggagcgcgccccctgggctgggcggcgtgtccctgcctcccgccggcgccctcgtccccgcagcagcgtccccgccgccaccccgctgcctcgtcgcctttctcgcaaacagcggtgccctctacgtgggggatcctggaggctgctgagcacgagcgccctccgcgacccgcccctgctcccgcctccactcttgcctcggggggagggtctcagtcttctgcctaaggcgccctcctcccttgggaagtccgccgtcctctgccgtgaagattgcccctctctcctccagtgcctcctccccagcggcttcggtggctcccaccctccgcaccccgtctcgc

SEQ ID NO: 331173 - DNA, 836 bp, Homo sapiens
  chr1:244012299-244013135
  hyper
cggtattggaaaaacctggccccaacgagattctttatctctaggctaactgtagattcccgggaaatcccaaacaagggatggtgaccccgcctcggcgtcagggtcaacacagcaaccagctaggcttcaactttgggctctgaagggccccaccggcatcatggctgatgcggaccgatgcgccggaggaggtggacaaggaagaggctggtctgtttacttgcagccagagctgccgccgccgccagcagcgacagcatcactggatcagccaaacccagcatcttccgcacatttctattcttagcacacaactcccaagcggatcaaaaccccactactattaaaaacacagacaagcacgttacccacctcccacacacacacccccccccccaccccaccagtgccgtcttttcctgcgcgccagtggcggggaagggtgggggaaggaaggagaccccggggacgcctgtgcatcctcgccttcaccccaccccacgcgcagacagcctcagcgccagggcgcgcggcagacggctccctccccccaacccaaacacactgacaccggcgctccacgcgttatataacctcgccgccgcccccggtccaggcgggcgccccctccccacgccgcgcggcccgggcggggaggggcgaggggaaggagcgagagttgcgcagacagcaggcgccgggccggggcagcccagacacagacggtaccgctaggccgggaacacccctcccccggcccgctgcgcaccgccgccccccagctttccccggaaagcggggggtgtcggtgtcaaccgcgctgggcatccccc

SEQ ID NO: 331174 - DNA, 963 bp, Homo sapiens
  chr1:244013722-244014685
  hyper
cgctcgggcgggggccgggtcacgccggcggggcggcggctctgggccccggggcgcgcccggcgcggggaggggttctgcggcctcctcccgggctgcgcctcgctgaggggaccccccgccgcctccccgccccctccttcctcccgctcggggccgccgccgatcggttctcgccgtcgccgcggggcttgttgttgactttgaggaaaactcctgacgtcaggggctggctctcggcgactggcgggagcggcttccccgcgtccccggccctgcccgccgcctctgctcccctccctgcccggccctcgtcctcaggcttccccgcgcccccaaaccagcggtgccccgcgccccctctcctctcgcgagaacatccccctagccagccagagccgggagcgggggcagtcgctcccgggcgggaagttctgggtttccccctcgcccgcgtggcccttggcgggcacccgaggcccgggagcggaggctcctcgcccagccgcttcctcggcgcatccgcccacccgccctggccgcggacgcgcgcgccgccaggccccgggcgtctcctccagtccgccgcggccccttggggagatgggcccggcgcgagggctcgcacctggaagcccacgaagtgggcggtgcccaatgaggtagggaccggagagcgcggagcagtccagaagccgaccccaccccctgcacctcggggaagagggaacccgggtcagcccgtagcaagaatcattcctgactatcccaggagaccacggcagaccaaaaacacctctctgaacagccttccgcaccgctcgctgcaagcattcgtccacacacggtacacagattgcgggcggatcgtaattcactcttgaaatcacaccctttttagggatattcgttttcaatgactttgggaaagccacgaggtactacatttactacgaagagacc

SEQ ID NO: 331175 - DNA, 631 bp, Homo sapiens
  chr1:244080520-244081151
  hyper
cttttccttctcactctccccgcacgcccacgcccacccgcttctgcaccgagaacctcgaggcgcgcacgcacgtggaggtgacgccaagcccagcggcgaggtcggggctgggggtggggggagccggcgtcccgcgggcccccgaggccggggagctccgccagcgcattgtgcgagcgagctgaatgcagccgaggggcgagcgcgcgggctcgcacggattagccgtgctttcccatgagccacaaaagaatgcccgaatctgggacatctgtcatcaaggggcaggctgctcaggatgcaaggtaaccagagctttcctcggactgcttcagtctttggggacgtggggtcaccctaatccttcctgtttatattgtgaacgcgtaggcagcgagacttaagctctgcgtcggtcaataagcatcacgacgcaggcattcctgagcggctacgtcctccggttgctttctcggttttttggaagaggcagcgttgcctcccatttattcagtcccctcacagcagcgcggctgtagcgcgccgcagaagagcgccccaacgctgccggcccctgttttgtttcttctttctgcattcatccactttgtcctcccattatggcgac

SEQ ID NO: 331176 - DNA, 871 bp, Homo sapiens
  chr1:244893344-244894215
  hyper
gttttttttttttttctcctgtctcaaaaaaaaggcattgcagagattgaaaaccgtttcccaccttctcccctgcagtgtttaggaagagacaatccgcccccgattcagcgcttcccagcccgcagcaactgcgcagcggggggaacccagggctccgcggcacccgcaggctttagttactgctccgaggccctcggaccaaagagaggctgcgaggaggacgcggctcgtttagctcgctgcgaacctcaagataacccttggtttccatgcacatccccccaacattgcatgtgctttcattcctacggtgctggggttactttcatttattgcttttgttgaccaaaaagaaaaaaacaatcctgagcgtgcacagggggcgcaacgggggaccggctcctcgtggctgaccggcggcggggctggcgcgcgggggcggcctgcgcgggccgcccggggacgctgctctggggtccggccgcggcctcgtggccgccctgcgcgcggtccagcaccagcagcgggatctcctccagccggtccggccgctccttgcgccgcaggtagcgccgcctccacgtcgccagcctctgaagcagcctctgcaggctcgaggggccccacaggccgcgctccggggcctccttgcctgcgcgcgcgtgagcttgcctgagcttcttcctgcgcgggccgcggaacagccgccgccagcaccagcacccagagcaggagccgccgtcgccggccaccgcgcgccgcccgaccgcctccggatccccgcgcggaggggggccccgctccaggcgcgccgccttctccagcagctcgtgctgcgcgccgccgcgccgggggccaccaaaccggg

SEQ ID NO: 331177 - DNA, 636 bp, Homo sapiens
  chr1:247170868-247171504
  hyper
cgggagtcgggactctcccgacaacccctccgtcatcacagcacaatccagggaagacgcggcgctgcgggcgcggggctgccccgggagggctctgggccgtgccgaagtcaccaggcagagaccggacagtcacccagcggccgggatcccgctgccggcccggcccccacctgcgcgggacgggactgagggccgagctgcgccagcgggactcggccgcacactccggagccgaccgccgggaggcccggggccgccagcgctggttccagccaattccaaccgattccaaccaccccctctcccttctcgggacaccctgctccgcacactcaccatttcccagcttttgggggtcccagcgtcctccctataaatctcgcaatacctgcaggccacagggcgatggagcctgcggcagtcacccgggactctccgagaggcagcagacgggaacccagcaccccgccggccgcaaggagacaaaggccccgccagatccccaaggccgccccttcctctctggctgcacgcctgattggacagttctcacgctagcgccgctgactggatggggctccaggccccaccccctcaggtcttgagtgacaggaggtgcgatcagacactggg

SEQ ID NO: 331178 - DNA, 307 bp, Homo sapiens
  chr1:247241973-247242280
  hyper
cgcgggaccacttggacctcccagggataaggggaaggagcagcggagacgcaccgagctcgccacattcgcgctgcccaacacaaaagccgcgccaggtcccggaagctgctccctcctttcgcggcgcgcttgagagtacagtccccttcccagcgcccgattggacagggccttaggccccgccccttcagtcctgagtgacgggagatgcaatcagacacggcgctgagtgaggccaggttctttccctgcagtccttttctaaggcatggattctgccctgtgctgagacctggcgcccccc

SEQ ID NO: 331179 - DNA, 819 bp, Homo sapiens
  chr1:247267064-247267883
  hyper
cgccgtttgctcaaacacacggtttaacgttttaacaaagcctcggcttaattttaggggaagaaaggtgggactggaagccccatgaaccacagctcctcccatgctggaaccccgcacaccgagacaccgagtcggggctctcccgcatcaccctcccgtggtcaccacactacctggataggggaggcgaggggttcccgacagggctccggccggcggaagtggcgcccgcaggtacagacaggatgcaggggttccgctgcccgccccgcccggcccggccctgaacagaagaggactgagccccggctacgccacggcgactcggtccgcaggttccggagccgatggcgtggaggcccgagtcgcgccacagcaggtttcaaccagccctcttctccacttcgggaagccaggcgcagtccactcaccattcctcggcttcccgggtgtcctggcgtcagctagggatgtcccaatactcgcaggtcacagggtggcagaggctgctgcagagccacctgggcctcccagagccaagaactagcagcggagactaacaggaagagccggctccggcgaaggagagacaaagcaaccgccaggcagatcccggaagccgccctctcctttccggcggcgcgcctgattgaacggtccccaccccagcgcccctgattggatggggcttcaggccccgcccctcaggccctgagtgacaggagattgcgatctcacgtgaggctggatgaggtcagaatgaccgcttttggcctagcggtttgtaggcggtgcgtccttcctgcgctgggatcc

SEQ ID NO: 331180 - DNA, 1005 bp, Homo sapiens
  chr1:248020330-248021335
  hyper
cgggggcggggaaccacaacgttaattttatccccgacatagggagcgcctgagtggtggcttttcaccgggtgtggctcgtctgagctcttgaactgaagccagcggacaccacccgtcggcgcctgctttcctggggcgtgggctcctccccctgtgcagaccgcgaggggagacggtgcgggcggccgggagcgcagccctccgggaggcgggtcatggcctgggcgccgcccggggagcggctgcgcgaggatgcgcggtgcccggtgtgcctggatttcctgcaggagccggtcagcgtggactgcggccacagcttctgcctcaggtgcatctccgagttctgcgagaagtcggacggcgcgcagggcggcgtctacgcctgtccgcagtgccggggccccttccggccctcgggctttcgccccaaccggcagctggcgggcctggtggagagcgtgcggcggctggggttgggcgcggggcccggggcgcggcgatgcgcgcggcacggcgaggacctgagccgcttctgcgaggaggacgaggcggcgctgtgctgggtgtgcgacgccggccccgagcacaggacgcaccgcacggcgccgctgcaggaggccgccggcagctaccaggtgaggcgccccccggcgggggctgcgggcgctgcggtgaccgggaagcgggcgacagtccggagcggagccgccgaggccacccgtctcctgagcggctcccacggccgctccccccaccgcgcgccgtcccccccgcccacgcggctcactcagtgtgggtctctttgccttggctgtggtaaccccctttgcgacacacacccattattttacaccgtccgcccctcccccaagcactctcctgtcgtcgaactcgcgctgggctggtttctcccgatgcggatagtctggtccctcagctgggctctggtcgggagggctgtgtggtccagttcattcttggtaacaattgtacgtctatatc

SEQ ID NO: 331181 - DNA, 177 bp, Homo sapiens
  chr1:248406552-248406729
  hyper
cgtattagttttaacttaatttttggtgttgaagtttgggctgtaatccagtagatggcgcctaagagtaatgcccgtagagaggctcttgatcggccacttggctctttcgtgtttcctggcattcgcaggcacgctgtccggtgggggttgagagagatgcctccttaccaggac

SEQ ID NO: 331182 - DNA, 1195 bp, Homo sapiens
  chr2:45398-46593
  hyper
cgcacacggccagccccgcccccagccttctgggcacacacctcgggtccggctctgctcctggctgggggtctccttggccttcttacaggtgtacagccacttgatgatgcgggcgttcctctcgatgaccgaagtggtgctgggcacctgctctatcagctcctcctcctgcagcccctcgtcgtcgccgccgctgtgccgggagaagccgctgccggaggtggcgacgctcacgctgcgcaccttgagggtcacacagtccgaccccgcggtgaagttctccctccccagggcctccaccacctcggggtccaggccgcagtactggaagaaggtgtcagactcggccaaggcagcggaatagcgggagctgaggtccgactgtgagcgctgcagcccccgacgcctcaccacccgcggctctggcccagggggcgcggccgggacactggagggcgccgcggaccgcgcggctggggctggggtctcggggattgcggggtccgccgcggggccaggagtggtcgggaccgtctccgggttcccggccttgccctcgtctcccgtccggggcaccggcgccttgtccttacccggcccctggaagagcttcttcaccaggcttgccctggggccgtcggcgcccgatcctcgcacgaattcgcatttctgccggtagatgatcagcgagtccggtctcaacggcttccgcgcaatagccctgcgcgccaccggggccggggcgcgggccgggggcccagggtcgttccccgggcacttgatcgcccccgggccgctgccctcggaagcgacgccccggccagtccccggccgaccccgcacatacttggcgcgatccgccgccagcctctccactgcgctcctgcgcgccggccgcgcggcgtcggggtcccgggtagccgcggggtcccggggaaggagccgctcgttcgggggcgcgctcagggccgccagggcgcgcatcttcgcggggaatggaccgaccggggttccgggtccagcggagacgcgctcgagtggtagagccagtcagtcccagggccggttccgaagtccgcgccgggtggggaacggcgccccagtgcccagctgcccaggcccggggttggggagaaccggagtctgcaccgattggcgaaactccccagttcccgcccctcccgacctcatc

SEQ ID NO: 331183 - DNA, 527 bp, Homo sapiens
  chr2:46668-47195
  hyper
ccccgcccgtccccgcctcctcactcccgcccgggcccgcctccctggccgctctccgggtgccagcgcccgccctcacctcgcgtccggggtcccggccctcacctcctgcccggtgccgtccccgccccccctcaccttccggcggcgctgccaaccgcctggaggacgctggggcgagcaggctctgaacccccactcgctcagccccagatccccgaggtcactgctggacgcaggcatttccggggagggggagcagaggggacgtccccccacctcccccgggcaggtgcctcacatcctttgaattcttaaagtgacctcatcgtgtttggaaacttgactgtttaattttgtctacctgagctcatattcttattaacagaaaggaataggacataagaggaaagaacacgcagcgcacgccaggatcagcctacgtgttgggtggcaagaacgcagggcctcggattgggtccgactcggtcgctggccggcagcgggcgtggccgggcccgaggacc

SEQ ID NO: 331184 - DNA, 569 bp, Homo sapiens
  chr2:263894-264463
  hyper
cgccggttttcccgtcctcctcctcccaccaccgcccagctcttgagaggggagggtgctgccggacaggtgggtccccgggtactcactgctgcccgcccggccgcggcgccccgtcccgaggctgcccaggaagaggaaggcgcgctgccccgccccgcggacaaggaggccccagcgagggcgtacctgcggcaggtgacgaaggaggcggcgcaaaacacccgccgtgtacgtttcgcgggacaaaaaccacgcgcccgccgggccgcgctcaggccttcgccctcagggacttcggaaccgccccgtcctcaagatcgaaaagcccagagccccgcggcggctccaagcacggtgttgggggtgggggtctcagggagcgcccaggcccaaggccgccctggtccggcgtggaccccgcggggctcaaggcaggttccccgcgtgacccgcccagcccctctatgcgaactcgaacgacaggcaccacagcccgccacgtgcgcgagactcgcgctgtgccccaacccaggtgggcggcccgcggagccgcgaggcctgagccc

SEQ ID NO: 331185 - DNA, 1236 bp, Homo sapiens
  chr2:287626-288862
  hyper
cggcccagggcgcagtcccgcccgaggagctgcaggcccttgtgctccgccgagtggtgcttccgcagctcctggacgagttccaccaccagccgcagcagcgcctgtccgtccgccggctcccggggctccgcgcccccccggccgcgccccgccgcccccagcaccagcagcagccccaggaggagggggtgcccgggtccgcgcatcgtgcgctcggggccgcggggctgggagactccgacacgcgccgagagctgggctcgctgcgagagaaggggcgcggggggccggagagaaagtcagcgggggagggggacggagcgcggggcgggggaggggaggggaggcgggaggagccgctggcgctggacccggcccctcacctccgcggaccccgaggaacaagccggcaggtgagggagccgcggtctcctcgacgatcacgcccgaggtcccgcccacggggagcgaccgccgctggtgcggaaaggagcccccggaacccgcccgcccgccagcccggcccctcctaactttcgcccgaaaggccgcgtccgccgagcgcgctgcgcctggcgcgggcgcaactttctttcccctttggaagccgcgggtgccaggcagctccccggccgcgggcggacctcggaggggccgcgctcccgcgcctaccgctctccaagaaggcggcgccgcgcgccgggcccggcggccgcgctcaagtttccagcgtcgcctttgcgcggtggtcgccggcgagcgccgagtccccgaagcccacggaggaggccgggtgcggaccctcgcgctggccccggccgcgccacgtgctggaagcccctccacctcccggccatggcgccctcccgcacctgcccggcgccacccgggagccacctgcgcgtcgtggccgggccggttacctggagccgccggagtcgtcgccgtctgtgcgcacgtctgtccccgcgccccgagctgcgccactactccatgcccggcgggcggagcgcacgggacgcggggactcggccgctccgagcgctggacccacggccgacctggggtgcgccggctccgagtcccgcctcagacctcggggagcttcttatccccgcgcccgccgacgtcaggcgggtccccaagggctccgagcggggctttaattagaagccgctgaagtgttagtacccccatgcggatcttcgtcagtccccccgcctcacctcgctc

SEQ ID NO: 331186 - DNA, 708 bp, Homo sapiens
  chr2:467981-468689
  hyper
cgcgctgtgcattcagggccctcgtggctctcagaggcgcgtcccaggggcgcacactgcaccttgggctgggcagctccgccgggttgtggcgagcggatgagggaaggacgcagaaaccagggcggaggagccgcgaggggcaggacgaggctgcatgggccagcgagggggtcgacaccgagccagagtgagcgcggggcctggggcgcagagcccgcccagggagccgggagacgccgcgcaagctccccggacaaacgcaatgaccgaggacgcgcgggcgaggccgtccagggagccctggtccctcagctgcaccggactgagccgcgaccgctcagcacgcgctgcttataaatcaggggtgcgcttcccaagccccgggtgaggtcccctacgtcggcacagccttaggagctgcaaagcagcgcgcgcctccggggctcctgcgcgccccttgaaccccgcctcccgcatcctcctgcaacagcctggagctccctgtgcaggacgcagcggggggcggggggcggtcttaggaggctgcggggcgcactcccacctcctgcctccccgagacccccagcgccttctccagggtttagagcggaggtgaaggggcctcgtcctgcaccgccactgggcgcctgggctgttcatcatcggttaccgccgattcataggaactcctcaacacattggctc

SEQ ID NO: 331187 - DNA, 1223 bp, Homo sapiens
  chr2:945451-946674
  hyper
gcctccgcgatgggcgctcgtgcctgggtcgaaggactggggggcggaggatttggaaagggagaaaaatacgggctggcttctttttaaaaaatgtgggtagccttgcctgcccccgccgcactggaatttatcctaaacttactttcatttacattaaaacaagacgatttgagtctaccaaacccaatactgcatctgtgaggctccttttggcacaaacctgaatgaacagcgggaaacgccgtctcccctggcgtctgagatctggggtcccctccccacctggtctcctcgctcccgccccagccccgtgcgccccaggagggcaccgccgagcgccgggtccccgcagggttcgggagactccgcggaccggaggagggataggacccccgagctttgggggcgggaagggagggtggaaggaggaggggagcggggttggggaaagttggagcttcggtatcttttctccgggccaggccgtcctcggggccctgcgctgcgtctccaagtgctgggaagactccgcggggaaaggtctgaggacgcggccggctggcacaggtgtggcggcttcagagggccggggagaacccatggcttcgaggctgtggactagaaatgtccctgattagaagctgagaacctttggccagggaggtggggcggcggggaggggtcgtcaagccggtccagagcgcgcccacctgcgccacaagggagaagaggtgccccccgcccccctccgcccaccgccgccacgatgcgccgcggacctcggcgacccagcccgggtagaagcgcgcgctcccctcctccagcctcgtgcgccggcccctgccccgccagccccgctatggtcccccatccacccccgcgggagcgcccctgtccccccatcctgcacttcccccagagtcgcgcgccagtttcccgccccgtggaagcgcccctctcccgacttcggctgatccccgctcgccgccctccccgcgggtgcgcgcccggcccctccctcgcccggggcgggtctgcgtgggcggtgctccgggtcggcgggcggagctccggttccccagccctgcgccccggtggagcccgagccggagccggcagaggggcgcgggcgcggacgcggcgcctggcggggccctgggaggctcggacggggtcctggcgttgagctcggccggcccggagcgcggacccagccgcag

SEQ ID NO: 331188 - DNA, 743 bp, Homo sapiens
  chr2:1746562-1747305
  hyper
tgcggaggaggagaggaactcgggcccccgccccgccccagggcctccaggaagcagcctgcaaactcggcgacccctgggagccgtggtctgtcccagcactttgtttcggaggtaggcgcactggccgcccacttcctgaattgttcactcaatttttttacaacttttgcagactctttgctggtgccaaaaagtcctctggctcagctaagaaacgtgaaaactatttttggcatgcagaaaagtcgctacaggactaaattagagtcggcgcctgaaacgcagcccgcgttcacagatcccgaaaatgttgaatccgactcgcttcagaacacaggaggcctgcagcgaactctggcggcatctcggtacctggagccgcggggcggagggatggggattcctgctgtggagaccgtgacgcgggacggcccgcaggacagggtgtcaaccccaacgcaacgcatccggttaaacgtatagcgcaactgcgaacacgctcgcgtggattagaagcgaaagaagagaaatgcccgaggcagaaacccgctctgagtcccggctccatctagacccgggctgccccgagactaccgcgcggcccctctcgggaaccccggccgcccggctcgctccgggcgcaggaaaagcccctgagaagcgcggggcccccaggacaccccaggagaggacgctccgggcagatgcgggggcactgggagcgggggcgccgcggctgc

SEQ ID NO: 331189 - DNA, 1216 bp, Homo sapiens
  chr2:1747628-1748844
  hyper
cggaggaggggccgcgaaccagggggaagcgggaggccggcggagcatgagagggggcggcgggaggcgagcggggggagccccggaggctccaacaacttcccagtcctgcggggattccgagttccgaacaaaggcggctacgaaggccgcgcgcacagcgctctgttccgcccctcggcgtctcccgcagggcgaacaaaggcccagcgggtccccgcgcccaggtccccccacgtcccccttcggaggttcccttctgcgtcccaagtccccaggccccccgcgcgcccgatgccccctccaccctccgcgccccccacctccgatcacccctgcgctcccggatctccacgaagccccggaccccgcgcccccggcgtcccccgcggcactcacaggatggaggtctgcggcgccacggcgggcacggcctccagcagcagatgcatgcagcgcacggtggtgcggaagcacaggcagcggctcggacaccctgcgcccggcttctgggccaccacggccagcgtcccccaggcgcagaacagcacgagcgccaacaggcagcggcgcccggggcccctggagcgcttggccatggccgacggcgcggacggacgctcggacgcacggagccaccacggccggctcccgactgcgcccgcccggccgcggcccacgtcccagctgtgcgcggggggcggggggcgccagctgtgcacatgcgcgaggctcctcccggcccctctgaatccccgagggcggggcggggcgagaacccggggccccagcgtccggcctgagcgccctcatcccggtggggcggcccgcatggccaaggcgagcgctcgggggcgcggaggagagcattggcacccctgattctgcgctcgagactcggggctcgggaccctggggcctacgcgaagcttctccacttctcttacccgtggtttctgcctgcgctcactacgggttttttagttggcgccttaatgtttgtaacacttttagagcgcttgctctgatccgggcacgattccaggcgcgcaggcgcgctcctctctttctccttctccctacccgcaaccacgtaggaaattatttaacgttccaaaaaagcccctcattccttttgaggaaactgaggcccaagccccaaagcgcacagcaagggagtctgcgggaagattagacccaggcggtccggctcccc

SEQ ID NO: 331190 - DNA, 128 bp, Homo sapiens
  chr2:3307454-3307582
  hyper
cgccagacgccggcaacctgacttctgagtgtttcccggcaccgtgaacacaatagacgacacgtgatacggtgcggcctctgcgcccgggaagcttcgccctctgctggcagacggcgggatccatc

SEQ ID NO: 331191 - DNA, 370 bp, Homo sapiens
  chr2:3751023-3751393
  hyper
tccctgccccgtgccgcctgctcacctgcccgggttccccgtcgccccgtctcctgccccggccccgagcccctcgccctggcggccaggcggtcacaatcgcccagggtcgcgtcaacacgcagcctccgcccgcctggcagccccgtcccgtccccgtccagcccccgtcccgtccccgtcccgtccccgtcctgcgccagcggctggagcggacctcccgtcggcggtgcccgggcctgggcgcggctctgcaggcgtcgctgcccgcgctgccgcagcctctcggccccggcgagcgaggagcggggcgcggctatgggaacccgcgggccctccgcgccggtggacaccacgcccgccaagacca

SEQ ID NO: 331192 - DNA, 854 bp, Homo sapiens
  chr2:5833353-5834207
  hyper
cggcaagctcaaggcccccgcggccgcgggcgccaaggcgggcgcgggcaaggcggcccagtccggggactacgggggcgcgggcgacgactacgtgctgggcagcctgcgcgtgagcggctcgggcggcggcggcgcgggcaagacggtcaagtgcgtgtttctggatgaggacgacgacgacgacgacgacgacgacgagctgcagctgcagatcaaacaggagccggacgaggaggacgaggaaccaccgcaccagcagctcctgcagccgccggggcagcagccgtcgcagctgctgagacgctacaacgtcgccaaagtgcccgccagccctacgctgagcagctcggcggagtcccccgagggagcgagcctctacgacgaggtgcgggccggcgcgacctcgggcgccgggggcggcagccgcctctactacagcttcaagaacatcaccaagcagcacccgccgccgctcgcgcagcccgcgctgtcgcccgcgtcctcgcgctcggtgtccacctcctcgtccagcagcagcggcagcagcagcggcagcagcggcgaggacgccgacgacctgatgttcgacctgagcttgaatttctctcaaagcgcgcacagcgccagcgagcagcagctggggggcggcgcggcggccgggaacctgtccctgtcgctggtggataaggatttggattcgttcagcgagggcagcctgggctcccacttcgagttccccgactactgcacgccggagctgagcgagatgatcgcgggggactggctggaggcgaacttctccgacctggtgttcacatattgaaaggcgcccgctgctcgctctttctctc

SEQ ID NO: 331193 - DNA, 1251 bp, Homo sapiens
  chr2:5836068-5837319
  hyper
cgggcgggctgcgcggaggctcgggagctggccggggaggggcggatggaggggcctgggttgccagctcccttggtcggggtcctgctcgctggggcttgtgtgttctctgcggcgggccgcgtccccgctgagcctcgcggtgacagccgcctttggcagcgagcgctcggggcacttctatccccgcctctcaaagggtggggacagccgtttccagatttgaattttttctgttctttatttttaacgctgcatcttcgcgtgtgctcagaggtggttgttggcggagaacgccgccgcagtgtttgacctctagcggtgaagggggaaggggaagaggaaaggagagaagtggtcggtgtctgtttccttctgtcccccggggccgtggagctgtcggagggaaggaggacggtgcggggccgcagggggcgcggggcgcggcgggacccaggctacgagcgggagggaggcgggagtcgggggaagacgcggcaggccggccgagggcaccccgaggaacatggcatggcctctgtgcgatccgagtcgcggtctccggggtgcctgggagggccgaaccactggtgagggcgtggggagcagggggtggcagagggcacccgggcggtagtccgggacgcgcaaggcagagccctgacgctccgggtccccgtgcctggctcttcttgcctcgccaccgcgtgctcctgggcgcgccccgccgcgggcccttgaggcgcgcggagacaccagcgctggcttcccgggcccgcgggccggggagggaagcctcggggctgcggggtgagaggaagaaagcaaacccggggagcaggcggctgccgcacccgcgcaccccgggccctcaccacgccctccccgcgcgccggctcaggggctgccccggaatcagctccccggggccgccgcaacgaaggtggatccgcatcttgattgttctccgggagcctcctgggggctccggcggcggcgcgggcgcgacccatcccgctggcgctccccgctcgctgaaccccgtttgcctgtccacaccccctcgctccccaccatttttcctgaccggcctgtgtccccgagccctcgcggcaggcccgagcaggcgatcgcggccgggcacgcgcgccccgggctcccgccccccttccgagcatccgccgcctcttttctgctgggtctgggaggagggaggctgggaggccgctcggggcccagcgtgccagcccc

SEQ ID NO: 331194 - DNA, 434 bp, Homo sapiens
  chr2:5866036-5866470
  hyper
cgaaagggagtatcaagttagcgaaactgcaagggaaactgggggcagcagagcgacgtgccagcgtccgtgttgggcgggtgtcggggggacccggacaccccgccctccttcctgcagagctctgcgggccctgtggcatccatggagaccctggctccggtttcacaggaagggaaggtgtgtgtcacagtccctaatggatcagctaccaatcattagccaagtccttctcttacttttctcctcggagagaaccaagcttagacaatagcatggctttcgaggtgggaaggacctcatgaaggagacggaaaagagtgactgcagatcttacatgtaggatctggcggagctcagcttaaagccgttgccacccagccatgggcattttctccacattttgcaggcatcctacaactgaaaactgggtc

SEQ ID NO: 331195 - DNA, 1034 bp, Homo sapiens
  chr2:7005163-7006197
  hyper
cggcccgggcggcttcccggtccgggaagaccacggaactgggcaagtctggcaccaccgggtgcagcgggggctccgggacgggcacgacctgtgcgcagcccacctgcagccgcctgccgtcttgcacctcccagaggcgctgccacagctggccgcgcgggtcggcctcgaactcgcccaagtgcgggcgtggtgcctcctgacaggcgcccagcagctcgagcagcgcttgccgggtgtcagggtcatccagggggtcgcgcagcaggaagccttgctgtgcgccgccggcctggccgcccgggcagtagcagagcagcctgagcagctggcaccgctggaaggggccgcggcgcagctggtgcagcaggcgctggtgcagccgcgccgcccggacccgggccccgcagccggcgtccggggtcacgggcacgcacagcgagtagctgcgctccgggggccccagcagcgccgccaggcgggggtcgggggcgtctgcgtcgccgggggcgtcggcgcctagggcgaagtgagccagggtgcagtcgggaagctccaggacgaagcggcgcggcggagccatggccccagcgcagaccccgcgccgcccgagcagcggccccgacagtggcccgcgcaggagccggcgggcgaaggccatgggcgcctcagcgacgccgccctcggccccgcctcggaaacgaaacctggcgggagccaggcgccggcgggaaacgaaacccggagggagccaggcgccagcgggaaacgaaagcgaagcgttgcggggaaacgaaagccggaggcccaggcggggcaggagccctggggctggggcgcccttccggcctctcctcctcgccgcgagatgtgcgcgataaacggccggcgctcgggagcagacgcttggccccggggccccaggtgcgcggctccgcgggcctgcgcggtccccaggcgccggctcccggggctgacaccgaatgaggccccgcgccgtcggccccaaggtagctccgtgtgcgttctgc

SEQ ID NO: 331196 - DNA, 670 bp, Homo sapiens
  chr2:7057762-7058432
  hyper
cgcgcgtcccctttgtgtccgcatcgcccgggccggccgcggagcggggagggcgggacgcggcgctgcgcggccggccttggggctcggggcttgcggccgcgcctgccccgctgggtcctgccccggcgcccggtggcagcgggcggggggcagcgtcccgggcggggactcgcgggctccgttcagaggacgcccgccctgccctgcccgtgtccctgacctcgtccctgctctgctcctgccctgccctgcctctcgcaggcggcgcccgcgccccagggcagtgggcgcttagggacctggcgtccccctgcctgccctgcgcggtcgcgggtctgcgctgcggcgcgggacagggcgccccgggccagggtcccgcgggcgagctggcggcgggggctttcaaggttcgcggccccgcccgcagaccctggggctggagcctcggccccaagaggaggtctgggaaaggacgacgcgtccggggcatcgccaccggcggggaaggtcggaactggccaagaggatgccccgcacatcccctgcgcgcggggtccgcggctgctactgcccctggtccccaccgcgagccctttcccggggaatgagccgccgcccgagccccggagttccctgcgggtcttacccaccccagcctccggccgcc

SEQ ID NO: 331197 - DNA, 557 bp, Homo sapiens
  chr2:7571105-7571662
  hyper
cgagtggcaggcgcagcccggctgcaggagcgcggctggggctggccgctctcgctgccctctctccggaactgtttttttctgtcctggtctctgaaagccttattgattgctcaaagtgaacttctcagcccacggtttcctcacccccggggcagcttgcatttcctctgccgcggcctctgtcgcctcccctcccgcgcgcctcggccttttacatttcaaatgctcgacagctgggccaacttctgcttccgcccaaagaagggctctttgccgctcacaatggccggccagtggcgcgggggctcttttctctccagctgtgagagaggctttttcaaaggccggggggaagctgccgtccagctgcgcgcctggccgcgggggccctgcatgctaatcagcggcgcgcagagccgggctccgtggggccgcgcagatgcgccctctccgcccgcagagccttccgggcaggtgaggccaggccggccgggcgtcaccgcaggtgtgcactccgcgcgcgcactcagctcgctttggtgtttctccaggcc

SEQ ID NO: 331198 - DNA, 208 bp, Homo sapiens
  chr2:9143658-9143866
  hyper
ctcggggtacctggtcgatgggcagctgcacggcgttgctgaggggctgcagcagggtggagcccgtggtgctggtggtggccatggccgggcctcggcgctccggccgcccgcgccgctcgcccgctcgcgctgtgccgggcgacgacgaggatggggatgcagcggcgcgcccgcccctgggccgcccgcggtcggagctctgcgc

SEQ ID NO: 331199 - DNA, 176 bp, Homo sapiens
  chr2:10151695-10151871
  hyper
gggtcaggtggacagtattggcgtgcgtacgggcgggtcagatggacaggatcgcgtacgggcgggtcaggtggacagtattggcgtgcatacgggcaggtcagatggacaggatcgcgtacaggcgggtcaggtggacaggcatgcgtacaggcgggtcaggtggacaggcgtgc

SEQ ID NO: 331200 - DNA, 166 bp, Homo sapiens
  chr2:10152421-10152587
  hyper
cgtatgagtgtgcgtatgggcgagtcaggtgggcagacgtgcatatgagtgtgcatatgggtgattcaggtggacacgcgtgggtatgggtggctcacgtggacaggcgtgcgtgtcagcgtgtcacgtggacaggcgtgtgtgtgggcgggtcaggtgggcaggc

SEQ ID NO: 331201 - DNA, 649 bp, Homo sapiens
  chr2:10183604-10184253
  hyper
cggtgtattttggttcgcctccgcgccccgccccgccagccgctccctccgcggccgccccgcccctcccgcgccgcgagggccgcgccggggcagagccgcgcgggcgggcgaggcgcgtgccggccgcaggagctccgggttgccgccgccgccgccgcccgcagcccacgtgcggccgctgctgcgcccgagctcacgccccgcggccgctttgttgctcccggccggcctgcacgatgcacacgccggacttcgcaggcccagacgacgcgcgcgcagtgagtggtggggctgccgcggcgggactactcgtctgagcgaggggcgaggcgggggaagtggtgcggcactcgcgcgcctgtaaatgcgggaggtggggcgtgcagggcttcgctgcggccgcgccggtaggggcctgggcgggctccggagccgggcggggcggcggccgcgacgggcgcgcccgggtcggcgggggcgaggagggggcgtgttccccgcgcagctttgtcttgcgcttcctgggcggccccgccccgctggccccgcggctatttccagccatgacgtcaccccggtcctgtgagccggacggccgttgggcgggggagcggctggcgggaacgcggcacgcggccttgggggc

SEQ ID NO: 331202 - DNA, 213 bp, Homo sapiens
  chr2:10587836-10588049
  hyper
cggggcccgctcgtctgtaccaaggcgagcccgggctctgcgcccctgcacctgctgcgcggccgccagggcctccccaacggctccccggccagcgcgcggccgccgaagggttgggaaagaggccggcgcggggccgcagggtctccgggtgggtctcccctaggcccctccagccccgagctgtgaagacgggggcagaacgaggcgccc

SEQ ID NO: 331203 - DNA, 619 bp, Homo sapiens
  chr2:10588876-10589495
  hyper
cgttcagtacctcgtgcccgagagcggaaaagggaaatcgcgagcggaggaccgatgtgctggccacgtgggccccgccgggccgactccggaccctgctgccgcccattcctccggtgcaagggacctggaagtgatcccggtgccgctctgctcccaccagctagggagcagaggcgcgggagggaaggggcgtcccgggggtcgccagcacgctgcgggcagggctggcagccgcctccacgcccccgcgctggaagcctcgtctttgtaacatcgaggtatcctgtaactagatgggtcctggcctgcggaggtagtttcccctgtgaagccagggactcagccaggagcgtgaggggacccggatcctgagtctccaagccgcccactaccctctgctttaccggatggaactcatcagtaactaggtatctttaagggcggctccctggcgcgctctgagagttacggaagtcccaaaatgctttgaccgaaaacgtctaaacagtgaatacataaagcaaaaagccgcgtgggaaattcgagtccctaggagcgcccaggggacgcctctggaggtggactgccactcactccaggccacgctggaatgccc

SEQ ID NO: 331204 - DNA, 440 bp, Homo sapiens
  chr2:10862070-10862510
  hyper
ctgcgttgggtctgcgcggggttaggagagaacaaaatgccctcggattggagcgggaccgggagtccgaaaggaagaggttccaccaggggtctctggctcctcagagcttatcctgctttcccccagccgtccggagacgccgcggggaggcaagcggaaagggggaacctggccgagggggaaaggtgcgggtgtggacacctgtgaaggagcagcacgaatcgaatcggccgtagaggctgcagacgcggccgcgaaaccaccggccacgccgggcaagggacccagcactgctgagcgggcacctcgcctagtggaaaaaagactttagtagttcccctcaccccctactacttttttttttcttatttaaaaaaatcctctgaagtctatttttaaagctaataccaatcacaaggttggccagtttgacctgc

SEQ ID NO: 331205 - DNA, 914 bp, Homo sapiens
  chr2:11051801-11052715
  hyper
cggcagcattctctccccactaatcctctccaaacagcagtgagagagaatgcctgccgcttcaagccaggtcgcaacccctcggtgacccgctgcgcccgaggaggggccggcggtgcgcggtggtggcggcgggcgcggcagctgtgcccgtctgcccaagggttaatccgtcccctgcagctgccgcgcgtgccttgcagaatttcaccagaagagggtacagtttgaaaagctcctgacgtcaggctggaattcctattgtgtttagaaaaggctcgggcaaagccagcccaagttcgctctctgcacacctcgagcacctcgcggacggcgtgggtccgccagctccgggacctgccgccgctgcctgcgcgccccggggcggaggacggtgccagccgcccacgaggagaccccgctcccgcaggaggccgagctgaagcggcggagcgcgccgccagccagccggggtgagtgccccgggcgaggccggcggccgccaaagcccccgcgggctcgcccgggcgcccggatgccagccccgagccccgccgccgggtgcatgcctcccccgcggcgcgcccccgcaggctgctgcccgctgtgaccgcccttccccgcaggcgggcgccggccaggctctccccgagatcagcgcacgggtggcacccgccggacccccagcggcagcggcggcggcggctgcagggggcgcggggcggaggctgcgagggcgcgcgcggggaggatggacgggtccggggagcgcagcctcccggagccgggcagccagagctccgctgccagcgacgacatagagatagtcgtcaacgtggggggcgtgcggcaggtgctgtacggggacctcctcagtcagtaccctgagacccggctggcggagctcatcaact

SEQ ID NO: 331206 - DNA, 987 bp, Homo sapiens
  chr2:12856411-12857398
  hyper
cgggggcaagcggtgacaccaactaaaaggaagcaatggatttccttttaaatggagaggaggatgtcggagagataccatgaaacgaattctcgaaactccaggcagcaataccgatgaaagcgcattcttccaaaacagagctcctcattcagggccacatctgagcctgggggcccaatgctcagagcgtgcctggctttctggggaaaagcgccaggaacatgaacgagctacgaagagctggagcgggcgctgcgggagcagcgtgtggggaacggctcgggagtcgctgctggtaaccccggcccagccgcccgcagctgggctcgcagccggctcgcagccgacacccagggtgctgcgcccggggccccgggccgcggaaggatatttcactttgtttacctccccggccgggcgagggagctgcgaggccggtgctggcgcccccggcacggagctgcaatggcagcggcgcggggagccgcccgaggactggcagcggcggggctgattgatgggcgcccggcgcaatgaggggggcccgggcgggggcggggcggggccggctctgggctgagccagtcgcgggggcggcggggggggggcggaggctccgtggaaatgtgtcggtgacattgaatggggagaccgagcgcgagcgaggcgcgcgcgcgcacacgcgcactcacggccccgctcgctccgagatccccggccacgtaagtaactattaataccgcctcgccgggggatgcgggcgtgctgagcgcggggattggcctcgggcaccgtcggccgtcccctttaatttttaaatacacggtcccctcttttctctggggggggcaagcaagaaatcaaagaaggaggagacaagccgtcaattttctccaaaacaaaccccaccgggcaatttggtctcggggtagggggagacggggtgattgcaaattattccaggacgagatccagttctccagc

SEQ ID NO: 331207 - DNA, 640 bp, Homo sapiens
  chr2:12857962-12858602
  hyper
cgttgggactgagtcgccgccgtgagctccccgaagactgcacaaactaccgcgggctcctccgccccgtctgcgattcggaagccggcctgggggtcgcgtcgggagccctggcgctgcagctccgcaccttagcagcccgggtactcatccagatccacgccggggacacacacacagagtaactaaaagtgcggcgattctgcacatcgccgactgctttggggtaacaaaaagacccgagttgcctgccgaccgaggacccccgggagccgggctcggagcagacgaggtatccggcggcgcccatttgggggcttctaactctttctccacgcagcccctcttctgtcccctcccctctcgctcccttttaaaatcagtggcaccgaggcgcctgcagccgcactcgccagcgactcatctctccagcgggtttttttttgtttgtcgtgtgcgatcctcacactcatgaacatacacaggtctacccccatcacaatagcgagatatgggagatcgcggaacaaaacccaggatttcgaagagttgtcgtctataaggtccgcggagcccagccagagtttcagcccgaacctcggctccccgagcccgcccgagactccgaacttgtcgcatt

SEQ ID NO: 331208 - DNA, 706 bp, Homo sapiens
  chr2:14772284-14772990
  hyper
agacgtctggggaacgaaaagggtcttcgatccaaggaccagcctaggggccatcgggaaccaaggctctgggggatcccagcagggcccagacgcccgcctcgggcaatgtcgctgcctgccccgggccgctcgcagtgcctgggccatactggggtgccctggggtttcttctccatacccagactcagcttccccgctggagtctgtcttcctggaacacggaacgcgggcgggctgtgttctcagtcacaatcagctcggatgagctggggggcgcgggcgcaagcgggcatcggcacctggcagaaagcgccgcgccccccgcgggtgcgcacacctccgctccccggggcggcgcgcggtcgggtgtgcggggtacggggcggggcggagcggagcagagcaaagcgcacaggaggcccgcctctgctcccctcccccgccggcgaagattgacacagctcgagcacccgccccaaccaatgagcgcgtcctggggcgggccctgggaccggctgctccggctacttagagtcgtcggcgcggcggtgggaaagcagagccgagccgggactgtccagtgggagcaggcgccccggccagcgcagacctggaggcgcacgggcgccgcaccgcacgattcggctcggggtagagcggagccgcagccccacgcgcagcccaggacccactcgccaccgcc

SEQ ID NO: 331209 - DNA, 1979 bp, Homo sapiens
  chr2:14773829-14775808
  hyper
cgagttcccggaaggggtcggaggctgtgtggtggcgtctgctctcgcctgacctgtggcggcttctccgcccctcgtacccctggggaggcacggaggactcggctggaaagggtgactccggtgagggcacgtaagctagccggcaggtcccaggggcactgcacgtcttggggagggacaccgaaaggggcagcccggactctgacggtgtctctgcctctctgtgcctccgcagatccccgctcctggccctcgcctcgccacctcattgatgggcaaccaactggaccgcatcacccacctcaactacagcgagttgcccacaggggacccgtcggggattgaaaaggacgaactgcgggtcggggttgcctacttcttctcggatgatgaggaagacctggacgaacgcgggcagcccgacaagtttggcgtgaaggcccccccgggttgcaccccctgcccggagagccccagccgccaccaccaccacctgctgcaccagctggtcctcaacgagactcagttttccgcctttcggggccaggaatgcatcttttccaaagtgagcggtggccctcagggcgccgacctaagcgtctacgcggtcaccgcgctgccagcgctctgcgaacccggcgacctgctggagctgctgtggctgcagcccgcgccggagccgcccgcgcccgccccgcactgggccgtctacgtgggcggcgggcagatcatccacctgcaccaaggcgagatccgccaggacagcctgtatgaggcgggcgcggccaacgtgggccgggtggtgaatagctggtaccgctaccgcccgctggtggccgagctggtggtgcagaacgcctgcggccacctgggcctcaagagcgaggagatctgctggacgaactcggagagcttcgccgcctggtgccgctttggcaagcgggagttcaaggcgggaggggaggtgccggcaggcacgcagcccccgcagcagcagtactatctcaaggtgcacctgggagagaacaaggtccacaccgccaggtttcacagcctggaagacctcatccgcgagaagcgccgtatcgacgccagcggccgcctgcgagtgctccaggagctcgccgacctcgtggacgacaaggagtagccgcctaggggctgccggcccctctgcctcccccgcacctcgctcccttcccttccccgcacccggacttcgcagtcagcggttctcaacctctgccccgccccgccacgcgcgtccgccgccggtggcccgggcccgggctgcacccccgcatccccaagccagcggcaggaagtctcaggaactgccccagggccgaaagggcgccgctgcgagcgcctggctgacagccacagcggtggtgacggtgctgggagaccccgcgtgcgctttccccttgagatgtaaaccgggaacggggaaggggctgaggggagaaaggacatggccttccccgcgagtccatggccagtgactgtggcccgactcgaaaacaaccctcttctcaaaagggaccatcaccgccccgagcgtgcgcacacagaccggtcggaggcgagaactggtctctacagggcacagttcagctcctctgtggatgcgtccccagatcgcaggatttccaagaaatcgagcctgtcccttgtgcacttgggaataattccccaagacagcacttcgggattccgggttatcctgaggctgcccgggacttttccagctctccagccccaggtctcctgacattgtgttccaggctgcgggctaagccagacagtgtttgcctccggttctttccaccgtgggaagcgaacgccacccccacccgcctttgcctgcgagtctccctcgctggcagaagggaagccggcccggtcccgggaggaagatggcgctgcgaattcggtgaggacagccggccccgcccccgacaaggagctcgctc

SEQ ID NO: 331210 - DNA, 763 bp, Homo sapiens
  chr2:16081810-16082573
  hyper
gtttccaaagttgcggagcctcgccaccaccccctgcatctgcatgccccctcccaccccctgtcgtagacagcttgtacacaaaaggagggcgggagggagggagcgagaggcacaacttcctccaccttcgggagcagtgggcagagtggggggcttggagggaagattggggaacctggttagagggggcgcccattgcctatcccctcggtctgccccgtttgcccaccctctccggtgtgtctgtcggttgcagtgttggaggtcggcgccggcccccgccttccgcgccccccacgggaaggaagcacccccggtattaaaacgaacggggcggaaagaagccctcagtcgccggccgggaggcgagccgatgccgagctgctccacgtccaccatgccgggcatgatctgcaagaacccagacctcgagtttgactcgctacagccctgcttctacccggacgaagatgacttctacttcggcggccccgactcgacccccccgggggaggacatctggaagaagtttgagctgctgcccacgcccccgctgtcgcccagccgtggcttcgcggagcacagctccgagcccccgagctgggtcacggagatgctgcttgagaacgagctgtggggcagcccggccgaggaggacgcgttcggcctggggggactgggtggcctcacccccaacccggtcatcctccaggactgcatgtggagcggcttctccgcccgcgagaagctggagcgcgcc

SEQ ID NO: 331211 - DNA, 358 bp, Homo sapiens
  chr2:16790116-16790474
  hyper
gactcagaccaccacgtcagtgaagaggtgaagctgggtcctgaactgctgctgcgatgggatcattcacatggctattaatcatacaagagcccatttatgacaaacgcaggtcactccctttgcatgacaaggcacatgggtccacagagccccattatccaaaaaaaaacacagagcattgtgggcgatgcaggcgaaggcgagtgcacacacacaagcggacattgtaaggctgtttgcacaaccccgccgtgctcctcgcggatttcctgccaaggagacatttagatctcacagaggcggctgcagacatttgctcattcaacatggcttcaggcagtggctgcggaaaccc

SEQ ID NO: 331212 - DNA, 460 bp, Homo sapiens
  chr2:17699502-17699962
  hyper
cgcctcagacaagcgaggcaccagaggcagtcgccagcccgccttaaagacacctccaggctcctcaagacagagccgcttgctactaggtggttgggaatccgggtcctcaggaggcgttaaagaggaggtaggctttctgagctcggccatccgcggcgtgggctgagggagagacatgacagcgaatggaaaggatctgtccgagtcccggcggggctccaatcccttaataggcggttccgggccgctctggtcacgcccctgacccgcccctcaagacctggccttagcctaatctcagggtttgccccaccccgaatccgcccctccacagccccagcctcagccccgccccgcctccctcagtccctcctctccctgcccccacccacgcgccccggttgtctcaccactgaaggtcggagcaccctgggccgttacattgtctatttttagc

SEQ ID NO: 331213 - DNA, 646 bp, Homo sapiens
  chr2:17719770-17720416
  hyper
tacaaaagcgcacgcgtcgatatcaatcgtaccctacaacagagcatggtttaaagtatcagtgtacattttttcctaaacacaagttgcaagtaagttatctaaaatcgaacaccgccacgaaagagacctccagggtgcaataaataggtatatctcgttgaagtggagaaatggcatcatgaccctttgggttgatgcagattacagtgcggaggctgttctcgagagagaaactagaactcagcgtaaaatgctgtagtaggggaaatcgaccaaagacgagattttgaaagccttttgaaagtcgtttttctagctaaaaagaaaaagtgacttattcaggactgactccccctgccagtcccaggaaacaggagcagcccggcgcgcccgggagccccgcagcgcagtgcgcactgcggctccagagcgaagggctggcgcccgccagattctaaacgtgctcggctgccgcagcccgccggggccgcgcgccgtggtccgcgcgactccgcgctccgggtttccgcggtcaccagcactggcggaagagccctgccgagaggggacagccgcgggcggtgtcccgggagtcccgagagcgcgctccccctttgcgcaaccttcccgaggcgtcctgccc

SEQ ID NO: 331214 - DNA, 745 bp, Homo sapiens
  chr2:17721363-17722108
  hyper
cggctcccagtactcctagcagaagaccctctgatgaaatggcccatgacaaaatgaccaccataaccgttccttcagtaagccaggtagacgtgctcacagcttgctgggaagtcttctttcggagatttctgcagttttctccttcaccttacagcctaacaaagggtgggccgggggtcggctaggacagaaagcagcgggaaaagcggctccacgtgttccatctctggcctcggccttcagcccccaggttcggtaaccactgggcgtggcgagtccgggtaacccgcagtccctcgcgcccgtccaggtgcgggttgctccggtagccggactcccttttcctatatactttccttttgagcttttgctaaaatctggagacgtggaatccacccgcggaaactccgagcccctccgactgagcatgcgccatcgccaggcggcttttggtcacaggctcccgagttctcctagctggggctgcggagctggggggagggaagagaggaaaggggagggggtgcctggagaggcggaggctcgcgcgcctgcgcatccagctccagggaccctaggttttctatgggattcccaatctgcagcagagatttacccgagcgtgttgcggcagcggctgggcttgcaaggcgcgatccaagagggatttaagcagcccagagctccagagaaaaagagagcgagagagaaccacacacagagacggcttaagcgtttaccc

SEQ ID NO: 331215 - DNA, 301 bp, Homo sapiens
  chr2:18011874-18012175
  hyper
cgttcagtcactggctgcagatcccgcaaccctcgggtgttcaagtgcgcggggtggtgcgggcgctcccgcagtccgcgcttggctcgtgggaggcctcgggcgccccctccaggattccgtgctaactgcaaacgatcgcgctcgcagggaggcccccagtgcttggaaaactccaggaatcccttcagagcactttatttccaggccagcacgcggcgctctgcagacctagtactgggctgtggataaggaagagcagagcggatgggttacgccgaggatgcccaggctgagcctc

SEQ ID NO: 331216 - DNA, 1674 bp, Homo sapiens
  chr2:18059018-18060692
  hyper
aaaaatctgcagtttgggggcgggagggggagcgcgggggtgggtcccgaagcgtcccatttctcctcctggctgttaactgagcgctctcgctcagtgcagcgaggccagcgatgccttctggaccacacgctgtcctcgccgaggtcctggtttgttcctcaacgtcggctgaaggcatcgtcccctgacttcctcttccattcgtccttccgaaaggggacccgactggttcctcttctacatatgaggcgcatctgcttggtgcaaatgtccaagcacctcttctgactcggtgagtggaggaataagacaaagcatcttgttctgcactgtgcctgagtcttcaggcagcgggaccgatggcaaacattggcaggaactggagctatatgtactctccttcgcactttgttttaaaacaagtttgggcctcgcgatttcctgaggaaatccaggcaaattagcaaagtgtcgcttgggccgcgactttagaaaggcggttgccccagccgccggggccgcgggggaggtcatctttttcccgcagggccacggcgcttccggcccaggagggcgcgcaggtgggaggcgcggggcgcgctcctggtcccacccggacagcgcctgccgctccggggtgactctgcacttgggcctgggcgggggcgcgcggccggcagggcagcatctaggtctatgggtctgtccgcctgtctggcggtcggagccccgcagtcctcagccgcccgcgccctcggcccggggcgcccggctgcgggcccgaagcgaggggctggcggagctgcgaccaatggggcggcggccgagcggcgggccccgccccgtcccgtccggccccgccccgcccgcagctcccgggagcctcgctctagcggggcgggaccgacggacagaccggccgacgcgggccaccccgctctcctcgccgccgcggcggcaggcgcggggccgcgccgcgaggcctgatccctgcagcgcgggcaggcggcgtcgcagagcggagctagctggatgcgtccggactcctgcaggtacctggctggcgtccccacctccctgcgcgctccggagacttctccgggcgaccctgcaactttaccgcgccttcccccaccttttgctgccccagtctcctgtggtccaggtcgcgggtgcacgaccccgagggtctacggccgcagagcactttccgtccttctgggcgtctggcccgcggcgcccgcatcctctggtccccagagcccgccgtcgctggagccctaaggctccgcctgttgcgtgaactgcgggctgttgaagcggtggctgggttgatttgaaagcctcggggaaggtatttaggatcagctttcggggagtggggtgggctatggtcagggggaggaccacctggaggcgggagaatcgatgagccgaagaaaggcggcacctcgcgtaggggcatccccggggcgtttccttggccgggaagccgttccttcccttcctcgagaggaggcgctttcctggcgcttgtaaatgcttcccgggccgtctgctccgccttctttgtcattcctcccctcccctttgccctgcagctgtgctaggcgccccgcgacagttgcagggaagagcgaacccagggcccttgctctcgtgcagcgctgc

SEQ ID NO: 331217 - DNA, 862 bp, Homo sapiens
  chr2:19550023-19550885
  hyper
cgcccctccagggctggccagcagggggcagcgtggctctgagcgtggaggccagggctggtccgcgccggcagggccagcctccagtgcccagttgggttcccgggcctcgaagttctagcccgcacaggactcaggagcgttcccggaggaggtggggatggggtggtgaaagcccagagcgttttaacttctgcatcccctgccgctttctcagccagcagggcccggcttgaggctgggatttttggtgcctgcagcagggaagcttatagtccagttgtcatccgcggccgccgcgctccgggcgctgaagctggagaggccatcctgcgcttgggaaaggccgcgggcgccaccgcctgcgcggtcccgcggtcagggcgctggagctggggggagccccgccttgccccaaggagaagagccccggcggcctggcttctaactgtgggaaaactagacaccccagggaaggttcagcttatggaaggcggactcgaatttttcctcctaagcgtcccgggcctcccagggcgcccgcccccaccattcctgacaaggctttaaaattgtagggaatcttcgcgggtgcagagcctcgatcctaggaggggacaagtcccaagcagagaattgtgtctgagggaccctaagggagggagtgatgttggtttggggttccggggaggcagcggtcattgtgtatttgcacccgagtgttgagacccggggaacgggaaatattacagctctgaggctctgtgagggcgggtccttcccaccccaaagccagaggccaggagggaggccttcggttagggtggggaaagacattctcttctcttcttgcaccctaagc

SEQ ID NO: 331218 - DNA, 815 bp, Homo sapiens
  chr2:19551135-19551950
  hyper
cggggtggtaggagggggacacgctggcgtccagcagagaaacctggtcctctcaaagagaggacccaaccggtttcctgcgtttaggagggaaattacccatcctgcaatgcctgtaaaataaccgtttatttaatagttaaaaaaaaaaaaaactccagtgataaatgtccgttaccgatggtcagcataaagtgccaatcgcaatataacgcccggctcttggctggctgctccctcgcagtgtcgcggcagcggaggccgggccccctgcagaccccaggcccgaggtccccgtcccgctctcctagtcccggagcccacggccgccagctgagctgcaagagctgggagggggctgccccgcggtccctagggcaggaggctgaagcagatacagggattacacttttgcaggctccgggggtgggggcaggggcgggaggaggaggtgggagctgccagtgctaaggacttcgttgcctctcctctctccactcactctccgcagtcagagttacaagcttatatggtcaaagacaaaaataaaaaagaaaacgtataaaataacaatagaaaaagtaatacttctgggagaggcgccgctgcggctccgcggagctttcgttctttttttaatgcagtttcccttccgccacgtgagtaccgccttttggccaagagtttagccgcgtcctaggggagcagcagggacggtcggggtcgcggccccgggcggggctctgaagtgccgcgtgcgccagggacccaggggacaatgttggagaggtggaaggtcccgagcgagcgcctct

SEQ ID NO: 331219 - DNA, 1150 bp, Homo sapiens
  chr2:19556476-19557626
  hyper
aggggacccgaccacgcacagcagacgcaattcgcgctcgggatcccgagtccctgcgcagtgcgggcactcgcgtccctcgcgcggtggagcgccaatcccaggtctgcggccagtcctatgctgggcattaatgaagtgtgcagagtctattaaagtggtttattcggggctaattgagcgtgagcaagttaactgcttgcattaatgagaacgggagcgaactccacgagtttgcgcctgggggagcccagcagcaacccaagaaaatcagccttgacatcgaatctccaacgagtggtgacaggcgtccggacccccgtgaagaggactgaccggcaccggatacttctatagcattctcccaacaaacgagatctaacgaacccattggcaaggcggtcatccggctgcacttaaatgtccgctgcgtcctcggtgatccattccccaatcttaataaaacagcaattacctcgaggagcctgggatggaacatctacacgccgccggtcgctgctagtcccctccagcgcttctcttccctagggggttgtgaacctgggacacctagccttgcacgtggttttgttccgcagagccaatgcgcagctcttagcctgggtgaaatttaccaaattgtggcaacaaagaaacccttgcggctactttacacattgagaacccaacccgctactgcctgagctgctgaaaaaggactaaacgtggtttttcattcttctccgagacatttccgaggagaaattagttcagcaggcagcccttcacccctttcccccttctttctctcctgacggctggattagcggacagtcaggggagtaacagaacttttcctgtccccagcccggagaccctagggctccacagagtttccactagtgctgtgtgtgggtctcgaattggaaagcagtgcttgcgcccactgcattgcctccctgcaccaggacaatcaagggttccgctccaggccttgacgacacagagcaatcatcctatggagaatatccctaagttagagcgcgagtgcaaggcggggttcagactcgcagccctgcgctctcgggtctaggcggcctcatactagagcgcaactcctcaaaagacaaacttgaacgaaagcgctacc

SEQ ID NO: 331220 - DNA, 1172 bp, Homo sapiens
  chr2:19557652-19558824
  hyper
cgcggtcggctgcggctgtggccattcactccctctcccttccttcttcgtcaacctgggcgtcagccagagctaggagcgcgtctcaggaaagtttgtgcccgctgaagttgctctggtttcttaaagggggcccacagattgactttcaaagtccgtgggcacctcgcccgtgattccgcagagccgggcgggctggccgcagtagcggaggcccgccccccttaatccccagcggtcagaggccgaggaccccgcgcaggaagtcctgaggcagcacccccaaccaccctgctctcactttcacaaaagtcctacagcattcgtttggcaagagcttccttcaggggcattgagagagaggaggcacccgccgagcagtgacaaggaacctgggagtcctgcccgcattcgctttgctgagcccaggcgcccaggactgcaattaccttgttccgcagaggtcctggggctgagcacgtctctggggctttagctgaaggggactggggaagccggaggccctggagcccacaggcgcccctggagctctagtgtcccgactcctctcctgccgcggggactccaagcgccggacacgcgggagcgagcgctcagcagccccggatcctgcacgccggggacggtgagcctcgctcgcggctccctcgctgggtctgaaccaggagcagctgagaacgtgccggggagaggccgagctccgactcactcatcccttagcaccgagccgcctacttattttaatccaccaccctccctcctccaccacccccacccccgccccttgcctcaggattcctcccctccctcccctgccccccaaccctgccctgcgcctgcgcaatgaaagacaaagtttttgctgacccgggcagcagactttggcagctgctctcgcttggacccggcctctcccaacctgcgtcccctcctcttcagtcccgcgcgacccctgctgcctttttaggtccagagcggcacgcctggcgcactggaggaaacggtccctagcagatgagagcgggctggcaccgcacgtttcgaggtcctatacttgggctcctaggacacagcccgtgctctttgggaggagggagggaggggcagtagctctgtgcaccgggatccccacaccgcggcttgggtttcaa

SEQ ID NO: 331221 - DNA, 742 bp, Homo sapiens
  chr2:19561251-19561993
  hyper
tactgggagtccagcgcactccgccaccgcggctgcagcttctgctagctcggagcctgcggactccagccggcgcgaactccgccgcgactctttctggctctctcgctcactgccttcggggcggaaccgcgggcgccggagtggtcccagactcggctgggaccgggcagcctagaagaagggtcccctcagtagagaccaggcctccagctctccgtccggcgctccgctccacaacccgccagtcgatgtgaggtccgtcaagggagcgatccctccgtctgcccgggcttccgggctgtggaccgcactgaacccagtcccgcagcaagccctgctgccgccttttcctgggcacgcctgcggtggtgacggcccgctgctcatgtctccacgccaaaccccagcccctctcccgattcctgctccttggtaaagcgccccagcctgtcttcggagtgaaaattgagcagcttccagaaaattaactagaatgtggtctatattgctttgagttgttttggattcaaaaaaaaatgaaccccacctctccgcaccccatagcctaaaaaaaaaaaaaaaagtcctcattttttcaaatgaagtttgctcagcacttgcgaatttttgcttccaacgcaactacttcctgtaactactttgcagacaattgggggtctgctcgttagaaacccccttacgcatgtacagggctttcaaataacctggagatttaggc

SEQ ID NO: 331222 - DNA, 328 bp, Homo sapiens
  chr2:19563170-19563498
  hyper
cgtccttgctctcagatggatgagggcttttgtttgtttgtttgtttgtttttaaataatccgaaattcctagcaactatctgccgccgttcgcttctggtcctgggaagacgatgagcaaagatctactgggaccccatcctgcatttgcaagctcggtccgcgtgcccctcccggcacacccggaggtgagaagtgccctccggtgcctccgtccgcagcccctcgtaggtctgcacgtcctgcttcggatcccaaatcctggctttctgaagaagcgcgggaagaagagagagagtctgtttccgtgaatcgatttccctgaaac

SEQ ID NO: 331223 - DNA, 364 bp, Homo sapiens; identical to SEQ ID NO: 228145
  chr2:20068518-20068882
  hyper

SEQ ID NO: 331224 - DNA, 430 bp, Homo sapiens
  chr2:20425310-20425740
  hyper
ggggacccgggggcgatggggccttcaaccgacgggcaaacacacacagacacaccccggctgtcctccagctgcgatgcggctcgctgcgccccgccggcccagattctcccgtacgctcgcgttcttcctgcactccacaaagtgctggagacttggggccttagtttaaacagctgcacccgcacggaagggctgcaagaaaaagggggacgggggcggagttcgcagcgtttttctgtggaagacaacgccctctctcttcatctgagctaaaaggaaaaataagtaacttctttgttccccggtgacctcgggcacgcggatctgaggagcaccgtgcagttgctgctccttcgagatcccctgcgaggccctgggcctcagttcaaaaagctgtggaaggcctgcgggtgtaggggaaacggcc

SEQ ID NO: 331225 - DNA, 889 bp, Homo sapiens
  chr2:20646879-20647768
  hyper
cgaggcccggagagacccgggagagagctaggccgagtccaccgcccgagtctgctgcccgagcccgcgttacgcacaaagccgccgatccccggcctggggtgagcagagcgaccaccgcccgggagcagcgcggcgagacgcacggtgcgccctatgcccccgcgcccccaccgcccccgccgcggcagccgaagcgcagcgagagaacgcgccaccgcggggcccgggtgcagctagcgaccctctcgccacctgcgcgcagcccgaggtgagcagtgagcggcgagcgggagggcagcgaggcgttcgcgggccccctcctgctgcccgggcccggcccgctcatggcggccatccgcaagaagctggtggtggtgggcgacggcgcgtgtggcaagacgtgcctgctgatcgtgttcagtaaggacgagttccccgaggtgtacgtgcccaccgtcttcgagaactatgtggccgacattgaggtggacggcaagcaggtggagctggcgctgtgggacacggcgggccaggaggactacgaccgcctgcggccgctctcctacccggacaccgacgtcattctcatgtgcttctcggtggacagcccggactcgctggagaacatccccgagaagtgggtccccgaggtgaagcacttctgtcccaatgtgcccatcatcctggtggccaacaaaaaagacctgcgcagcgacgagcatgtccgcacagagctggcccgcatgaagcaggaacccgtgcgcacggatgacggccgcgccatggccgtgcgcatccaagcctacgactacctcgagtgctctgccaagaccaaggaaggcgtgcgcgaggtcttcgagacggccacgcgcgccgcgctgcagaa

SEQ ID NO: 331226 - DNA, 2006 bp, Homo sapiens
  chr2:20865462-20867468
  hyper
cgccgcgtctccgcggtggccgagagggcaatggctgaggagttcgtttgggacgaagcagtggagcaggggaactggggagcctgggccgggcctctctgtgggtcccagcgcagcgcagccaggcaggcgtcgggacctaggcggctttggattcggcgggcgacctcgctttgaagctgatcacccgctcaaggtgatcacgacgtgccgacccagtctagattttgagttctgcagaaaatgcaattttaaaggaaaaggacccgcctgcccttcttcggcagttcgtttggcccaggccttcgatcagctgaaagtttccgatctagggggatgtccaggctgccggcggagcagagccgataacccccctctcctgcgcgttcccctgagacttggcctccgcaacctgtcccagccgcggagcaaactgctctgcggcccgcgcgagtgcgccccagggcttcgccgctgccgggcgtcccctccatccacctcgggacccgcgccatcaccgcggcggggtaagaagctcggaggcgccatcccggggctctgcgccgtccgctctcccggctcctggccgctcacgcacacagccggtagctggttttcgttagccgctgccctcgcccagaaggcgggtggaaggtcgccagttggacgcacagccaaactcttagcgcactcccgcgcgagatcccccatcacccggggctgccgtcctcatttcgagctctttctagagcttggctcccgctgaagcgcaacttccgcgcccaaaccttgcttttacgacgggcggtccgcgtccaaaggtctcttacaggcctgccctttcagctcctcgccctcccttcctcccctaccggccccctcccctgctctggccgcccgctgcaatcctttggggtctgtggctgagtggggaaccgccgacccgcgatccggaacgcgactttgaggccgccgggagcatcctgtggcctctctctgcgcggccacccggccgcggcgcgaagcggtctggagggcgagcccttccgcggccccaactctgccgccccgttcccggcattgggaaccagggcagggagggggcgggtgtttctctgcgggggagtggggaggaagctgggcgggtgcgcgcggtgccccgagcctggaaccacggagggcgcgttggtcttgggcggatggagggggtgtcgcactgccgcggggaggcgtgtcgggaggctggggccagtggcagtcgcttggcgagggtgggggcgtagcgctgcggtgggaggaggcggctccggccctggtctccactctaggccggggtggggggcgcatagcggccgccggagctttcagcagggggcgctgctccgggcgttgggcgggggtggggtgggccaggagggggggccgcgggctggccgcgcacacttcccccattattaaacactatgttcaaaaggcgccgggggacttcccggagccacggagcccgcgccgcccgcccgcccggcccacggagcccatggacctgagcgccgccgccgcgctgtgcctttggctgctgagcgcctgccgcccccgcgacgggctggaagcggccgccgtgctgcgagcggcgggggctgggccggtccggagcccagggggcggcggcggcggcggcggcggcgggcggactcttgcccaggctgcgggcgccgcggctgtcccggccgccgcggttccccgggcccgcgccgcgcgccgcgccgcgggctccggcttcaggaacggctcggtggtgccgcaccacttcatgatgtcgctttaccggagcctggccgggagggctccggccggggcagccgctgtctccgcctcgggccatggtcgcgcggacacgatcaccggcttcacagaccaggcgacccaaggtacttacgcctcttctgtgcccgcccatcccgtcaggtcctgggctgagaccagccccggagccgtgccgcagctcc

SEQ ID NO: 331227 - DNA, 843 bp, Homo sapiens
  chr2:21022199-21023042
  hyper
gccaggactatcaactcttgtgtttggtacacaggacacaaagcaggtgtccggtaactacttgcgagggaagatacgaattaaccaaggaataaagtgttccaatctgcattctgtcttgcgtggggaacaaaaccaaactaagacccaaggatgagggtttacggttaaggtcttcagcgtgaataaaaggcggcgtgagcactaaacgccgggggcaaagaacactcccggcccagagtttgacccctcctagcgagttcttcccggccagctgcccaactttttggcctctactcctccgcgggggcaccataagactccctacaggtgggctacacttaggggttcaaatgctgcattaccgcgctcgggtgagcgactgcccggcctgcaactcaagggactcccaggccaagtggctccgaactcgcgagctgtcggaacagtattatttttgctgctacgggccatctggcccagggcaacaggggctctgcgaggaaccatagagaagaaggggcgccagatcccgcgtgcctgcccacccgtccttcctttgggcagtcaccctgagctcggcaagctgtacctcacctgtccacctggaaggctgcccgctctccctgagggtcctgggaaggcggcacgagaccggaagtgcccccctcaggtgacgtcacagtaccgcgccggagctgatccgggaagccgatgtcagcctggcgcgcggcgcacagctggctgggagatttcttactggcttggagccggtggtccagatcagagagacctcttggagggtgtcggggttttcctttctttttcatttgaattttatcc

SEQ ID NO: 331228 - DNA, 967 bp, Homo sapiens
  chr2:23609309-23610276
  hyper
cgcacacttcccttgacaccttgtgggtgccagcgtgttgtggggggacgcggaaaggagagctcacggggacggcgaagcggccaggaggtggtgtcgttggggaggggttgttgatgtgtgggacagggtggacctggagatgtgtagtgtgggagtgtgaacgcgcgccccgatggcctcggggggccgggggagcccagggctcgcgtcccggtctccgtggcctggagcgggctgagagcgctagggttatctgcggtcgccgcgcgggtgcccgcgctgggcagcgtcggccccgggccccaagggagggacgtgctcgcctggggccggagcgcggggctgggagccggggtaggtcggaggtggctcttagggcaggtcgcctctgcgttgcctggggaaggcggggacgcgctgcctgcctgcggccagccgtctcggaggagggggtggcggccacgcgcgagtctcggatgcctgggtccacccgctgagaagccagttgtcgtccctgggctgtggaaccaagcggcagacgcggtccgttggcgggccctcgcgcgggcccccagagatgctgatgggtaaggagctgccgccgccgccgctgccatccccgccgctctgcaaacgttctcctccctccctcccgtgcttgcgccgcggcgcgccccgggcgaatcgtggacgcaggtatttatgtagcattaggcgagacctcggcgctggagggaccagaccgtggaggacgccgagctgctgctgcctgcgaaacttccacttcggcagctcagcggcatcccggcccgctgctgcaggttccagcctctctccagtccagcaacgctgggattcggactcctcttgcaatgacagatctgtcctggttacggctgtatttatactagtttcagtctctttaaagtcatctgtctagtcactacagagtttcttcctcgcc

SEQ ID NO: 331229 - DNA, 783 bp, Homo sapiens
  chr2:24272450-24273233
  hyper
cgtcaggcggggccaggctcgctaacagccgggcggggtcccttcccccgggccccgccccggccgaccccacctttccgcgcggctccgccccgccgcccccttgccagtggcccctccccgcgcaggtcccgactccagccgcacctcctccggctctgcagtggcggcgaggaggcgagccggagcgacggcggggctggggccggagccgagccggggtcgggcagcagcagggaccccccagaggcggggcctgtgggaccgctatgggcgtggagatcgagaccatctcccccggagacggtaccgggctccctccggagccaggggaggggaggggtcccggggcggagcccggagggcgggggtctgattcggaggtggcgtggagggtgctgaagggtcggggggctggatggggaaggcaggcggagacgccggacgggattcttgggggtctaggagaccatcctccgccatcctcttccgcgctcacctaggggaatgtaggcggcagctcggaggcgggggtctgcggcccggaggcgggggtctgcggcccgccaccgccccgggcttctcctgtcgcggctgcagtcgttcggttatccgctgctgctgataccccagcctgggtttcggcttcgctttccctgccctactcggcgagctctggaaagcaggacctgctctcggatacccgctgctcggggacctcctcctagcgcgtcccccgccgggcctcccctcggtcgcttccctgcgggccgggctgtgagc

SEQ ID NO: 331230 - DNA, 242 bp, Homo sapiens
  chr2:24714925-24715167
  hyper
ggaatctcgcctgccgggaccgcgaaatgggggcgaccgcggcgtccctctccgtcggcgcagccctcgacggcgcttgggtttgaccccggcgcgcttgctcgccccttctcccgagaaggggtttcggaggtagacatgggatggatactggacatgttcctgtcgcggcccgggtttggtccccttcctgggattcagccgaaagggccgaggaagggaagcaaacatgttgacgaggc

SEQ ID NO: 331231 - DNA, 211 bp, Homo sapiens
  chr2:25142472-25142683
  hyper
cgggctccgatccggcccccttcccacgctcggggcgctgtcttcccccccggaagcctggccctgcccctgcgtttacctgtgcgggaactcggccaccgcgtgctccgggacggtccccgcgcgggctggggcgggagagctcggcgcgcccgagggctgctccccgcagagccgcgccgccccggcagcgcctcggggcccggccgga

SEQ ID NO: 331232 - DNA, 540 bp, Homo sapiens
  chr2:25354461-25355001
  hyper
cggagtccgttttcctcgggagaagtccgccaggaagttgggagcgcagaggaagcccaggctggaagggggcgtgaccctgccctgcctgcgcgcggtgcacagaggaggagggtgccagccttggatctcgggtgtcccgccccaccgctctcagggcccacagtactggagatgttcaacacgctgctgaggcagctgcggctcagcatcgactacgcgctgaccgggagctacgacggggcggtcagcctcggcaccaagatcatcaaggagcacgaggagcgcatgttccaggaggccgtcatcaagaccgtgggtgcggcgcggggccgggccggggcggggcggggccgaggcgcggagtggggaggggaggggagggacgggacggggcccaggggctcaagactgaggcgcagggcggggtggggccaaggggaggaaagagggaccctggaaaggggcggggcaccgggggcggcccggggatgggggttggagagggagggaccgcactggggcgaagggcatccaacc

SEQ ID NO: 331233 - DNA, 743 bp, Homo sapiens
  chr2:25391013-25391756
  hyper
actccgtctcaaaaaaaaaaaaaaagaccgggttgtcccaagacctcctagcaagctctcggagcctccggaccgccgcgagcccctgggggagaggaggccgccggctccctggagacagcgcctgcagcttcgcggccgtccgcccaggggccggacgtgggccctccagctcagctactggcggcttctcatgccgcagtcggcgcagaaagtttgtcgagaactcgggaccgcggagagccagaggcgcccaggtccgccttcggagccggagccggccgactgcatcgcgaggacggggacaggggatcccggggaaagagcacgggtcccccacgctgcgcccttacctgtctcgggaggctgctctctgagggcggggacgctcggcggcctctctcggtcgcggctcttcttcccctccttcgccgccgcttggtcccgcgctcctctgtccttatatacttgccgagctctcctggtgggcgcgggactttgaccttcccggcagcacaaggagcagctccccgggccaggggaaggggggccgcggggcgtgggaggggggcttccagacgggggacgagcgcggggagacgcgctggaaaggggctggaattagcactgtcctgccgaaggcgcacctggccgctcgccctcaggaagaacttaattatggatggcgttgggtctccgcttagaacgggcgggaggcttagcacccccgtgtggggcaggcc

SEQ ID NO: 331234 - DNA, 455 bp, Homo sapiens; identical to SEQ ID NO: 221692
  chr2:25438912-25439367
  hyper

SEQ ID NO: 331235 - DNA, 93 bp, Homo sapiens
  chr2:25464444-25464537
  hyper
cgctgcggacgtccccgacgtacatgatcttcccctggtgccgcaccatgcccaccgtgatggagtcctcacacacctccgaggcaatgtagc

SEQ ID NO: 331236 - DNA, 160 bp, Homo sapiens; identical to SEQ ID NO: 221708
  chr2:26395433-26395593
  hyper

SEQ ID NO: 331237 - DNA, 424 bp, Homo sapiens
  chr2:26401695-26402119
  hyper
cgcggccccagccccatcttttcgcggggctgcttctgtccgcccgcacgggggaggggaggaggaggcggaggcggaggcagaggcccctaggagggcgaaggccggcgggttaacgaggaggcgctgagtgcacggctgggctccacgctgatttctcctaatgaattaataatggcgctcgggcgggcgggggtggccggctgcggaccgcggagagagccgaggggaaggccgtggagggaggaggacggcgactcgcgccgggtggggctgaaggcactgcggggtgactcggtctccaggctgcggcgctctgctccgggagtcagggagacctggcctggccccgtactgtcccccgtcccagcccccgcccctggccctgcgggaggggccaggcgtcttccctgagcatggtgcc

SEQ ID NO: 331238 - DNA, 695 bp, Homo sapiens; identical to SEQ ID NO: 228178
  chr2:26407500-26408195
  hyper

SEQ ID NO: 331239 - DNA, 725 bp, Homo sapiens
  chr2:26521776-26522501
  hyper
cgtttcgtccaatgaggagtcctggggtaggagtggtgtgtgtatgtgtgtgaatgtgggagcctaactaggctcacccggcacatggagaggcctgtttcatccgatgaggagtcctggggtaggggaggtgtgtgaaagtgtgtgaaagagatggtctcgggagaggccaacgcggggagtgacgaggggaggcacagatcccttagtgcgggttgtgttccgaggccagtgtgggggaaaccagacctagaacgttgtatacggctgataggaccaggtccaccgctgcagcaggctgtgagaggggaaggcacgttcctggctaagcagcgtccaaaactcccgtaataggacccagtctggtggacccgagagtaaaagtgagagtgaaagtgcgccgcaagggaggaaatgggaggaaaagcgtcgaaaccaactcctttggagtgcatgataaaaaaatttttaaaaaggatttagaggtgattatgggatgaaactggatgctcaaaatttaaggacatactgtgaattagaatagccctcttttagtgttggacgactggccgaaggcactacagagaaattggccgtgtgttttaaggtggtgactagggttggaggaccaccagggcattcagacctagtctttgtattgattcatggctaaatgaatgcagccctgcctagcagtttattgtagaacgctcgcagctcatggc

SEQ ID NO: 331240 - DNA, 810 bp, Homo sapiens
  chr2:26915614-26916424
  hyper
cgggtgcccggcgcggagagcggcgagcgcagccatgccccaggccgcctccggggcagcagcagcggcggccggggccgaggcgcgggccgggggcgccggggggccggcggcggcccgggcgggacgatgaagcggcagaacgtgcgcacgctggcgctcatcgtgtgcaccttcacctacctgctggtgggcgccgcggtcttcgacgcgctggagtcggagcccgagctgatcgagcggcagcggctggagctgcggcagcaggagctgcgggcgcgctacaacctcagccagggcggctacgaggagctggagcgcgtcgtgctgcgcctcaagccgcacaaggccggcgtgcagtggcgcttcgccggctccttctacttcgccatcaccgtcatcaccaccatcggtaacggctcgccgggcggggggcgggaacccagggctgggcgcggggctccgggagtcgtccggggccggctggggctgggggcgggggctcccccgagaggggctgggcgccgaaccctgcgctcgcagaaacccgagttcagcctggcgtgtgtgctccgcggggacggaactcggggaggcgtcgattcctggctccggacctgactctccggccgggccagccctaacttggccctgccatgttgcataggcccccagggactccgaagtgtgtgagaggggcagggacgaccggcggaggctcgggcaggaggggtgtggccgggccaggccctgaacagggcgctgagagtgagcggcgggagagcgccagtgctccgtatccctgaggat

SEQ ID NO: 331241 - DNA, 86 bp, Homo sapiens
  chr2:27069899-27069985
  hyper
cggatcgccggggagcccggggagggagggattctgcagctgcagcttggaggtccttgatgctgcattttaacgcgcatcgcaac

SEQ ID NO: 331242 - DNA, 862 bp, Homo sapiens
  chr2:27070281-27071143
  hyper
cgctctggacagggaagcacccgcgtggcgctgggcaaaatcttctcagtggagagaacgcactccgggttcgagacctccccgggtgcagatgcgaactgcggtggccccaagtggccgtccactttgttcatgagaacagttttcctataacgcccacccggccctttgcatcccgcaatcccgcgggcgtcggagcgggtcttggcgcgaaccaggcggcctcggcggggtcctgcggcggagggcagcgcggccgcagcccgggagaggcggccgcggcattgtttcagcccctggggtgggatccagctgggggaggggaggcggggtgtcctccggaaccgcccccggccctccctggggacccgtgcctcagcgcgtccaggctttgtggtgtcctgagtcgccatggaaacccgagggaacgcggagccgggtgctaggggggtcggtgagttctccggccgcgccctccgtccgctctcggaccccggccctgcagcagggcctgccgggagttgtagtccccaggcggcggcggcgcgcggcgccaaggatgcgggacgccgcctgtccccgcctccccttaacctgctagctgaggtggggagcggcgggaggagccggccgcgcggtgattggcggaggccgctcccagcccccgacacgcgcccctcccccgctccccactctggactcccgcgctgggcgcgctgaggcggcccccgagcgagcgcgcgtgcagccgccgccgccccgagcacccgcagctccggcgccgcggcgagacggagacggaccgagccacgggcccccgcggccgcagcatctcggaggagtgggtgatggcaggggggtc

SEQ ID NO: 331243 - DNA, 47 bp, Homo sapiens
  chr2:27165767-27165814
  hyper
cagcgccagggaacgctagagtcagaaaatgctgatttctgttcccc

SEQ ID NO: 331244 - DNA, 148 bp, Homo sapiens
  chr2:27304248-27304396
  hyper
tggcctctggagaccgcaggtcccagcatgcagcagttcctgtggcttgccttccctcctgcgtgctgcacaccggatgtgctgtttccctgccccgagatagccttactataattatgcaaacaggaactcctggccaactctcacc

SEQ ID NO: 331245 - DNA, 424 bp, Homo sapiens
  chr2:27308893-27309317
  hyper
cgcccgacgtgtctacgtcggctgaagagacagcgggggcggcgggctcctggggtctcgcctgagacggggcacctagccctgggcgagcgccgcacccgggcccgcagcggcaccgcgcccagagcggcctctccccacgcccggggcgcgccggctcagggaggctcggggccgcccatgcagacttttggcctggcgcgatcccccaagaacccctccagggccggcctgcggaggagccgatcctcgcaccctccgctccctccactggccctccaggtcgattccctgggctccaggctcccccgcgcgggcgccgcccaccgccatactaaacgatcgaggaataaagacacttggtttttctaaaaaaaactaaacgaaccgttctgctacggtacggggtcgggggctgccgggc

SEQ ID NO: 331246 - DNA, 405 bp, Homo sapiens; identical to SEQ ID NO: 228195
  chr2:27341651-27342056
  hyper

SEQ ID NO: 331247 - DNA, 278 bp, Homo sapiens
  chr2:27473102-27473380
  hyper
cggaggggaaaagggtcttcccgtcctgaccccagtcctgagactccctgcaaagacttccggctgcctctgccgctgcggtggcgtatgccccagttgggggcgctgctccccagccagccgggctctaggaagcgggagggccaaatgcctcctttaagccggctgcaccggggccctgaccgggcgggagggctgctggagggtggtgcttatcacccgggcttcctcttgaccctgccggctgggccctgggccttggccttcgcctcttaaac

SEQ ID NO: 331248 - DNA, 771 bp, Homo sapiens
  chr2:27484883-27485654
  hyper
cggacggtcagccgacagacaagatggcccacgggggtgggcagggaggtcggacggccgctcagaggggcaggtggacggtggcggcaggcgcgggggccggcggggcgcgttggcggttctcctgccacccccggcccgctgtcccggccgctccgcgcgcctcatttcacacctcgccgcccccggccccgtctgtgcggagccgggaatacccccgctgcccagaccgcacctgctccttcctcgccgccccctcgcttcccggcggccgcccgccccccaggggcccgcaagacccgcgcggagcccggcccatcctcgggccccggcgcccacagctggccgcggctggagggggcgcgcggaggggagcccccggggcctacagagggagctctgaagcctgggcagcgaggcgctcccgccctgggcccggggcaatgcggaccttggcgcaccgggcgagggctccggcccgaccgagcggcagctgctcccagggaaggcaggcgccgcgggggtggcggaggggtccggcggcctgggacgccggccggaggggagtgagaggccgcttcacccgaggaagtcaggcggccgggaggaggcgtagccggctgtgtagggctgggcgctccgtgtggccagaggggatgaagcggggtgcagcggagcgagggacccgcggtgcgctggggcggccgccggggcccgcgccgagagagacaacgaaatggacggagggtagtagggtggcgcccccgggcc

SEQ ID NO: 331249 - DNA, 338 bp, Homo sapiens
  chr2:27938267-27938605
  hyper
cgtgctggactctttcaccctgcacgggggagaagccctcctcccgggagcctgtttggggggcaggcctggccgagtggctccgtgaagacgcaggcgcggccggagggcgcggggctcgggcaggatcgcgccgccgggccgggagggggctgcgggcgcgcggcggatgtcacggcttacctcagagcccaaattagaaggctgaaaaaatcacagcaggaaataatgtgctgcctaaaatagaagcatcaactgggagagaggccggggagtaggtggcatctgaggctcccgccgcgtcctccccagcggctgcctgacgctgcatcggaggc

SEQ ID NO: 331250 - DNA, 725 bp, Homo sapiens
  chr2:29033285-29034010
  hyper
cgtattcacacgttgtgcttttctcagttcaagcggcctcttccttttgagtaaccagggtaaccacgctgtgcccgcgtgtgccgggcggggaggggaggccgcagccccagccccgggggcctggttgtctaatcgaagggaagtaaacggccccaacgcaagcctgactgcgagacgtgcccaagggaggtaggtcgaatgaagagggttgtgtgagttttgcgcgggcaggcgggataacggaggagggaggcccgcggccgaggctcgggcgggcggggggcagggaggggcggggttcgccggcgcgcactcccaggcaggccccgccccctcggccggctgtgcgcgctgattggcccctgccggcctcgcgctccctcgctccgggttggcgggagaccttagagcgggtaccgctgctggctagcgaccgacgagcaaccgtctgaggccaggagcgctgcgacggagccttgaccgccgttgcccggccctctcccgcgcagccccgggcttccgcaggtacctgtgctcgcccccgggaaggggcctcgcaggcgaatctccagtttcgagtgtgcccggtccctgggttcgctcgccggcgaccccaccgcccgccttagatgagaaggcagcgctccagcctcgtcctcacgccgcctcccgtgggcgccctcagctgccttcgcggcgacgacacacgcgctccccgcagc

SEQ ID NO: 331251 - DNA, 1182 bp, Homo sapiens
  chr2:29337909-29339091
  hyper
cgtgggtgtagcacggattaggccttttacagcaagcgctgccagcagggaactggtggatgtactcttgaccacgctcggctggactctggggagcccaagacgggtaagactaggtccccggccccagcagctggtgggggcgccgcaggttagagacgtgaggccgcgaggctgagggctgtgaaggcggtgggcacgcacggcgtgccggggccgcctggcttcgcggcgggggaggtaacactgcgacaccccgcagacgctgtcagccggggtcgcggccccgcgtgcgcccgatcatctgactgctggggagtgcgggggcgcgggagccaggcgagccagcgcaggcgcgcgctgcctcctccgtccccaccgagtccccagcgcgtgcgcggggccgtggccgaggcctgcgcgccgcccggccgcctgcactgcgcgcgcgcccaccccgcgtgggaggcagcgggaggggcccggagaggtgtggagcggcgcggcgggaggctccgtgggcggccacgggagacagcgccggcgggagcgcgcctctcggcctttcctccgcgcccccgcgtccccagccggccgctccgagaggacccggaggaggcaggtgggccgggggcgcgcggggcccccccgggccgcgggctggccggcggcggggttggggccggggtgggcggccctgggggcccgcggggaggtcagtggccccgggagggtcgcgcagaggcgctgggggctgtggaagccccgcggccgcctcccgtgggcaccggtgtcgctggccgcggggaggccttctcggggcggagcggcccacccggcggggatggggactcctcgtggcggccgctgacggacggcccaactttaggttgaggggcgcggggtgtgcgggacccggcggcggagctgggctctgggccacgaccgccagccgcggctgccccgagagtccccgcacgcgcagtggctttccaacgcggcctcttcccatttctcacttgactccccttgcgcattaaattgtcgagaaacctttggccagtgggtcttcaaagctaaaccaaatggctgtccttgcagtccttggctacctgagatcccttaattctgaaccatccgcacctgggaggggaagttgaaaggagcgctggagctgagccc

SEQ ID NO: 331252 - DNA, 1227 bp, Homo sapiens
  chr2:30143623-30144850
  hyper
cggctccttccacctgatctccagaggactgtgcgtgcgcgcaagtctcttgctttcccccaactgcacggaggcgagcaggagtctaaatgaaacagacctggaagctcaggggcgagtccagagacactcaagcacactgggctcactggctgggaccttgagcctcccgctctccgcgccgagtgccgcgcccccgtctgtagctcgctgcgctcggtacagaggaactactatggttgaagggaggtggcagttgggtaccgtcctctcctgccccccgcagtcggagctggggtctgtcccctctcggggcagcctccaatctctgcaacttttaaggctgagaacggcggctcccagctgctgcacgctgtcctggccgccttttgcgttccttttggctcctccaagctcttctgcccggtctgggcgggaaccgagggcggaggctgccgtcttgcgcaccctcaagctatctctccgctgcgggaaggcttcggactgtctgcctgctgaacttctgggcgtgaatcccagcccccgcgctgcgcaagtttgcagcgtccttgctctcaccggcgcctcggctcctcagagttcgcaggcactggagcggccccggcggcagcagctgagggcgttcagggcaggggcgcccgaaatcttgccgccccctcctcacccatcatcagcgcccgcggctttgggtggccgaccagagggcggccggaaagcacctcggtgccccgcgaccctccgaacagaggcggcgggaggtaccagctgctaccaccgctgccgcccccagagccgctggatcgcatctgcctgggcgcccgccacttgcagctggctgagccgcgcgagcgcgcgcagggagggggcggggcccggagggggcggggctcacaagccaactccgcgctgctgcccgacccacgcagtccggcctcgccccgccccacccgcaccctccaaccaatggcgtggctcgatcggctcctatgcaaatctgcagaggcctcggcattcattgagaaaaggagtgagcccgccccaccctccctctgttccctctccagtctcttgttcttcccctcctctagattccctgccctatttctctgcagtgtgaaagggagcaaatgtgagaactggaagaggcctttgcaatcaagcactctccctaattatacatttaagagattaaacgggtccgacttc

SEQ ID NO: 331253 - DNA, 1380 bp, Homo sapiens
  chr2:30453530-30454910
  hyper
cgttcggctaaagctctttgtttctgctgtcatgagcgactcctcggagaagacgtgggagtcaaggatggggggcggcgtgcacaccgcccgcccacaccttctgcccccgctgcagaccgggcgtatgtgtgtctccaatggaaaaatcctacccaggacgacaccacatccttgctcccacaaataaaaccttccacggaactcagggctgcagaccagcccttcgcaagccaacgcgccccgtgggcactcggtcccccggctccgcgtctctgccaccttcccaccgcttcttctttaaccatgctcttgtttcccctcgctgatcgcaaggctgcgggcgaggattccagagagaggcctagtatggggaacaaacgcttcagaggggtccgaggtgggctggggacagccagtggatgggaaggagggcgctggcgccgggcggctggggtggaggagtggcgggtgccctaccccggcgcagagcagccgccgagctgtcatgtcccgagcggcccccgcgccctccttgcgcccacctccgccgcgctggagttcggggtgtgcgtggagggggctgtgagcgggaagcggcgcggacgcggagtccgggccggtgcgagtgagcgcgtgtgcgcgtgggagagcggcgggagggggccgggctcgcagccgcagcgaaccacggccccgggagcagagccgagcgcgcccccgagccgccgcccgccggagctgcgagcgctgaagccattcatgattttggtgacgttattccaggagtgggcgagggagggcggggcctctcggggccaagccccgcccccgcccctataaatacggcttcccgggctctttgtggggctgagtgctcagtggagagcggggagttgtgtccaccttgccgacgtcgctagccgtggggctgtcctgggaaggcggacggcgagcgcccggtgtccgcactcggccgcctgccgtgcccgtctgcgcccgtgtcatcctcactcgggacgcagggaccgtttttaaatcacaggggcgtgtgtcagcctgccctaggacttcatgtctatatatttccccattcactggtgagtaccctgcgcctgcggcgggcgtctgtctcgcggcggtggctgcgggcccgggcgcctgcttcgtgccggctccgggtgcgagggcagccggcggcgcgggcgctcagcgctaacccgccgcccgagcccgtgcaggagtcaacgtcaaggttgcaaaggtgggggtggggggagggggtgctgagaacatccagacaaaggacgtgaactcggagccctcacctaagtgacggccggagggtttgtattggttggcgggggagccaggggtcac

SEQ ID NO: 331254 - DNA, 851 bp, Homo sapiens
  chr2:30454942-30455793
  hyper
cggagagctgcaggaggcgcgcgccccacttggcgcaggggggctcctgctcttcccgggcccctcctctttttctttttgtttgcatgcaagtctcaacgtcgaggccggcagcagcggggctgagctggtgcggccgcagggtttgcagagctccgggggggtggggggcgggaaacgctctccccacacgtaaccccactaaagccacaagcagcagggcacgcgctgcagcctctcaacccctgccctctccaccgcccctaaaaaccgacgcacattggtgggggccgggactgggaggagccgccttcgccgtgctgaaggggaaggagcccgggccgggcgcggggcgtcggaggtttgccccggactggggatcggagccgggagggatgcagagagaggcaggcccctgactgctgggacttccttgctggcagtttcttccttcctgctctgggttagaggagaagcggccgggggcgagcgccggcagccccggagcgcgctctcaggtgcggacgtggggagctcggccccgagtctccggcaggcgctgagcgaagggaaaaccggcgcaagccgcggcggggtccggcctggcccaagaagcggaaagttcatgcttctcgcttcaacttttcgggccggcgccacagccccgagcgaggaagagccgcccctacgtcagactcttcaccctgcgtgcgctcttctggctcctttctttggaggtcgccagcagcctttccaagacccgggaggaaactgcctttgcagggcccagctcccgaacctaaacttgccgcaaagccccgcatcttctgttagtctccctgcccccatcc

SEQ ID NO: 331255 - DNA, 1529 bp, Homo sapiens
  chr2:31360231-31361760
  hyper
ttttacaggctctttcgtggtgttctgggcacattcaacttccaatgcagctgagagggtcgggaacagttagagaacaggggtggcagccgcccgggaggctgcaaggcgctcgcccgcaacgcacaggcgcgcgcggcgcacccggcctccggcctccccaggtcgggcctggcagctgcgggaaggaggtcagcgcagccgccacacttcgcccgggcgctggcccgacccgaccgccggcgactctctggcagcgcccggagaccgccagcccctgggccgcccgtccgcagagccccctccgccccgggaccctcgcgcgcagctcaagttgggagccccgctccgcaggcgagcgcgcgcccaccacccacacccactgccactcatgcacaccgcgggtccggagatgcccccgagcgttttaaaatccagaaacatcacatggtagccacatccggcggctgttacctgctcgcagcacccagaccctcgccctggtttcccgggagcccgcaaacccggcacgcgggctgcgcgccctcccgcaagccaccgctcagcgccagcgcgccggcaagccgcctaccttaggggtctgcacttcaggtcccgtcggcacctccaacttcctcttggttacccagaagaacagcagcaccgtgatccagagcaccccgaagactggcagaaccagccgacgagtcaggcgccgcatggtcccctttgccgcttcctctccgcggcgctacgtcccgggggcaccccccggcggtcagggttggcggggcaggagtcctggcgagcgcctcgctctggggagctctagacccaggatccggttggaggggcggcaggatcctgcaaggcgcccttcccgcttcgaagagaagcgagcctgggtggggggtgcagggcgacccgaaacgtggcagggaaggaccgagggcagccaagctggacgcccgctccagcgggagaagcgcggtggctgccgagatgttccccacgccgccaccgcggctgccgccgccgccgccgccgccttgcccgctgccgccgatagggaaactgactcgagcagcgagagggaggaatccgaggctgtgccaagcaccccgggaggagcacgagggcggagggagtgagcggggagggcgggcccgacagacaggccgactcggagcgagcccaggtgggagtgagcggggctctgagagggggcgctaccgccgcccgccgaccgaaacgctcggtgctgttgcggggccgccagcgccaagccctgggcgcagctcccagaccatcgtgggttggggcaaggcggggcggggcgggagcggtgcactcgggatgcccgccacccccagctgccagctgggacccaagggccggccctcgccaggcggcgctgtgcctgggaggactttcccgctcatcgcgggggctgcacgtggcgctgaagccggggtcccacccccaatgtgctcgtcctaccacagccaaggctgggattccagggcgcc

SEQ ID NO: 331256 - DNA, 835 bp, Homo sapiens
  chr2:31456697-31457532
  hyper
cgattcaaagcagggagtgtgatgaataggtcaactctgtcctcgcagccgtccctgagagggcgctgttcccaaatcgaagccccagaggcggagactgagacaccggcactctcccactggactgggtcagcatccctctccccgcgcggccgcaggtctagagctgagcgcctgcccacaaacatggcggcgccctgcgcggcttcccgtcgccgcaaccgtggggccggccctgccttgccagtactaggggacttcctctgcgcgccggcttcctgcccagctggcatttaaaccaccgcctggggctgcaggatgctgctgcggatgcagagctgtccgcgggctgggcagcgtcgccgtctcccctgagccgcctcggtccggcaggagcggagccgaagcatcccttgctgcacgcagggcagagcaggcgagggctgggggccgatcggggaccccggcttgggaccccggcatctggcagtttccttgcaggttcaactttaattgccaagatttcacccctcctcctcaagcccagattatttatcctccctccggcctgggctgctggatgcagcagcggctgggcttggtcccaggagcagggagagtgcgctcccggccctcctagccgcgtgcccgggccatggtgcggctgagccccgcgcttgggtgaggcggcggcgcggctcggagcccggcggaccggtcctacgggacatcttcccctgaggaggagtcttcccctggggctgcgtgccgggggcgagcggcggccgcgatgttcagctggctgggtacggacgaccgccggaggaaggacccc

SEQ ID NO: 331257 - DNA, 490 bp, Homo sapiens
  chr2:32852579-32853069
  hyper
cttctacagcgttccgacagtgttccaaaaacttccctgcaccagcggcaggggcagatttcccacccggccatgattcatgtagagcagtgtcaaaaccagatcctttccttacacgctcattcgccgaaagacccatgctatgctgacggggttccaacctgggcttcaccgactccacgtcagagggtctgtgattccctgagagggtacccttaggctgagagcaagggcccacctgcactctgcgcgaaggactgtggttttcatcgggttgtcgagagcgttctaacccaaaatgctttaagaatcacaactctagcccttctaatcaaactgctttggccaagacgtccgttttgagttgcatttgaaccctagccctcggtgggaggcacactcacttccacgttcacagttcttggaagcggtcccactgggggcggggctgagcgcgaccgcgccctcaactccccctattgcccgcccc

SEQ ID NO: 331258 - DNA, 810 bp, Homo sapiens
  chr2:37899247-37900057
  hyper
cggtgacccgcagggaagcgaggccacctgagtgcgccgccccggccaggccgcagctccccaggtccctctcagcccgggctccggtgggcgcggagggggagggtcgcgttctgtcagtttctagctcgctcccctcagagctgcagccaaaacccggagagtggaataagcgccctgaagatgccggagctcccggctgagcaactggacacgcgacgaacagcagacgctacaggttctcctacccagagggaggcgtttcttctccctcagggtctttcaaaaggatttgcctaaagctggggcaagccggtggcggctgccccagacgcgcgacgaggcgcaagtggcgcagctgccggcccgagagagtaaaattcaggccgcggtggcacctgcgcccgccggtcacccggccaccgccagcgccgccgcccggcgcgcccctcccctccgccggggccggagcgtgaaccgggttaatgaatgctaattttcttaatcggcctccgtctcttcctcctccgcgagtcgtcggcctggggaaggagtaggcgacaggaaagggcggtgttttccggctgggaggtcccagcccgcatggtcagccaggggagggggctgggacccctgggagtcggacgctgggggcctggcctctgccctgagactctcgggttggatggaaatcctggcacaacgcggagaacctcccggataccttggctttgccgagagatatcagcttcaggtcatcaccgcggtgccctgggtctgtctgaaaccttagagggtgcgccttaagcc

SEQ ID NO: 331259 - DNA, 2183 bp, Homo sapiens
  chr2:38301661-38303844
  hyper
gcggggggcggccccgggccgaaggctttcgcagtgcctcaagaacttgtccaggatgaagttgctgaagttgcggttgagctgctcgaattcgcggaaaacggtgcgcaccgggttggggaagtactgcagccagggcatcacgtccaccaggctgcccgcgcccaccgtgcgcccgaactcttcgttgtggctgagcagctcacggaactcggggtcgtcgtggctgtagcggcagccgaaacacacggcactcatgacgttggccacggccacgacggtcagcggcctcgggtcgaggaaggcgccgtccgcgctgccgcgcaccagcagcgccaccagctcgcgcgcctcgctcagcacgtggccctcgaggacttggcggctgcgcggctggcgcgtgaagaagttgcgcatcatgctgtgggctgcgcgccgctgcaccttccagtgctccgagtagtggccgaaagccatgctgcggccgccggacaccacacggaaggaggcgaaggccggccggtcggcgaaggccgagccctgctgcaccagggcctggtggatggcgcgctcgccattcagcaccactatggggcagctgcccaggcggatctggaaaacgtcgccgtagcgccgcgccaggcgagcgaacgagaggtgagccgcctggcccaccgccgccgcgtttccgatcagtggccacgcaaacgggcccgggggcgcggaccggagctgccgcctccgttgcctcagcagccgctggcccacatgcacagtggccagcaccgacaggagtagcaggagcgtggtctgctggatggacagcgggtttagcggccaagggtcgttcgggctgaggctggtgcccatgctggggacagagaggagaaggcgtgacactcaggggtgcagagacaggagcgggcgccccacgcccctaccccagcctctggggactgagtgccgttgggtggagaggtcggagctgactctctggagaaatggccgaagacgccccttcccatccccaacccactctcccttggagaagagaaggggcgtgtttccacctcgctgtaacccagcgccaaacccttcccctccccgcaaggcgcgtaacggttcctgcaatctggggacaacgctgcgggcatcgaggcggtggcgcttgatttcctttaaagtacctaccacgccacccgctacctgtaataatccatctgaagaggtcgccgggcagcgcctcggcagacagactgacctgcggggaggtgcggtttccagtggcgcgggacagccggctccgagaaggaactgggacctttgcctagggcaagacgtcaacaggaacccgcagcccggcctggacacctgctgccctcactggaagctttaactcccactcgagtctcttggcgtcgtcagtgccaggagcgcttggattgggatggggacggagaagggtgcctcgctcgccgagccccgctgcccttggggacctggcaaagtcgaggtttcctcacagcgttgagattgagactgggggtcggtgagtggcgtcaattcccatgcccttgcggctctcacaactggagtcgcagaagcgctcgctcccactcccactccagagtcaaagcgcgccatcccgctcctccgggttttaaggactgggtagaaggagggcagcgcgacctggcagggcggggcctgcggggggcggggcgcgccgcacaccaggccgctttgacccggactcccgtccaggcgcaccggccggcctcggagctctaccagcaggctttcatgggagcggaggtgcccacgtttccattgtgcggtaaccgcgcttcatcacagccacctccaatcgaggccgcacggtgtccccagaaccacgctcggtacaacctgccccggccgctgcgctcgacttgggagcgcgccccgccccgagcgcacgacctcccttccctctccgcgacttgagcttgcttcccggaaagccagtgtagtggcagcggtttgcctcacagcgcccctggttggttgtttaaattttatcttaggttctcgcaaacaaattgccacctcagtggaggctctttggcatgctaaattttttccagttcttgcggcgagatcaggaatccctaaaagtagccgctcccccgccccggggcccc

SEQ ID NO: 331260 - DNA, 134 bp, Homo sapiens
  chr2:38342446-38342580
  hyper
cggttaaaaatcactactattcacttcttaccatttgatctgttgacagtttcagccatcagtcactgccggctcccacttcatttagttaccatgtccctcactaacacaagatcgccgtctaggggccaatc

SEQ ID NO: 331261 - DNA, 406 bp, Homo sapiens
  chr2:39187314-39187720
  hyper
cgcgctgcccgcgccctacgacgaggagccgttccaggctccggccctcttcgagaactgctcgcctgcctcctccgagtccagcctggacatctgcttcctgcggcccgtcagcttcgccatggaggccgagcggccggagcacccgctgcagccgctgcccaagagcgctacgtcgccggcgggcagcagcagcgcctacaaactggaggcggcggcgcaggcgcacggcaaggccaagccgctgagccgctctctcaaagagttcccgcgtgcgccgccagccgacggcgtggccccacgcctctacagcacgcgcagcagcagcggcggccgcgcgcccatcaaggccgagcgcgccgcgcaggcgcacggcccggccgccgccgccgtcgccgcccgcggc

SEQ ID NO: 331262 - DNA, 199 bp, Homo sapiens
  chr2:39663585-39663784
  hyper
cgaggcctggtgggcagcagctcccaacctagagcggacgaccccaggttggcgtgaagcaggcaggtttgacaacaccagacccctgctgtccggttcgtcgcgctgaccctgccaacgcaacaaacgcccagaccttctctgcactatggatgagcagtgtggcctgctctcgttctgcccttccctggaaatgcgc

SEQ ID NO: 331263 - DNA, 453 bp, Homo sapiens; identical to SEQ ID NO: 228248
  chr2:40678393-40678846
  hyper

SEQ ID NO: 331264 - DNA, 761 bp, Homo sapiens
  chr2:40678936-40679697
  hyper
cgctcgtttgccaaagcagagggaagtgtagccttatgagcagcaaatggaaaatagttcttggtctctgactaaatgccttctgcctgtccatcataagatcctacctggtttggggagtgtgaatggattcttcctccgttcctccacgctagtagaaaatacggcgcactccctccttttaaacagctcccgatcaggaagaggtcgctcccatcttctgtgggaagcacaaagcaggcggcggcggcgggctgactaccgtgcagcgccggcgcgagcgggagccgcggcagcgggcagcggtgcgcgcgggcgggaggcaggcgcggaggccgggaggctgggagggccggggcccgggcgcgcgcgcgctccccctccctcccgcgcacactcgcccgcccgccgcccgcagcctcgcactcgctcacacgcgcgctcggccccgcggctgccgggcgccccggggccccctgcgcgccccttgggctccccaggcgatcgcgtcggggcaaagccggcgcgtttctggagcaccgagcgggtggggagcccttccagcctcccagcctctgccggcgagcagctttttcgatttcctgccggctctcggccccgcagtgcgttgtggccgcgcgctagcgctgtctctcgcacccagcccatcgatgacacgcgcacacaggcgctgcaacttttcttttgaaccctcttcttctcttccgcagacagaaccctgacccccaattcgcctaccc

SEQ ID NO: 331265 - DNA, 1609 bp, Homo sapiens
  chr2:42274305-42275914
  hyper
cgcggctgaccccgtcagaccccaggcatcttgaggggtagggagcgacccccagctgcatttggggctttagaggcaaggaaaatcagaaacactttggtaaaaggagttgaacagggcatcctcggcgagctcacgagcattcctctatgcctagagctcctgtcccacgcgcgctcgcaggtgctggcccggctgtgcccgcttccccctcaccatcgccccaatccggaatccggggctgagcgaggagccgccacccccggccccacccgcgagagacggggtccacgcgccttccctgcgcccaaaccgccccgaggcccccagtcccaggagggagcgctgagatcactcggatctccgcaccccggacttagctgctcgtcccctccggagcccgctacccgccggcctcgcccctttatctttcccccactccgcccggccggctccgttatccacctcccaatcccgttatccggccgccccggccccgttatccgccctcgcgttgggcgcggagcccccgcgcgcctcctggccgccgccgccccctcccccgctcccagacggagctcgggggaccgcgggctgggcgggaccgcgggctgggcaggaccggagccgcctccgcgccgcttcccaggcccggacggccgcgggaggaggtcccgctgtcagtcagcggggaaggccgggccgggcggccggagggggcggcgccgaggacgggctcgggccgggagctgggaggtggaggcggaggggcgggggagggggcgggggagggggcgggggcgggggcggggggcggctctgggccttataagcggcgggggcagggcggcagggaggcaagtgtcaggccgatgtgtcgcccgcgaggggccggggtcggggccgccggggccatgcgcgcgggctgggcagggggccggcggggcgcagagcggagccgcctcggagcctgagccgcccggggccggggccggggagccgcgcggggccggccggccggggggaggggagcgatgcggcgccggcgggcggcagtggccgcgggtttctgcgcctccttcctgctgggctccgtcctcaacgtgctcttcgctccgggctcggagcctccgaggccaggccagtcccctgagccttcgccggccccgggtccgggccgtcgcgggggccgcggggagctggcccggcagatccgggcgcgctacgaggaggtgcagcgctattcccgcgggggccccgggcccggggcgggccggccggagcggcggcgcctgatggacctggctccgggcgggcccggcctgccgcgcccccggcccccttgggcccggcccctgtccgacggcgccccaggctggcccccggctcccggcccaggctcccccggcccgggcccgcgcctgggctgcgccgcgcttcgcaacgtgtccggcgcgcagtacatgggctcaggctacaccaaggccgtgtaccgggtccgcctgcccggcggtgccgcggtggcgctcaaggcggtggactttagcggccacgatctgggcagctgcgtgcgcgagttcggggtacggaggggctgctatcggctggc

SEQ ID NO: 331266 - DNA, 1341 bp, Homo sapiens
  chr2:42720186-42721527
  hyper
cgcctggagggagccgcctcggccccgccggggcgcgcctcgtcgcggcccagcacgcccggctcgtcggccgagtagaaggtgtaggtgtcggacatgcggtcgtcgaggcggcgctggcagcagtactcgaggtgcgcgccctccaggccccagtagatcatctcgttgtagaaggagagctcgcacatccgcggcgcgaagcgcagcttgccgtggccgcgcacgtagagcaggatgaagccgaaggcctccgagtgccggtcgaagaagtactcgttgcgctcgcggtcgtagtcgtcgcacacctcgagcacgtcgcgctcggagcggcagccgtgcagccggctcacgcggcgcagcgggaagtccttcagcagctcccgggacagcgaataccgggcgccgcccacgttcagcaccaccgaggccgccccgctgcgcccgaaggtcatggctggccgcccgggggactttcggcccgagggccccgctgcagccccccaccccaagccgccacgcggggcctgcctgcccgtggctgacgggggagcgcgccgtcggggcccgcgctccctcggggctccgctcctgccctccgctggcccgggggtccctgggctcgagtatctccggcgctgctagtagcgcgccctccgcccggcggtacctgcgggtggccggggagtcctcgccggcgccagcgctgagccccaccggctgggaacgcggctgtgtccgcgccgccgaccctcgcgcccgagggctgcgcacaccgaggccgcggtgccctctcccaagccgcggggccgaccccctgagggctgcgggcgccgaatggagccgccggggcggaatagctccccgtctccggcgctccctgcggccgcgaatccggcggccgccccgccgccgtccagaggcgagaggcaaagtgagcgggttcggaggcggcgaagagccggctcgcggcggcgggggcggggcctctgtgcagtcctcctcctcgcccgccggctccgcgcgcgccgctcacctccctccgcgccgccctccgcttcccgcccgcgcccgcacctccccggcttgctcgggctgggattcccgggcgccccgccctggacctcgggctccccgcctcgtgacgccgtcctccccctccgctccggcccgtagtggcggggaggggtccgcagggcgggggagcggggagcccagcgccgggatgcctgctcccgcgtcctgccctgggccatcgggatgaattgggcagtccccagggccccttttaacagccctggttcaaagcccagtgtggactcgggtgcggggacagacggc

SEQ ID NO: 331267 - DNA, 1034 bp, Homo sapiens
  chr2:43019539-43020573
  hyper
gatggaggagggggaggaggcgagggcagggggcggccatgggggtgctggactcacatgagcttgttgcagaccgggggctggaaggagccccggttctccttcacccaggccctcactcccaggcggcgctccatgactgtcccgggcgcctcctcgcagcgctgtcctcccgccgtcggaggcccgcagctccgcccagccgcctttttaaccagaatcccaagctcacgaggcggagcaaacccccgcgaccccgtggtgggggcttggggcccgcggactttgccccctggtggactttggtctgagcccgccgccctccgcgccactccaggccctggcgagcgcggcggcggcagcgctggggaacggcgtcccgcgccctctgcttctccgcggggcaggggctcggtccccgccaccgtctccggggcgccccacacactggcgcctgcggtggggcctgctcccggcggaggacaaagaatccagacccttcctggacgcttgtccccagacgttccttccctctacgccccgaggggaatcccagggaaggttcccagaaatactacagtgaggagatcgcgggttggaagtcccagcacctgagaacacggtgctggcgctgggctcaagatttggctttcccatctggaaaaggggaatgactgccccgccactcagggctgcggcgctcacccagcgggaagccgcacggcggtccccgcaggtcccgattcaaggtgagccccagacctgctgcgtgcggccggcagactccgccgcgggctcggcgaggggagcggtgcaggcgccgagctgcggagcccgggctcagggcaggaccgcgagccctccccacctgaggcccagccgagcggccgctgtccgcgcagtgtcgcagtggaccccgagccccgtgctgaactccttaggcgtcttaggaacatactcagttcgcacgcagctatgggaggaatttggcagatgtggacaccggcctcagtgtcctagccctcgggaatctc

SEQ ID NO: 331268 - DNA, 195 bp, Homo sapiens; identical to SEQ ID NO: 228261
  chr2:43037887-43038082
  hyper

SEQ ID NO: 331269 - DNA, 338 bp, Homo sapiens
  chr2:43448444-43448782
  hyper
gtgaaacagctgcccgaggcctggcgtatccaccagaccgccccctcccctccatgctcagctgtgagtcaccagagaccccggctaaggcagggcccgggagggagcggggatgcgaggattgttgatggagcccagctgttgtatatgagaaagcaaactattgctaaatctcttacctaccttggaaaaagtgtctgaactgtgtgcatgagggacggcggtggaggagaagaaacatgaattgatttatgaacccgatttaagttcctaaagtgattgttttaaagttagaaacagccagagtcactatagtaagattttgttcaaccgtttgc

SEQ ID NO: 331270 - DNA, 1704 bp, Homo sapiens
  chr2:43451134-43452838
  hyper
ttttttttttttgttctattcgtatcacaactgccctgttgtgaatattttgttcaacagaaaaagttcgacttttttgctcaaaaagaatgaaacttcgtaataaaaataaaaaaaaaaagacaagaggaaaccgaaaaaggaggggtgggggcccctcccggcacagagttcgagtccaagtgctcggtcgggcttgcagtctgcctagggcccatgtcaccccccccactcccgtgcccccagcaagggcgagatggcgaggggtgtcctccaacatctctgaaccgccttcccttcctcctcactggcgccctcttgcctcagtcgtcggagatggagaggcggctgaagattggcaggcggcggccagggtcgaggctgggagactcagagccgctgaggctgccggagctcagggagccgcttaggtagctgtcgcggtccgacagcgagtccggggggctggggggcgcgtcgaacacgggcgagtcggacaggcggcgcggcagctggaagctgaagggcggcgagggaggtgcggcggccccggcggggagggtcgcgctgggcggcgccggcggctgcgcggggggcgccaggccctgctgctgctgctgctgctgactgcggtagtaggcggcggcggccacggcggcaaagttgtgggtctggatggcgagcggcgtgatgaggctgctgagctccggaccgaaggcgaaggcgttgttggcgcacgaggccgacgagcaggccgcgcacggggcccccggcgccagcaggtcctcggcgcccccggtgccgtacagcagagcggccgcagccgcggccgccgcggaggcgcagcatgtcggggcgcccgagggcgtggaggccgcggaggccgaggaacaggaggaggcggaggaggagcaggacgaggccgaagagcaggagggcggcggcggcgtgcgcgacgtggggctgtcgagcagcagcggcgactcgaggccgcccgggggctgatggtggcccgacgggaagcccgagaagctgaggctgtggtgcaacttgggccgcggctcccgcgggaagcccaggtgcaacgcatcgcgcgtgccaaaggcacgcaggtccccggaggcgccccccgacggcgcgggccgccgctcgtccgcgttgtggatgaagtggcagcgcggcccataggggcagaagccgatggtatgaaaggtgcggcacagctcggtcttgtacttcggatggcgagtcaggctgcgcagctcgtggaagccatgcgcgaactggcacttttcgccgtacttgcacgtgccgctctcctcgaagggccggcacagctcggtcttgtagcgcgtggagttgatctgggagccgccgccccccttctgctgctgctgcaggtgcaggaggtgctggctgcgatcgccgttctcgctaaacgagcggtcccggaatttgttctccttgttgagcagggctgtgccgccgccccccgacggctccttaagggtgccgtaggaggtcggaccgccggccgccgcgctgccgcagctgctgccgttagcggcgcccgggaacttgggcgagcagctgccggggctgggcgcggggtgggcgagtgcatgcaggttgctggccgagtgccgtcggaggaatcccggcgcgaagcccgagctgggggcggcggccacaggcgtccccacc

SEQ ID NO: 331271 - DNA, 920 bp, Homo sapiens
  chr2:43864207-43865127
  hyper
cggccgctgcagcaagctctggagtctcgcagttgggacgttaggggtaccactccaggacagagctccctcctggggcagggactgggaggagccaaagttatagccacacccccggtgacgcccggtggtcggctgtggtctcccattggctacaccggctgccagtccctggaggaggcggtgcccttccccgccctctccgagctcggcttgaggcgggcgcgggctgagagtccggggatcccgggggccagtcgcggccgggacatcgggcgctgcggccggggacccgctgctgagatagacaggtgagaaagcccggggacgaggggccactccagagttcctgccaccctgggatccccgcccccttgagggcgccccgtccaggggggctcgcggggccgaggtttggggcgccgggaggagcgggaaggcggggacgagagggacggagcgggctgactcgggatccgccgctgcacctcccgccacagcccagagtcggcccccaagtctggatgtcgccgggagaggtgggcagggggcggtggccggcggtccctcgcgcccgtgggctcccgtgacgttctgtttggaaacactgggcccgggcttctggcgcggcgcgagcggtcccgggggcgcagcggggcagcccagggtccccgagccgagggacccgcgcggtcagggatgccgcgctcgccttaggcttcgggagatccaccaggatctccggggcgaaactttaaactcaaaactttaaagaagcattttgtacacctcgagttgctggcacgtcaaagcaccctaaggtgacctacccggaaaccactgtccccgaagttagtggggcactttttaaaggacaacactttttacccgtcgatattgttgtgcgtaacgctgtggaa

SEQ ID NO: 331272 - DNA, 271 bp, Homo sapiens; identical to SEQ ID NO: 228275
  chr2:45029031-45029302
  hyper

SEQ ID NO: 331273 - DNA, 354 bp, Homo sapiens; identical to SEQ ID NO: 221734
  chr2:45029730-45030084
  hyper

SEQ ID NO: 331274 - DNA, 1874 bp, Homo sapiens; identical to SEQ ID NO: 228277
  chr2:45155186-45157060
  hyper

SEQ ID NO: 331275 - DNA, 534 bp, Homo sapiens
  chr2:45157281-45157815
  hyper
tcgtatccggcgcgcgggcccagtgtgggactgcggctgggagcccgggccctccgggagtgaagatacctttggaggtgagacggcctctctagcgcgttgacactgttgatggaagggattaaaggggtatcaggttattttaatttattgttgaagatgatgactgccccctccccgatccgcataccgtcctcactttcccaccccaaccctagacccgacaacaccgttcagccctttgccccgggcagcggaaatggttagcttcctctaggagtttctgctgaggaaggcgcaggcaaccctagtcggcttagagagagacaaccgcacgcgatcaccgagcacgatttctcccaacaaaaaaactaacaataatagcgatccacacactcaagaggtctcaaacctccgaagttttgccccgagtcttgtggccctggcagaggtgacaagggcatttgggaaagacagagaaaaataaattcgctccagtgactgtacacggggcatttgaggctgtgagaaaac

SEQ ID NO: 331276 - DNA, 803 bp, Homo sapiens
  chr2:45159699-45160502
  hyper
agcttgagtctgagctcaaacgtgcgcgaccccctgggtctgcatggggagaaggaggtgtgcacgtgcaaacgcgggactttgggtggagtgtgaggttgatagggctttcggccccagggccctctaggcctcttttaaataccttcatctgcccaatttcttaacctttcaggacaaggagggagaccctccgcgatcctgcgccttgccaccctttgggaaggataggaccatcatctagggcgtctctcggtggactgtggctgggccgggctgaatgggcgggcggaggtctcgaggtcgtctcctggctctcgattgctcccatcacccaagccacctcgaggtcgagtgcgccctggggctatgtctggggaggtcatggcgtctcggggcgaatgatatgcacgttttggggcaaaactctcctaggcctcgcaggagcagctgtatttgtaacttggaattggcctgggcccgcctcccttggcccctcctccagctcctacctcaacacgcagcgctcagcgggctgccagagtgagcttcccggaccacccccaagcaccctggggcctcaccatccttcagggtccctggggcatcctagaggcctggatctggaagaatgggggccaacaagagtggccagggctctcctggggcggttttgcgatgtattcctccgctagaattagcctttcgggcctgcgcgcctacaggtttcagaggccagcgggaacggtggcctcgggtgtgtgggggtgaggggtgtggtgtgtgtgcacgtgttcacgcgc

SEQ ID NO: 331277 - DNA, 1780 bp, Homo sapiens
  chr2:45161096-45162876
  hyper
cggggagcagcggcttttcaccctgctatagggaggtgcgtttggctgagctgtccccccaccaaataaagctaatgatgtagtaatttaggagggggagaggggctgggcaaaaggagagaggggagaggatggggaaacgcgcgccccaagagcaaaagcaaacagctgtggaggcgctgcccgcggctcaggcttcccaacaggttagctatactgggatccacccggcatttcgcaggaaggggtggggggaagacagagcgagagggggagagaggctcacaagaggacagagggagggagggaaagagagataggagccagagagcgcaccgcgcggcttaaaaggagagacttactaatgaatatttatccgccgctgctccgtgctcccggcttcccttacctttcggcaggtaagatcctccctgtgccccagccccgggggccctcctagctccccagtcggggagcctgtggctgggcgggagggctctccgttggtgggggtgggagggcggctctactctgcgttcactttgggtgcccaggcatgcgaccctgcacgactaggaaccgcgtgcgtgggctccatgtgtggaatgagtgtgagcatgtaagagtgtgtttgtgtgtgtgcgagagagagacagagagactatgcgcccgcaagcgcgcgcgcgcgcctgtttgtggcgcgctctggaaacattttccgacttttcactcggacgccctggatttctcgcctttgcctttctctgcttcccctccctcttctctcgccctcccctcccccacccaggtctaccccaccctaccccactcctaccccggctgctgaggcgctcttctgccggctattgtacggctggcgcgggctccccctggccacatcccgggcctctcacacaagaagaatagttctgtttccgccgtaaacccccacacaaaggctgcccggccaccgggtcccctgtcccccttcccggggacttcggcttttgaggtgctgctgcgcgttctttctccctccccctctcagggcgccagggcccagaccaaggagctaagagtgatcgggacttgggggtaccgggtggaactccttgggggccgcccgccaggcttcctgggctgcaactcggagcccagagacccccaggggaagggcgcctcttcccccaccaccaccccagccgtcgcctgcgggaggagcacggggaacccggcccagccaaagggggaagagggaggggaaaaggaagaaggtcggggaggggctgaccatataaccagaattctttaaacggacttacccggccacctgttgagaatccatgtggggtcggctggctccggagttgcgcaaggtggacacacaaaaccaaaagccggagttgggaaaagaaaattctttctctgaccatgccagacgcggccggtcaggctcgcagctccgcgctaggatcgggcggctgtacaaccaagatcgactttgccctgtcccccaacgcccccctcatcccacggctccacggctgggaggctccggactcagagctcgcggactcggcgctcagggtcagcaccagcagctcggcttaagccggggcaggctctctaagccctgctcagaagtcaagagcagcagtgctgcctctcctcgccgcctttcatgccgcggccgctccttattcttgtgtctcggcctctcccggccccctcggacaaaacccccagagcccggccactctcttcccgctaaatccccttc

SEQ ID NO: 331278 - DNA, 1400 bp, Homo sapiens
  chr2:45164561-45165961
  hyper
cggcggggctcattaggcagagcagggtgccgagaggtgcgcgtcgccggcccctgaggccgcctttgagccgtcggggcggcttcattaagctgcgctaacaaggcgtacaaatgccgagcccagcagctttcttgcaatgcccggccttagcagggcgccggactaatgagggtcactcaaaggggctgatcaaatattcaaatttccccgcacgccaggaacttttatgcatggagaaagttgaggcaactgagctgtgtttactgtccggggcgacaattgcttggagcgccagtccccggaggctaaggcggggggcgggggtgcggggagggagcagttgttgttgttgtttttcaaaggaaagtaatcggggtccttgaagggcttcgcggcctccccgcctgcgtgctgcgctcccctgcgccctccctggccgcccgcgccaagcgcctcagtttgcagcttgcggggaggcccagactacgggccacccggccagcctccgcctcccgacatcctgggagccggaaggggcgttgcccccacagggcaaaccttcccccggcctcctggtcggctgtttagagctgagcaaggccaagtgggtgcagctgccccaaccctccggatcctcgtctcccggaggcctgcagacccgttggctttccctgtaacccaaaacaaggagagagtgggaggtctctcgggcgttctccagatgtggttgagactttcccagtgctggggtggcgggtgacatttgtaaataaatgccagttggtccgggtacaaggagaacactatttaaaccccaaagacatcttttctccctgccccacctgaaggcgatattttagatcgccggggccaggattgaagcggggatgatggcagcaaatttgttctgcacaggtgacccggcctgtacgggcgccaagtcccagatcccgcaatcagagcggccagagagcagagaagagacctagaggatctgcaagctgacctatccacccgagactctccgctctgagcgaccccagggtgcaggcgccctccacgcgccacctcctctagcggtcccccagggtcccttcccagtcctcgcactgccctagggcttgcttggttcccagaccagcgtggaaggccgctgggccccggaacccaaggtccctctgcttctgctccactccccagtgcccagcgcctgggaatttgggaggggaagctctggcgctccacagccctgcttcccacccaaacacgcactcagaacccctcgactgagatcctatggagcctgcgcccccagcccggcggggagccagtccggccctccgctctgggaccagccgccccgcctccctgccctgctctccggactctcaacttac

SEQ ID NO: 331279 - DNA, 911 bp, Homo sapiens
  chr2:45169301-45170212
  hyper
ccgattctcaccaccgctccatacttctggcgagtagcggcggcgggaacggtgcgggaggcggcggcggcgcgggaggcggcagcggcggcgggaacggtgcgggaggcggcggtgctggcggagcaggcggcggcggcggcggcggctccagggcccccccggaagagttgtccatgttccagctgcccaccctcaacttctcgccggagcaggtggccagcgtctgtgagacgctggaggagacgggcgacatcgagcggctgggccgcttcctctggtcgctgcccgtggcccccggggcgtgcgaggccatcaacaaacacgagtcgatcctgcgcgcgcgcgccgtggtcgccttccacacgggcaacttccgcgacctctaccacatccttgagaaccacaagttcaccaaggagtctcacggcaagctgcaggccatgtggctcgaggcgcactaccaggaggccgagaagctgcgcggccgcccactcggcccggtggacaagtaccgcgtgcgcaagaagttcccgctgccacgcaccatctgggacggcgagcagaagacgcattgcttcaaggagcggactcggagcctgttgcgggagtggtacctacaggacccctaccccaaccccagcaagaaacgcgaactggcgcaggccaccggcctcactcccacacaagtaggcaactggtttaagaaccggcggcagcgcgaccgcgccgcggcggccaagaacaggttagtggcggggcccgcggcctggctacagcctcagaggcctgggaaggggagaggggttgagatggggctagcggagcggccgctgagagccagggaagccgtgactcctggccagtcggagaaagtttccgcttgtccgggacgcgcggaagagggggcc

SEQ ID NO: 331280 - DNA, 540 bp, Homo sapiens; identical to SEQ ID NO: 228283
  chr2:45171352-45171892
  hyper

SEQ ID NO: 331281 - DNA, 180 bp, Homo sapiens; identical to SEQ ID NO: 228284
  chr2:45172215-45172395
  hyper

SEQ ID NO: 331282 - DNA, 524 bp, Homo sapiens
  chr2:45176739-45177263
  hyper
atcacccgggaccccggagctcgaagtccattcccaggcctgtggcgcactggatgcactcggcgtcttggagcagtctcttctccctctcttcttcctctgcctccgtggccctgtcagtcccgcctaagcctttgtgtggccgtcacctggagcaccggctgtgcctcagggactttcccgggccttccccttgtcctctctgtcccccagcgctggagctgagatgcccggcccgcgggacgctcgaccccctggtacgcgcgctgaggcccccacggcttcccaccgctccggccctttccggccccagctgagctgaagctccctggccccagtgtgcgggccccggtggccgtctggcccgagggagggcgggggcaggcgagagggagccatggaggaggggagcagtactagcccggctccaatttctccggtcagctgagcacaactttccattcgagtgtattcatgcagcggctgattgagctccactgtgccgggcggggctcggcgggagc

SEQ ID NO: 331283 - DNA, 698 bp, Homo sapiens; identical to SEQ ID NO: 228287
  chr2:45181675-45182373
  hyper

SEQ ID NO: 331284 - DNA, 946 bp, Homo sapiens
  chr2:45235530-45236476
  hyper
aaaggcctaagcatcgtccaagtcaggccgggctgccgctgggctgtggccgggcctgggggcccagtttaggcctctccgggggaccggcagaagccctgcgaacccctcccttgggccccggggagctggcgccgaagaaggtctacttactcgtacctttccttggcctcggccgcccggtcgcgctgccgccggttcttgaaccagttgctgacctgtgtggtggtgaggcccgtggcctccgccagctcacgcttctcgcggggtgaagggtaggggttgtgcgcgtaccactcgcgcagcacgctgcgactcttttccttgaagcagtagctggtctcctcgccgtcccagatggagcgcggcagcgggaatttgcggcgcacgcggtatttgcccacggcgcccaggggtcggccgcgcagcttctccgcctcgatgtagtgtgccttgagccacagctgctgcagcttggcgtggttgtgcggcgagaactggtggctctccaggatcttgtagagctcgcggaagttgccgcggtggaaggccaccacggccttggccttgagcacgctttcattcttgtgaaggtgctcgcaggcgggcagcgaccacaggaagcggcccagccgctcgatgttgccgccctgctgcagcacctcgcacacgcacgccacttgctcctgcgtgaagccgaaggtgggcagcatggacatggtgccggctgcgtccccgcccgcccgcgcgcgccctcaccgggccgcgcggtcccgcatgggagcttcctcgccgggccgtccgggccgagacgcgggcggggctggccccctggcccggcactggcccccggtgagccccgagtcactgccgtacgtccccgcgccggccgcgggtcccacgaagctccgaaccccaacggcccgcgcgcctggcccaagccctc

SEQ ID NO: 331285 - DNA, 718 bp, Homo sapiens; identical to SEQ ID NO: 228294
  chr2:45237182-45237900
  hyper

SEQ ID NO: 331286 - DNA, 881 bp, Homo sapiens
  chr2:45240827-45241708
  hyper
cgcggcgtcgcccgcgccgcacgtggctggggcagtcacaggccccgagagctggagcaacggggtcaccgccacccctctgccctccaggccttcaccttgagacccacgcggcagcctggagggcccacaagagcaaacggtttagaggccgcgggctcacgagggatcttgttcaaacgaaaagaacgagcacaggggctcggggccagcctggaggccggcacagaggcgagtcggcccgggtggcgccgggaccaggcgggatttggggcgggtatccgggcccgggcgctggcagcctccctgcgacccccggccctgcgtccccgcccgcggtcccgccttagtcctggagtcccttcctgggccccttcgcctgggtgcggaggggcgcgggcgcggcgggcagggccacggggcgaggggacgggctcgcggctttgggttcagggagccgcggagctccaccgccgggttgttttgcaatggggctttggagaggttgcgcgtcccgggccccatggctccgccgggtctgcacgccagcgcccccacgcggcgggcccagagttcaggccggcggggctgcgcgctcggctccccgcaggcctgtagcccaggagggagaggagggagaggacgcggagagggcccgctggttcttccctcctcaccccagcactgacccgcctgtgcgctggcacggagggctcgaaaatcggggcgcgtccgcgaagagcgagacctcggagacagacacacaacccagaggtgcactaggttgccagacggtctgatcacaggattcttggggggatagacgctggcttttctccatcacacgtttcccctgcaacgtctgggtgcccaggaaatgt

SEQ ID NO: 331287 - DNA, 960 bp, Homo sapiens
  chr2:45396336-45397296
  hyper
cggcgggcgggctctgcgcggggccccaccgagctttccgggagcctctcccgcagccgatgggcatctaggggcgcagaacgaagagtgggcgccgaaacgggtgtaggcgctggaggccgacggggaggcccggggcggtcaggcttctcggtagagagggccgtgcacctcgcggcctgcgggctaaggcggggagccgctcctgcggcggccgggcgcgcggactggagggagggaagcgccacggactggggaaccggggtgacggggagacgggggggctggtggggtgaggtcggcgggcagcagccaagtgttctgcagctccgaaccccgccaccctctgggcgaacggaatggcacccgcggagacgggcggggacgggcgaaagcgggtttgctccgacccgaagctgagcccgggttggagggcgagaccgtaggcgagaatggccgcgcgggctgggagacccgggccggtatggagtgagtggagccgcccgaggtagggtagttggggatggtagttgtgaagacagtcggagtctagctccgggcagacgaaacaccggggcgcgccagggtccgtttcctccttctctctgctttcccaccagccctgtagatacggagccagcagtcgggctagagcggaggctgagggtcgcggttccaagggcggtctctcgccccgggtcaggccccaccccgcggtggcggtcgcgtggcgctgtcctggagttgagctgtccccgcgccgcggcccgcacgcccaggaccgcacaccgccgcccgcaggcagagacgcctgcaacctcgccctctcgcccggctcccagctcggggctgggaaccggaaaggtgcatttccgtgtggggtgggggcgattcccggctgtcggcggtggggctaggccttgcggcggatgagccagaccttcccggctttccagccag

SEQ ID NO: 331288 - DNA, 1271 bp, Homo sapiens
  chr2:46525231-46526502
  hyper
cggtttgggggcgcggatcagcagctttgcagtggagacttctgcggctcggaggagtcggggatttgcgcgcacggcgaggccaggaggccgagggagatggcctggaggtcggaggtgcttccgcggtgcctttgaaaatctcccagccgccccgcagcagattaccgtggccaccggcgcttggaaatgtttgtgggtgcatgtcctcgactttctctggtctctcattttggggcagcatccacgtctctatttttctctggattcgcggagtccttccaaatgcgctcctgtgcccgcgccgcggcccaagtgggcaaaggggggcgggaggcggagagcggctcagggacacgatcctaccgaggagccaggacccttcagagcgccccgctgccgggctccagaccccaccgaaggttggagaacccacttcctcgtgccgcaccttgactctggggagagtaggtagtgagtgacctggattgccctgcgggggcagatggttcggtgtgtaggaagcggacggcaacactggatgtccctggcaggtccgggtgtctgtctccgaagaggacagagaagggcagccacgatctgcccgcctgccctcgcgagcctctcggcactgggtgagaggcaactctggccatttcttgctgccctctcgccctctcccggccgctcccagtccagccgggcccggcgctacccgagcgagggttcgagccctctgcgcggccgcgcagaagcaggcagggcctcaacttctgcaaatgtgtgcggctcgccgcctgtcccctttctcctcctgtctccacccgtgcggccccagtggcctggagcttccagccccgcgcttggccgcggcttggcgaggctatgctgcgggaagctggaatccaacgcgcggccggctgaaccgcctgagccgcgggaaaccagcggcggagcggcggtatagaggtgcgaggatgaggaggaccgactcgctaagggagggaggtgactggccgggagggctcactgccgaggttgatttgctcttgttccaacttccactacgggactggagccagaaaccgtgtatcctccggtcgaaagcagcggttcccacctcggggcaccgataaggatttgataaacgggagcgaatcgcgcctgtcctggctcggcgcccgggcccttcactgcgggatcgctaggggaggggattgggccctgctcccctttcctggccgtagtcccccctttctcgtcaccgtcgc

SEQ ID NO: 331289 - DNA, 144 bp, Homo sapiens
  chr2:46689161-46689305
  hyper
cgagcagtgaaaatcaaaaattaggggagagaaggttcaattaagtgtcgtcaaatcgaaacttccaccacttccttcatccctgagtcagcaatgttgtcagtaggagactggtcatgtgtaagcttgcagggtgccttaaac

SEQ ID NO: 331290 - DNA, 537 bp, Homo sapiens
  chr2:47142873-47143410
  hyper
cgaagcagacgcgaagccctccaacgtgagcctcaccagcccccgtccccaaaacgctcttcctcggcttcgccccgccccccccccccccccgacctgccctgcgcacgcgcgctccctgccgcccgcccattggcgccgccgggcccctcccgctggcggcggcgggctgtgaggacggctcgcgtgagtccacgtgtaatcggcccgggcccagcactggcgggactgacgcagttcttctacctgctttcccaagggcgacactcggctccactccagttgggccgctggacgccctaggggcccggcagttgctaggcaacgccggaagccctcaggaacgtagttccacgggcgacgtaggatggcggatccggatggggcggaccccaaagctggctcccaactccgctcaccccctcctatacagggctcttggttcaggtctcttggttcgtcctgctgcaagttgggaagaaagataataggaatgctaattccttcttgatgaaacgaccacaacacgctggagcc

SEQ ID NO: 331291 - DNA, 461 bp, Homo sapiens
  chr2:47499351-47499812
  hyper
gggttccgggcccacgtcctccagaccatgcccctcacccccggccaccaccctccccgactgaccacacctggaagggaaggaagggtgggggtggcctgcagagggtgtggcgagatctggacggcctgggggcgggggactaagttgaccggaaatggggctaggccgcggccagggacggcagcagatgatggttgaggagtggcctaggaaggcctccctgacggcgcccacacacgccccgcggcaccgcgaacacggctgacagggcagttgggcagcgaggtagtcgggaaagagcagggggagcccagcggctccgttgcgccctctgtcggccgccagcctccattgcacgcggcgccgcccacctgcgcactgggaccccggccctgggccgaccaggaaccccttgcgcccgcgccagctcgagccctgttgcacctgtcgtggtcacc

SEQ ID NO: 331292 - DNA, 73 bp, Homo sapiens
  chr2:47656947-47657020
  hyper
cgtcgattcccagatcttaaccgacttgccaagaagtttcaaagacaagcagcaaacttacaagattgttacc

SEQ ID NO: 331293 - DNA, 759 bp, Homo sapiens
  chr2:47747991-47748750
  hyper
cgcccggcggccccgcggcctggagagggtccccggcgcgggcggacgggcggtctacctggaggcgctggtctcggccagccggttgttcatgatgcccagcgcgcccacgccgcccgagaagccgttctggcgcgtgttgacgcacacgctgcgcgggtagccgttggccgtctccgacagctgcttctgcagcagcgccagcgacaccttgttggaggccgtgaggtcgcgcatggagatgagctcgcccgagaggcggcggccctcggcgtcgctgtcgcgggccgcggggtcggcaccgagcgcggccaggcggcggcgcagccgggagcctggggtgatggcattgcgccgggccaggggcgcgccaggagccgggcagcagcgcgcgcagcagcggcagctcagcttgcgcagcatccagttgagcacctgcttgatgaggatggagatgacgttgaagagcgagtaaatgcagcacacgccgagcaggatgaagaggaagttgcccaggcggtagagcccctggttccggtaggcggcgtgctggctgctcaccaggtccccgaagccgatggtgctgaaggtgacgaagcagaagtagagcgagtccacgtagtcccagccctccacgctggtgtacatggccgaggcgcagcaggacagcagcacggcgaacaggcccaggatgagcagcacgtggtacaccgagggcttccagcccgccaggctgtcggcctccgagagcgcggagcc

SEQ ID NO: 331294 - DNA, 2379 bp, Homo sapiens
  chr2:47796765-47799144
  hyper
cggtagcccttggcacgtattcttagaggagaaaacggaggctcacaaaggtcagatcacagagccggccagtgttggagcacaggcggcccggggtgagcgccagaggtgggctttcttccctcactgaaagccgggagggagagagagagagagaacgggggccggcggagaagagggcgagacgaaagtaagcaaagggacattagaagggaaggcagagccgagggacgcggaccgagcggccgagcagtggaaagggcggcaggtgaaaggcacagagaggaaagatgcgcgggggacgcgccgctcacctatggttgacaccacggtgcccacgaagtagaaggcgccggggaagtcccagcgcgggcgcagcgcgtcggcgcggacgccggcggccagcgcggcctcgtagtgccggaggaaggcgcgcagctctggctcggccacgccgtgcgcagcgctgaagttgcgcagcgtggcgccccagcgcgcccgcgcctccgcctcgccggggctctcgagcgccgagaagactgtggcacccgccaccaggtagaggccgatgagcgccgccagcagcacgaagcggccggtgtcctcgttgaggtgcgaacggcggcagcagcagcagcagcaggaggggcgcggcaggcggcggcggctacggcggggcgggggccgggggctgcgggaggacatggtccggagctcagccccggggccggggcggcgctcggggcccgggccacgacatccccccggcgggagcaggagcgtgaggatggtggccaggggtccggggccgccgcggagcccctcgccgccttcgcagagcccctcgtcgccttcccagagcccggacagaggggcgcctccgcctcctccccggcgctcaggccacacgcgagtcccgtggcccagcgggtgcccgggcaggggcgctcctctgcgcgccccgacgcctcgccggctcccgcggctccttacccgccgctctcgggcgcggggctccgcagctaggcccctgccgcccggtggccggcgtccgcggggccccgggcctcatactcctctccagacaggccgcgggctgcgggcggggtgggccgtggatcccgggcgcctaggaccgggacgcggcagcaaggcgtggagagagcccccgggggcgtcccatgaggcgttcgggatcggcgcctcctaggtgcgggctgtgcgggcagtcctgctcccgcccccggggctgagctggcggcgtcggcttcagagcctcggagccgagccgagtccggggaagcgctcctttctcagctccagccgaagagccgcccggcagggagaggcggagtcactggcgcccggggcggggtgttggggaggggtgagtagggacaggagggagggggtggagagttgggctgctgcgacgcctcccggtggctctggcggcaccaatgcggggcaccggagcaggtgtccgactgcggtgcgggctaccactccgccggggaacctcgtcttgctcctccctgcgcttcgcctctggaatctctcccttatctcatgccgcggtgaaactttgctcaagttggtggtgctctgaggtctccagggctggaggccgcgcgacgcgaatcgccgacactggattctcgggcgttagtccgaagtttaagttcccttcgttcactcctttgccctggatcgaaccgcagccccaggacgcagcgggttccactggaaacggggaatcggggagaggcggtcgctgggctccgggcgacctgggaacgagggcgtttgctccccctcccgaccgagcgggcggccggcgtcagcaccgcggacagcgcatcggtgccgcagccgcgggcgggcgccgctagggctgccaggggtccgaggcgcgggcaaggctgctcaccccgctgtgctgtgcaccccaaaccttccctgttttcctttctacctcccgtgtgcacccccctacccgccacccgaggcaggtgcggtcgctgaagcaggctgctgacagggcggggacgctgcggaatagagacgggggaggagtcaagcgcgggtagggggccaaggtgccacagggagaaagagcccaggcccggcggactgccgggctcctcgcgccaccccagctcaccgacccctctagcccggggcggggaataacaccctgggtgcggtagagagtagaggaatagaggaggtgtaggggaagctcactggcagctcccctgaggccggcgcggggaacggtgtgctatggaacgcccctgggaaatggtcgcccccctacgccccaccgcggcaggaaaagacgacggatgccccgcgcggctgcgggtgctcctctgc

SEQ ID NO: 331295 - DNA, 328 bp, Homo sapiens; identical to SEQ ID NO: 228319
  chr2:48982577-48982905
  hyper

SEQ ID NO: 331296 - DNA, 975 bp, Homo sapiens
  chr2:50573691-50574666
  hyper
cgcaccaagcacacccaaatgcacctcccttttgtcgagctcccatttctctgagccttaggagcccaggagcgagtgcagggtagaaagaggggagcgaggggataacccgcgagaacttggcatcgcagacccaccgtgtccgcctcgcaaggatgccggtgacctgtagattgcaataggcactgaatgatgcttgctgctgccatggaaatggtggatgtggtgcgctcccaaactggatgccccccacgccactcctaggaggccgctgagggtgagcgggactatccaaagcagggccaggcgcccccctgcgccgccgccgccgccgccgccgccgccgcccccgggcgagcccagctcggcgccgcaccggagcatcctctggtacatggcggggcgcccgccgaggggcagccgccgcgggaggcaaagtttggggcgcggggagaggagagggcgcaggggagcgggcggcgcggagtgggctgaggggccggccgcctcaccgcgccagggcacccatcctctccctccttcggacagtcttctcggggtcctggagtccgccgtgcctagcaccccaaacaatccgaaacatagccgaggcgaatgcagctggagaggggcttgtccggaaaggcagccccgggaacagcaagcgcggagcgggtggctgctcccagatttccagggctccaggttctcgagagatactcccaaagagtttcgggcgagagtgcgtgccggcgggtggggggccgagaaattgtttaaagctcctcctggaaggtcctcacttctacatgacagacatccaccgcgaatccactaggtaaatccatttagctttgtgtgcggggactagggaggccacttcgccggcccaacctcctttcaagacagaagcagaccccatggaatccaggcgccccttccctccattcagccccggccggctcgcccgctagc

SEQ ID NO: 331297 - DNA, 1283 bp, Homo sapiens
  chr2:54784837-54786120
  hyper
cggtgctcccataaatcttccttgcgtcgaattcctatcataggcccgtgttattccaggaaaccaccgccttcatatcccctgatggcagcgtaagtcagccgagattcttcactgagcccgaacttacacctcccctggctgtggcgctgcacagcgccctgagagtgactttgtctgacttcttcccggtggctcgccgggccgccgccgcgtggttggcgccagcgcactggggcagtcgcgcgcgcccaggtgcgggccgcgttacctcagcagacgctagagagtgaatgagccgcgcgggcccgggacccttggggctcttcactctccaggccgtcccgtgggcgcgctagccttttcaagtgatagtaatcggagacttttccgttacatgaggctcaacaaaagattgtaattccagcagctctgtttgggaaggcactaccgcggcgagtccagggcccggccgggggtcggcggctgccgggcggctggggcgaccgcggaccgtgcgggaccggtagggggtcgcgggccggctaggctcccccgcgcccctcctcgtggtatagcctgcatttctaatacaatgctgttatgctaatcaggtgacatcaccgcccagcacacggcgagtggctcctgataaaattacaaaccggcggccgccgcgggcagctgggaggaggtgtgcgcgctgcgcccgcgagctcccgggctcggcaaccgtggcatgcttaggattggccatatttaaaagttctgaagtagaacctgcgcctcctctctgcttctccctcctcctcagtaatttatttcgagcttccaggcaagggccacggaagaagggaaagcaagaaattagatgcctgtgtggtaactcctcgcggagctaaggtggactctcttgcagccaacttcccatcagatcaccctgctggacttgcagaccggaatggggctcgcctaaggagccgagcgctgcggaggctgctgcgtgttggatgggagtgggagggggctggagcgagatttccagggcgcagtcctccggggcgttacgccgggcataatggaattgcagaggacgtctagtatctccgggccgctgtcgccggcgtacacggggcaggtgccttacaactacaaccagctggaaggcagattcaagcagctgcaaggtaagccccctcccaaaggccgggcctgtcctgggtgccaacgggggttcttggaggctttatttgtgaccctaatgaagacgggcggcttcacag

SEQ ID NO: 331298 - DNA, 397 bp, Homo sapiens
  chr2:54798152-54798549
  hyper
cgacttgctgtacaattcagtcttgcaatgacagagagattacacactatctgcaaacaactgccaagcagatgaaatcctggctgtgggaagtctgcggtgaagagtggtgggggtggtcaggagagcagtggaagggaagtggctcagaacattgtagtggtggtttggcgtgcctgtcaagggctgtgggacgttttctctctcatttcagaaacaagggtggtgggaaacacatgggccgtggatttgcataaaccaacagtcaaatcctagctctaccagtgacttcactgagcctcattttcttcagggggaaagaataaatagcccttggggtgattgtaaagcctaattaggtatgttataattgtattaagaggatgacgagttcacc

SEQ ID NO: 331299 - DNA, 546 bp, Homo sapiens
  chr2:55509233-55509779
  hyper
cgcaggcgccgccccgcagcgaggcgcctgttgagagctcccgcaggccttcgcaagccggagccctcagcggacgatgttcagggactagcgggcgaggcgctcagacagggcggacccgccttcaccaggcaccagcactacgctgccggcgtcggccgagatccctctgggcagttccgcctcaggcttcggtctgcgcagccgcgggaagccgtgccgtttttccgcccatcgccacgatagcggctccacggcgggcgcggagttgggagcggcgctcgagcagcggctcggtgccctggccatccacactgaggtcgtggagcaccccgaggtgaggcccctagaagcgaccgccgagacaggcccagcggggtgggctgtgctgcacgtccgtcgggcgaggccgctgagatcaggtgtcccagggtcaatgtaccgtgagaacgtcgctcctggaatatttccccggtctcaaaatacgaaagtgaccctgcagggacagcagaggacttccatcttgggaccatgaggttactgcac

SEQ ID NO: 331300 - DNA, 200 bp, Homo sapiens
  chr2:56149749-56149949
  hyper
cggtagccaacgaacgaggcagcaaagacgtaaaaactgctgtagaattgcatttcacgttactccatcctgctacgctgtttacatacaaaagacattcagcgtgcattttatactgcacctacaaagcaggctgcagaaagagggggtcgaaaggaaaaaacagtaatccatttcaaaggggacggtgcatttcctgc

SEQ ID NO: 331301 - DNA, 957 bp, Homo sapiens
  chr2:56150222-56151179
  hyper
ctctcaaagtggcatttccacgcctttctctgcgcacagctttgtttaaaagtcccaggttgtgtggaggggcagcccaaagcgactgattctcttttgtcttatcagtctgggtccccgacacgctaccttcggtttcaggctgcctaggaccggaaccagggatcgcaccgcagcccaaggtaccagtttcgggcgggcggcctggcccggcagggagatgaggtcccctttcttaacagcaagctaacgcggcggtcccctggagctgctcagcgtcccagcttctaaccagctcctatggaatccaggtgcggcttaaatctcgcacactggtcccctaaactttcaaaaccacgtttatgggcaaagccctgccggctggttgtcggcgcgcacacacatgcccatcccaacagatgtcacccgagtactcgcacttgctgacagatcgcattccgaggctgcacacctccacctccctctctgcccgagacaccctgcacagtccagggcagttctcgggtactcaacacccctcagctcaccccacctcactctcccgcgcgcggcccagtgagtactgggctcgctcggggcgaccccccgttgggggctcctacctgtgcggccgcgctgcgctccgggcccgggcagcgaggggagtgcgcaggggagggcagccccgtgggtctgatctggcgaagtccggcagcggccgcggcggcaggaggaggaggagaaagggagggaaagggggagggcgaaggggggcggaggagagagctgagggaggcgcgagcgctgagcccagcgttgcgagcccggcggtagagcgcgcagcgcagcgaggtccgcgccccctgctccaggggccctctttgccgcccccgcttgccctcccttgccagctcctcgtttcccagactcgcggggaccccacgccagagaggacac

SEQ ID NO: 331302 - DNA, 912 bp, Homo sapiens
  chr2:56410766-56411678
  hyper
atccctccaaatacgaagcacctcgcatttgggtcagcagctgtttcccctgcctggtgacaaggccggtgtgcagagggcagaggagggagcttcttccgccacacggtggcgcgcgcgagcctcccaaagaccgggcggccacagctcctcaccttctccccattccagccccacccgcccgggcgcagaaagagccgcgcccccagccctcccgggcaggacagccgggagcgcacctcgagggcccgggcagcggtcgagtggcagctgcgtccagcccatgcgggagctgctgcgggttacgggtggccccagctccaggctcctcctccagccggtcccccaccctccaccccttctcgactccgctctgcaaatcgaaggctttccggagcagcctaggagcggccgcgggcgcagcgaaggcggcaggaggagcgcagcagccttcgggcagccgcggcggcgtcgctagagcagccggggaggcgccgcggtgcccggcgcgccctccaagctaggagaggggagaagccgggggctgcagctgggcaagggggaggaaagtgcgtgtgcgtgcacgcctgtgtgcagggcagagagtgcggggggcgacagtctcggcttagggcggaggagagggcaggggaacggcggtgcagctcccccgctgtccccgaggatttcccgcggcagccccgggctccccagtgcccctcaccatggacttgcgcggagttgggacgggcctcggcagcagcaagcggctggctgccgggccctgggggagcgcgggcgcgcgcgcggggatggcgaggtaggatggccacccagcgcgacccccgccgccccaacccagcggcccctgggcggtgccgctgactcgccggagcgcacaggggtgtgggc

SEQ ID NO: 331303 - DNA, 194 bp, Homo sapiens
  chr2:60777883-60778077
  hyper
cgagggagcagcctggactgcgcgccccggtctgtcctttgagcccccactgcatccttccgaagaagggcctgactttcccgagtcctgcgaacactgcccttccttcccgccggtacctggccgggctgtaacttcacaccgccgcgcgccgcgtctgatccgcatccggcgcggccgggggagttgggggc

SEQ ID NO: 331304 - DNA, 134 bp, Homo sapiens
  chr2:60780349-60780483
  hyper
cgcgagaattcccgtttgcttaagtgctggggtttgccttgcttgcggcgagacatggtgggctgcggggcgggcggcggcggcggcggcggcggcggcgggcggacgacggctcggttcacatcgggagagcc

SEQ ID NO: 331305 - DNA, 1067 bp, Homo sapiens
  chr2:60783811-60784878
  hyper
cgacgattccccgacatatatttaatttcaccatcataatatgcccagggtgaaatgggaagtgccctccgctcccgcccctcccccagccagatttcacccagtccagaaaaccacggctgtgtgtcggcatttgatccctcctggtcgtcgacccccctccccggcccctggtgccctcccctagggcgacaacccctccctcagcactgctggatgctcgctaaagagcccgaaagtgggggaggggagggtttgtatgtgtgtttaaagaaagatgtgtcgttttaagagattttaaaatattacgtaagtattgattaatgatgcaggtggttttgtagagggggtgaaaggtcactttaaatgcgcacacttggatacacaataagtatatttacctttccagaagtggcttttagaaagtaataaattatgacaacgttaaaattattttctggccgttcagttaacttcgtttggggctgtagagctgttgctgctcccattgaaagggtaattacgttccgtgggctctttcccaaacctttggtgacgacactgcgtgtaaactccaggccagcagacgacccctccccttccctcctccccctttttatcttgcccgcggaggagacgccccaggacttcctgcagtatatattctgcctctgatctccgtacttaatagccaagtcctagtttatgctttataatgtgttgacaagttttctaacagactttctgaaataatgcacatatattcacgtcggttagaaacccaccgtatttttagagttgagtagatctataccctaatgcagtgagagagtgtaaatcatacaggatttcatagtcctttcagtagttttcggtatgaagtatgagccgcgtggcctccagacgtaaccttttagaaaaaaaaaaagacagtgcttttattttatggtgtaaagtgcttttagctcaagggctctgaacgtgaatgtggtcaacaaacagctcgaagagggagacttaatacagtcccagccctcggaccgaggatcgcctggcgcgaggaactc

SEQ ID NO: 331306 - DNA, 311 bp, Homo sapiens
  chr2:60796321-60796632
  hyper
ggctgactgagggggagtcacgtgggcagcccgtgggcagcggcggcagcagctcaaaagaaattgactgactggccgcttgggcgcatttcaatatatggaaatgaccagaggcttctgcaataaatcagcactcaacactttgtcatttttctagttctgcttcattttcctattttcctcttctcctcacagaagcctcatttcttgcattttgccttgccgcgtctcttcccacttccaacctacaccctctccaaatcttgccccatcctctccatcgctcccaaccaccgcgcgcccccaccccc

SEQ ID NO: 331307 - DNA, 604 bp, Homo sapiens
  chr2:60796723-60797327
  hyper
cggtctacgacgattttttccttttctttccctttcaaaaaattttccgacaaaatcaggcagtatttgctgccctgcctcggattatctgagacaagaggcgcccaggatgagctcatgtaatccccaggatgggaacctcaagccccttatgataaagaaaaaagaaaaagaccaggatactcattccttaccccagcccccactccaccctcgaggagttcccttagcaaacttaaaagactatcagaagcaacttgtgccatgcagtgccatggagagcgctggatggctagccagaagaaaagggaaggttgtagtggaaatctacgtgggtttgcaggttcctgcttttcttgtgtagagcctccggtgccctccacctaaccctgccccaatgcctcgggtcttttttgaactaatgctgtgcgtctccgcaatctgcaattactttggatatttctcaggagctaaacgcagcctgaatttcgtggcgcgtgcaaaaaaaaaaaaaaaggcgaaattaacaaaaccccaccaccgcgctgttgtttttttctggagtttttttttttttttttttttagttcggttcagaagcaaa

SEQ ID NO: 331308 - DNA, 291 bp, Homo sapiens
  chr2:60962765-60963056
  hyper
cggtgcgccacaggaactctccggtggtcgggttgtagatgaagagcttccactcggcgaggctctggttgagggactccttcttcatcgtgtgcgcgcggacgacgaggggagcggcggccgcggggacggaggcggcgagggcagcggggacgggggcggcgagggcagcggggacggaggaggcgagggcagcggaggcgcgtcccggctccggcggcgcagcccggcgacggcaggggagggtgggacgaccgagaacacctcctcgttactgggagtactcgagcc

SEQ ID NO: 331309 - DNA, 362 bp, Homo sapiens
  chr2:61109154-61109516
  hyper
cgtgcagaatccaagccacgctctgtaattcgatcctgttgtcatagcaggaaccttagaaattcccaacgacttgattttaggattagggaagtcataagcgaaccaaaggaggacgaagagttctcattaaaaatgtatatgtattgaagatggtggttttatgttttagaacaggaatgaggaaccttcagacctcgggcaagctctctccccctttttagtttaatttcatcaaatgcaaagaggtgatcccccttgtactgacagttgtacaaaatgtgtcacggctttaaaaatcatccgtggtattttaacacgaattagaaaatccgtggtattttaagtgttaatgttgcttc

SEQ ID NO: 331310 - DNA, 109 bp, Homo sapiens
  chr2:61110127-61110236
  hyper
cgggagagccggggcggggggataaatcaagtagcctggggtcgagttggtcttttaccaggattttggcaaggtgagtgggggacactttccagacagaggaagcagc

SEQ ID NO: 331311 - DNA, 424 bp, Homo sapiens
  chr2:61175661-61176085
  hyper
gagtttgcgtgttttagggagaaccacatacctactgtcaggggtgggttgttttggtttttttttggtgaaggaaaagggttatacaaaaggatatgtctggaaaagttatgaatacatcttgtttagggtgacatttcaatataataattacaaatcgatgtgcataataaaccgggacctttcaatgtttgttagcccagcttgcaactaataataccgcatgtctttttacatttcagattttttagggacacaggcttgtttttctcacaattcgttagagattttcttttatgtcacaagataaaaattaagaaatagaggttaacgctgtaaaaggtcaactaattccaagttttaaaaattgggcgtaatcagaaattcagattcataagaactgaatcctcttcattttcttgtc

SEQ ID NO: 331312 - DNA, 199 bp, Homo sapiens; identical to SEQ ID NO: 228364
  chr2:62081271-62081470
  hyper

SEQ ID NO: 331313 - DNA, 1845 bp, Homo sapiens
  chr2:63274633-63276478
  hyper
cgctcccgaagccgctcccaatcggccaactgacaacccttccctcgccccagatttgctaggatggtctgggaccgccgggcggcccctctacctgccccttcagctttagtcccgagcctctcggggtttcaatttgggctgctcggtggcgcccgaacgcccctcagcggcggtggagcgtggactccggcgcctggcggggtaaggcccgcggcaagggcgctgcatccggacatcgctgcgtggtgcccagacgctggctcccgagaacgggcacgagcccagcacgccggaggacccggaactcgaaagcccgcgctgcgggaaaagagactatcggtccgagggtcgcagaggagcaggggcgttggcagcgggcttgcttgggcacagtctgcgggccggagcagaacttccgcccctggtcagatccctcggcctcagatccaaagccctccccttgtcccaagtgtcctccagagcctggccgggcctggaggtcacctggatgctggatccttgtctccacacccagctccctcgccccttcccggctcgagggccttgagctggacggcttcacctcctccagtggtgtccccacttccccttcccgcaccgcggccgatgctggaacggtcatggcttctggcccagcatctcccacctggacatttgcctagcgacggccgcctcaatcctctgcgctgctttcaagaaactttcatcccagtctctctccctctccactctcctccctctccccctctcctctttcttttcttaatcctggggttttatgggctgagcgttaagaaaattcgcctgcaatttgggattagataaatactctaattaggaaaaaaaaaatccgtgctacttgatacctcccaacttccccgagaatggtggcagcatctggaaccgagagcgccggcctcccgcgaggcgtaccccggggaccgcgctggcacattccagagcgcactgccgtcccacctcgctgcgccggacccaggtcaggtgctgaggctgcaggcgaaacagggcctggtggagggaggaatgagttaaggtggaggaatggggcaaggtcacgcgccccggcactggagggccaaccccggcacacagcggactggccgggactagggcagcgccgggctatggacgcggacgccggcgaagcgcaccccgggacgtccgcatattctttcccccaaaactagtgcgctccagccggcgcctttcctcggaacctaaggaaggggtatatttcgttgctttctttaaacctcagcacgatcacagtggctccgagccgcgggcggctgaccgcgggcctcgcgggctactcctggtaggggcctgcgcgagcctaaggtgtgtccccgcctgggttagcgctgcgctctgcactgtttcttttcctcttaaagcttctttctcactcactctctccctccttctctctctcattttttccccatttctctcgttcttttattcagctttctctctttctctcccttttgtgaatgggccgcggtgtctttgttctgtagagaagcgcccgtgtcgctgacttttgtgaaccagagaaggatcttgtaaaacctccttttctccttcgtacgcccccactcccacccctcctcccctgcctctttgattagatgttccctcatcgtcaaaaaaaaaatgtaatttcgttggtctggcggccactttctttgaacattagctcgctttcagctccaacttcaattagaaggagttgattttgagagatcaacaaaagaaccgaccaaagccttattaaaggtcctaagaagatctccc

SEQ ID NO: 331314 - DNA, 993 bp, Homo sapiens
  chr2:63278430-63279423
  hyper
cggccccggcagctgagggcaggtaaggagaaagccgcggggccaccccggactccgggagcgcgttggttacccttatctccccctcctcaaatggatcccggcttccccggtccccagcaggtggtcggggctgtgggagcggcctggctcccctcttggtgagccgaggaccccggggcgctgtcgcggcccgcagccccctcccccgcctcctccgaagtaaccaagctgaagtgctaagtttggagaaagtctttgaaaactcacgctgcagcttcgcaaagccgtcgcagctttgagtcccattttccttcggccctagagccctggctgcttcccttccggtccccttcctacaagctggactccctcagcccaggtcttgggtcccagaagacgggggcgggaacggggctggggggagcttctttagctctaacttctctccttgaacgtcctagcccgagtccctggcttgcttcacagcgatcccgctaagcggggtgtagcgatggccccccagggccccaggcccagtttccagcgcccctccctgacccctgagagtggcaccccgggttcccggcagcggcgggggcgaggcttcgacctcccagctcgggtctgcgtgggctacgccgctgaggcctagttctctgttctcgaccgtgtcctggggccgcgggttcagctacaaggatggcagcacgcgacttgctgccctccggcttcacaaatccccgagaccctttgaggtgctaggccagtcacccttcaccccctgctgggaccctgcggtccgcagcccagactgggcagagagaaggccgggtgcgcgctggcaacgaaggacgctggccgcagctgaggcgctcccgacctcaggccgcatcttggggtcgcccccctctacagtggccccttcggcgtcctctggccctctgcgaagcctgggcccgttactgcggttgaggtgcggtgggatttcgc

SEQ ID NO: 331315 - DNA, 617 bp, Homo sapiens
  chr2:63281020-63281637
  hyper
tggcctctcaggctcggccgcccgagggagtttcttttattcccagttcggctttcttttgcgaaggccgagatctgggcctgccaggggcctgcccgagtcctctatcgcgggtccacgtggccaccaatgacccgcggcgcccccgcgtgtccccgcagccactccgcggaagcagcggcgggagcgcaccaccttcacgcgttcacagctggacgtgctcgaggcgctcttcgccaagactcgctaccctgacatcttcatgcgggaggaggtggcgctcaagatcaacctgccggagtctagagtccaggtgcgcactccccgggctccagggtctgggtaggggagctgaggctgctcggggaaggtctaggaaggctcttgagtagttcttgaggagaccatcctgtgggggtgggcttacagactgggcagccgctctcggactccccctagcgctgggccccagccaggaaagggggcaaaagttaaaggaaatggcttagagccctggattccgcctttagccctagggcgccttcggtgtcggtatcgaaagtactttttagaattgccggaggactagggaagctcccgaatgtaaagcgccctgc

SEQ ID NO: 331316 - DNA, 443 bp, Homo sapiens; identical to SEQ ID NO: 228374
  chr2:63282553-63282996
  hyper

SEQ ID NO: 331317 - DNA, 238 bp, Homo sapiens; identical to SEQ ID NO: 228375
  chr2:63283922-63284160
  hyper

SEQ ID NO: 331318 - DNA, 2953 bp, Homo sapiens
  chr2:63284469-63287422
  hyper
cgcgggatatccgaagtgtggaggaaacagacaagtcagggtacagaggtgggggttgggcaggggcgcagggctgaccccctcacccggtctaagcacagggtcgcagttccagtttacaaacctaaaacaagaaaaccaaaaccagggaacaaaacaacaaaacaaaacaaaatccgtaaaagtacagcattagggaaaaacaaacaaacccaggccccaaacccagttccaactcctctgtcggcttctctctttcaacacccttgttttgtctagtgagtttttagtgcaccttcgttctccgaaatctgcggagagcccgcgcgcctgtgtatcaattttggctttggccgcttcgtccagtaggtgggaaagtaatttgtaaatttgatttgtctgatgtgaagatcacaaattacttgttgaaatgtaaggcagtccccctcctcctctttatctacattacttcccgaaaataaatgcaaattaatgaacggcttgtcagtgttgctcttctgattccagcccgaggtcctggtctcggggggctaaaagcgagggaaactccgtgttaataacccgcgtgttaatgacctgcgtgaagctggaggccaaaggatgaggcgggaggacttggcaagagaagtccccagaaactttcgcttagggagtgtctccccccacccccaccacgcccctccgcgtcagcctggcctcttcccccaggcgttttgaccccgcatcccccctcgccatccaggacagagacaggtgtcaggactcaattcccgaagcaattcctttctcttcagaggcaggagcctggcactgatttcttcaccctaattgcctgcaccagaaagaagagggggaggggaagagggtcgggaggcgggaaaggatagctctgtaatgctctcagagctgagccaaaaaggaaaagaaagcaaaacgacaaaaaactgatccgtgtcctgcatgttggcagcagacaaccttccttgctgctgagctgtcccgggtggcttcaccgcggctggggaatccgagccattccttccacgtgctaagatgtccctctaagccctcagctcctgccagaagtagccaaattacctttcttcgtactgtaaacttcctttaaaacatacaaactcataacctggaaaagtcgacaaggacgcctttcactttggcaggggaagaagacgactggcttgcatctgggggtcaggaaggacagttccatctccctctgagggaagacggggttgaggggtaatcctcccccagaaaatgcagagcctggaactgtccagactctggcctgaaacctcctgggtgtaaggccatgaatctgctcgacttgctcacgggcgggaaggaaacaaggaaacaacgaaaagtttcctgcgaagtgaccaacatcccctattttttaaaaattccgtgtgagacctgagaacacactgtgaagcggggttcggagaacgacccctcccgcgttccgcgcccagcggggtcgcagggctgcgagcccggctgtagcaaagctttctcggccgcgtcctccctccggattcggtaggccaggctcgggcgcgcccttcccacaccaacaaaccatctttcccgactcagcagaggcccacaggggcgcagccgctgtccctccgcccttggcccagcggcgccgccctggtacgccaggcctgaaggcagggccggcccgcgccacgcagggtctcccttaggcggcgccttagggtgaaatgcggggccaagcctgacctgccggggtgccccgtggcatctctggtgcggaccccgcacgtgccggggagaactggcaggcggccagggcgaggaggcttccagcttgcgccgcactggcctgggcacccgggctgcagggccttttgggccctcccctcagtgaccctgcctgtagcggccccagggccgctttggctcaggcagcagctgccaatgccgctcgaggcccgcggctccctgaggcgagctctgcggggcccagcagtcctcttggctgctaaatggaacgaaaccaggagacccggctttgcactcgtttggacaactgtgtggcctccggagcaaggtacccaaacccttgggcctcagtttcgtcgcagttgttatttgaacccactcggcctgggacgtgccagagcttcacactttaggtcgcggctgcgggcgggaggggcagatgcgacccctgggccggcccctcgggggcgtctagaagcttcggcacctgcatactaaggccggagggggctggcagccaggcacaccgaggcccggccggagttcccgcccggggaacgaggcttcgaaaagaggcacgtgcttctcccagggcctcccgccaggtgctgaaaccccacggcactgagtggaaaccggaagagggaaggcgcccagggcctgccgggccgcggcgccacctgaggctgccgggacgctggagcgtgggggagtggggtgagtgcgctgccgggccgggggcggcgggggacggcgggaggtggccaggcccggcagggtgagggcgctggcgttggccgagagtccctgggcagcggcggcgggaacgcggaaggttccctccacccccaccccaacccccacccccacccccgggccggccacctgttgacaggcaggttctctgagaaccgacttcagctcgcccttctgtccaggaagtttgttcggtttgggtttgggtgttcgtgacacaatcggagcaattagaattgaagcaacttcaggagatttagcaacccgcgaaaatttagcaacgttcagacgtcaacagttttctttctttgagtggtcaacgaaaacttgacgttttctactcataccttgtattctctgcttatactgtaggggcaaaaaagtctactcttagacaaac

SEQ ID NO: 331319 - DNA, 582 bp, Homo sapiens; identical to SEQ ID NO: 221779
  chr2:64836250-64836832
  hyper

SEQ ID NO: 331320 - DNA, 354 bp, Homo sapiens
  chr2:64994400-64994754
  hyper
cgttaaaaaaattccccgttttaattactgcaaatgttaacgtgactaggtaagaactatttttaatcacctataattacacggttagtgtacagctaaaagcacgaagtcagtatccaaaagccacaattaaaaaaaacaacaacactaagacaaactttgcttttgtttgaaatgtgcaatatttttcctttacatgctctctcttcccgaataaatgctacgtttagaattgctagggttccgcagatacagaaagccagctagaaacatcccttccctgaattcgatgggcttacgtcttacccagcttgagcaaattcttggcgaatatttcatgaactcacaagagac

SEQ ID NO: 331321 - DNA, 1430 bp, Homo sapiens
  chr2:66652787-66654217
  hyper
cgctcttccgaattatttaggaaagccaacacgcaattatgcaaaagtgtagataaggttctccgaagcagaaagcagcagcgcgggacgcgggtttccccttctctggcgagtaccagtgctgggaggctgtttatctgtgtcctggtgctgggacaggacgcaatccaattccagctctcggtcggttctgccgctctgtccccggttctgcagcgcactctcttactccctctctcagtagtgtccccggctgtctcctttcctccgtctcccggtcctctcccagcgtcacccctcactacctatacccccgcgccctacccccacctggggcgctgggttccacgcctcctcaagaggtgtgagcgcccgcgctgggcgcccgtagcgcggccctcctgtgtccccacttccacccggcggccgctggaagccgggagaaggaacggcaccaatcccctcacgcttctcccaggacgtctgatcccattagcgcacctgaaatcacaaccttggccacaaatgcgcgcttgttgcgacccctccgagtgggccgccgtgccgcaggagccactctggggccggggtccccaacctctcccccctgcaagtcctaaaaggaatcgtagagcaattgatctcggaggagatgagcgcaccccggggctcattgctgcccctgaggaagagccgtccaggaacggaggcgagaagcttccagaattaggccaagaggcaggtggcggggtgatccggcgtccccgagtccagctggggagaaaggcgccctcggatgctcagccccaaagcagcagaagacagaagccggtgcgccatcgtcgctgcgccccagtccgcgggtcctcgcgctcctgctccggctcccgggctgccacccaccgctgcccaagcctgaccaactcccaactccctccggcacaggctgaggcgacccccaaagagaaaaataggatcgcagtcaaaactggcggggatggggcacactggtgggagaggggaccttttcaccttttgctcttcccaggggacacagtcccccaaacctacgtccctgcgccaaaccaggtgcgagcaaactccgcggaccccgcagctggaagtgcatcctgccgggacccccacccgacccagggagtcagcgcgccccagggtgcaggcaggcccagggctctgggtggctcagggcacggggaccggatcgcgctgcagaacaccgccgggacccggcacccggacgcgcaagggcgacagggcagccctgctgtaaggactgtgccatgagaggttctcattcggtaaacagtggccctcccagaagtggccgccgacctgccagtcaatgaagttatcctccgggagctgggaagaaggggcgcctcgcggggctgtgggctcggttgcgaacc

SEQ ID NO: 331322 - DNA, 951 bp, Homo sapiens
  chr2:66660936-66661887
  hyper
cgggagaataaagagaaggggtgagggggaattaaagcccaggcaataggtgttaaagttaaaaacaaaacaaaacaaaaaacagtggttggttggagcctccgagttgtaggtacaggcagcttttgtctgaaatctcagcttccgaagcggatttctttttctctggcactgggaggtttcgccgagccgggttggggacgggaaagaggagcgcggggaaggatgtctggggtggtgagggcagggcttcgctggagaaagagctagtggggcgcgaggttcttacaggcccgggagaggtcgaggctggagcccctcggcgcctctaagacaaaggcagcggtggctgcagccggagcctagcactccggcagcgtcgcgccgcgccgcgccgcgccctgggcgcacggccgcctcaccccgagcgggtcggagaaagagcctccctcccagcggctccccggccccggctccgcccgcgaggtctgggctgctgcgagcccgcgccgggtttcgctttccgacgatcataaatagcttggtgtttgtaaacaggcgctgggggcacattccccgcgctcagctcattgttccctcccttcctctctacttcgcgcaggacgcctgggctggggctgggagccgccggggctaggaggtgggggagtccagacccgaagtgacaaaatgctagcattttctttcccccggccgggcgtccacctctaacagcaaagaaacctctaagctgggtctgcagaaagcccgagccacctcaaccccatgttctcaggactccttagcagaggctttcccaacctggcttctccctccttttcctccacgatcccgctttgacttttctccttgcagtgtttagttctgagaattcagtactttgcgcatcaccccctgccccgaaaaacactggcagaccccaataatttc

SEQ ID NO: 331323 - DNA, 90 bp, Homo sapiens
  chr2:66803383-66803473
  hyper
cgatgcgctgggtcccggcctaggccccagtgcgtgggcgggcaggtctttgcccagagaccacagctctggtcgcggggggtggcgggg

SEQ ID NO: 331324 - DNA, 463 bp, Homo sapiens
  chr2:66803682-66804145
  hyper
agactttgccacatcgggggccccagactccagagtcccatagtggccctgggagcgcgacccagagagcctgggggctggagggcacatggaacgcgtgcacggcccactaggagggcgttgggaggagagtgcccgagtctggagccgcagccgggaagccgtagacagcaccccgacgccttaggcagaagctcctcaggatcactttaaaagctctgcaaactttccccagcctttcggataccctcaggcccttggcccaccggaaggcagtaaaaacgtaacttcatgctgcaaagctcccgggtaggcgcttggacgccgatggagagaggcgtggaactgggtagtggggcgccctgcctggctgggcacttttccttgtctcattctcgtctcccatgccatgccttacccactggctgctagcggcgcgtttcacttaaggtggccacggtgc

SEQ ID NO: 331325 - DNA, 877 bp, Homo sapiens
  chr2:66808540-66809417
  hyper
cgatgcaggtctgtttgttttctttccccgccgccccactgtcccttttctcgtctccccgcgcacctccccagacgccctgccggggtggctccgcggatgaggcggtcatttgctgtccgctttgcggggacgggtcactttccgcgctggcgtgaaagcaaatgtggagctgcttttggaaggcgccggccggacgtcggctaggctccttctccccgcgggctgggggccctggggctctgcaaggctctggctccgaacagattgcgcctcccgcctggctgccagtaggaactggggtgggagccgcgtaactaacagttgcgcgcaggaggcgagccccaggtgtgagcgcagaggctctctccccagcccgcgggtctgggaacctttcaggacgcctccctccccaactcctacccatgcgtctgctccctaggccgagcccccctcgtgaggttttaatgaccgcggacgcaggggagcccgcacttgagcgaggaccgacttctctggcgggtccacgctgctcgcgcttgcgtccgcgggtagcgcgctgtgcccgggtcagggggcgagctgcgagaagtaggaggggtcaagacccccagaaatccctccatgggcacacacacaatcaagaatagggttgagggtcttgagaggtagaactaccctaggcagggcttctccaactcggcctttggaccccgcgcgcgcccaagggcgtgcccaccgcggaagcacagatcatcttcccgggactgggtctcctggaccctgcgttgctccctttttcctagcggccccgtagctggctgccgcatgtagggcgatcttcattaacttggacgcccaacgtgattgaaataga

SEQ ID NO: 331326 - DNA, 213 bp, Homo sapiens
  chr2:67624288-67624501
  hyper
cgcggacctgactactacccgaacaacccccaccagtctggaggattttgagcctagacactcctccagagcaggctcctgtcccggctgcggaagtgcgcgcgccctcggcaccttaacagttccgcccctctcccggacccagccaatcagcggccgcctcttgcgcgcgccccaccgaccaaaatggcggctgccgttggtgcggggtgc

SEQ ID NO: 331327 - DNA, 1030 bp, Homo sapiens
  chr2:68546319-68547349
  hyper
gggaccctgctgccaccaggcgccccgcactcactcgacctgcagcgtgctgggtttaatcttcacctcaaccttgtaggaggagccggtgagcagcttgatggtgcggttctggccgaagcgctgcccgtccaccttgtaaaagaccgggccgtcattaggctggatgcgcagcgcgatggagaggcgcacgaggcccggcaggtcccccatgtctgggcgagggtctggcgcggcggctccggggggcggaggacagcgccggctgcggccgagtggctggagcgcgaggggcggagaggaagcgcggggagggtgagggaggtggtggagctgaggctgccgctaggaacccgcgccgtcgccgccgtccgcccgggcttttgaggagcagctccttaggctgtggcccccctccccactcggcgaggaagcgggcccaagagacggctccaaggccgcgcgcttccccatcccccgctccagtgctgcgccctccacgcacccgaaggctcgctctggcccgcaggccgccgcgcagatccgcgcagctgggggcgagggagttaatcctgtttacgcaccacaatccccttcagctggggaagcggacatttaggctcctcctagaacagccccgggcaggaggaggagaggtttgggaggcactgggaaggcgctggagttaagcgaccactatgccaaggagcgagacccccggaatctggataccgcctcggccagctacgtgaggtggacactgctgctcgcggatccggcgccagccaggcgggaggaggctgagggggggtaaagggaggcgggaaggggggacaggaaaccgctagccggtgatttaaatttcaggaaatatgagtctttccaaagcttaggggaaatggccgaggaaaggcgcaattccacgtgatggagccacgctggatgaggaatggatgcaagaggaagaaaataaccatattcaaggagctacatcttcttgtgggtgtacatttccattatacgtatgctc

SEQ ID NO: 331328 - DNA, 560 bp, Homo sapiens
  chr2:69533498-69534058
  hyper
cgtgccagcttcctgaattctctcctcaatgtcggctgcgtggggatttaaactcatttaaactggtgggcctgggaccggctgtatccatcaaaaaccaggaaggggagccggcgcggggcgtgcacagctgtaggagggctctctgtgtgcgaatccaggccctgagttcgcacgcccacctggggcggtggtccagccgccaggaacccgcttcccagccgctccccctcacgcaggaagccgggactctgggcgcagctctcccggaccacggccacgtcctggctccagctacggaggcagaaagaagccacagaaacctaaaggacaggaggggaaactgagctttccgcgtgggtgcggctgcccttgacacccgcttgggggctccggagggggaggcagggcggccccgcgctgagggtggaagcgtgaacatccgagcagagagagcggggaggggccgtccggagagatgccccgctggcccgactgtggcccccgggaaagacgccggtcccgtgagcaccgccccttctgttgtctccagacgcccc

SEQ ID NO: 331329 - DNA, 620 bp, Homo sapiens
  chr2:70351179-70351799
  hyper
cggctctttttttcatcaggatgtggagagtgggcgccttgggaagacgaaattgagtatgtgcgggggaggggtcatatgaaacaaggtcgggaagggggcggggagagctggggctctggaggagcttggggctcgcgctgcgggggaggaagcgccttccgcggtcgctggggggaagtggttaggaggaagcacgggcagtggaggggactgctggagggtcccatctgggaaagcaggcacggatgcggggacatttccgcccgtcaccctggcaaagcgctcgcagggctggagggacagagttctcagatccaagtagagaaaaccgggaacggttccggctctggggactgacattcatcgcggcagtttctggtggcaaaacagaggaaacaaaggaatgatgaaatgaactgagctgccttcatgccccggatgaatgttcagccattagaaaagagtgaatcccagctgggatttggggttccacggtgtactagaaaagcaaaacaaagagaagcgcctactagatgccatcttggaaaacaaaagcaaacgtgtgtgtgtgtgtgtgtgtgtgtgtgtgtgatgttacatgggcatggggaaattac

SEQ ID NO: 331330 - DNA, 280 bp, Homo sapiens
  chr2:70369049-70369329
  hyper
cggctctagtgactggcggggaagaaggggaaaaagaattagtgtatctggacacaacacccagcatgtgctaggcagaaactaagtgtgcgaagcggatcccgatgtacaaaggggaaaacagcggctgggaaagcctgagccacgggctccaggcggccagtcgcggtcctcccggcgcgtgccctcctcctccccgacctggccggagctgaccggggcgggtgtaggcccgggggcgggagggctactggatcccaggtggggcgggtgtaggccc

SEQ ID NO: 331331 - DNA, 1109 bp, Homo sapiens
  chr2:71453505-71454614
  hyper
cgaacgtctcccaggcaaatgaggcatgaagaatgagggctggagtcaagggggagatggagcaagtataaaaaggcagaggacgcgcaggggccgcgaataggggaagggcacgacgcgcaatccctcccgctccagcccggggagaggggcgggggatgccgcgcgggtcaatttgcctagcattgttgcacctgggtagaaatgggactcaggccaagaattcggttcgagtgttaggaggacgctgaggggagtcaggaacttgggtgggagtcggggggaaacagagcacctgtgcgggggggaaagggacgaaaaccccctattgctcccgaggggcaggggctgaccccagcggacgccccttttcgccgatggccgcgacgtgggaccccgcgcgctttccctccctacaggagctcgggcaggcgcgtgccgcccttcacagccccgacggcggcagaaagggaggcgcagggcgcccccagagccgggagaacggcgtttccctcgagtcctttccccagcagcccgggcacccgagcccacctgggctaaccagaagcccctccttcagatcgtactctgccactcctccgagagcttaagccgttgccgtagaggtcgccgtcgccacaacagtctcggcctttagtaccaaaacgtgaagcacagcacccgagaagcgccactaccacttgccaggttatctcttactgcacactgcctcctcgccccgcccccgaacccaagccattggttgccgggcaccgccccattcgtctattgggccaaagaagatgccgttcggtcacctagaatggcatatgtggtttttattggtctaaatgtgaagcagtgcccgcccactccctcagaagtttcagcttctgattggttttaatgtctgtcttttctcttccttcattttttttttcctgtggtggaacacctccttgagggagatgccggctctgattggctgaaaggacgctacgctagcctgggataggcattgggccaaggatgcgcccggcccactcgtgggggaggagaccaaggcgccgcactctgggtttgtttacacaggctcttgctcccgcttc

SEQ ID NO: 331332 - DNA, 889 bp, Homo sapiens
  chr2:71503428-71504317
  hyper
cgaagaaattattagtcttaaaaaggacagaaagactcccgcaaaagcagcagcgcgtgccgaacaccttaggcctcacagaccttctatttgaggaatgtgctcccccaatcccagaccgctcctggtggggcgggcgcgagcgcaggaccgcggagcctgctgcgttgctcggctgcaggggaggagctgggccccgcccccggcttcccgcgctccgcgtccattggctggcctcgggggtgggcgggtcccgccgcacggagtcctgcgccttgaggctcaagcggcggcgtgcaaggcgtgtgaggcgcgtagagagccgcgcgcgccgtctgcgatgccccgggacggcgttcctgccgggaataccaccccggcggcagcccaggctgccgcgcagagcccggattccgcgactgccggggcaccgcaggttttggactcgctgaagcggtgagctctgcctttgccctatatgccgcgctctcgcccgtgctctggggcagttggcagtgggtgggcaggaaggggcgggccggcagggcgtcgcacgttggcgtccccgcgtcgcgggaatggggttcggattccccccgtgaatgtcattccccaggctaccggtctttagcgctaagttgcatgggctggtgtgccagtcggtcagcgaatagcggcagaacgcctggccgggccggcgttttccgggacactcgtttcggcctcgcagtggcagcgcctcctgcgagcctagaccggctcagtggacgcgccgcgctgtgcacgcgggtctggggagacggcggttcttgaatgatccctcacactgcagggtatctgggagcggtggattgagggggcacaacgtggcttctgtgtcggtgaaatc

SEQ ID NO: 331333 - DNA, 464 bp, Homo sapiens
  chr2:71680558-71681022
  hyper
cgtcctaccccgggcggtcgggttgagttctggagagactgctccaatccccgaggcggaaggaggcaaccgatttggcgcagcactcagccagggggtagaagctcaggggaggagccgagcctttctcctgtccaagagcgagatctgggctacgccgggcgcccggagccctagtccagcccccggccatcgcggccgccgcccagccaggtgcaaaatgccgtgtcattgggagactccgcagccggagcattagattacagctcgacggagctcgggaagggcggcgggggtggaagatgagcagaagcccctgttctcggaacgccggctgacaagcggggtgagcgcagccggggcggggacccagcctagcccactggagcagccgggggtggcccgttcccctttaagagcaactgctctaagccaggagccagagattcgagccggcctcgccc

SEQ ID NO: 331334 - DNA, 1639 bp, Homo sapiens
  chr2:72371599-72373238
  hyper
cgagaggaaagaggtatcccggacagctggacccgaagcgggagtctccgcccccacccccacccccacacccccaccccgcgctcgggagcctctcggaataaatatttccaggctccgggccacgggctggcgagaccccgcggggtggccgcaggccaaagattatttatagcggtaagcggtcggtgcccggaggcagcaactacagatgggggttggagtttcctccgctctccggtgtggcccgcgcagggacccggcggccctcggaggactctgcagggcggggtcacgggcccagagccgcgattttcctaatgcattttgccctggaaataacggagacggactttggttgccgccctggagtttggaacccgagcgcggggcggggcgggaccgggcagggcgacccgcgcaggtaaccagatccccggtggtggcggcgcaagccgaggatggcggggccggggccggccggactctcgaaacggctggcggagccggccgggcgcgggtaccggaaaccgtggagacctcagaggggcgggggcaagggcgtcccgctcacctttgacgtcggcactagttaccccaccccacgttaacccttctcctgccggggcagcacccggcgcaaaggggaggggcgccacctgtctagccgccccgcctgccagcccacgagcgtaccgactcgggctccagatctacccgctcctgcacccccgaggggacaactcagtccccctagcccgggttggtccccctcctcactttccttttttccacagaaaactacttccagctaaatgtgcacacacgccagtacagccgaaaagtgactctgcagaacccggagccctaatcacttttccacatgcgcctccggcccggcgcgcgacggggaacgagctgggagcgcccgcgcagccaggaggggggctgggccgcgggaacgctgtccccctcccaggctggaaggcggggataattccccctgccgtgcagcccttctagacggcgtctacccctttaagaaaaatctaggcggaggtggggtgcgacagaaggggtggtgaggcgagggtttccctccctccgtctgctatacccgtctccctcgctccgtctcactctccgtctttcctctccttcttttcctctgtttttcttttctttcaacacaaaagttgggttgtgaattttccgaggtcgccgccgcctcgcccccaccccccgcctctgatctgcctaactataattaaagtgcgttttttgtggcattaataaagagttatttgtccgccgtttccacggtcttcacaaagagtactttcataggggcggccgctcgggccgcgagtccaatttatacaaaaatgttgtatttttagccctgggctctgtttagatggcgctcggtggaaacggagagcccttggaggtccccccgtaaaatctgataaatgactccgaaaaaataacgctgggattcagagggctctcattaaccccttaggcgctcctgtacacgtaccccctatttccctcctcacctccagatctagggccccgggttggagggatggggaggcttaggtttcctcctccctaacttctgtgcaggttggac

SEQ ID NO: 331335 - DNA, 943 bp, Homo sapiens
  chr2:72374248-72375191
  hyper
cgctgccgacggcgccgcaggaacacagttttaaatcggcaattcaagctgccaccagccccctcctctcccgactcaattttcggctcccagcgacacagccaaccccagaaagccgagggcgactgggggcttgcagcaccgaggggaggcgaaagcggctcaggaccggaccctcccccgggaccgcgcctcgctaggcgcccccggggcgctccacgccccctgccaggccagccgcgacccaggcaagtccatcttgggagccccctcaggtccgggaacccctcttaccagccccctgaacctgcgccgcgggcgccagtggtcccggaaccgcgctgccggcgggctggggaagcccgggctgctgcggcagagaggagggaaggggcggggcggggaccagtgccttcaggctcccggcgccccctggccggcccgccgctccgtctgccccgcgctcgcagctagcggaccccggagtgcagcggagcgagcgcgcccttacctgcagcagccagtggccggtctctccgatgagcgggaagcccatggatcccttggggatgggcagcttgcagctcttgtcgcgagtggcggcccagcgcagctgccacagctgctgcgacacggccagcagcagcgtcacggacaccaggcacgcggcgagggtggccagcgccgacaccagatccaagccctcaaagagcatgttggcggccgctcgggggattggctgtgccggccgcggcgggggaggggagggcccgacgggaggggaccggagcggcgggggaggggaggctgcggccgggggtcctggcacctccagccgaaacagagaaggaggaaggggccaagggaaagggagtggaggctgcgaggggagcggagagagggaggaaaaaaattgcctaaaagaagagaggaaacacgaggc

SEQ ID NO: 331336 - DNA, 976 bp, Homo sapiens
  chr2:72376427-72377403
  hyper
cgcacacacggtgcgcactcgcttagtgcctgcttggcttctaggctccttcccttcctcttttcctccttcccaggtcagcggtcccctcctccagctccgagcagtccctcctgggccgaagccccggcagcggaggtcctggccggactgccccctcgactggcaggcgcccaaagccctcgaaactgtgccttagggtcccgagcttccaacccccgggatcccgctggctcttatctccagggacccctgagttaccagtcccaatccccctaagccagatcccccattcccgatccctatatcctcacacctccgatgctaaggtccgcccccgccatatgtctcttaccctacggaacctggaggttctcctgtccccgtcagcgtcccaggctgctgactctgcagcccctcctttcctgcacattgggacccccctcccctgcttttgtagtccccctccaccgcccgcagcgtcggggaaccccgatactggtccggcaagtgtcctgcgcggggacaaacgcggcggccccggtacccagaggcgggagaagacgggcacaaacgttcattgatacaaatgagtaaataaacatgctgggtgagcacggccaccttctcagcgctggcagcagagggcccggcgcgcgtgcctgtgtacggtgtgcgtgtggcccggggccgcacctgtgtgttcgcgcgcgtggccttgcgtcggcccgacgtctgaggagcgacgtggtatgtctgtgggtttgtgtattctttgtagagccatgagtgtgtctgcgcatccgtgcatctgtcatctggcctctcctcctgcgagcctgtgttaacatggagctgcgtacagcaaccccgacattggtctagctaatgtctgcccctctctctcccgtgcatcctgcttccctcagccccccttggctctggcgttcactctcacactcccggagccagagtc

SEQ ID NO: 331337 - DNA, 695 bp, Homo sapiens
  chr2:73052644-73053339
  hyper
cctctcgttccccagcgccggaccagcctcggagggagaacgaaggctgctcctgccccgagggaggcagcgggagggtcctgagtcactgggctgtagggcgccgggaagggaccccgcgtcggggctgcgaagggagacccgcctcgcccggtatgcagggtctctccgaagggaggggccggcgccggacctggggacagccggccggaggcccgacccagaggagcctgccccgtcccgcccgttcccgcccctctgtggtcccggcacccggggtacctgagcgtgggcccgatgcaggccgtgtcagtgctctcgatctctcgcaggatccgctcgtgctctgccgctgtctccaggctctccgcctccgccatcttaccccgctccatagactgggggcgccccgcagcgcgtcccctccgtcggctcggctcaccttttccctgccccacaatgccgctcccaccacaggctccacagccgccccagcctctggctacccgcaggccgacccctccctcaggctcgacacgcccccttgcgtcaccgcgtccgtcggcgttctgcgtaatgtccgctgggatttgtagttctctgggaaatgctaggttggattccattcattcatacatggaatccgcaaatactagttgaagcccactgtaagcaaaaacagttaacgacagtgc

SEQ ID NO: 331338 - DNA, 1976 bp, Homo sapiens
  chr2:73143917-73145893
  hyper
cgagggggtggatctcccagtgccgaggcccgccgtcctggtccaagccggtcgcggcaccgtgtctgggcactggagctgcttccagccccgcgaacagctggagggtggcagtgggaccgctccggcggcttctcccgcgcagtgccccgcctggccccttgtgaagggagtgagcgtcccctttccagagctgtcccccgtgacatccagaaaacgcgaaacctcaggaacaaggtcgcagcttcagaccgcggcccaggaggccgatggtgggtgagtgggagagtcccggagagcaggggggcagagagctggttttcgggaaaaccaatgtgttggaccccaaacatccaccctccgctcggatccaagttctctgagaactgaaacgacatcccgggacgaatgggagagttaggctgagctacacaccggggaggggagggttggagtttagccccaagcccttcggacgccttcttcggctcccgcgtgggttgagacggcggcacggccaccagactcagctaaagggcggagtcgcgaggagaagccagtggcgaggggaggaggaggcctggatctccccgcgaaggctccagtccggcttttgcctccgactgcgggctccctccccacccgccgtccctcgccccgccccgccccgccccccaccttggggcaggtgagcggcggccaatgggcgagcgcggggcaggtgcccgctaactcgcgcctcgcagcgctgggcggccggggctgggcagggcagtgcggggacaccgggggctggggtcggtcccagcgggactccgaaaggagggagacgagctcaaccctcgggccttactggcagctcgcagcctagcacggagcccgcgcctgtgcgggcgcctggagctgcccgctccgccgcagcagccgccgcgcctggccgtacgctgtggccggaccccgcggtcgctcgctcacacacccctcgccgctccgcgcctggctcgcccgcgggggccgagcgcgagcgggcgggcgggggaggtgaggggtgcgggcgggtgtgcatgtgcctggctgggtgcacaccccgcaaggcggcggcgccaggacgcggagcgctccccagagcccggctgcctcgcacagctcccgcggctgcgaccatgttccagcccgcggccaagcgcggctttaccatagagtccttggtggccaaggacggcggcaccggcgggggcactggcggcgggggcgcgggctcccatctcctggcggcggccgcctccgaggaaccgctccggcccacggcgctcaactaccctcaccccagcgcggccgaggcggccttcgtgagtggcttccctgccgcggccgccgcgggcgcgggccgctcgctctacggtgggcccgagctcgtgttccccgaggccatgaaccaccccgcgctgaccgtgcatccggcgcaccagctgggcgcctccccgctgcagcccccgcactccttcttcggcgcccagcaccgggaccctctccatttctacccctgggtcctgcggaaccgcttcttcggccaccgcttccagggtgagtgtccacgctgtgcccgccgaggcggccggccggcgcccgtgctgcggcgatgcgggggaggctcgggggcgcgcggggctgtttagaagttactgccgggaaggctgcaggtccgcggaggtagattcccaggcagggaagagctgtgcggcatccacccgcgccttcgccgcgtaggtctccctcccaggaaagcaggtggagacctccaggcttttctagaaaatataccagttcggacgcaagcccaggcgcgtcctcggagcctgtgctggccctcgccacagcctgcccaattctctctcccagctgagccagtctcagaccagagtacaactcctcccgctctccctccgcccggcttaacctcgcaccacgcttctctc

SEQ ID NO: 331339 - DNA, 1230 bp, Homo sapiens
  chr2:73147029-73148259
  hyper
cgtgggctcgatccgaagcctgggtctcgaaacctggcgcccaggggccgagttgtagttggggcggtgtgtgagcccgcgggccgccgcggccgaggggctggcgggttggaggcttgtggagggataggggctcggaggagagggcggggtcgttcctaagtcctgtggcctccagccgttcagcttgtccggagtcggcatcctgggccgcaccctcggcttcgaatccagcccctgacgccctccgcaccgcggttcctgcctccgggcgccgagggccgggggcgcctggagagaaatccagctccggctctgagcgtctccagtcaggcgaggcggataaatccttcgcaaaaccctcttggaaattgccgccgcttcctgagccatcagtcccagcgggtacgttatcgagtagcacaaacagttggatttttccctcaagaaccgagtctggacgcggagatggagccaagtgtggctgcattttcggacccggaaatccgttgggcactgaaggacttttcgaaccctgtagcgctgttgcttcgcggtccatcgtcgccgctgcagacggatgcgctccccggcggctctacgccctccagtcccggccaggcctctgggctgggagccgagccgtctcgggccctccggcgccgcgttttctagagaaccgggtctcagcgatgctcatttcagccccgtcttaatgcaacaaacgaaaccccacacgaacgaaaaggaacatgtctgcgctctctgcgcagcgcttgggcggcgcggtcccggcgcgcggggaagcggcgtctccgctaaccgaggcgctggaaggggaaaagcgaatgcggaatcgtccaggactccgaaggtcggggccgctcgcgagcaccgaaggggaggagccgacgaagaccaggagtgggccgcatttcggtactgtttccccgagatcaggaactttccgggtctaggagcaacgcctggagggggctgtagagacccagccccccgggacccgcaactacaatgggccggagcttctaaggtcgcctttgttctggcaggaggacggggaatgaggttatctccgccgcctgtcctgcctctccctctcctagccctagggccctccgcccagccgtccggccctgagcccctggccggcggcggcctctccagcgaagactgcggctcgaagactgcagctcggaccccgggtgcttc

SEQ ID NO: 331340 - DNA, 1314 bp, Homo sapiens
  chr2:73150996-73152310
  hyper
cgaccagttaactgaaagcaaatcgttggggctggcggccagggcagcgcccctgggaaagggcggagaaagagcgccatggacttttcttccccaccccttggcctcttccgctgccccaggcattgtgaatgtgggtccacgcctcgtccggcctgccccatctcttggcttaacagagggatctggagagctgttattccccgcgttcccccgcggagtggctctcgagtgcggggaggtgttgcggaggggagtggacttagggaaggggcggcaaaagggcaaagggagaaatggcgtgtgtgtgcgtgtcaaggaatggagagggcagggcgcttgggagcagggcgcgaggccaggctctgttgggccccggctcacggcgccccttctctctgtctgtacctgcgtgtgttgccgtcggcggcggggccgcagccagcgacgtgccccaggacgggctgcttctgcacggccccttcgcacgcaagcccaagcggatccgcacggccttctcgccctcgcagctgctgcggctggagcgcgccttcgagaagaaccactacgtggtgggcgccgagcggaagcagctggccggcagtctcagcctctccgagacgcaggtaatcacccccggtcgcggcctgccctgcgcccggagcccgggtggaggtgagggtgcgcgggtgcaggagaggccctgagcccgccccagcccagccctgctgggttccaaaaggcccccattccccgcggcgctgcggtcaagcccgtctttagagcctcttcctcgagactgcgtgcagcctgctgagcccgcaggacttttgtcaagcgctaaagacctagcaggaggcagagtaaatgcaaactgtatcccgagcccggctcccaaagctcctcacggggggaccaggttccctggaggaagcgggtcgcctcgggagcgggcagcgcaggcagcaccgaggccactggagctggctccagccctggcattcctgcagcccttttcccgccactgtgtcggggcgctcatagtcctgcggggagccggtccgcactggctttgctgctgttcctgggcaaaactggcggggccttggctgcccaccagccaggagcgtctggggagaaagcccaggtgtcctcagactaccaacagaggggcttaaccagggaggggccagcccctgcttggggcccgagggttgctctgatccggcccaggccggctgatagggctgtggaagccacggtgtgcgcgcgcagagcatctgagtggcctgggcctggtgggaaatagacccc

SEQ ID NO: 331341 - DNA, 364 bp, Homo sapiens
  chr2:73152639-73153003
  hyper
cgtgccggccggctcccagagttgcgagaggccggctccgcggtctcccagctacctcccggctgacttttcaccttccgctcccctttcctcctagtctcgaccctactacaccaccgtcccctcccaagtcccgggcagtgagaagatgcccggcatggggggcagccggagcctccctttagcagccagagtaggaagggggcttagtgagggagcccagacccaaacttcatccgcagctttcttcggcggaccttaccctctcctccttcagtggcattttggcatctattgtcgtcatatctgtctgctgccccacttaatctacaaatcgctcacgggtcggaggcaggacccgtgc

SEQ ID NO: 331342 - DNA, 814 bp, Homo sapiens
  chr2:73518220-73519034
  hyper
cgcgcgagaccgccttggcgctgccccagcctgtctctgggggttatagaggaaggcgtggggcgtgtgccagttacaaaagactgtcttgaatcccagggtagtgcctattcactgggtggtctcagaagacttcccccaaagcgcggctgacaagggtgacagcgcctggaccgcgggaactgtccgcggagctggtgctgaatagggcgtgtgcggcgggcgcttcaaggaaactggaagcgggaccggaggccggccctcgggcgtgcgaggaggagttggaagaagagcggggaggggaacggcccggaactcgtgcgcgccgaacggcggcgccccaacccataaacccatctcttgctcagagagaagcgaaggagaggcccagcgagtaaaagccgaggcccttgagccgctcctcggcgcgcgccttctgcttgaggtgcaccttgctgtgccgtttcttctcatcgctgcgcgcgaagcggcggccgcacacgtcgcaagcaaaaggcttctcgccggtgtgggtgcgcacgtgcgtggtgaggtggtcgctgcggctgaagttgcggaggcagatgcggcactggaagggtttgtggcccgtgtggatgcgcaggtggcgattgagctcgtcggagcgcgcaaagctccgcacacaactctccaccgggcaagcgaaggccttggcgtgcggccgcgggcagaagcagcgcgtgctgcatttgccgccgcggcgccccttgcgtcgcgccttggcctgggggaaaggggtgggcggcggcggcggcacgggtggtgcagccac

SEQ ID NO: 331343 - DNA, 728 bp, Homo sapiens
  chr2:73519055-73519783
  hyper
cgccaccagaggtttagggaagtccgccgcggcggcgctgcgaaggcccagcggggaaagctgaggctgcgtactggccagaaactctccgccgtcgccgctactccctccctccccactaggaggggtcaggagcccagggaggccctcagccccctcccctaagtcacccggggccagcgggaaagcgtcataggccccgctgggatagagtctgttggctgggacggccggcagttccgcagggcagctgatggacagcaagtcctcaatcttggtccctattacgggaaaacgagcctccggggcggcctggtagtctccctgtgacccacagttccctggggcccccacagaaagcagctcccagggcgcgtagggacccttgaaggcagagacagcgtccagcgctggcgaggcgggaggcgcccggaggccgggcttgacgtcgggcggggagagctgaggctcatacaggcactgcgagggggcacccgcgcaaggcgaggcctcccagaacgcctctgggaaaggggcagcgcccagatccggggagtaaaggtccggcggacccggcagcaaggcatcggaccccgcaggaaaaggggcatccagcggggatctggacgctgctgcctctggaccggggaagggtgccaggcctaagatgcccgacatgaggttgaagagtgcctccgggtcgtgcgggtgttcgggcactgcctgaa

SEQ ID NO: 331344 - DNA, 944 bp, Homo sapiens
  chr2:73520107-73521051
  hyper
cgctccgataaccgcacaggttcctgcggaggcgctggcggcccagtgtgggtgggaatgggggtgcgcaccccaggactcctaagcttcccatcgcccctattctcatagctccaatgtcccagtccctcctggttctcaggtatggtgcgcccccgcgctgcgccgtcgtcgtctgagcacccctgctcgccctccttacctccagggtagccggtggccgcgggagcgtccctggcaggcagccggggcaattcagcgctgggttcggcgcaacagccttcagtggacttgacgaggagcgcgtcgggttcggaaaactcgctaaggtggagcatggcgcggcgccggctgtggggcgcccggggcctcgcccgctgggcttgggggcgcgcgggtggcggggaggctggcggtaggggttccccgcagcgcacagacctaggcgcccgggctcctggcttcgggcactcacctctgggaaaggagtcggggagccgcggcgccctcgctcgcccgcaccggcctcgggcggcggctcctcgcctctccaaagcgctgccgggctcccccagcccacagcccccccacttatatagctgcggcggcgctggctccgggcttccgactccccgggccactgccattttgggaggccccggccctgccgccgtgacgtaaatgcccaaacatggacacaggatgtgtgccggggactcccgaaaaggaaagctcgagctgtgacgttgttgttgtcgccgccgccgccaggctcgcgccgctgcgtgcgcgcgcgctccccaggcgtggagcgctggggccgcggatgcgccagtctggggcgctgcgcctcaccgggccgaccgtccggtagatgcgcttcccacctggaggcagaggccgaggggcagcaggggaggaccgtgttgggtttgaatctgccc

SEQ ID NO: 331345 - DNA, 228 bp, Homo sapiens
  chr2:74211299-74211527
  hyper
cgcgacgcgcccgttccccctcctctgggaggcagggcgggggtatcggattagtctttgttttcgacgcgaaagaatcgagcgcggcgcgggggaggctggtgatggcagggccgtggggtccacctggacagggcattcggccgtgacccctgcgagggtgcccttagcctctgcccccgagcaaccccttcttgccggccaggctgactcggtacgcaaacgcgc

SEQ ID NO: 331346 - DNA, 110 bp, Homo sapiens; identical to SEQ ID NO: 228446
  chr2:74229981-74230091
  hyper

SEQ ID NO: 331347 - DNA, 998 bp, Homo sapiens
  chr2:74425444-74426442
  hyper
cggccttcggtgacactagcggcgtcaggcaggagtttgacttcctcagcctatcatggcacgttgccgaggcttcagcgccttacaggacctcgctccaggctcttctggctccaatcaaaagcagggctctttcggacttcgcttacgtttaataaagaaaaccggttggccccttcggctccacctggctcaacagacagccagtggcatgcggcagggaccaatgggtggcggagggaggcggggcctgccacgaggccgcagtataaccgcgtggcccgcgcgcgcgcttccctcccggcgcagtcaccggcgcggtctatggctgcgacttctctaatgtctgctttggctgcccggctgctgcagcccgcgcacagctgctcccttcgccttcgccctttccacctcgcggcagttcggtaagagggtcacagagctcggtcagcgcggaaagctgaggggaacggagggcgaggggcacgccgggcccccgagggacaccgagggaagtccttcccgaacatctccgccccggcggtggtggccgctgaggggtgtggcggggcgacgtggcaccgagcgccgccgcagctctcgactggggcgcttcctcggcgcggagggctggtacccgaagcccgcctttcggagggagccgctctcctgcgactcggggcgtcgccggggcccgtggccagtcggcgggcgggacgggggtggcgtgcggaacgcgaaggcatcagtttacgcggagccttccgacagcgccggccgcctctggctgggatgctgagagtcgtctgggggagaacaggcgagggttccaaaagagcagccctcggcgagttgtccttgcggggaccctagcggcggagggcgctgctgcagctgatgaaatcgcggagccgacttgctcggggtccccgcgccgccctcctccctccgccggtgggagtggcccgcgctgcctccgctctgccaggaacatgaac

SEQ ID NO: 331348 - DNA, 583 bp, Homo sapiens
  chr2:74726177-74726760
  hyper
cgcgattgccccgcctacaaggaacagagcaacaggtcgctcagttggcgacggtctgcccttttcccttggcactggcggccttccggagccgccgcggaacctagggactaacggaggagaggtgagaagtcgcaggtgcgagtcctggcacgtgggctgaggacaggggaggattagggtgggtggcctgggctgggacaaaggtttgagacggggaaccaggaggagagaggtgaggaaaaggctaagtcagagtccgcgaccttgccggctctataccttcagagggctgcagagcgcgcgcgtcaagtccgcggaaagttttactagtcagctcctccagcgcgcacagcggcgacgttggacccggacccgactctggaagctgcggcgcagagggtgctcgggggaccatgcgcggggctaggatgtctgcgatgcttaagagtgtccggggtgttcggggctcgcgtcccgagttcatggtcggccgggctggggcggtccggctgtccgttgcgctaggctccgcaaacgcctgggccccagtgctcggctcccaatccgggcccccagcctc

SEQ ID NO: 331349 - DNA, 1235 bp, Homo sapiens
  chr2:74729488-74730723
  hyper
cggattgccggcccggacattccactgaattctgtgaatgtgtagcagggttggaggaccctcggaataacccccttggggaggtggacaaggacaatctcagcgaagagcttgctcccctcctccccacccttaggaaacgtccgtgaaccggagtgagagggcagtgggagttcagggagcaaagtccaggcggaggagcgtgaggcggggcttccgtccgtcccgcacacttctgggattgttttctctttcagaaagcgctactgcggagtgaaccggtccttatatcttagtttcgtgactttgggggcggcaggcctgtgagttgttttccgccctggacgctgttttgcaaagatctctgcgcgcccaccgccaccctcccgggcgtgcgggccgggaagcagccagcggtgggaaactccgacgccctcctcgacacttttctccccccaactccccaagactcacttctagggaagtcctttttcccatcaagccctgggaaagactggccaggctgagagagggacccgtcctcctctgtgccaaaggcgggagcaaatcctggtgctgtcgcctttggatgtgagtcctggaaatggcgggggtgaggaaggtgggcaggggcaaggtttggccctcaggcgagaaccgacgccttgtcccggaagcgcagcacggccgagtgcgtccgggggtgcagacggcgccctggggtggtcctgccgccacctctcctttgactcaggagcgccgcgccgcgtccgggcgcgttctcagtcgcgcgaagccagagaggaccctgggcgtgattctccctccctggcacagacggagacccgagtgaccccggggtccgggtgggcgtggggaatggacccatagacccgggacgagcggcgcggagcccgcagctggccagcttcagccaccttgggagacgcagtgcagctgccgctgctgacagacaagaccaaggctcggctgggccccaccccagatccggcctgagcgccttccgcgctgctcggcctcaaggcgtgagtcaccaagggcaagtcccgtgacttggtcctcagggtctccggcctcggcacattaatcttcagacccggctttttcgacgccgagctgccgcccagccccaatggcagggccttccagggagtcccagtcagactgctccccagctcccgcagctgctcggtccctgcaaagcccccgggagc

SEQ ID NO: 331350 - DNA, 281 bp, Homo sapiens
  chr2:74740324-74740605
  hyper
cgttggtgcccacccgccaccgccaccgcaggatggtagaagcgcccccctctctgagcccagtctcaccggctcagaggcgccagggcccccccgggggccggggcgggccggggaaggtaatgtaattccggcccagctaacccgattaccgcggcctgcaccgggcagggcggcggcgggggcgggtctaaggctcaggggcccgcccgcgggggtcccatccccgggaaggacgcagagttcacgcactcccggctcctggattcatggccagaggt

SEQ ID NO: 331351 - DNA, 659 bp, Homo sapiens
  chr2:74740635-74741294
  hyper
cccacctcccttctctgacagctccaggccattttttgagtttgggtggggtaaaatgtttatgggaaacaaggcggccaggatccaaccaaggcctcagtgaggtcccacgtgtcccccgtggcgagatttcgccctcccgccgttgaggaggaagagtgtgagaacagacttcctaggcacagaatggaggggcagagtcctgcattgaggactccctgcacttggggtccgggggtaagtgccagccccaagaacccgccggcctgatttggcccgggttgagccatggtccgttttacacggattttggaaaatcgaaattctaggaaacacaggacaccaattaccggtgcgcatgaacagggctggggggacctacaggagaggccagaaggcgcaccacgatcgccagcccaaagcggccgttccccgcccttagcccctgccgtccccttcccacacctgttctcttcctgggcctgcagctcaccgggcgccgttccccagccgcttcttacgcagccgggaaaccacaacgagatttggtcttcgagagcatttaggcggggaccacaacgaatccgggagttggccagaaggatccatcgagaggcgaagagtgggggctgggggaggaggcacctgcggaggaagcc

SEQ ID NO: 331352 - DNA, 1488 bp, Homo sapiens
  chr2:74741301-74742789
  hyper
cggaggcagcccaaaggcggaggccgcccaaaggcggaggccagcaaggatggaggcgcggtgagcatctccgctgactcagcggcccatgctcgggcccctcccgcgctgagcctggctcctaacaccctggccccctgtccccctccccgcacatctccgccagccagccttccccctgcgcttggcgcaaacaggcgtcccttcccctttaactgctgggccccgcccctgccctacccccagcccccactacccacccgggccgatccgtcagtcactgccccagccggagctggccaaccctctccacccgggacttgggcagcggcgccggcagcccagcgtctatttgcgcttaagagccagcaaggaagctccaggggccccagctggccgtgctcccccgggatgcaagtccctgcgctgacgcccggcagcggctggcacgggcgcggctgctccgggtgcacagggatgctgctgtttcggggaccccggcgccctgccttggccagccccgcgggcccctgaggccactctccggagcgcgccgccgctgggcttctggcgctgcctgaggcatcctccccaaccaccgaacctccggcggttctcctcggcccagaccgatggagccggggatgctgggtccacacaacctcccacaccacgagccaatcagcttcggcatcgatcagatcctgagcggccccgaaaccccagggggcggtctaggcctgggtcgcgggggccagggtcatggggagaatggggcgttctcgggtggataccacggagcctcgggctacggtcccgccggctcacttgccccgctgcccggcagctccggagtgggcccaggcggcgtgatccgcgtccctgcgcaccgcccgctgcctgtgccgccgcccgctgggggggcgcctgcagtgcctgggccctcgggtttgggcggcgccggaggcctagcgggactcaccttcccctggatggacagcggccgccgctttgccaaggaccggctcacgggtgaggttgtctgacccctccagcgtcacgcccgactctgaccccgtctcctcatttcttagctttctgctccaactcaaggacccctttcacacctcccactagatcctcccaggggatcctcccccaactcaaatctctgggtcctgcctccgagaggtgatggggagggagctgccgtcggtgcccgcgccctcctctgtagtcccactgtccacgcgtggggaggggagggtgaagttacaggggacgtctccctcgcatcccaggggaagggcctttcttggctatagggctcggctgatgcttagggcccgggtaaggacagggcgcgggagttctgcggcctggacagccgcgcggccttctcagtggcacctcgggccaccctgcaaatcctgccctggtctttcttcctcccggtagctgcgctctcgcccttctctgggacgcgcc

SEQ ID NO: 331353 - DNA, 905 bp, Homo sapiens
  chr2:74742812-74743717
  hyper
cggacccctccgaagcggaagaagccgcgcacgtccttctcccgctcacaggtgctggagttggagcggcgcttcctgcgccagaagtacctggcctctgcggagagggcggcgctggccaaggccttgcgcatgaccgacgcacaggtcaaaacgtggttccagaaccgacgcaccaagtggcggtgaggcgcggcgcgggcgagggcggactggggttcccgagcagggcctggtgagaagcgacgcggcgggcgccccgctgaccccgcgtctccctcccttaggcgccagacggcggaggagcgcgaggccgagcggcaccgcgcgggccggctgctcctgcatctgcagcaggacgcgttgccacggccgctgcggccgccgctgcccccggaccctctctgcctgcacaactcgtcgctcttcgcgctgcagaacctgcagccctgggccgaggacaacaaagtggcttcagtgtccgggctcgcctcggtggtgtgagcgacgcccgtccgatcggcgtggagcgccgggcccggagcggtggagcgcgcggctgcctgcgtccatggtctagtggcagccgggcgcgtgaggagcggcaggccttgaggctgtcgtcgagggctcctccaccaccggccggctcccaagccagcgttgcgcagatgcacggccagctcagaggcggcctttcccgccatttttcacttcactgccgttacgccctcgctggaacctgaggcgccgagagggcgggacctgcaggacagtagccaatgaggtgcggggagggggccgggctggccaatgggagctgctttcctgagggactcgaaattctccggcgggtggtcgggagctggggctctgaggggctctagcggcgttgcgcgcggtgc

SEQ ID NO: 331354 - DNA, 786 bp, Homo sapiens
  chr2:74781700-74782486
  hyper
cggctaatccgggggtctccaccattccttctcgctcctctccctcaccccaccgcgacccccccagcggctgccggcgggggccggggaggggcggaaactcctccagggaacccggccccgcctcccgccccgcctcccgccgcagggccaggaagcgcggaaggaaccgccgggggccatggacggagcagtgatggaagggccgctttttttgcagagtcagcgctttgggaccaaggtagtctggcgcatggatgccgaaccttatccgggctagtagtgggtgagagagcccagaaacagggagaggtgggcagcgggctggagagcggcgccgggagttggagagcctgtgactttcccgtgaagttgctttgcacactcccgggaagcgtctgtagtctaggggttctggtcctggggagacggagtggcatcgtccttgggaaacttcgcccccaaccccgtttggaagccccagatcccaaatcgacttgcgccgcaacctccttccccgtcgggacccgggccgcctgcgcacgccactccctctcgagcactctctctctctccctagaggtggaggaagacctgggccgtgctctacccggccagtccccacggcgtagcgcggctcgagttctttgaccataaggggtcgagctctgggggtggccgagggagctcgcgccgcctggactgcaaagtgatccgtctggctgagtgtgtgagtgtggcccccgtcaccgtggagaccccccctgagcccggcgccactgcctt

SEQ ID NO: 331355 - DNA, 1884 bp, Homo sapiens
  chr2:75060920-75062804
  hyper
cgccccacaccccgggtccgcgatcacgctccccccacccatagccgagcctgacgcggcggtggctcatgcgcctttccgtcccagcctttagccacggaccacacgtcccatctcaggcgccccgcccctcccccgccccccgcccccggcgcgcctccccaggctgccggctccggtgtctgagcggccgcgcccgcgagccgtgagcgatgattggctgcgccacggcggcgggcggtccgtgggcgcacacaccctccccgcgcagccaatgggcgtgcgcacgtcactgatccggaggcccgcgggccggcagcccctcaataagccacattgttgcatgaaactccggcgcaggagtcccgggctgccgctggcaacatcgtgtcacccagctaagaaaatccgcgggcccgagccacgcgcctgtgaatcggagaggtcccactgcccgagtggagccgggctgagattcttctcaagttgagcctcagtgatcctgtggccgaagttagcgccttgacgtgggacaaccggacacgtcgccaggagagaactgaggcgccttctagcagttgtgacgccaaaatcacgtctccggagacccgcgccctccgccagccgggcgcaccctcgccggtagccttctttgtgcgccgtccggactcccagctcccggcccggcagccgagccccagcacaaagcagtcggaccgcgccgcccgcctcccctctcgcgtctccgcctcggtttcccaactctgcgccgtcgggccgcggcaggatgattgcctcgcatctgcttgcctacttcttcacggagctcaaccatgaccaagtgcagaaggtaagtcagcgcgggcggggcggcaggctgggctctggcaaagtggtctggcctccatcagtctcttcctcgaccctgcggggacccgcttcctccctactccgggcctgggagcggaaaaagtttgggcagccgggacactcctgggcgccaggagccacgtccgctaagcacagccggcgagtgcgcgcgggcggggagccgaggtcgcgctccgccgggcgccctccctccctgagctccggcacgcgctcacgctctctcccccagtccctttttccctgttactggaggggcgggtcaccccgcaggtagtcagggattgctgcgcccacgtgggagggagcccccttctgcagcgcgagttccggcgagagcacgtggagagaatcgtggctgcgggaggctgctccgctgccgcgtggggccgccgggggccgtccgcgctcgcggaccgcgtgtaggagacgagcggttcccttctccttccccgcggccctgcgggggtgggctcgaggagaagctgacccgggaaggagtaggaaaggggcagaggaactccgcccgccgcgccccctccccggaactgtggcgcccggaactgaggctcggcgaggggcgtcccccattaacccccgcccctccaaatcagcctcgggaccgcccagcctcgtgtcctcaggatctgcctctgagtaaggggaggactttggttgttactttctggtttgccctaaaagttactcggagaggccaacgcgccgcgttcctggattacttgagattcttgagatttatgtccttccgaaaacgagcttttttttccttaagcctcgacctgtctgttcccacctggctccgcagctccctatggctgagcgctcaccgcggccgggtcatttacataagaaagagcctcaggccaagccgggaagctctcattccccgcctcggggtatgggggtggggatggggccggggccggggacgggcagggccaggggcgcgctcagaattgagtttctgaaatgccc

SEQ ID NO: 331356 - DNA, 240 bp, Homo sapiens
  chr2:75146990-75147230
  hyper
gtttaatgaataaaacgatgaaaggacccgtcgcctcctaaatgcagatctcgagggagcctccaggtggcgctcgccgctcggagaagcagggagtcggtgcgccgcagctccggcaggcgtctgggaggtggtcgcctcctcacctgcccaggcggccgtcccccgggagcgggtggcggtgacctcaggactgacgcactgcctcctccgggcgggtgcgcagcctgcgtcaggggc

SEQ ID NO: 331357 - DNA, 681 bp, Homo sapiens
  chr2:75426248-75426929
  hyper
cgcctgcccgcggtggctctgaattcctccactttcaagcttcaggagacgtttgagttcagaagtctggagacagcatctctcttgcggtaaactgaaaaagggaaagaaattccaccggtcacagttctaggaagcaagagatcccccgcatttatgcacctgctgctgcctgcaactcctatttctccttcctccgcagggaaaggcaaagccctgtgctgcgtgaggacttaggagcgaagtgggggcccattgcagcgcgacctgtaaaagttctgagcctatggccaggattctggagcttcgtatccagctggagatttttccttctcttttgctgccgctgccgccgcctgcagtttcgcgggcacctctcggttcgggttgctcagctcgcgagttagctgcgcacgaggcttttataaccccctgcagagacgtcactgggaaggggcagtacctgggctgcgtactcgccagtcccggtgcgcagcgcggcagctgcgccagctgttgacaactgtctcattccaccgccgcagctaccacgccttttgctgcttgctacttgccgtgggagtctgcgagccgggagccccacgcactccgcgagggggcagtaggtggcttggaagtaactgacacagatgcggtccgcagctggaatcgtcgttgcac

SEQ ID NO: 331358 - DNA, 736 bp, Homo sapiens
  chr2:79739586-79740322
  hyper
cgcggcagtcactacctttgcagcactctggccctgccctcctcctgccacgtgtcggacccctgctgggctggccctcctttcctactctgcgacacccctatcccccccgcccctatcctgcccgctcccgcacccggtccctctccccgggcctcgcgactccggcgattcagctccgggtccccgcccgcagggtaacgcggttgtcatggacacggcacctgcgccctacggcggtgccccttcgccgccgtcccctccccccacctgcggcgccgagcctgccgcgcctccagagctccgccctaccccgccccgccctttcgggcgctccccaggccgcgcgcgcccgcggccccccacccagccacccctcgatgcccggtgcctttccaggcgccgcggagccacggggaccgcgggggcgcgcgagcgagcaagcggccgcgcatgcgcactggctgcctcccctagcggcgatccgggccgctgccgctcgcgcttgggcaggacgcggggcgggcggggggaggggggagcggcttcgcttccagccccgagtgaggcggagacccaggcgggcgggcagagcaggcggcaccgcacctcggccagaggcggctgcagcagctgctgcccttgtccctgccgccgcctctccagtcccttctgtgattaccactccagctgctgggaacgggcgagaaagaggaggaggcgagaaactcccacc

SEQ ID NO: 331359 - DNA, 960 bp, Homo sapiens
  chr2:80530603-80531563
  hyper
cggcgcagtttctgaaaggcgtccccctgcacggagcagatgtgattgtgatccagatagagccacgtgagctgcattaaccccgtgaactggccggcgcgcagctccgagaggctgttgtagcgcagggacaagcccagcaggccggacaggttgtggggcgcctcggtgaggttgagcgcctcgcagtacagcagccgcccctcgcaccggcacagctgcgggcacccgctgggggcggcgggcagcatctgaaagcaggcccccagcagacacaagaccacccccgagggcctcctcagcagccagtatagacagagaccgagcagcaggaaatccattagcgagaatctttccagagagactggagaatgtccattggaagcgctcggtcagaaatctacatcatattttattccgagggaggggaagcgggggagggggagaaaagggcaaaaaatcaaataaatacatagaaataaagaaggacccccctccccaaaaaccacacgttcacctctaagcatgcagaaagctgggcagcatagaaagttcacagccacggaaagatcaaagagatggtgatttggtccatgttagatgctgcagcaaagaaaagggaggaaaaaaaaaatcttcgggaaagaatttaattaaaaagtgtcttacccacccttttccagagagtgacaacctccattcagctgctccctttgtgtgcaggctaattatatgcagggcgagagaagacccctctgtgtttccgaggcagccccggtccgcggccggcggatctggcaggcgcacaatgtctcactttgctgctcggctcggggctgcaagggcggccggcaaggcggggaggcgacttctaggacccgcaagtttcccaactacgtgccggagcccgagcttcgccttcctgccgccttcctttccctctgcagttcggactgtgac

SEQ ID NO: 331360 - DNA, 298 bp, Homo sapiens
  chr2:80549613-80549911
  hyper
ttcccttgcttgggcggctacgctccccgcggggctgcctgcagcccccgggcccttgcagctccgggacggcgcgcggcggcggaggccgcggggccccaagcgccagcctggccccggcgcagatgcgctgccccggccgcagcccagccgccgcgtgtgttgtcaggacgatcggaaacgcgtgtgtggggagatgggtgccagtgtcgccttgtccattatccaaaacccagtcgcttttgctggttcctcactcagcatgtgagagagattgtcttctcactcggtgccactc

SEQ ID NO: 331361 - DNA, 839 bp, Homo sapiens
  chr2:85360795-85361634
  hyper
cgcggccccaccatgccccagctcggcggcgggggcggcggcggcggcggcggcagcgggggaggcggcggctccagcgccggggcggccggcggaggggacgacctcggggcgaacgacgagctgatccccttccaggacgaggggggcgaggagcaggagccgagcagcgatagcgcctcggcgcagcgggacctagacgaggtcaagtcgtccctggtcaacgagtcggagaaccagagcagcagctcggactcggaggtaaggaagcaccgcggccacccccgggggatcccggccctgcgtccgctcacccgctcttgcctttgtgtctcctccgcaggcggagaggcgcccgcagcccgtccgggacactttccagaagccgcgggactatttcgccgaaggtatgtgcccgctgggacagccccccactctcgattcccgctgcgctccgctgctcagcccgggcggcccaccgtcccccttgcttgggtggacgcacccttgccctccgcctttattggcggcagcccccgtggggcgcgcgtggggggcgctggggtccccagctcccgcctcgagccccctgccgcggcgctgtcagtcccgggggcctgggcctcacctcgccttggtcttgttcgcagtgagaaggcctcaggacagcgcgttctttaaaggacccccgtaccctgggtaccccttcctgatgatcccggacctgagcagcccgtacctctccaacggacccctgtctcccggaggagcgcgcaccgtgagtgcccgtcgggcgcgccggggagggtgggaggccgcggcccgcaggatgcgccccc

SEQ ID NO: 331362 - DNA, 1054 bp, Homo sapiens
  chr2:87017505-87018559
  hyper
cgagcagaaatagtagccctcgttctctcggcggaagtcgctcagggtgaggacgaaggtgtcccccaacctcttgcccgagaaccgctgggtgtccagcccctcggccgccttgggcttgttttgggagaggtataggaggaaggtgggactggcggcggcgccgcgcggctggaagagccacgagcagcccgacgtcgggttggacagcagcacctggcacttcagctccactgtctcgcccaggttccaggtccgatccagcggcgacacccggaactggctcggcctggcggcgtctgcaggcggcaagcagcgaggctgagcccgcagtcccgcgccccccgccccccgcccgccccatcccctgccttcccgggcgtctcaaactcacggagcagcaaggccagcggcaggagcaaggcggtcactggtaaggccatgacgcgctccccaggacgctgcttggctcgaagctcgggcgcgaggggaggcgcgcgggagccggtggggcgccgaggggggaaagttgcgcccttcggccggcccggagcctgatttcgcatttggaggatgtgatgtcacccgaagcccccgccgaggagagtcaccctccttttcgcggttgtcgccttccagcccggcgaggaggctggggcccgtgaatagggccgtcgaggcagcctggccaggcaactgggggcagctgaaaactgcgggtttggggatgaggaaaagggcttggaaatagtccttggaaatggttgtcttgtgagagtgacagagtgggtgaagggagaccaaagatttcaagaagtgagggcgagagtaggcagcaaaggaggggagtgtcccttcctttgccttcactaaaggcgtctcttgtactgtcaccttgggactttttattggcaaaatgggcactgagggctgaaaaggaagaggaactagcgacctgcccgcttctgaggaactcgctagagcagccccagttttcaccgaggaaggaccctctcccttcccccaggagatttccatgagagcggcagcagcc

SEQ ID NO: 331363 - DNA, 727 bp, Homo sapiens
  chr2:87034584-87035311
  hyper
cggtgcttccccacgctgctgtgcaatggataggagctatgtgaagctggcgtatgggtggggtttgcaggcttcgtccggcttcatcgccggctgctgacccggcaccaattcctgttctgcaggtctcaccgcagaggggcacgccagccatgaggacagatgagggaacacgtgatgccacgatgggggtgccaggatgaggtgggtgcggtcgcggacaggcgcacgaggagcccagcggagcgccacccggagcaggcgcggaggagggctggggagggccaccaaggcgacgagagccggtgtgcctgaatcagcctaaaggagacggaggaggagtgtggtgggcgcaggggcagggagctgggggaagggcggggggctagcccaggctgaaggcaggcaggagcagggccgcgatgtcagacaagaaacggcagcagtgtgtttgggaacctagcaccaaccgcaccggtggagacagggtctgctgtagaggaggtggggccgggtcccagctaagtaaggcggtggatcttgcagcccttccatcctcagccgctcattctgcgcaaatctcggggccagccttggtggagccgtaaagcgtccaccagaacctggatccctccgccacctttcccatgaattcacctttctgtacacagcaagcgcctgagcggagacggccgacacgtttcccactgttaccccaggaaaccgc

SEQ ID NO: 331364 - DNA, 333 bp, Homo sapiens; identical to SEQ ID NO: 228497
  chr2:87088802-87089135
  hyper

SEQ ID NO: 331365 - DNA, 895 bp, Homo sapiens
  chr2:88315911-88316806
  hyper
cgatgcgtagactagatagagtaaactcttactccaactccccgttccaaaactgcgtttaatatagcgttcatcaaacagaagaacataccagatattaaactgataagaacacacactacactcaatcattaaccaaacagcaaaaaagagataccagttacccggggcctcccacgtcctcccttctttcatccaccttaaggtcacggtgagaaacctcaccttcggtaaacatctcacctgctttctgatgtaaatattatattgaaaacataggccctttgagacattttgtccgctccttgactcttagtgacttcgagctttgtcgccccttttccttggtcgcgagggccgttcatttgcatgtcccacccgctctgcgcccgggaggcgtggccaccaaggggccgggccctgcacagcgccctggggaagctggtttgaaagctctggagcgaccccaatgccgggtaaaggacaagatttgcccagacggaagggaatttggggtgaagtggccgtaaaagtgtgggacgaaactgtttcgggcagagcggtgggaactcacctgaggaaagcatgggggaggagtcactaataagaatgagtggcagggacagggcggccttgtaacgccctcggtgttggaagggaagaccgtacagcgcgatggggaccagggcggcgggccgcagccagggtgtgggtgggcgacggtcaaggtgccttgaagcggattctgtcctcgggagctgcggttcttcctcctccgccctcaccggcgggcgaccttaggcagggcgtgaaatgcaacgggagccctggagggagggtgaagccgcgcgtgcaggaggaacctccttttggcgagttcaggccccgcagctgc

SEQ ID NO: 331366 - DNA, 1736 bp, Homo sapiens
  chr2:88751286-88753022
  hyper
cgctcccacccgcagcctggacaagaagactcctggcagatcttccagccgcacaccgacccctgcgccggcccttgcgacccgcgtccgccctccccggctgggaagcacctgccagcggccctcacctgggtcgtcctcgtcgcggggcaccttcttgaagcagtcgttgagcgacaggttgtggcggatggagttctgccagccggccttgctgcgctggtagaaggggaagctatcggcgacgaactggtagatgtggctgagagtgagtttgcgctcgggcgcgctctgaatggccatggcgatgagcgccgaatacgagtagggcggccgcaccatcttcatcaggtcctcgcggctggccatggacagccagcccagctccccgggccccgcgggcgcggcgggcgaggcgggcgcggcgggcgcgggctgcgcgaagggccgctgagagcagccgaagtgccggcggcaggcggtggctgcagaaagggcccggccgcggccccggggggcggcggcggcggcggagcgcccaggtacgcggcggcggctgcggcggcggcggagggcgggcctcccacgccgggcccgttgagccacaggtaggggttggcggcggcggccggcggcgcggcgtagtcggccagcccgtaaggcgccctggctgccgggggggcgcccggggcggcggcggtggcggcgggcgggggcaggccgggctgcgaatacactccgaagttgtcgccgcagtagagggccatgtcggcggccgtgggcggctgcggcgcggccgcggcgaggggcgagcggggctggtctcgccgctcgggcgagagcatccctttgggggccaaccctgcggctccgccttcacccgcgctgggcgcccggtgctccgggccggggtcgggcgggtgctagcggagcgcctgctagccggcctcttataaccgagcccggcgcggctcctcctgggccggcccggagcggggcggtggccgcgggcctgggctctccacgcccccgccacgccccacctgcccgcgcgcccaaacccggagcccgcccgccccgcccctaccgcccctctgcccgggcccgggagcgtctgggaggccggcgcctccaggtttcgggcaaaaagcagcaccccattcctagcccacgtttcttaacatcataataagtaaagccacgaatattaaagagaagataacccgaacagtacgaatgatttctaaaaagttaacttggggtggccgctcgggccacctgcctagtcatccttttggcttttctacctctttcctcctaaccttttgtgatcgagtcgcggaattcacgtccagtctcaaccgatcggcttccagtcgaaaataatcgatgtgatttacaacgctttggggtatacggtagaggttattaacaggcccgcttggcgtgtccccttctcctcggggattctgtgattggaggaacggaaatcagtgttgagtttttctaaccaaactgtaggttcgctcacattcgggaagcatttattcgttttctgtgcggtttgtacgggctttcgttgtgatttgttatcttcaaaaacataaaggtgaatgttttcaaagacatttaaataagtaccttcggaattagcattttaaacccgaaagtttcaaagttttaagtaatttaaactgtgcaagaagcgctcatttacaaaaacagcctcatctaac

SEQ ID NO: 331367 - DNA, 747 bp, Homo sapiens
  chr2:89064675-89065422
  hyper
ctgcagccgccaccagcacacggaccaggggtcgccgaggattgggaatccccgaccaggactgcgcctccagccgtgcggaccccggggccagcggggcagcggcaagtcaggcagtctgcagcaggagcgctgggcatgggcttcggcccgggttgcaggaggcgtgcaccctccggccggataggcggcgcactcagggaccaggaggccatcccaggtgagccccgccagccccagccggagcccgagctgcagctgccacctgcaagtggtgctctggctgcagcggtggcaaccccggatccagtccttccgcctcgcgcccatcagcgcggacccgggggcgacgcagtggcgaagtcgggctgtgggcccggcggcggcaccaggcggagaagcgccactcaaccccatccctgggctgcagagggcccagcgcggagggctccgcgcgtcgggagccggtggaagaggagaagagcgcgcgggcgacagtcatacaggccttggggcagggcgcgcctcgcgctccagggagccacgccagcccgctgcgcctccgcagcaaccgccgcctgcacgtggcggggcgagagagctgctagggcggtttctccgcctcgggcctgttgggcggggccggctaaggtgcgcgtgctcgctggtcctaacggttctgttgggcgtttctgctgagaggcgggaggggctgagagtctgtgcgaaggtaggtggacagactgc

SEQ ID NO: 331368 - DNA, 392 bp, Homo sapiens; identical to SEQ ID NO: 228505
  chr2:91635028-91635420
  hyper

SEQ ID NO: 331369 - DNA, 138 bp, Homo sapiens
  chr2:91635540-91635678
  hyper
cggctttttgcccccgccgtcgcggctttttgcccccaatgctgcggctttttacggctttttgtgcccatcaccgtagctttttgcctccgccaccacagctttttgcctccgccaccgcggctttttgaccccgcc

SEQ ID NO: 331370 - DNA, 151 bp, Homo sapiens
  chr2:95664007-95664158
  hyper
gggagggcggccctcggtggggtcgactgggcggagccgccgcctcctatcttcccttgaaggcacctgcgcagggggacccgcggtgcctgggaggggagggggactttcgcatgaagcccctccttgtcagtccggtcaccgcgcgccc

SEQ ID NO: 331371 - DNA, 1248 bp, Homo sapiens
  chr2:95690867-95692115
  hyper
caagcagagaggcccggtgcaggatcccagcgccgaaccagcgccggctcagtggacgcggaaggggccggcggccgcggccggtcccatcccccactgcagacccccagcctgtggcggtggtccagttccgccaggaaaccgccgcctggagctgtgggtcgcgcacattaacgcatccagcggaaaaatgaaggagacccaaattcaaagttaaagtaatggtgacccgagaggtgccttgatgagaaggtttggggtcccggttactgatggttatcattcttacgagatgctggtcacctacgaagggagaaaggcacgaggagcgcctgaccaaagtggttttgccctgcttcccgcaagaggtggcacccacggctggaacgcaggagtcagacccacagtccccagctctggacgcccgcagcggggcctcgaagaggttcagggcggtgcccgcggcgctcgggccgggtctcccggggcgtggggcggggggcggggttgggcggcggccggggctcctccctcttctgccccgggctcccctgctcttaacccgcgcgcgggggcgcccaggccactgggctccgcggagccagcgagaggtctgcgcggagtctgagcggcgctcgtcccgtcccaaggccgacgccagcacgccgtcatggcccccgcagcggcgacggggggcagcaccctgcccagtggcttctcggtcttcaccaccttgcccgacttgctcttcatctttgagtttgtgagtggctcctggccggggaagggacggggtgggctgagccgtgcgctctctcgggcgcccagcacagctgtcggacgggatccgctagctgcgcaggttctgggagcatcggggcagcaggcgcagggcggggactaagccagggaagtcccctcccacctccggtcctttgtgcccttctagaccaacagaatgaggggaacagtctacaggactatggaggaaaaactgggttcccaactggggtcagatgtaggcagcggggcagggggggacggctcttggttcgctggtcccaaagctgcgcgcggggcccacttgacgcgcgcagcgccaccgaagctcccgccgcgctttgcgcggttgggtagaagtgcgcagcttttacaagggagaaggtttcgttaaaaaagaaaaaaaaatcagcaagagaaacattagtattaccaaccgagatttggagatgagagggagctgaatcc

SEQ ID NO: 331372 - DNA, 1410 bp, Homo sapiens
  chr2:96011320-96012730
  hyper
cgcgcttataggcgtggagcggagctggatttctcccttggctaacacagcgggaaggatgaggtgcgggccgtagccgcgctgccgcgctgagtccgtccggcggggatgcccacagtgcgccgcgcccgctggagggcagcagagggccaggctcccggctcaggtctccggcctcgcggctccaaggaccccgggctccgcccggccacgcctcgtcctcccctattttctccttccttttcgcggctttccctcctctaccagacccggcaggaagaaagccacccacaaacgaataagcatgcccttgccctgcccgtgcgtggcactccgcatccgcttagctcttccccgccgcccgaaggcgggcgtctccccctctctgcggagcaggcggcggcggctgcgagtccgtgactcgaccaaggtcacgcagcaaagtcagcgaccaagctctgttccgcagacgccagggccaaagcccacactttccctaaagccccgagtgcacgcgcgtttccagaacgggagaactttggagaccaacttctgcattttcaaagggggccagcctgggcccagtttaatctccggcggaggaccggggttgcgggaaatgcgccggggagtgagggcttcccggatcccccgccgccgactccgcgcgggccagcggcgcggggcgggccgggatcagcgcctccccgggagagcgcagccgccgccccctcctctcgggctcccggcccctccccagcccctcggcccccatcctgcgcgtgggagaaaccgccgaccgcgcggcctccaggggctggcggagcagcggtggcgacgcgccagactccgtcctgggctggcccgtgccgggcggggcggggccggctccctccgcccttcccgggcaggcgcgggggggccgcagggacgcctcccggagtggccgccgcgcctaggccaatgagcgcgcggggagcggcgatggaggctggggcggccgggagcgcccgggacccccgccgccgcgccgccgccgccgcgcccccgcgccccggcgcccgcggggctggagagggggcgacagaggcgcagcgcccgcgccgggcatggaggcgccgctggcccgcgctggccgtccgcgctgcgtttcgcgccgccgccgccgccgcgcctcgaagtttgccggctgactcggaaagttgcgctcgggctcggccgccgcgtccggtccccgcgtccagcctccggcctgacccgctcgccgccgccgccgccctccacggggccccggcccagccaacccagcagccccgcctgccgggggcatgtgagccgtcgccgcccccgagaggccgtgcgggctgcaggggccccggtgcctccgaggcagcgcgtgggcgaggggtg

SEQ ID NO: 331373 - DNA, 563 bp, Homo sapiens
  chr2:96192254-96192817
  hyper
cgccgctccccgagaggccgcaaaagcccgagggctccaagaactgcctgcagaggctcagggactgcgagctgtccgcgctgacgccgcgctccatgcggggcccagaggaccggggcgccctggaccacatggtcaggatgaccacgagcctctaacagccccgccggggccctcgcgtgccagactatgtgccccgagagcaccttgtgctgggggaagaggcggctggcggtgcaggaaatcctggcggcgcaggaaattccggcggcgcggcgaggggtggggggaggcaggcgcaggaggcgggcgaagaggagggcgcagagtagcataagccgctcggcctagcggccgctggctccacaaaggcctccccaagagccggcctcccacctgcccggctgccggggtcctggggctccgccgcccccgccccgcggacggccagcctcctgcccctgcagtgcctgcagcagagcagcttggggcccagcgtggtggtgcccaggtccgcctcagcaaggtgcccgcgcccaccttccaacccaaaaggccggcgc

SEQ ID NO: 331374 - DNA, 486 bp, Homo sapiens
  chr2:96990889-96991375
  hyper
cgagcagcggagagtgtgtggccacggcccctccactctcccagcaaacccacgggggcctcggtgcggacagagacccggtgtggggaggccgctgcccctgcacgctgggccacgggggtttgggcggggaggagcttgtactgggtgggcggggaggagcccggacggcgggagcggctgcggcgcgcgggcgccctcggagccgcgtgctgggggtcgtaggggcccaccgcgctcagccagacgttcagacgctcggacaagcatggtctataacccaggaaaggggagcagggccactcccgcgggcggccccagcgatgaaccggacgcccccaccctgccgggaaaaaagcagtggcggtcaggccgcgctgtctctttaagatcgtgttcctactaacactgacggtgagtaacctggccctgggtcccgggagacatcccgaggtaggatgggcccttggcctcctacggataggc

SEQ ID NO: 331375 - DNA, 187 bp, Homo sapiens
  chr2:97073215-97073402
  hyper
cgttctcaccaaatacaggcacttcctctgagaggacggcagagggcgcagatttagcttctgtcctgcgaatgaagcacgcagtacaaggttccaaactgcaagtcaacagcaagcacgaagcagccacactggaaatggggtgcctccatcgcctggggctgtgggctgccatcctctgccaagc

SEQ ID NO: 331376 - DNA, 608 bp, Homo sapiens
  chr2:97193030-97193638
  hyper
cgggagggacacgacggtccggcagcagagcctgcggggctggaggaggcgccctcctctcagctgctcttcctgcccctttcggtggcgaagatggatggggcccggggctttcggcggggcccgaggggccggcgaggctgcggccctggagccccctgcctggcagccatttgggccccagggaaatatcggcgctttggctaaccgaattattctttcggtttgagccagctcccctttttgagtcagatccggcggcagggccagaaaagcgctttctgaaaccccagcgcggtcctcggtgggggtggaatggggtggggtggggggcgcggccgcgccgctgggcgccctccccgccctcccccctccccacccccagtcctccctccgctgcccgccccccaagcccggtgtcgccccctccgccccctgccgcatccccggagccagtgcccacaggggccaggcagcccgcaggggtcgctcacggctggtgtaggggcttggtccaccacgctagtacttcgggcaccaaaatagaaaaagaataacgcttggaaagaatctgatgtttccgaaggagcatcgaaaatcgccgttac

SEQ ID NO: 331377 - DNA, 248 bp, Homo sapiens
  chr2:97203334-97203582
  hyper
cggtctgcagaagggacggggtggcggctggggagcgtcaggggaagagggcaagagcgtgggctacgagcttgcaggcgatgcccggcttcgcgctcggcgggagctgcgggccaacccgggcccgcgctccgtccctccgcggtgtctaggggtcgcccgggctggggtcgcgtcaccctccgcccagcgccggcgtggtggggcttgcgcggtgcaggacccccgagggcccagggggtcccaag

SEQ ID NO: 331378 - DNA, 791 bp, Homo sapiens
  chr2:98703022-98703813
  hyper
cgcccacgtccagtggctgagctacaacgaactgccccacctcttttaaagcgtctttctctgaactgtgcaaggaagagagcatcgcctgacagtggtgaggtgaaaattaaaactacacaggggtcaatgctctgctgaaaagtatgaaaagaagttcgtttgtagcgtttcccgcagtctcctcgcctctcctcggcctctggcgccttcctcccctgtctgctcgcaccctatatttctaccccagctcatcagtgtatttgtttgttaattcattcattctttcattcatattctccgctgttgttaattttcccattgacagtaggcgcaaggggcaacgccactcgccctgtccctctagcgtggcctctgtttgggggtctggggtggaggtcgtcccggcccgggtggttccggacgccggctttccgcacctggctcggtgacggcctcggcgccccgccctcttggccacggtccgcagccatcgccccagtgagggcgcggtctgtgggcggggccggctccaggagccgcgctgtgattggccgtgtccaggcaaccgcggagacgccgtcgtcaacagaccgcgctcggaaccagaggcgcgggtcacagagacctagaacagctggaatccttcgcccccggcgcgcagccttcgcccgccggaatcgctgccttatccaccagcgggatgcttacctcgcccgccctctcgggtcaggcgggcccgggaggatgggagggtggctgctgagcgggagccgccacgtcttccaccc

SEQ ID NO: 331379 - DNA, 944 bp, Homo sapiens
  chr2:98963040-98963984
  hyper
cgccgggaggtgtgctggggccgcagaccccatacaggaggtaagttagagaaccacacgcaggggagggatgctgctgcttccaggggcgggcgcggcgctgtccgcagcccccggtgctgaaacgggccgcgggctggagagaaagtgaaaaaggatcggctacggcctcggctcccactccccggctcccatacccctccagtccagttcaaaggacaggaagccctccccgtgctccccaagccgatcgcacccccttttactcacgtcccacagccgcgctgggccgagcccgctgagccgtcggggcgggaggcagaaggagcagggctggctcccgctggggacgggtagggcttgcagccgcgaccccaccccatacatttcctcctgtcacgctgtccccggaccgccagtccgggaaggacccacttccccggctccaagtcgggagcgggcgccgcgtcttctcgagtccgcgccgcgccgggggaggttgagtcagtggcctggagggagcagggccgggggaaggcagcggcgaaggactgccccccaacccaggggactattttcccttggggattcaaagagaaaggtaggctgaggaggaggcgagaattaaaattcttttaggagtgcgcggttactttttttaatgataaaatcacacccgggatctcggacgcccggggcttagtgctcggtgatggaggagaaggggcggcgggctctctgatcctctgcaatcccctaaccggataaaggcgccgggctcccagccgtcaggcttttctctttagctcagcccgcggcccctcccgacgcccctgggggccttggcgcgcaggccctcgcagtcccgcaaccccgggccgggtgattcatttttctccctgtgtaatctccctactgagcggcgcagctgggactttaacttc

SEQ ID NO: 331380 - DNA, 387 bp, Homo sapiens
  chr2:99346431-99346818
  hyper
ttttcgggtttacacgtgtgggttaaagaaatctatgtcaagataacctgttcatcaaactgttttttaaacattcagaaaaagaaacataaaccacaaaacgcatatttttattctaaatttacagtctacgttccaacgaacgactgtcattatcttttatcaaataatctgtccaacagcaaaagcacaacagcaaaatacgtggaaagcattcaaagcatacattgtgcctgcttctattttccaatgcggaatgtaggcaatgaaaccgctccagagaaacacactgttgcgaggaataaaggcgggtgtgcaagtggctcgactgccagctcagaaaagctcgcctccgagatgtcacctggcacacttggtggagtcacc

SEQ ID NO: 331381 - DNA, 659 bp, Homo sapiens; identical to SEQ ID NO: 228546
  chr2:99438951-99439610
  hyper

SEQ ID NO: 331382 - DNA, 1383 bp, Homo sapiens
  chr2:100937779-100939162
  hyper
cgaaagcccaaagcctcgggcccaccggccagctccccaccccgctgctgggccggacaggtgtaggggaggcggacccgccccgcagccgactcacccagctccagggcctggtcgcacctgagcagcgcggcctccggctgctgctggcgctgcaggctccgcgcctggcctgccagcctgcgcagccggcactcggccgggaagcacttctccagcaggccgctcagcaccacgttcacgcgccgcacctgcggccgcgcgggccctggctccacgcagcgcttgcagactgtgagcccgcagggcagcgtcaccggcttatgcagcagccgccggcagcgcgggcagccgagcaggtcgcggggcgcgcggggctccggggccggccctccctcgccgggcgcctcgggctcgccgcccgggttctccgcggacagcggccggtcgcgcaggcccacggcgcgcaccaggccgcccgccagctcttccagctcctccggccgcagcgccccgagccgcgcggcgccgcggaacgcgcccagggcttcggggaggcggccggcgcgggccagcgcgtcccccagcctcaggcacaggccgcggtccggctgcgccagcccggctagcatggagcgaaagagctcggctgccatctcgtagtcgcccgcgcggaaggcctcgtcgccctcctctaagcgctgggcgatcggctccgcgcggtcgcagccaggacactggggcggcggcggcggcgggaccggctcggggctcatcaccgcggggctgcgacgacgcgggtccggagcgaaggcgcggagcagggaggatgcgctgctgctgggaactggccggcgggagcgcggtctcagccctcgccagcagccacgcgcgtctgggggcggcgcgctgcgagcggctgagaccgcgggcgggggcgggcgcctggcttgggcagcgtcctcagcgcggtgtgggcggcgagccccgcagggctgcaatcgttccggggtgggggccgggacaggcaccgcgggcgcaatctgagcccctgcccacgcgcagcggcctctcagtcccgccggcttaggtaacccaggtcgctgcggtaacgcagtgaccgcgctccaggtccgcgtctcttgcgatgcttcccccactcgcctgagggctcctgcgcgactgcgcgcgcgtcctctgcctgccgcctccccgcagaggtgccggggccctgggagcaggtggccttggccgcgggctgctggcgcgccggcaccgcggcacctgctcttccccagaggcctggccgcccccacaacctgtggctccgcttaagcaagaacccaggaaaagtcaccaaacgcatcacgcatctctagcttc

SEQ ID NO: 331383 - DNA, 850 bp, Homo sapiens
  chr2:101033445-101034295
  hyper
cgcaccgaagctgcacatgctccttcttccctgccttcctctgcatgctccttggacccaagctgaaccctttcttcctctctccatctacaattacaaacgcaaattctcagccaaggatgaaagaagtaaattgtaggctcgcacaatatcaataattccgcgggtcacagcatcccgcacaaggacgccttcttattgcataattaacgcgaggaaggctcttcccgctactcccgcgaactagggaggtcttcaagtcgccaaaacacaccgggatgtggctcgccaggacaaaacccgcgggttccccggtttttccgtgcgccccgcggcggggagaggggcccaggcgctgaaacccacccgcctgcgcgtccccgagctcaccctactggagcggcgctcgtccgggtccttaggctcctcccctggccctgggggcgccgcgcgggtcgggcttcgccgggcctgtgggcgaagcgcgcggggtcctgggagctcgggaggcccgccccaccttgccccgaggcctccgcgccgcggcccgtcgggtcccgggatgtggcggcggcggcagcggaagtaaggaagacgcccggcgcgctagaccggctttgggggccagaacgccggcaccgcctcacgcggccccctcgcgcctatccggccgtgcgcgccgcctgcccgcgcgcgtccccgccgccgtccccggccgtgcgcgttccagcgggtcgcggggagtggggaggggcgcggccgcgggaccccaggcccggatcccgagtctccctttctgccgctgcaaaagcgttctttctgaccgagacctgcggccggaacaagtccc

SEQ ID NO: 331384 - DNA, 1320 bp, Homo sapiens; identical to SEQ ID NO: 228555
  chr2:101435066-101436386
  hyper

SEQ ID NO: 331385 - DNA, 1021 bp, Homo sapiens; identical to SEQ ID NO: 228556
  chr2:101436606-101437627
  hyper

SEQ ID NO: 331386 - DNA, 797 bp, Homo sapiens
  chr2:102090423-102091220
  hyper
gaagtcacagatgggaagcccggccccatcgccgattcgggcccggggcttttacgcgtgtgcgtgcatggcaggtccctccgcgctgcggcgggcgagcatcagaaagcgctgggcctggggccgctcctcacacccggctttgacccggcgtcccgagggcagccgtagcgggaaccacgcttcccctccccggccccacctcctccatcccagcgtcccaggcgcctggcggctcaccactggatgacgccgctgtgcgggccccggctaccctcgccgctcgacggcgaggccggcaccccctcggccatggctcggccccgggcctgcagcaccgaggcaggcagcgagcggcggccgtgggcggcgctgggttgcaccggtcctgctaccgccgctcctcggtgtttactttagaaaggagcgcgcggggggcgcgcggggcgcggggcgggagcccagtcctccaggcccgagcccgggggcgcggaaggcgcgcggcgagtacgggaggccacagctccccaacccccgcgccccgccgaggatgcgcggaccccgccctgcatcctgcggtgtgggctggagctgcctcccgctctcacccagcgcccttcccaccggcgtagcaaccagtcaaacagggacgcgaacaacaagcaccaacttacaccttttccaatctggtcgcggtgttgagtccgtgggtgtccttgacttgcttgagcgttggagttattcaggcagttttcaaaaatattgataccccggctgccgctccccatcccagcccc

SEQ ID NO: 331387 - DNA, 519 bp, Homo sapiens
  chr2:102758965-102759484
  hyper
cgggccgcgactcgagagcgcccggcagctctccaatgctttggaaccggcgggacccctgcgggctacccggggcagggcggtgtccgcaggggtctgtccagccgcgcctgctcctccgggtggagagttgggacacccggccagctcgctcgcagcccgcggactggcccagccgagccgtctccgcccgttccccgcccccgcagcggcggggctagagccagagccgcgcccggcagttcccggccgcgagggcgggcgcagcttgtggccggcggccggagccgactcggagcgcgcggcgccggccgggaggagccggagagcggccgggccgggcggtgggggcgccggcctgccccgcgcgccccagggagcggcaggaatgtgacaatcgcgcgcccgcgcaccgaagcactcctcgctcggctcctagggctctcgcccctctgagctgagccgggttccgcccggggctgggatcccatcaccctccacggccgtccgtccaggtac

SEQ ID NO: 331388 - DNA, 57 bp, Homo sapiens
  chr2:102972750-102972807
  hyper
cggagatcgctgcttctcacctactttctgaacttggcctccgcagtcgcgacctgg

SEQ ID NO: 331389 - DNA, 875 bp, Homo sapiens
  chr2:103235763-103236638
  hyper
cgcccgttgcggcgattccacccacagttcgctggctctgggggtggcgggtcttggcgcgcggtgcctgcgcgaagggagggcagccatcgcccccgcggtcactggggccccgcgttccccgcgggctcgggcaggtgcgcggtgtgccggccaggtccccttgtcctcctgccctgcggcttgggcgccgcgcccgccccgcccccgcccgcgggccgccctgggcagggcctgccgctgcggctggagagcagcgcaccggcatgggcaggcggccggcggcggagggcggctgagggctgctgagggtacgcgcagcggcctctcgtcgccctgcacgtgcctcgccaggcagtgcgcctgctcgcagcgaggacctagccctctggttgcagagacccggtgccgcagcagcggcgggtggctgtcgctgccctgccctgcacggggcagggcggagcgggctgagcagcccgggcgcgatgcgttgagcgctcggagggccaaccgccggtccccttggcggcaaccggcggcacccatggaaccactgggcaactggaggagcctgcgggcgccactgcctccgatgctgttgctgctgctcctgcaggtggcggggcccgtgggcgccctggcggagaccttgctgaacgcgccgagggccatgggcaccagttccagcccgcctagccctgcgagcgtggtggctcccggaacgacgctgttcgaggagagccggctgcctgtgtttacgctggattacccccacgtgcagatccccttcgagatcaccctttggatcctgctggcctccctggccaagattggtgagcgaactggacttgtggggaatgggagggggcgatctc

SEQ ID NO: 331390 - DNA, 1258 bp, Homo sapiens
  chr2:105458975-105460233
  hyper
aagagggagatgcccgtgtagagaaccgaggaggggggctggggtagaataatcagctctaaggttgcagatttagatctcaaggctgaaaaggataagcttccaccagagcatcctgtagcgcctcctgtcctgccctgccctgccctgcgcgcgcaccgcactcacacgtacacccggtcctcgcacgcgcacacacgcacactgttccccgccgctctaccctctagactgcaagggaaacggctcctctggggcgcgctcaccggaggtgaggcgacccagcccggcccaggccagcctggtacccagcgctggtcgctgcccctgtggggaggcagcgcggccttcggggctccagagcgcgcgggcccggaacgaggcgcgcggccgctggcacatgcggggactgcccagcgcggactggagaaggggagcgaaggggtggggagggggtgacgccggctgcccaccccgctccgcgcctccctctgtggccctctctcccttcttcccctcccaccctgccgctcccagccgcgtatggaactcgcgtttggaaaaggcacggagcaggcgggcagctgtgcgtgtgcgcgccggtggcctcggacgcagccagcgcgaggacctcggcgcggcggtagcgccccggcgggccctccaagtgccggcctgcagggggcgccggcgcgctcgcgccccgcgggttctccaccgccccgccttcgcccaccgaggaagggtcggagggaggacccggacgggagcaggttcccttcgcgcctctctggagggtcggcggggccctcaggctggtgctcacccgtaggaccgggacggtgttgtcacacttgtcaccaacgacggccggcgtggcgtcgcaagtccgctttccagtctcagcggctggaggaggcctcggggcggcagggggagtttgcctcccggctggctagcttcgctagactcagtcattactaaggggttgggagggggagcttgtctcttctctcctggcagagccgcgggaggcgtcggaaagtttcctaccacttgagggacgaaggtggatggatcgagagccttgtttccctgctgggatggccgaatgtaccagaagtctcgctggcgagcagcgccctcggcttccccggcaatcatcccaaacgcacacccttcccctggccgaaggaaccccaggttgcctaggaaacggccccgcggacctggcgggccctagggtggagacccgggc

SEQ ID NO: 331391 - DNA, 752 bp, Homo sapiens
  chr2:105460811-105461563
  hyper
cgggatccgccacatgcccctcgaccctctcccaagagaaggaccctatttgacaaacaataacagagcagtaactcttgcaatctgcccacacctttgggggtggctggggagagggtgatacacgttcacacaccgcttgctaaatgcagtggcgagaggagggagcagcgtctacatgaagcgaacttttcaagcgcagagccctgactcccaggcgcgggggctcaccgggaggggcccgggcgagagagcgcgtgggtgcgtgagtgcctgtgtgcgcccgccctttgcttgctcggggtgtccgcctttgtcccccgccgcgggcctccacggtgggatctgcgcgcggccggtgggcagccctcgacccggggcgcgtccacagcgcccacccgcggcccccaaacacctcgagagcagatcttaggggttaaccaggcaccgacctgaggcgccctgcagctgccaaaagctcgaccggaaacctagaacatgggacccaattcatcggttttcctcgtccatacatgcatccatccatccctgcatgcgtacatgcatgcaatacaaatcccgggacgccggcacggagagctgcgcctcgcccttgctgcgggctgagagcgggtacccccccttccagctcttcctcctcccgcgcagccgcggccccctccccgaaggaagaacagctcaattacgaagaggagccaaggaacgaaatcccaggctcagaggcgcccgcc

SEQ ID NO: 331392 - DNA, 2369 bp, Homo sapiens
  chr2:105468471-105470840
  hyper
aggaaaggaaaacacggggtgctggcaccgactattcaaacgtctgcacctggagatctcagattgattcaatgaaatctgtgttccatcttttatatatacatatacgcatacgtaaatataaaaagcaacctttgggggccgcagaggaaaaaaatccgttctgtttggggtttggttaccaccgcctttggtatctataccttggcaataatggctttgctaaaacctacctacgatggtatctcacccggcaagcaggagctggacaagagcctacataaattctacgcgtctagtgttaatcttgagatcacgcgggggctgcctggctgcggctgggcaggagaactcctgctttcactgagttcacttaactgcgctcggcagaggcacgatacagcgggagagaagggcaggcccgttcacattttaatcggagcgcaccggcggccgctcctcggctgcgtcctgggctgccgctcgggctcgggactgccagatgcaggctctggctgggggcggcgggcgcaagcgggcgcacccgcagctaggggtgcggggtgcacgcacacgcacgctcattaagagccatgtatttattgaatgtccgagttgggttagttcattggaaatccccgaggagggctcaatttgcccttgttttcgttgccactttctcttttttcttggttcgctgaggttcctctgtgcagcgtttccgcttggccgcgtccccccaccccaccccaccccacccccgcttctctcgcctaccgggtgcactccccctcccatcccccttaactctttcagctgggttagagctgagaaagcatttgtcgccgccagccccatccaccacgcaaatccatctgagacagaaaggaaagaaaaaaaagcaccaccatgcctaagaatagagagcgagcaaacccccccaccgctaatcacacacacacacacacacacacacacacacacacacgaggaagcggtggagcagagaagggcgcggctagccgatcccggttctttcgcccggctcctgctgccacagggaattcctaaagccattggggtcgaatacacttacgatgaatctatgggggaaggtcggactgattgcttttcaaatacatcgcacggctccgctgaccggcaccctccaaactcacaagggcacgcacgctacttgcacgaatcccagaggagggaggagggaggaagggagggagagcgaaggagggagagagggggtggaggagccagggagcggcggcagcgagcggtccgtctcgcacgcgcgggcaccgcgctggtcctgggctgcaggtttcccagatgatggcatccgagaacttaaacaaagggggctgccgccggcgcgcaacggctgcggaaagttgcggtggcggatttccaaggagcgtggccacgaccagagctcttggcgatgcgagcccccgcttcccacccccgccgatcagagaagggggccggctggtgaagggaagaggaaactttgaaaccactggggacacatctgtctataggtattagcttgaatggtacatccgtgccgcgcgctttacaaatctctggcggggcgggggtaagggggtgagcaacccgacgcgtactaggtggggtgggcaggttgctatttttcatgtttcccccttcgttttccttctgattctcttcccccctctcgtccctccctcccttttatctcccctttcttccccccgcccagacctattgcgaacgcccagagccgccgagggaacgccaacgtctgggccggacactaagagttaagatgtggcggagggggcggcgggggaggggcggggaggggaaagtggtgagggggagggaggctggaggacgacagatttccagcttctacgacgctctgcctaaattaaaaagcaaccaatcggaacggccggaaggggggcctcgcgtcctgagccagtcattccgagcctgccaatcacccagcgggtagccaatcagcgggggccctggtgctcgacttccttgtatttgggaaagtgtggtggtgggtgcgcgctcgcggcggagggtaaacattcgacagtccccgctctgagagggagggacagagagcgaactgtcagatcggagcgagagcgggcgcccgagagagggagagagagagagggagggagaggaaaagtgagagagggaaagagagcgcgaacgagggcgcagagcgagctcctgctgcaactctgctccagcacggccagcgccagcgcccgccgtcggtgcactctacgagccgtgcagcgtgcccactggagttgttgtgtatcaaggatcgatcccctatatgc

SEQ ID NO: 331393 - DNA, 173 bp, Homo sapiens
  chr2:105471040-105471213
  hyper
gactgtgactgttgcgaggagaatgaaaaaggactcttgtttcagaggcaaccaagagctccggcaatagcaacttcagagaaatgcaccatcgcaagaagttttcctaggacagaacaaaacttgaaacgagaggaccagagggggagagcaggagccagcctcccctctcc

SEQ ID NO: 331394 - DNA, 1744 bp, Homo sapiens
  chr2:105472225-105473969
  hyper
cggcggccatatgctgagccacgcgcaccagtgggtcacagccctgccccacgccgccgccgccgccgccgctgccgccgccgccgccgtggaggcgagctcgccgtggtcgggcagcgccgtgggcatggctggcagcccccagcagccaccgcagccgccgccgccaccgccgcagggccccgacgtgaagggcggcgccgggcgcgacgacctgcacgcgggcacagcgctgcaccaccgcgggccgccgcacctcggacccccgccgccgcccccacaccagggccaccctgggggctggggggcggccgccgctgccgcagccgcagccgccgccgccgccgccgccgcgcacctcccgtccatggccgggggccagcagccgccgccgcagagtctgctctactcgcagcccggaggcttcacggtgaacggcatgctgagcgcgccaccggggcccggcggcggcggcggcggcgcgggcggtggagcccagagcttggtgcacccggggctggtgcgcggggacacgccagagctggccgagcaccaccaccaccaccaccaccacgcgcatcctcacccgccgcacccgcaccacgcgcagggacccccgcaccacggcggcggcggcggcggcgcggggcctggactcaacagccacgacccgcactcggacgaggacacgccgacgtcggacgacctggagcagttcgccaagcagttcaagcagcggcgcatcaagctgggcttcacgcaggccgacgtggggttggcgctgggcacactctacggcaacgtgttctcgcagaccaccatctgccgcttcgaggccctgcagctgagcttcaagaacatgtgcaagctcaagccgctgctgaacaagtggctggaggaggcggactcaagcaccggcagccccacaagcatcgacaagatcgcggcgcagggccgcaagcgcaagaagcggacctctatcgaggtgagcgtcaagggcgcgctggagagccacttcctcaagtgccccaagccctccgcgcaggagatcaccaacctggccgacagcctgcagctcgagaaggaggtggtgcgggtctggttctgcaatcggcgccaaaaggagaagcgcatgacgccgcccgggatccaacagcagacgcccgacgacgtctactcgcaggtgggcaccgtgagcgccgacacgccgccgcctcaccacgggctgcagacgagcgttcagtgaagccagggcgcagagcgaagagggccgccgccgccgccgcctccgcagccgccgtcagcaccgccgccgcccctgccgccgccgccgccgccgccgccgccgctgccgccgccgcgccgaccctgcacctgggccgctccgggctccagcccaggcccatccgccgccctcccctccacccagagacaggcatgcccgcccttggaggagaaaacgcgggagaaacggaccaaggaggcatttttgcagtccaaggaaggaggggccaaaaaataaaaagcataataaacacccagactgttttgtatacatatataacaaacaaaaccggaagagaaaaagggggcgatcatgagatctcgttcatactgtggtggtgtttcgtttttgtttttgtttttaaagaagggtgaagatgcctgacgcacgaaaactgcactcgtgaggtttttccaccctgagatgacctacacggcagcggtggacagcacctgcctc

SEQ ID NO: 331395 - DNA, 1851 bp, Homo sapiens
  chr2:105488296-105490147
  hyper
cgaacgcagaaagaactcaacaactgaaccgccagtggaatccagtatctgggcaagttcactttattccttcgcaggaagagggtcagcgacggccagcgaaagtttcccccgctctttgaagagggaggtgacaagacctgccagaccttcccacgcgcgggccgcctgggttctggggctttcgtgacgtcttccctcatcgcgctccccacccccgaacacacacacacagacacacacacacacacactcttccttgctcgggaaacttggcttcaacctggctccccctttcaaaaccccctggagaacttcccctgcagggatgccctgcgcccgccggctgcgccctccctctcctcagccctgctcctcctgtccgctccccggcgttctggactcacccggcacggtccttccattccacatacagacaggaaaccggcctcttcgggacaacatttgaaaccacattttatcaacatcatcaaagaccagagcacacacttcgggctctgagctctggagcccgcttcttgcagaaaaccgggtatgggggaagggctgcaggggcgagaaatcctgcttccaactgcgatttcagctttcttatggaaatgaacgcgacggcccgttcgccccgagcctccctcccgttcccagcccctcttcagcttaccctttcctcccgctaacccccgccctcccggtccccgagttcccgcggcggccaggctggtggggacgcactcgctctgcgcccgggtctcggcgcgcgcggaaacccaggccgcgggctcccctccgccccgccggcccgcgtgcagcattaaatattcatagggatgctactttcttaaaggagaacctaccgcgcgggaaagttcacagccaaggagaggcacaaaagaaggtctccgcgctggttctcaagggcgaggagacgcatcccttcttgacagtgcgcctccagactggcattaaggagaggactagggaatgggatcacctatcgtcaagtcacttattttagaggggtttggagaagaggtgaacttggtggtggagagaaagcgcgctccctaatcacctgttaaacagttattttaaaattagctgtcgcatctgacgccctagggtccccaagggccttttcataagggagtctgtttaacttcactggctttgggagcgagaaagtttgccctttgtttctggaaacacgcccacgcagtacgcttaggtaaccttacactgaacaatttccttggagcggctaaaaccgcaacaaccaaacttgcacctgcgccattctcttaaaaacagggcagcggctgtgagcgctgggccggtaagtaagggcagagaaaggggctgtcgtgtgcgtcccagctctccgacccgcacgtccgggacccctttccgcccgcgcaccgcggtcacttgcagccggcgctggctgcttgagcccgcggccgggtcgcccggcttctctccgggagagtggccagggcctaggcgctcgctcaagagggagagcgaagggaaaagaagaaagttctccgccggccgcgcgcagctcctcccgtgagcgcgccccagccctgggccggcccgacccgacccgcgacggggccacgcgtagtgccaggcaactcctgtgccctgtggccagccccgcgcgcgcactcgcactcacacacactcatactcacaccccacggttctttttgttccgggccaggagcactttcacaagtggttagaaagtcttgggcgccatctaacgggagcagcaaaaagttgacgctgggtggaggttaggcccgacaggagcccaggatgggc

SEQ ID NO: 331396 - DNA, 884 bp, Homo sapiens
  chr2:105760109-105760993
  hyper
cgaaagcgaggtgtgcgggcgggtggaaggaggaaggtgagggttcttcctagaggtgaccaggtgaggccgggagtcgagcattttcataagattgctcgcggacgcgggggtgggtggagagcatcacgattaagaaggaacacacgcacgcacacacacacctccttcctccttcccctcctcttcctctcaccccgccccccggggggcggtaccctagtctcccgggggaggttttggggcggaggaccgcggaggactgcgcccaggagggtggccggccgcgggaggaggacttggggtcgggctgctgcagctgggtggccagcgccgcggcggcccctcccccgctctccctggccgccgccccctcctcctcccgtcctcctcctcctctccctcctcccggtcccccatcctcctcccggcccccggcagctgcggctcggggagcagccggcggcgccgcggccgcgcagcctttgtctcgggccgccgggcgcgcggggcccagcgcaggcgtaagtgaccggtggccgggccgcggggggtcggcggggagcgggctgggggtcgcgggcgctccctgcagtggggaggccgggccggccagatcctcccgccacgcgtgtcccgggatgctcgggcggtgccggcgcgcgggggcgcgaggagagccgagcggggccaccgcccgggagggcgcgggacgcagagaggggctcggggcccgccgggccgcggggtcgggggagggggtgcaggctcgcggggcgccgcagcttggcgcccacagacgtgcggcttgggtgcaaatcctgtttctctgggcagaggccacgcggggacggaggaggcagagaggacgggctgtgatggag

SEQ ID NO: 331397 - DNA, 1350 bp, Homo sapiens
  chr2:107502865-107504215
  hyper
cggcctgcgggatcacctctccggggccagcgctgctccgcgccggcggcagctgcaagcgcgggcggcggggcacagcgggtggctcggcctcaaagccggcgggaggctacgctcagccccgcgctgcacgcctcattgtttcgggcagcgcggcggcggctcccgcggccagaggaaccgcggccccgagccccggggagaggcggcggttcccggcccacgcaccgaggctgcgccgcgccccgcccccgagctccgctcgccccagagccccctccctctccgcgatccctttcatccttcccgctccaggctcacctagctggcgggagccgggcactgggaagttgggctgccccctccccgcgcccccggcccggcagctcggcccgccggcgagcgcaggcggggcgctccctggctgcgcgcggatttctgcttgtcgcggagagtgactgcagacttgggctgcgtggggcggtgcggggcagcacggctgcctaaaaaggcgtgtttctccccggccgccgcctccatccagccctagttcttccgaaggttacctgcacagtacccgcctggcaccgcgcctggacacctccggggcactcgggtcccgggcggcggcaggaatgcaggaatgcgcacaggctgtgggcggccaggagggagtcccggcgcctgccccggcggaagtgagtctttgtgtaccctgtccaacacctccccccgccagcgcggaaggccgggctacctgcgcgcctggcagcgcctggcagccggctgggtggggcgcaggggagcgcagcatcctccccggctcgctagctccctttgttcatctcgctcaaccaggctccgcactgccgcctggccctcgctcccagagcttctctaaggatatgggatggacttgggagcgggccacctttcatttgggaagggtagctcgccaagtccggtgacggtgctccctggagacccccacctgcccgcccctccacactgccggtccccaaccccaagagggacggaaagttcttggggtagaagccggcgggacaagtggttgaagcagcctccggagccagtgggcggctgcgagctgggcagctggagcctgcgggcggggccgcggggaggtgcccatcgagtgtcggtctggtcgcgtgcggaatgtccacttgtcaccgcggcccttgcgttttctcgagacggcggcagctggtcctaggaccccaaaccgcgccgccctttgtttgctggtaaatactctcctgtgaacttcagcgtgtctctccgcgcgcactcctggcattgggtgccccaccccgctggttctctcgc

SEQ ID NO: 331398 - DNA, 561 bp, Homo sapiens
  chr2:109647974-109648535
  hyper
cggctctgcccgcctcgccgggctgcaccgagtccgcgggtctctagcgcacggcctggccccacgtgcggcgaggagggcgcagtgaagttctgctgtgtgcaccccctgcagctcggccgggaagcgcccgctggaggaacggagagcgccgcttcagcgtcggccacgtgggccgggctctgccggtggcaacctggacgcgctgcgggcgccggcgagacctgcgccaacgcctacctccgggccacaggcgggataaagctgccccactttgcccccagcgaagagaaccctccttcctctaagtattttcttcagcaactaagcttttctgtttgctcaatttcttgtcccgtgagcgctaccacccaccccccgccaccttcttcccctccccccacatccgttcactctctttgaccttttgccaaaactctgaacgctcgctgccctccctcccatttcctcaccgcgtttcaggagctgtaagttcttggtgttcaaaccccctacggttacgtaaacagaactctgcagttatcttctttccctttcttc

SEQ ID NO: 331399 - DNA, 1471 bp, Homo sapiens
  chr2:109744585-109746056
  hyper
cgacgggaacgcaaagcggccacgagggggcagcgcacggcagggaatcttcgccgccgaccccagcccaccgccaaacttccctgctgctctcggtcctcctgtacgtacttccgttgctctgacgctcccagaagccggggcgtcgggaaggagagcgcgaattcaccctcctctgcgcctccgtaggaaaaaattggagcgggggttcacgagactgcgccgcggcgggcgctagagcccctcgcacagcgtcgccaagggtgcggcgtggagccgggcgcctggcgccagggtgctggtcggcgggcagcggcgccagcctccgacccgcgactccggcgagccaaggctgcgccgggaggagtcggcgcgggccccggggtgcccccttcaactggagcgccttcccctcctgccttgcggcgcatccccacacctacaccggaacgaagctccggggctgtcacttctgcgcgcttctcggaaaggagtctgaactgggagcgctccggggggtcgtcggggaggatgcccgggcgtcggctgtgtccccaagctgctcgccggcgctggcgaggaaggcagtcgggataacgccgcccaaactttccttcgcagcagcgttggcaggaaacgtccctctctgaggctcacgaaaagccgaaaaagactcggacgcttggaggaggcagggccaagcctgcgcaggagaggttccccggagccctggagatgtcctaggggaccaggctaatcgccggcttgcgcccaagcgaagggaagtcctgcaggcacggcgcctccttccctgagccccgcagtgaccgtgacctccgcgcgcacccccgcgcacgtgctcgcggccgaggaagaggaacggtcctgctgaatcctctggaggacagcgactagcgagcaggccaggggcgcatggaggtgccgcgggggcggtgcggctcgccagctgcgcggaggagcgtgcacgccgcgccccggcctccccggggacctggccggccgctgcccgcacttcctgccgctggtctcccaggcgcgagccgccgcttgcagcacagaacccgttgagcttcgtgcccggcagcacccccggtcccccgcgcggggcggacttgcggcgggacaggtgtagcccgcagccgcaggcgctgcgctcaggactgggcgggctcggctggccggtccccgccacgcaggccggtccccgccacgcaggccggtcggtgagccacttcgcaccgccacagccctagcatcgggccaccagccggggtgaagaaagtcacggcggagcccggctccccagtcctgatgctggctgccggtggcgggctccacgccggccccgggacctaggcagccgcgcgagaccgctgcgggcgcctcccccatgctgctcggagcgtcctggctgtgcgcatccaaggcggccgccgctgctgcgcagagc

SEQ ID NO: 331400 - DNA, 1765 bp, Homo sapiens
  chr2:110370721-110372486
  hyper
cttggtactattaacgaaaatagttgtaaccacacttggaaaaccgctggcttactaacaagcgagataaatctacaaaagtaactggaaaggttcaaaacagtgaacaaacgcgttcttttagagtacaaaagagtcaaggcgggaaaaaaacggtttaaaatcccaatggaggaaaacttggacgaccacaccatcggataaaacgggagagcttttgaaaagccaggggagccgggctttctcccggcggcagggaggctcggaagtgctcacggctgcaaaagatgaccgctattcaatcagtccgcactgcgccttcaactccgttatagccgtaagagacccacaaacaccgctgtggatgtaacttttggcaaagaccgggaagtcgttcaagaactctcccaccgtcccgacgctggcgccgcgccccgcgaaccggggtccggccgcgcccaggctccgcagaggctcctctcccgccccaggcgcccggccgccgcggaagccggggagcactgggcgggcggggccggagggggcgcgggtcacaatcccgggccggaccagggggccggtgggtcgagggcgggaagtcccgcgggggccggggagcgcggggctggggccccggcgtcggcgggactcaccaggtgccgcgccacctcggaggaggccatggtcgcgggcaggggcacggtgaagcggctgtatcagcccggccccgagcggctggtcccggcgacggcggcgggaaggccggagggcagaagcaacgggcggggcgcgaggctaggctgcctccgcgacggggaagggacaggggcggggccgagctggaggcctccgggggcggggttggggcggacgccctgtggtgcgcgctgagcgttttgcctgcgccaagcgagcccctcacaggagctaccctcgacgcctgaggactgagcgtcagcgttggggcgggctgaaggagagctgggactccaggaagacggcgcgaggaatgcaggcgggaactgcggagcagtgattgcggccctcgcgaggccggaagtgggcgggccttgaggcgaggccgccctaggtaggtgtggccgagacagcggggagcggaagtgggcgtggcctggtggcgtgggcgcggggcgggggtgcggggggcgtgtccgcccgggcgcggcccagtgaggcggtggccgagtcctctggcctcagacgcgtaggctggcagcccgctgagcccgccagactccgccgccgtcgggagccggccgctgggagcccgtcgctatgggaccgcgctgagccgcccgctggcgggggagcagcgcggtcgaggatggaggggccggcagagtggggccccgaggcggcgctgggccccgaggcggtgctgcgcttcctggcggagcgcgggggccgggccctgcacgccgagctggtgcagcacttcaggggcgccctaggcggcgaaccggagcagcgcgcccgcgcccgcgcgcacttcaaggagctggtgaacgccgtggccactgtgcgcgtcgatcccgccgacggcgccaagtacgtgcacctcaagaagaggttctgtgaagggccgtccgagccctccggggacccgccgcgaatccaggtgaccgccgagcccgaggcccccgacggccctgccgggcccgaggcgcgcgatcggctccccgacgcggcggccccggagtcgctccctggacagggccgcgagctgggcgagggagagcccccc

SEQ ID NO: 331401 - DNA, 848 bp, Homo sapiens
  chr2:111490011-111490859
  hyper
gaagcgcccgctcgcgccggacctcccgcccgggaagccagggcagggcggggccggggagggaggggagaggaaggtgaggagggaggagacgggccgggaggggtggagagggagagggcgtgcgcctggggcctcacctgctgggagctggaggaggcgcggagcgaagccggccctgccagccacgcggagaagcagaggcaggtgagcgcgatgcagccggcgccgggtctggggctcggggactcctccctgcaccgctacctggacggcgacttctggagcctcaagaacgagctgcgcggactcctcggcggcgcccgctcttccggcaaaggtaccgcgctgcggccgtcgcccctgcccgcgcccccgaagccgccgagcgtgtcccctcggtccccggagcgtcgctgcggacaacgccctggcgagggcgaggtggggtgtgcgccgcgcctgagaggcgggtccctgcctcgccgcaggtgacgggctcccctccccaggtgtgtgggcgcagccggccgccgccgacctcttcggccccctgagaggtgccctctcctcccgagctccctcccccacgaagagtcgggtgcagggctgggccccgcggtgacaggcgcggtgtctacgaagaccgtgtggctggaagatcggccttgctggtttgttgaacctgtttcttgagtccccgccccgcgatgtcccacccttggtggggagaaggggacagaaaaccgcgatgggatgggcgcacagggatggagtggccctgtccagggcgtgtctgggcgtcggggtgggacaggcttacaggaccccctcggagtgcaggtgtg

SEQ ID NO: 331402 - DNA, 1125 bp, Homo sapiens
  chr2:111874622-111875747
  hyper
cgccgtctcactgtactgaatttcaagaatcatggcctactgccagccaggtcaggaccgaaggcgctagtctggggagactggagcaggtctctagtggttcacctgttcggaggctcttcctgttcagttccctctgcgcgccagagggtggcaccccaggcactccagaggtggagaggaggggacgacaggggaggcaaagagagaggagcggagggaaggaccagggaggaaggaccaaggagggagctttaataaattctcagaccttggtctcgagttcccggctaatttgggggcaaagccgaccgaccccacgtccacgcccacccccttacgggaaaagccggggtttccactgggctaggtgtcagagttgggaatgtctaaaacaaaaaaggcttccgagggttattcatggccaacagtttccacaggagaatccaaagggaaactagtttccggggccgctgtgtgtgcgggtgcttggtgggctgaaagctgctgtcactagatggctgtaagtgtgccaacatctgacctgtcccattgtgttgtgttttgcagttgctggatttgtgcgactcggtgaaggatgatgcccggagggtgatctcgacctttaacattccacacacctacctccacgcaccaatcgccggaatctccaacccgcgggccgcgtgggctttctaccctgcaccgctgcagccgcggccacgggaagaggcgcgctcccggcggcccaagctgggagccaagctctaacgggtgtggcgggaagtgtggtggcccgccagcagctgccacgacgctcgctccaccgacgcccagagctgtggccgaggccgggggctggcacccgctgggccgccactctcggggattttggtggcaaagcggaggtcccgccgaggctggcgaggtgcgcggctggctgctaggaaagagatccagacggtcgcctggtgcgctggatccctgtgccctttccctgaaacccagcctggcctgactgcaacctctcccaacttcagtgccggatcccctagacaatcagggtgggctccccgctgcgagcgcgccccacagccgggtgccgccaaaggtctcctgctgtta

SEQ ID NO: 331403 - DNA, 635 bp, Homo sapiens; identical to SEQ ID NO: 228604
  chr2:111876428-111877063
  hyper

SEQ ID NO: 331404 - DNA, 699 bp, Homo sapiens
  chr2:111877567-111878266
  hyper
cgagggagctcctacgaggttatctgcgagcccagcaaatcttgggggtcctagccaaatgcagtgcgcaacgttctctctcacttggaggccgccattcacctcgtttttttttttcctaaaaggatttttttttctgagtgcttttttcatttccctattttacctgctttgcacatgcctcccgccctcacccgggaggcggcgaagacgcccactgggaccgcgcctggccgttttctgggcgcgtcctgcccccacggcctctgtctcttagggcgactgggcgcggaagaaaagctggagagcccctgcggggtggcaggaggagggtgcctgagtcccgcgagaggcccgggcgaggaagatgcgcagcctgctgatccgcgtcccgcccggcgccagggaccctcagagggaggagagctcaaagacctcgccccgcgccttcgcgaggaccaacccagtccccgcgcctgccccagagcggcttagaaactcagggcacagtgagagcgcagggcgcctcccgaggcttcacaccgccggccgggccagcggaggctgtgaccggagcgccccctctgtgccgcgcacgccgcggccgccgccgggttggggtaggtgagcgggaggctagggtacacttcggggtgggggatgggcgcgcacatggccgccagcaggcagagttactcc

SEQ ID NO: 331405 - DNA, 617 bp, Homo sapiens
  chr2:112656507-112657124
  hyper
cggtgccagaggagggggcgtaggcgaacctaccgtccactgaccgcggcgcctcaagcgtcccgagggcacccagcctggcttgcgggtgcgcatcgtggtgaagccgggtcggggtcggcgttgcaggctcccctcttcaccgcagaggaggaaatcgagctcggccgggcgcgctgcaagtcctgaagttccgacgagtggaacgtaggtagcaggtctggtctgggatgcgacgagaactttccactagagttgcatggtggggccccgctctggccggagtcccgggggccacagatccggtctcccgagggaccggcgcggggcgaacgaacgggctgcgggagtcggagccgcagtccgggagccgcgatagactgaggccgagcgacgggccagggggggacggcagtcctggctgctcccaatgggcccttacgggcattattagtatccctttttaggggcacccagagagtgtgggaaaaggggagcgttcttttcactcctgttatggcagaacagaacttacagtgctcggcagcgtttacgtttatctggattcagcgaagtgttgttacaggcttttttttttttaatttgagaccgagtct

SEQ ID NO: 331406 - DNA, 616 bp, Homo sapiens
  chr2:113341835-113342451
  hyper
cggagatttggagcgcttgtgtctgaggctcaatcccgtcaggtgccgcgcaactcagcggcgcattctctttggacccgaggcaccaccatactttccattgcttacttccgttaaaccccgagcgctgccatggcaagccggaaatagggatgaagcaatttagccagaagagggcggaagtggctactcagggcgccgccatgacgagccgggccggaagaagaggtagggcgccgccgtgacagattagtcctaaagggaacggggttgttagttcaattggctaccggaaaaaaccaggctgggctgggcgccgccatgacaaccgataccggaaaaggcgggtcgttccccccggacagccctacgccggcaaaggtctcgagatgtgagtagtgagagcgcctaccccatacgtgctgccgctccccttcttttacccagtgatctagacctagtctaggacctcgggaactaggaccagcctccctccttcttggagatctgaccctcaggattcagcgccttcgctcacgagctccaaccctccgcatgcccaagccccgccctctaagcgtttaggcctcgccccctctcgcgctgcttaggactt

SEQ ID NO: 331407 - DNA, 897 bp, Homo sapiens
  chr2:114034594-114035491
  hyper
cgctcgtggttccaggacgcggaccgtaaagaggtgccagggagctctgctcggtcccagggctccccaaccccgccgcgccggggaatggctgcgaggtctctcccctgaggaccttgaagggaccccgcgccttctgggggcagccggacgattctggcccaggtctctgaggggaatgggggccgggagggagcattcgtctgcagctctagagagaacccgagtgagaaatcttccggcgccccagggggttcccgctcccctcctagttgggccatggccctgggactggagactgcgccgcagagcccgggcccccgcagtgcgcttggctaaatagagatctcagcctcgctgcgcgcccgatccgaccctccttattataacaaatgtcccgtttgcagagcgggacatcatattcgcggagaattcattctgaaatattgatttcctctcacttcgccggcccaaatcgatagcgatgcgccctggccccataaatcgccttctctgcggccggccgggctccatccatcactgcgggccgcgctgcgcctccaccgctgtccgcactcgctgcgcgccgggacggctgcgcccaccagccctgaccctggagctccttcccagcaaagaccctgcccagccctggccgggaagggggaaaacaggcatcgcggcctgggagctcgagtgtgtttgaaggccctgcttccgggcgcaggtggggagggggttttgactccgcgagcggcttagtcctcaccagccggacgccccgcgcgcggcgcccggcctgcccggtgctgggccaggaggagtcggagagcacctgagtgcgctgccggctcccgggcccgggaccaccggctccattgccgttggcttgagaga

SEQ ID NO: 331408 - DNA, 87 bp, Homo sapiens
  chr2:114035831-114035918
  hyper
gcgggtgggtcccgcgaatcccgtgctgacgctctcgagatccaaccacccgagcgcacgcacggacgctcagcggcgcgggggctc

SEQ ID NO: 331409 - DNA, 1278 bp, Homo sapiens
  chr2:115918676-115919954
  hyper
cgacctttaggagttccaccgacgtgacccaagcagctggtaggagaatctgggctggattcggaaggcgcagctacaggacgcccgctgccccggatcggaaggcgcagcacctcaggccacaatctcagacacgccctcgggtcccgacaggtgttgcccgcctcccacggggctccgggaccccggtccccgggctgccccctgccttctggggcgctggagcgcgcgcagtggcggagctggagccacccagtgcttcgcacgggcgcgctccgcttctccgggttttagcggaagcctgcggggggcggggtaaccgcggaagccggcggccgtgggcgcgcgggttgggggctctcgcgccgctccgggctctccccccccccggctgcggttgccgaagagaggccggagcgcggcgcccggctgctccacctggcgcgctgagcaccgcgcggggagcccccgggggcgggcggtggggggcgcggactgcgggaagaaggcacgaggcgtcgccgcagctcggtcaggggccggggccccgccgctcgccgctgcactaacttgccgcttggtctcgcctcgccgccgcggctcgctgcgctttgggtggcggggggcggggagagcggggagtcagagggtctgcggtggccgagggagggaccctacgacggggagcccgcccggtgccgctcttcttcccctccccgcccctccgctccccccaccccgtcccttccgccgattccgggagcgacgggcgcccgtgacctgcgaacgctgccaagtgacggtccccgagtctgaagcgcccgcgaggaagcgagcgccagcgcgggccgccggcgatgacggccgcgaagcaggagccgcagcccaccccgggggccagggcgagccaggcgcagccggcggaccaggtgagagtcggcagccgcggccaggccctcccgggaggggtggctccagtgcgcgctccgcccgcctcccgcttcccaggctgggctcccgcgcctccctcttctcaccctcccccgccccgccccagttccaggctctcctgcttctccacggactctgcgggaagttagagcctctgcgtgcgctccggggcccggcgagaggatgcgcaaggtggagagccgcggggaagggggcagagaggtaaaggctgaaggtgccccggggaaccccggcgggcggcccaccgagggagggagaggcggccgggaccaaggaatggggcctcttggttccccattaacgcac

SEQ ID NO: 331410 - DNA, 1334 bp, Homo sapiens
  chr2:118981062-118982396
  hyper
cgcctggcgtgaaaagaaccaagaacactgaacccagggcagcagcgaatcccacgccccacgctccctcttcccaaacctcaatatcgttgcttaaaatcttccgggcttattgtgaagccaagggcgcttggcatgggaagagagccgctcgtgatttatttgggagagggatggggttttggaaaggaaattggggggtttacaaggaggacgggtgggttttactcaacaacttattcttgggcgttttcgtggactggagaggagtttcgatcccgtctcgggctcacctgggaagccccctcctggcgcccgctttgtttggcgttcctttaaagcccggtgttggcagagcgacccacaatgaaacaaattctcattttatgacgtctttccccccgtaggagtccgaacaatgtctgggggcttggcacgcatgaagataaaagaattttattttaaatgcgatacatgtcaggattagacagcgtttcctttcagctaaactacagagcgaatcttcatttcctgtttcactgcttcccccgaaagaaacttttctttttctttttctttttctttttttttcttttctttctctcccccagcagagagtccgagagaaaagtgctgggcacagagctccccacgaggtccccggaaagcagacttagctcctgatcgttgtcaatctttgggcaacccggggcctcgcaacggctcgggtttagtgtgatctggggaggctgcagcccagttccggctaccgtgggcgcctgagcagagccggggcgagttgtaaacctcagagaaaggcacttgtccccagcaaaacgcttggagaggaccgtgcacgctgtgctgcccccgccccgagacgcgccgggccgccgggtcaccggttttccgaaagggacccggcagagacaaagtgccttcgccgctgcgataggttggttttactttgcaataaacagcccctaatgggaccgggcgccgggcggagagctcggcccggggcgcggcctttgccgcctggctctgcgggccgccccgccgggcgccaggttttggggggtggcccggccccgcgtccgccactgcaggccgctctcctccttcccgcgcacacagcggagaaaaaaggacgcaaacagcattttacacttttcccactttagcgggaatcggaggagccgggcgagaaagcccgaaaagggaggcggttatttacgaccggcgggttggagtctggcaccagatggtgggggtctgtcaggcccggccgccccgcccagcgccccgcaaacagcgcccggttggcagcgtcg

SEQ ID NO: 331411 - DNA, 690 bp, Homo sapiens
  chr2:119067626-119068316
  hyper
cggcttagcccgcttaatgatgccacttgtggcactccgaaggcagcggagaagtctataaactacttccattaaaatgcaaatcgggcccgctgagaaaacaagtgacacaaaaagtgggcgccgcgcggccgccgcccgcgatggcgccgatggctgatgccgcgattacgccggcgggggcggcccgcgcgccacgaacgtgcccgacaagccgcgccgcttaatttctgaagagatttatattttttttgttgtcaggaaatgaacaaatacttatcaatgtaaaaactgctatctccgatctccccgccgggtttttcatactgatattctttgcaccccgtaacacaggaaatgaaaatcttctccgcctctcacgtcgccgctgcgccttcaaatcctctgcgagcagactggcctccccccaccggccccctcccgggctcccctccccggtaaacagaaaagaaaacttctgtgggcgaaggagggagaaattccaaggctctggctttccccagccgacttgggtttcggggcagcgcgggctcccttctttccagcgcaggaagaaggggtgagggaggaggggccggggtgctggcactcaacggtaacatctgttttacttaagcagctcgatttcgttttaggatgaaaaagtattccctttcagcatgaggaatc

SEQ ID NO: 331412 - DNA, 432 bp, Homo sapiens
  chr2:119603649-119604081
  hyper
cgagacccgagcctcctgtgccacgagctgtagcttctcgggtggtggccgcagaggccaggatcgcatagctggatgaacattcggttgtgactggaactggggtgaggaagcaggcgtgagagactggagtacccgaggccgggtttgctctccctagcgccgcagcttggcgttctggggcggtccgcggggccagaaggcatggcgcagcccggagttgggtactcaccggaggatggacgatccgaataacgtgtgcagtacacccaggcgggccatacgagaggctgctgcgagtcagttttgaccacgggcccgccgttggctgagcccataagtaggatagccgggttgccgtgctccgggtatttggtgccctgcgctccggggctccccgcgccgcctccactgccgccgccaccggtgtcc

SEQ ID NO: 331413 - DNA, 341 bp, Homo sapiens
  chr2:119605278-119605619
  hyper
cgcgtctccgccagcgccgggctgtttttttttttttttttttttttttttttttcaaatctctgacagctcggatctttgcacaaactctctcgcttaaaaaaaaaatcacccaggcacactttttgccttcaaaccggaagcacgtgagtcagggccgcacgtgtgcggagccaatggcgagccgggactcgcgctgacactcgggcctcggcccaatgggcgcgcgcgggactttgcggataaataatccgggggcgtcaaccgctggcggagagggggcgcctcggcgctggccctgtgcgtcgggtccgccctcccccacccgcgcccgcacccgc

SEQ ID NO: 331414 - DNA, 779 bp, Homo sapiens
  chr2:119607049-119607828
  hyper
aggcgagggtcccccgatttccggggctgagttcccggctagacttgcgctgcagcctaggggagaaaacctctctccctaacgctgcgctgcagtcttctctaccttcccaagccgcctccaaccccaccttggagtctcccgagtcctcttcagtagcacacccaagggctccccgaaatctccaggcgcccccaccccttctccccgaaatgggggtgggattttatttatatttaagttcgcaaaattgaaatctttatcccgcaagcaagcgtgggtacttaattaaattctaattaggacactatcaatatcctatttagctgcgtagcttttgtgcgccgcggtccctttcagcgcggtaaatagggtctcgacgccttatctcgcctgcaggagacgcctcgagaagggctgcggaagataatttataggttttaattactcttcattccgcctgatcagcttggcgttcatcacaggcctgtgaataaaaccctggtcaaaagctctgtcacatcgcgctggcaagacgcttaatcaaagtgagcggccccgcgcgccgcgcggcccggctcctccacgtaatttccagccagctgataaagccagctgaataatacggcggccctttggagacaccatttacagaaatgactttattgacggcttaacgtcggtaattcattttacctttcatgtagtggagcccggatttgttacagtaatgggatgataaatgcacccgcggcccacgagctcgagctggattaggc

SEQ ID NO: 331415 - DNA, 846 bp, Homo sapiens
  chr2:119613031-119613877
  hyper
cgaggaggctgcagggacgcgcatggaagagccggtgcgtgggagggtttgcgggggggacatcgcgccccctaggggtgaccccagtgggtcccgtgtgctctccgcggagccggcggagccttgtcctctgcacccggcgcgcagcggccccttaaacagtggaaccgtgaggccgctctaagccgaagggctggaatctgggtttctcgggttttattttagaccattcggcaccaagcccgagctcccccgccgcaccgcttccagtcccctttctttccatagagcgacccgaagccggcggtggcgcagggagccgagtctgatgagctcgcgggcggctgaaggccggcttccctgtggggaacgcgccacctgtcggcgccagtgagaactgcgtctgtgtggcgccctcggggtattcggggctgcggggagatgtgtgcctgaagccctgcgcttgcggtggggacgtccggcctctttcctggcaattgacccctgaggcgggagagacaacggaattcccacaaagggatccttctcgggatctccccacctcaagacagctaaagctggaggaaaagcccctccggggggtggggggtgcgggtttgccctgcgattccgaaagcagaaaatacccgagccacacagggacgggcgccgcgttggtagtcggggctacgttcctactccctctacctcccccgcgctgtgtgaccctgggcggaaccccgctgctctctgggcctcagtgttcttattcgtaaactgagggcgttggatgagattggtcctctcccaactctgaccttgaaactgatactgaatctgagcagc

SEQ ID NO: 331416 - DNA, 733 bp, Homo sapiens
  chr2:119615014-119615747
  hyper
cgagacctgagggttccgctggggcctcgccctgacacccgggccctccgtgtggtcgagagtttgcgcccgctcccgctagggcagcgaggtcccacttgcggccggctggggcatggtggcaccggttgtctactccccacttgtgacaccgacagcttccaactcctcagacccaccccgtggaattctggactttgtgagggccgccggggtcctggccctggggtcagctgccatctgactaagccaggacggcggagctccaggccttgctccagcactgccggtgcgtcggggcccgcggagagcccagggcgggagctgtgggctgagccgggtggccgcgtggacacagatgcccggccggactgagcggcagccaagactctccgtccatcccgccgctggactcgactctcccagacccgccacggaacccagatttgagcacgcaagataaagacgccagaggcgagtgcgcggcggagaactggccgcgacacgggaagcttctggggcgcagaacgctggctccgactcgcgcggcgcagaccagcttctgtggttgcactcaattgaacaacaggcggatttacgttaaactttgttttcacctttcactaagatgtttccaatttaccaaggggatagaatgagagacagagatgtgagagatacagagagagagatagagagtgcagggtcgggggaggaggcagagagcggaagc

SEQ ID NO: 331417 - DNA, 885 bp, Homo sapiens
  chr2:119913874-119914759
  hyper
cggtgtggagaggtgaattttctgtttgctggaattctgctgtgggtggggttttggctgatggacagggaaatctgcacaagtatttcgggtcacaaagaaggacgccccaggaagcccgcgctccctctggcctacctccctggccagggcccggagccctccgcttctaggcactgggaggaggctgtctgaggagggcaggctcccggccctgcctgtccagtctaatcaggtttgcaaagtctgtgccgccgcctcaagggctcgggcgtcccttcctcccttgccgggatggggatggagaccaggagcacagccctgagcgtggtgggtcgcagacgcactgaggccaggagcggggcagggaggacgcagggatttgtcttttccaaaggagatgtcaggaagtgttatgaatcgagagtggcctttgccaaggagccgcgcccgggcggagaccgggcggcctgcagccaccccgcctcgcaccccccgcgcccctaatccgggtacagaagaaagcccgagaacgtgctgtacttgttattattgcctccgtgagccttcccgccatccagcttcacatacacttcgtcccctgaatccaagtgcagcaccacgctgttactggcgtagtcgtagttctggtcggcgtcctgtgcaatggcgctggcccggacctggggacaagcggtgggagcaggtgagccggggcacctcttcccgcgcctttgctcagcccacaccaggcgcgccactcacgggcctcccgcctgctgcttcagggtccacactcccaccccagctccatgttctctctccaacttagtcaactccttccaggtcccccctcctcctcgcgccgacgagtctgggaaatag

SEQ ID NO: 331418 - DNA, 871 bp, Homo sapiens
  chr2:119914969-119915840
  hyper
aacatttggctctacgtcccggtgagcgcggcctcggcgcatcgggaagcggagatactgtggcaccgaggcgcgttcattcccggggctcgcagggtagcccgcgggtggagagaaaggaggctggttccctgggaggttcagggcgcgggcgagggtttacgggggccggtgagtgtaggggtcactgacctgcccgttcttgcagaggtccgcccacatgctggtgccgtcgccgccgcgcatgaggatgtggtaggtgaagaagtagatgccgcgtacctggcagctgaacttgcccgtggtggggtcatagtgattgccgaggttggtgaccacgtcatcgaacttcagcacctcatagccttcgtgggggctcttgagacccacatagaaggcgatcttggggccgctgaaggtggcgctcagcgcactggtcacttcaccctcggaatcgccacctaccccggccccgccgcccaccaccccgacgccgctggccgtgcccgccgtcagttgcagccctggcagcccgggccgccccgagtcgcccttctctcccggagggcccctgggtccaggcgggcccggctctccagggggcccccgcggccctggcttgcccggtcgccccgggtcgcccttgggtccctggatgaaaggaggaggagggttggcgctgaggtcctgcatgacttccagggcggcggtgctgggtccgggtggctgcgcctttgcacccgggggctccccgccgggcgcggcagtgtaagggtcgcagatcatgcggcaggtgcccatcatctcatagtgcgcggcgcctcggggcgccgcctgcagcagcagcggcacggcgatgagcagcccgagc

SEQ ID NO: 331419 - DNA, 769 bp, Homo sapiens
  chr2:119915856-119916625
  hyper
cgccgacggccgccaggcaggcacgccgccgccgctgccacagccgggaggcgaccgccaccagctcctccttgccgcccggggaggtaatggtggggcggcgcgggcggccccgctccccgcgctcggggaccggctccgcgggtcctggccgcgcccccgacgtggcgacccccagccccggctacccaactacttcagcgagaggcgccgggacctctgagcctgggcccaccgcgctggggctggtcgggagagccgcggacgcccgcgcgcatgacgtggggcacacaagacgaatccggcgccccgagggtccggcgccggccagggagtgcttgcgctggccggggagtctgcttgcggcgtccggcgctggctccgcggcgctgcctcccgccaggctccgctccgctgggtttagtggggctcctagcgcagtgagggcgccccggctccgcggcgcgctctgctgtgctctctcgctgttcgctggctcccgcgcggaggggggaccccgctaccctgacgtaaggagtccggggctgagcggcggaggcggcgaagcagcgcgcgctgccatcactcgggagacggagccctcatgtcatcagcctcctatctggcggcgtcctcggcagaggcggtgaaggcgcggttccccctggcggctcccaggagccacaagtgggcgcagcgggcgcggtcccaagccggggcacatcggacacacccacccgcggccacactcacgcgccccccaccgata

SEQ ID NO: 331420 - DNA, 667 bp, Homo sapiens
  chr2:120281422-120282089
  hyper
cgggcggctccagaatttccgtgtaggagagtttcagaagccagaccagaggaaggggtcggtggtgggcacagggattcatcttagagccgccttcgtctggcgcgcacgatgtttttctttgggaaagggtccctccggagaagagctgggagagattaatgttgggaggattgggagggaagagtccctattcctcatgggaagatctgctagtccctctccacctgcatcctgcccgaggccggagaaagggcgagactgtcgctccctcgggtccccagcctgcagaagggcgcagtactcaccgagtgcgcggcgcaggcgagcagcaccggcagtagtagctgctgcagcggcggcgacaggtggggacgcatggtgcccgcacgttccccgagggcgccccgacgtccgcctgcccgtgccctctgcccgctcgggagctcagcgccccgcgcagggtcccgggctccggccggccgctgcgccccgaggagccatggctgagccacccgacctgcggcgggccccgggactgctcctcctcggaccaggtggccgcgcgcgctaagccgcccgccccattgatcaggacgcggctttgccggcgcgcctcctccacccggcagggactggcgcggggtcggcgcggaggctggcaggg

SEQ ID NO: 331421 - DNA, 636 bp, Homo sapiens
  chr2:120301702-120302338
  hyper
cgtcgtgagtgatgcctgtcaggtgaagccccgcccactggctcgggcggctccgccccgtccgtcttctctcccgcgctccgctcttgaagggttccagtgtgtggtgtttccaactttctcatgtcccctcgggaatccattcgtatcccatgccataagtcgcgctgtctattcttgaccaggcccggcaaactgctccgagctcccaggaatcacccgccgcctccggtcgtggcccgcagcagcccggctcccccgccctggggcgtttggtcgcgcccggccgccggccctgggagcgcgtccgcgtcgtcatggcgacgctccgagcgggcgccggcgctggcgccggccgaatccggcccgggaaccacctccagggtgagcggccagggacctggggcccgggtggcccagggtcggccgctggggcgccgcagcctagctgctgaggcgaccgagccccgggtggtgtccagccgcaagtcggccgcggcttgggtccgaggagagtcgggcccagagggtgacctgaggatggtggggggagcggtgcgcgggcctggggcgaccctgacccttagcaggagtggaatgaaaggtcgcggaggggaggaggcgcttggccggggc

SEQ ID NO: 331422 - DNA, 724 bp, Homo sapiens
  chr2:121103741-121104465
  hyper
gccctcgtcgccagcggcgcaccatggacgggctgcccggtcgggcgctgggggccgcctgccttctgctgctggcggccggctggctggggcctgaggcctggggctcacccacgcccccgccgacgcctgccgcgccgccgccacccccgccacccggatccccgggtggctcgcaggacacctgtacgtcgtgcggcggcttccggcggccagaggagctcggccgagtggacggcgacttcctggaggcggtgaagcggcacatcttgagccgcctgcagatgcggggccggcccaacatcacgcacgccgtgcctaaggccgccatggtcacggccctgcgcaagctgcacgcgggcaaggtgcgcgaggacggccgcgtggagatcccgcacctcgacggccacgccagcccgggcgccgacggccaggagcgcgtttccgaaatcatcagcttcgccgagacaggtgggtccggccctccggctgtctgccgcggtccccgctcgctcccgctctccctctccttgctagctccggctgccaccgccgccaccgcagcccgcgcgccctggggcagcctggactcccggcagagctccttcggccgtggccctgcgcgctccgcccgggttgcagtcctcttcccccaggccgcagacccttgcctgctgcctcaaccccccgccgccgatcgcctggccctccacccctgctctcc

SEQ ID NO: 331423 - DNA, 1161 bp, Homo sapiens
  chr2:121199626-121200787
  hyper
cgggcgttccgctttctccactgtaccatgctaatttttcgagggacaattttttgacaatgagtcctccagcccgaacagaaaccctttatggggccggccccagggaggccgcggcgctgccaaggcaaacaaaggctcattgctgccgcggaacatgcctgcgcctttcagggccgggttcgcagagcgcgccgcctccagcccgcgccgaggtaacacctggtccgccaactcctggcgcctaatcaagatatcaatcacggcgcgggggcaggggggcgcacgggccccgaaggctccagaacccggcaagtgcaggtagccggccgcctggccggccagggctgcttggcagggagcgccgggatctggggggaaagaaatcaagccccgaagctgaaggcttaattaggctgatatcatcccgcacaaatgttcctccgagaggaaggcttctgggcaccaaaattattttgtgattaaaagcgaaaaggaaggagaaatgattcggcctttggaggagttcggagggctgggggtggcagcaggaggctggggcgcagcgcagcgccaggggcgcgggacccagccaagctccccactctgcccccactgggacagagaggcgcaagagtccaccaacccctgccacttgtggcctttcctgactgcccagggcttccaacaatgtagaagagtgacagtaaatgtccaggtccctgcatataggtgtttctttaatctgcacaccaggccggaaaggccatgcacgtcgtcgtcatcccatttcgtagatggggaaaattagctcggagaggtgacatcttgcccgaagtcccacggctggtcagtggcaagtggacagtggcaactgcgcctggaaaacgccgtccgtggcgcggtcgcggcgccaggggcatgcctgacagccaccttctctcccgtgaccgccgggctccgcatcagggcgagccactcggctcgggagagcaggaaactggggagggccgagcctccggccacgccttgtcagccccggagcctccaccaatcccgggcccggaaagaccaggcccactgccggccccgcccagcacctgcgcaggtagcgcgcgcaggcgaaccgcaggcccgggcttctggggcctcacgctgcgc

SEQ ID NO: 331424 - DNA, 112 bp, Homo sapiens; identical to SEQ ID NO: 228656
  chr2:121344943-121345055
  hyper

SEQ ID NO: 331425 - DNA, 176 bp, Homo sapiens; identical to SEQ ID NO: 228657
  chr2:121412044-121412220
  hyper

SEQ ID NO: 331426 - DNA, 1485 bp, Homo sapiens
  chr2:121493478-121494963
  hyper
cgaggcagcacggctccgcggactttttttcaaactcccatcaatgagacttcgaggaggagcgggcggcggcggcggctgcgactgcgaacgcggaggaaggccaggagccgcaggaggagccggaggaaagagcttgggccgcgcggcgcgccgcagcctcggggagccgcctgctcgccggcggtaggggctgcgcggcgcccgcccgcctctcggtcccctctcttgcctggcccgccccgccccggctggctggagccccggcacaaggcagccagccgagggtcgccgcgccagccaaggtgggatgggggcccacagccaccgcccggcgcccgagaggccacctgcgtgctagaggcaaacttttgtctctctcggtaaagttgcattggccttcttttgcttgcttttcgtgacgaagcgcctcccacctcggccaagcgcgggccgactgggatgctgcgccgtctcggggggtccctcggccgggtaccggcgcctaggccttgggatcggggccctgggcttcgggggactagaggctagtaggcgcgaccccgcctggggctctggacgagcagggcggggacgtaaggagagtcctggggcttggagctcgtggccagaggtcgatgttgcaccctctccctacctgggggagagcaccactcttctcggggtgcacagcgagccggcctccgcgcgccggcgggggtctgttttttcagggggtggagggtgggatcggaggctgggatgctccgaagctgccgtaggtgggcatgggagcgtgtctgcgggcgtactgagcgcggaggggctgcagccagccacttgagaacttcgaactccacttctccgcgctgcgcgtcccggagccctgcctttctttcttccttcctcaatccttcctccccctcgcccggcccggccgccccctccccctctgctgggctctcctcctcggccccccctctttgcctctcttctcctcctctcctgccctcggccctgagatccgcttgacttcccaaagggatccgcacgtaatcctttgccgggtcctccggttcccccttccacctcactttcatccctgcccccctactcatcgtctctccccacccccgacaatctctcaacaagtatatttgctgaggaatttgaaaaatccactactgcaacttgatctgtatgtgatggatggggagaggcgcggagagagttgggcgccaatcctattaagggtttagagaggggagtcttttccccggacggggcgggggcggggagctgggagggagcgtgtgcttgcgtgtgtgagtgtgagcgcgcccgccgcgctggagagctgggagtccacccagctcggcgccttttcagcccggcggtaactgctgtcatttcctaggaaacccgacttttaccgcgcggggagctggggatggagcccgtgcgcctcaccctgggtgatcggtc

SEQ ID NO: 331427 - DNA, 501 bp, Homo sapiens
  chr2:121499189-121499690
  hyper
ctcctccccgcccccgccgtctggaccttcctctccctccgcgccggcttttccgccacgcggagcgctggctggcgaggccgcgtgtccgagcggcgccgaccgtgccgcggccgggggacattccgtgccccgagcgccccgggcccgcggctgcggccctcccacctgcgcgccggcctggtttgcagctcccaaacaatggccacattgtcgcagccgcacaccggccgccgccggcgagtggcgggaggccggactctgctcgtggcgagtcgggaagaaagccaacgggccaggtccccacagccgcgcccggagcgcgcgagcggctcccacccgggaagggcgcgggttccgaggggcgccccgggtcttcctcgaccccgtttcccattggcctgccctcttgcccgcttccccaggaggggcttccagttgcctttacagctggcgaagtgaatgagagcactccacgggagccgggaagagagaggcccc

SEQ ID NO: 331428 - DNA, 154 bp, Homo sapiens
  chr2:121834588-121834742
  hyper
cgctgagacggagtgaggggtgcaatagcgtaacggggagcaccacctgtaagaggagagggaagaagcaaggtgggcggggccggccatcctgatgcatcctccctgcacaacctgcacctgccagcagagggcgccggagcaaagcgcgccc

SEQ ID NO: 331429 - DNA, 759 bp, Homo sapiens
  chr2:122042333-122043092
  hyper
cggcaggtgcgcgccctgcaccctctctgccgcctgggaggagccctcgcagacatagggctctgcgcgctcgcctccccagcgggcccccaactccgcacgtcgggtcccgccggcgtccatctgtcagtccctaggcgggacgctgggcgggtctctcagtccccagagggcggacagcggggaggccagggcccagcaggggcgccccctctccgcccctggacgtccaacggcgcccggcccgccggcccggcccgagacccgcggggaccgcgcgcggcccttaccgcaggtagctgccggagttgtgctggttgtagtgctcgggctgcgtgtgccagaagagcatggctggaactcccagcgcgccgaccggggcgcggcagcaagcgcagacgcggggcgcgccgaggacccagcggcggcttcgcgctccgaacccgcggtgccggccggctcggcgcatttatcggcggcccaggggcgggacagcggtgagacccgccccccaggaagcgcggcccggagggcggctccccgcggcagccgcacctggctgactcccgcgcgtgcctttccggcgagcgagcgcgcctccggggcggccagaccagagggctctagggccggccgggtgctctccccaaactccgatgtggggctcaggtgacccttgccgcccccaacccgctccacacggcccctctggcctctgctccccactctacgcccagggccggtctccagagcggctcc

SEQ ID NO: 331430 - DNA, 783 bp, Homo sapiens
  chr2:124782548-124783331
  hyper
cgtctgtcttgcaactcctattagcatccttcgacagcggcctttgaaaatctcctttaaatttcaatacctctactcgtttcccaaatggggggaagggaagagaaagccggggggtagagagaatttccttcccctttccctcccaggtagccaaagcgcaccgcagcggcttggcttcctggaggaaaagcgcccgagcggggcaaagacccgcccaggctgctcttataggcgagcgcggggcgggcctggctgggggcggtgccgcgcggccccgctcgcctataaggagctgtccgccacccgggtgctgattccagctctcgcgcccgacgaggtggatttggctgtccaccgagctccggcgcctgtcgttctaattgggtttggatttgcaccgttaaggaggggggaagagaaggaagaggcgggcgaggaaggcgagtccagctagcggctgttgcggggaccgtagccccagctgcagctccgaagaatcccccgccacggtttcggtggagcgtctgggcacgggatggagtgaaagagcgagtgcctctccaagcgggggtgggagggggtcaggctgtgcagaggagagagacagcgagaagaagccgcggctggctactgcgaatttgggattcgattgggagggaccgctcactcgggggaaatggattctttaccacggctgaccagcgttttgactttgctgttctctggcttgtggcatttaggattaacagcgacaaactgtgagtacgaggagctgggggc

SEQ ID NO: 331431 - DNA, 1016 bp, Homo sapiens
  chr2:127413347-127414363
  hyper
cgcccagctatccagcggccgcgcagccagccaagatttcaacacaggtctgccctatttggtcaccatccccgacagtgctgggccaggccatcatgtcacattggggagttttccctgcactccagggggaattctcaaccacaacctctgtatccggtagtggcagatggaaagagaaacggttagaaaagcgtggttcttgcgcaggaaagttggagcaaagaagagttcagaagtgggcgggtgtgtgtttaaaaaaaaaaaagggggtggaaaccccaccagccaagtctgcagaaaaaaaataaatgaagtctgcctatctccgggccagagcccctcccctcggcccgcgcgggaggagtgtgacccaggtgccgcttcctctcgccgccgagggtcaggagcccgggagcgcgaccctcccccggcccggcctggcccggcctggccagtccccgcggtctctgcccgggctgacgcccaggaatgtggtcgacgagaagccccaacagcacggcgtggcctctcagcctcggtgagtacccgccgtggggaagggtcctggggacccactggaggccgcggcccgcagcagccaggggccgagccacggccacggacgccctggtgtcccggtccgtgccgggcctccaggcggaggaggcgtccgctgggctcagatccccgactccagccccggttccccggcgcctgggctgcgcggagtccctgtcccgcgtcccggacccctacgcgcagcctccacgcgctccgagctggagaagccgccagcccgccctcccagggcgtgtcgcccgctttctgtttctttgtgcggggcatgtgaaatgtgtggggccagaattgtctccctaaagaacagttaggtgagagttcacatcacaagttgcttctgtgctgctccccagccagggtccgaccggccaggctccggtgaactccaggcaactccagccttgcccagggacttgctcgctccgctgggcgcc

SEQ ID NO: 331432 - DNA, 748 bp, Homo sapiens
  chr2:127534437-127535185
  hyper
ggagggaagcccgccgggaagctgaagacagtggtcaccgccctcggtcattacttcccgggacccggaccctaaccctgcgccacatctccacccgcccccagccgtgtcctggctgcgcagctggaaaggttgagcagctcactgctgtccctctgttcggccttggacacatcgcctgaactcctgggcgcctctgctgttaagtgggggacagcactatttactggggaggaaaactccaggaatgtggaccctggggccacgcaggggttgggaagtgaagggcagggaacgcgggcggcgcccggggtctgcgggtaggcaggcggcctggccgcggaggcttccccgagtcctgcgccttcctagagagggaggggctcatatcggctggcacagccaccacgggtaccgaaacttggggacgtgcccgaccatgcctcctccggtggcccgggggccaccccgcattgcttagaagtctcgcttcccgttcctcctctctggttcagctcattactcttccggtgaccctgggtatgccacgcttattctccaggcctcagtttccccatctgtgctgtgaggagtggaaggaacgggatgactaggagccttttaagaccgagtattcgaggttctttccggccccgcggagccaggaggtgccagccgagatgcgcgtgccgcgcgcgccctccagtgcccggttcccgcttctgcacggtcctcgctgggcaagggc

SEQ ID NO: 331433 - DNA, 166 bp, Homo sapiens
  chr2:127643937-127644103
  hyper
cgtggccgaccctcccagccccctaaccccggtcgggcccatcacccagagccccaaacgcaccctcgcggcgcttcagcggggtgggcgtggtctggtcgacccggtggtgccgccccacagcgccccctcgcgtgcgccagccagctcggcctcagctccccgc

SEQ ID NO: 331434 - DNA, 572 bp, Homo sapiens
  chr2:127782995-127783567
  hyper
cgaactccacgacatgggaggcaggggcgggccttttgcaggggaaggactcccccagcaggacgtttactgaatctggagggagtcgccctgcagatatcccgcggaagccggaggagacccaggtgcgccccaccggctagctgcgcctgcgggtgcccaaattggtgtccgggccatcctcaccgcagtgactcctccgcagcgccaacgcactccattttccttccaccctgccggtggggggcgtttgcttgttctcactctgcagccgcagccagtggcgccgctaccaaggtccccgcctcgccatccgggtcctgcctgagcatccttattggtgctcagggctaggcgtgcattgctgctaggggcgcggaaaggtttatcgtgggtggatgctgcccggggcttgagtggtttttagaggtcttgagtggctcactctccaatcagcgctttctagagacagcgtggtcagcgtacttgcttactttcaggattgcgagacgtctttaacccttgctgatcggctgacgctgcagcttcctgtggcttcctgctcatttccc

SEQ ID NO: 331435 - DNA, 936 bp, Homo sapiens
  chr2:127863367-127864303
  hyper
cggcggccgcgcagcgggtgggagagggggcaggcctggccgcggggcactggggggccaccctggcagaaacacagattctgcaatctcagatttcagagttggagtcgtcaggggaagtggcgtcagcagctggcgtgatccaattcaataaaccagaggtggcttgggatagacaactgaccgggtgcagacccccgcccctcaatctctgcatttcctgcacgctctgggcaccctgggaggccccggctccatcccccattccagctctccgcgaggaggggtcgggtttcctgtggcgccttccacgcgcctcctccaggccagctccccacccggccgtgggctcccaaagccagtgccgccacccgctccccggccgccggaaacgctaagcccctgctggggcgagggcacctccttgcggggtgcgtagccctgggctcccggtggggccgggctgggcgggagcttccaggccgcaggcacctctcgggaaaggaaacccaatccctccttcggcccacggagaacgaaagtggagaagcagtgggaaggaaggaactgtgggtgccggttcgagaagcagccttgggagtccgggggaatagtgtccccaggggcagagggacatactccctctcgccccgagcgccggcccagcctaggttgcctgcatgggcctggagagctgagggtcaccacctggcctcccagcctcccggcccttggcctccaaagcggggtagcctggagcgcgcgcctgagaagagcctggagcagggccggccactgctgtgcagccgagccacgaaggtgcaaagcggggccctgtcctgccccggccgggtgtggggagacagaggacgcaaacctaagagggcacccagagcgccggggaacgcagcctggggacctcgaagcccctcgaaa

SEQ ID NO: 331436 - DNA, 749 bp, Homo sapiens
  chr2:127976389-127977138
  hyper
cgtgctgggccgggcacccggggaggcggacgatgggcgaaggcatcggagggcgccgccgcggctcgggtgcagtgcccctgccacgaagggcgcaacggaggtgggcgtgggaaggacagcactcaggctccaagtgggaagcgtgcggaattcgccggccccaacgccctagcgggtggctgggacccctgggttcctcccacgtccctgcctccagtcccggcgcgaactccaggtgtcgcccccaactccggcttagagcctacggcaccccgagcctccgagcctccgtcccctcttcccccgccattacaaaatacaaaaaggactagaaatgaatacacacggtctcggccacctaaggacaccgagctccgcagagcctagaggagctagggaacctagcgctcccctcgggccggccccaggcagcagcccccctcagccccaactccgcgggtcccgccagctctccactcccaggccccggcggcgtccaccaggcgcccgctgcccctccccaagtctcctcctccgggacctcagccctggtgccctccccgcagtcccattcctggtttcccttcgcggcgccccctccccaggttccccaaccaggcaatccctgcctgggtccctccccgggaccagtccctggagaccctgcccgccgcctctctcgggctaccactctccgaaactccatccctgactcccctccccgctacctcctccccaggggtccc

SEQ ID NO: 331437 - DNA, 550 bp, Homo sapiens
  chr2:128173501-128174051
  hyper
cggcttcctgggtggacctgaccgcgttcgggtgcacgtggggcgactcacacctgacaagtaaagcgggtgaggccgcgcctgtgaagggcgcctggctcctccgcaggagcggtgcggcgcggcgcccccggctggaaccaggtgtaactgcagagaccctgggatcgcaggaacggctggcggcaggactgtccctacctcgagaaggtgacggggtttcctgcgctgccagccgatgaggcggccgtgacgcagcccgccgtgcagagtccccgtcggccgacaggcgtgcagagctctgcagaggacccttccgccctctgggcagcctgccaagccgtggcacccccaacccccagcactgggcacttgggagcattgcagccgccctggctcgtaccggtgccggtgctttgggcacctgggctggtttggacatgggtgccccgggcagagtccatttatgcaggtcagaatcagtgtgtggagcctgcatagacttgccctggagcggctgcctgtgctggggtggggaggagtagagggc

SEQ ID NO: 331438 - DNA, 153 bp, Homo sapiens
  chr2:128284484-128284637
  hyper
ttactaactggcgcgatccacagcgcctcctctcccggcgtcttcctctctttcattctaaacaacgatttaatttccttgttaagaagccatttagccaacagtaagaagtacacgtctttgcttccagaagggttcccctgatgaaacacc

SEQ ID NO: 331439 - DNA, 335 bp, Homo sapiens
  chr2:128421756-128422091
  hyper
cgacgccggggcagagcccacggcgtcggagggccccggtcgggtttccgagggaaggcctgccctgccgccgcagctttccggccattgtccccgccacccgccccgcccctggccacctaccccgtggctggcggcgggctctgccggtgctggcgccgccggtacagccccgacgcggccagcgcacccagccgggccgccatggcgcggggcagccgccttgaggtcgcgggcgcgggccgcctggtgcaggggctatgggaccacctcggaggggaggcgcggccgcctggggccagacaccaagacgggacgggcgtgtgggcgcctcc

SEQ ID NO: 331440 - DNA, 103 bp, Homo sapiens
  chr2:128459399-128459502
  hyper
gtgttgctgctgcgcgcgcgcaagttcgcgctgctctggtcactgggctcggcgctggcgttggcgggaagcgcgctgctgcggggcggcgcggcgtgcggac

SEQ ID NO: 331441 - DNA, 429 bp, Homo sapiens; identical to SEQ ID NO: 221869
  chr2:130737208-130737637
  hyper

SEQ ID NO: 331442 - DNA, 240 bp, Homo sapiens; identical to SEQ ID NO: 228684
  chr2:130763501-130763741
  hyper

SEQ ID NO: 331443 - DNA, 755 bp, Homo sapiens
  chr2:131484816-131485571
  hyper
cgagtttccctctcccagggaatctgcattctaagaccccaaaggccggcgagggtcgttgtgctgggctggacagcagagagaggctcggccttggccctcagccctgcagcacacagggcacccgcgcagagagcgtggcctgcgaatggctctgctgcctctcccggcctggggccgattagaccggtcagagcatctgtaaagtacaaggggcccctagggagtgcaggccagggcagctggggcagggaggcggggtccgccccatggcatcgcggtttctctggaaggggtgatgggctttctcagaaccacctttagtttctgtaccgtaatcggccaaaaaggcgcaggcgctgctgctcctggcagctgcgtaacaggctctcagaggaggacgcggttccgggctgcggcgggcgtggtccggggctgttctgggcgtggtctttggctgtgatgggcgtggccttgggctatggagggcgtggtcccagggctgcgatgatggtggtccggggctgtggtgggcgtggccccgggctgcggcgggcgtggtccccgggctgcggcggacgtggtcaggggcggttctgggcgtggtccctgggctgcggtggacgtggtctcgggctgtgacgagcatggtccctgggcagcagtggacgtggtctcacacccagagtctgaaatttctgcctcttcctggccctaaaaatatcctgcctgttcccacgcggctcctgccttct

SEQ ID NO: 331444 - DNA, 739 bp, Homo sapiens
  chr2:131594562-131595301
  hyper
aaggtgagagccggcgtccgggacttgcggtcgggctcccggcgccctgcgcgggtggggaggagcacagcccgcgctggctgctgcgccccgggccgtcccctgggcacccggtgggtggggacaccctcgtggctccccgccgctcccaactttccgacgtgcagaccggaggcggcgtcctgcaaagtggggccgtctcgagcgcggggaaggacggggctccgttgggggcggtagggacggcggcccggggcgagcccctgagagggcaagggcgagcgcctgagccggcctccccgcacctggaccgtcctgggcgcgcggggcactcggagccgctgcctggaccggcctgggcgcgcagggcactcggagcctctgccgcttggcgcagtaccagctgttttgggaaggagggctggtgccggcccggtgggtacgggagaagtggttgctgttgttattccccaggctgagagtacgcgagggcgcagcagcggcaaggggctggaactggggtcggggctgttgggctcctgctcggggtgccccctctctggcccgatttccgggcccgctcaccatccgggacccactcagttgggacgcctccacctcgctgcccccacaggaaccccaagatgggccgggggctccggggcactgtcaggggtggccggccacaggttgccaagcccgacctccccaggtgagccagcgggagggcggttgcgac

SEQ ID NO: 331445 - DNA, 1548 bp, Homo sapiens
  chr2:131720733-131722281
  hyper
ggtcactgaactcttccacacgctttctaaaatcgtttggcatggactttcctcggccccttaatcaccacagggtgtgtcctgcccgggctgtcaggagggtcgcaggcgcccggtggtccacgctcaccgtgcgcctggctgagcgcagatgagggtcgtgtcccgtctgagcgcgctccccccgccggcgcgcacgcctgcccgccgggtctctgccctgggccgagcggggccacctgcttgcgtcctcgccctggatggcgtgggaggcgccgccaaccgtctgagctggaatccttgcggtgaaaaagtgggcgcccaccagccctcctcaccaccgcggctgcgacgagcctgggcgtcgcctcctaaggatggccctgtcctaacacacgcgtgcggacacaggtggcggcggcgcggccctgcggcaccgaggacgacccggagccccgcgcccgcgcccgccgccgcagccgctccaggcctgcgtgcgcgcgtgcgtgagcgcgtgccgaccgggcccgcgacccgcactggggtcgccgttgaggctcagcgcccgccgggcggccggtagtgggcagcgagctgacgcgctgcgctctgccgggagggcgcctggcctcgctccgagccgcgcgcgccccgcgcctgccaagggtcccagctgccgcggccacagagcccgagcggggggtcggctgagagcctccttaacggagccccatgatgtcagccggcccgcacgcccctcgccctccgactgcgaccccggcccgggctcgcgcgccccgtcccccggcagccccgcggccgccgcaccgccgcccccggcccagccttccccgagcctgtggctggagctcgggcccgcctgcgtgcgggcgcagcaatgccccagcgagtcaagcgggcagacgagtggcgatctcggcactagcagcagcagcagcgccgggctgtccccgggctccgactcggacagcagcggcgtggtgtgtggcggccgcggaggcaacgggggcatgcgcggcgccgtgtcccgctcctggagcctggagagcctgcgctcggccaccgccggtaaggacgccgccatccccgcgccgcacgcgccctccgcgcccgggtctgtgctcttgggaccccccgcccccctcctgcctttccttctcctccctcactttctgcctgtcgtttccatctcctggtcccttccttcccattgcttcgccctgctattccttttctttttctggtttccttctgattcccactgcctgtctctctgatccacgtctaccggtgggccacctgttacagccgggaccttgttggcccccataccagagcgcgctgtcaactgggaaactgattaaggtgagactagaatttggtgcccgatgcgctgtgttcctttccccaaactgttcttgaccagttgcacctgtctggctttacctaccgcagctgcttagcctctgtaaagccaggaggatggaagggggccgctggccgagggtggaacggattgcgccacct

SEQ ID NO: 331446 - DNA, 829 bp, Homo sapiens
  chr2:131792026-131792855
  hyper
cggacgctgcggtcagtgaagaggggcccctcagggtggatcgctcccaccggagtttaaatcctgcctccgccatccctgcattcctgcgcgattttatgactgagcagaatccctaacctttcagagccacgtttactcatctgtgaagtgggggcctgcggccagtccttgtaaggaatcagagtccctggcccatccctccccaaagcgccggtgccaggcgttttggcctctgtatctctgaaacgaggaggtcccggggcatccccgagcgcccccgtggccatctgtgccactggccagcccagggccaggactgctgtgccggcgtggagattcccgaccctttccaaggaggtgccaagggcgcagcgcagcgcacgcccgagccgccgcggtccctctgagcctctccagcccgccgccgccgccgcccccgcccgcacagccggcttggttgccagggttgccagggcttggggcctgggaggcgccgcgcgcacggcgccggcttcgcgggaggagccccaggcccgcgagcgcaggcgccccgcctctccccgggcgctgcgggccaccggctcggccctgtgcggcgggatctcggggccgcacggagcgggaggccgggcgccatggcgagggccccgcagccccggcgcggccccgcggcgcccgggaacgccctgcgcgccctgctgcgctgcaacctgccccccggcgcccagcgcgtggtggtctccgccgtgctggcgctcctggttctcatcaacgtcgtactgatcttcctgctggccttccgctgagcggccgcgcagggcgccgc

SEQ ID NO: 331447 - DNA, 382 bp, Homo sapiens; identical to SEQ ID NO: 228693
  chr2:132121378-132121760
  hyper

SEQ ID NO: 331448 - DNA, 1342 bp, Homo sapiens
  chr2:133426955-133428297
  hyper
cgcgctcctgtctagacccaactacccacgctcccgcagccccacatctatcgcactctgagcgcagcaacccagcttcagcgtggccgcaggctgcctcgcgcatcgctcacctgtcggcggcgccactcccacggggtgccggaggcgccagacaacttggcagggttcgggagatgtcgccccctctccctcgcccagaacccagcaccgctcggaccctccctcctctcaagcccagcttctcccgacggtgcagccggacaagctgcagcccggagtcccgcaaacccgccgctccccgctctcctcctgcagcgcgggacttggacactttcccagcctcgcgccccggggcaccagtcgcggccgccaactcccgctgggcagccccagcgcagggctggccccgaggtgggcgccttgggggcaaaagggctggcgggtagatggattgtgcgcacctggcctcggctgctggcctctgggtattctcacctggaagcaagaacaatccgcaaaaagttgccgcgatgcctaggacccacattctcccggagtcccggggccgggagagggcaagcgcatcagaggaggcgacagcagcggaggctgccccggctgcagcggctgtggctgccgaggctgctggggcccgcgctgctgccgcggagacgacggtcgtagcttagaggagccgcaggtgccgctcgcggagcctgcatcgcccgcgctcgggctcccggctgcgggtctctgctcctcccgctcgcgctcccgggccgagcaccgcgcctccggagttggcggctgagactgaaggaactactggcgatcgggagcacccacaaaagtctcgccttttctccccacctcccactccaggcatcacgtgacggctgccgagttggggtgggggtggcgggcggggaaggctgggacggtcgcttcacatccccacccccttcctgtcttcctcttctcccgcctccgcacgttcctgggaaaggggcgccggggggcgggagagaactggtagttttctgagatggggaggttgggggagcggcgaggagggcgcagcaggtgccgtggggacctgccgggtgcggactagggtctgaggactgcgtgcccggctggcccttcgcacataggaaggcagcctccccactccacgtcctctgcgccttccaggactggtcggtaccccagcgactgggtccagcccacacaactgaggctgtcccgctgcgggccgcgggagcctggcgccccgggaggctgacaggaagggcgcgcgttcccgtgcgcctggcaaagttccacgcccgcaggctcc

SEQ ID NO: 331449 - DNA, 799 bp, Homo sapiens
  chr2:134023959-134024758
  hyper
aagcatacagtctgcggggacaaggactgaacggggtagtgggagccaggtgccgaagggctggggctagggtggcggcgcgcagggggcgcgcctgggcggggagtgggctggcgtctccttacctggccttcggtggagcatgctgctgcgggctgggggcggggtgggcgctgcgtccccaggggttgactccgcagcgccttcacttcgggggcagcaaggcgcgcgctgcagagccgggagttgccaaacttgccatgtccagagcgcggaggcagcctgggccacgcgctcaccgcagcccgggcacctcgcgctcctccgctttgttgtgttccgccgccagtccccctgcgcctgcctgccagtgtccccgagccctctcctgccgcgggacgtttcactggcgctcagggaggcccctcgggtgggcagtgccactttcctcctggaggcgcgcgttaaagatctgcctgggagcgcccggcgggcggctcggcttgcgctctgatgaggaggctggggcccatcgattcccaccccctacccactccccctcccctcccctccgccgggcccccccatcagaagctgcttaggatcggcgctgtcaaatccagcccatctgctgcaatcataatcagtctcaaccgaacggttctgacaaatctccgcctggagctggagttggagaagctggagagtgaggggcggggaagggaggtgggggtgaggggacgatggggaccgggcgccctgagagggggcctggagccttctattgtctgcccctaac

SEQ ID NO: 331450 - DNA, 183 bp, Homo sapiens
  chr2:134325872-134326055
  hyper
cgcggttggttatcctctgtttatttttgaagcattcaaaggccacgctaacagaacagactcggttttcctgaacatccacagcggctgggaagtcctgccgtgaatgcggagcaagtttgcggagacttgctccctgggctgcggctccgtagttgcttcgagcttgtaaatacaagctcc

SEQ ID NO: 331451 - DNA, 1410 bp, Homo sapiens
  chr2:135475603-135477013
  hyper
cgcgccctccggaaacatcaggtttcagtggcatccatccagatgaggttggtggcccaaatccaaatgtcccattcctctgccccatcatgagacgacggggcagggacccactgtgacccgcgtccgcgattagaatcggggactgcccgagaccagaggccgcccgagtcccggctcgctcccctccttgcgcccttcgccggggcgggcagccgggcggccgccgagggacatctcgcggctacacccgcagagggaagttctcccaggcagccggcggagccgcaggggactacggaaaggaggatgcaacgagcctgggtccctccgagctgagtagggcccggagtggcccagaagcgctcgactccgaacgcaaaaaatgcctcccgcaaacttttcccgtgggcgccggagggcctggagctggcggagaggagggcgcgagtccaggcggggtcggcctgaaggcagctggggtctgggcttcgagggaaggaaccgcagccgaggcggtgccggccgcagaaggtggggctgccgctctcggctagcggcgttctcgccgggaagtcggggctccgcgcccccgcgcgctccgagccccgcgcctcgcccagcgcggcccgcgagtggggagaggcgggccccgagcagccaccccggtcgccggccgggtcgggcagctcgcgctcacctcggtcctccagcccgtcgctgaactggccgctctcgctgatccgcacctgccgctcctcctccagctggggcggctcgcgcaccggggagctcagcggggccgggccgggggcggcagccggtggcgcgtggccccggggcggcggcgggacggtgggcccctgggagctgcggcgctggatgcccgcggccggctccatggcgcggggctgcggatcccggcggcggcgacgacaagcgcggcggggactcgagtcagaagtgcgaggcgccgcggctctggcgggggcaggagcggacggactggccgcgtggacagggagggagggcgggcgggcgccgcggagtggaggtgcacgggcgggggcggggacgagcggagagccgctcggctccgcggccggtggcggaggctggggccgcgttgttgccgccgcgctccgcccctgggggcaggtgcgggcggcagggacccgccccaaggcccgggcgcgggagccggcgcaccgaggcggacgagagggaggaaccagcgtgaggacccacaggcggccctggcagagcttggctagggcgtagcggggacccgccccacctgcgccgcgggatggtgcccagaggggacccctcccactggattcctctggggtccgcgaagcccgcggccgcgcgtgggtagcagacagcgcccctaatttggcatctttc

SEQ ID NO: 331452 - DNA, 3442 bp, Homo sapiens
  chr2:136873862-136877304
  hyper
cggcgtggggggtggggtgggtgctgctaggaggggcagtgattaactttttgtaagaagtttttcgcccagggagggaagaggggagaagggaggatcacggggggagggcgggggcgttgcaaagactcattctcctaaagcgcaaaaacttaattttcccacgcctgcctaaatacaaaccattctgggcttcaagcaacttgtagtgggtaaagagaatgcggtcttaaaacgaaggcccttcggtgcttggggtatattgggcgggagtgtcagaaaatgaacaaacggcacctcctcccccaagcgggcgctcctccggtgtgtgggtctcttgccatcctcgtgtttatcacttggcgcgtttgggacgttagggagcggggcattttcctgggtggagaaggtaacggggtctgcacccgtggtcctcgccccaagtttcatttcctcactctcccgggtggcttcccattaccccgccactgatccagttaacccggccggaggtgggcagctggaagcctccaggcggtgggcacgcggggggccgggtcgtccagccccgggccgccgcggctgcccactacacccacgccaaccgcccgcaagcagcgctgcaggggctccgctgggcgacacgccaggctctgtcccacagggtgctggggagcgactgggcggctccgccgcgagcgtctttgaattgcgcgccgctgcaggaaaccaaaaactccctagcaagagggtttcaaaaggtttctggaaaccaccgacggttaaacatcacaactggactcggagagagccaaacggtttccccacttgcacctgccagtcttcgcggcggcgacctggcagcccaggtgcggtcttaaccgcccccgcccctcaccccgtacccgctcctatccccggagcgcaaatctcagggctggcagctgcgcggtgtcaaaggggaggtcaaaccactccgctgacctctgcacgaccccaaactctcgaactgcaggacccactcgcggccgtggggaagaggcgcgcttcggacggcgggaaggttttccccctcaaacccaaagcgcgcgggcggatcaactcctagctgctgccaccactcgatcccctcagaggatcggcgcggtgggtccacccgcctctcccgccctctgcctactgtgctgggagactggcacagctccgtcggccgcacagagtttaacaaacacgcacccagtgtcaagaacagtcaccaggcgcttaaccccgaagttaaagcgggcgcaatctcctcctgggaactcagcccaggcacgccgccctccgcctctaaattcagacaatgtaactcgctccaagacatccccgcttccccaaggaagagaccggtggtctgagtcccgaggcagcgcgcacgccttctctgcacttgtgcacagaatgttcttacgtttgcaaacagcgtgcaagccgccgcgcgcggcgggactcaagggggagacacatgcagccactggaacgctctttccagtcgtttctcctcgactcacagagaaaaagattccaatcctgctccccccccacccacccgcactatataggcatggtcaagaaaactcctttcggtgacccttttttggagtacgggtacctccaatgtcctggccgcttctgcccgctcggagaggggctgcgctctaagttcaaacgtttgtacatttatgacaaagcaggttgaaactggacttacactgatcccctccatggtaaccgctggttctccagatgcggtggctactggagcactcaggccctcggcgtcactttgctacctgctgccgcagccaacaaactgaagtttctggccgcggccggacttttataaaaacacgctccgagcgcggcgcatgcgccgctggggcggggagggagaaggcggggtgggggagaggggcagacgcgaggaaggagggcgcaggggcggggcggagaggtgcgcggcttgggaagcccaggggaccctgctgtttgcgggtggtcggtagtgagtccggagccggacaggacctcccagaggcatttcctaagtttgagggaagcgggatgcgcctgaagacaggtgggaagcgcgggctaggaacgcgtctctctgtggcgcgtccatccttgctaaagtggatggaattccagacctgggaatgctacagtagagacactgaggcccagggaaggggagtgacttgctggagtaacccaaccagtaggcggcaatgctggaagtagggccaagcttccaacgccattccccgcgctttcagcagacgcagcccattcaggaggtaaaaggagtaaagatccttccttcggaggatgtagctatacttgcacattcacagcatcactagggtcaggtgcagataattaggagatactttcagaagaaggtaggatttggcataattctggagactgatcagatgtagatatgtattgctcagtaatttcataatagcggtaaccaattcgcgaatagtgctttattatcctaaaagtatgctttattataagagtaatttagcgaccagtactttttgtaacagatcactaggaacttgcacagaatcactcattcattctcacaacaccgtgtgggtattaccatcacagagatgcatttagtccgatatttatagaaggacgaactgcgtgccacgcactgttctaggcgttggggatccagcgtgaaccagacaaggcccgcattcggagaaaccagcaaataagcccggagagatgaaatgccagggatgggcagggattccaagccgggcttgaacccaggtcttcggtccccatactcggcgtcttccacgattttgagcagaggacaagctttggcacgaatcagaaattaggttgaagaactgggcggggcggagtgggggtgggggtcagacgtttaaagcgatctcagactggctgaggtttgcagtgggcgcgcagacagtgctttccccctcgcgccacttccctccggcgcggagactgggtggggcgggggagcgagtgtggggcggggccgagaaactgcgtccgcaggcggggtggccgctgcggagatagctgggaccgaggcgcgtgcgtcgcgacacggaccccagaggcccccaccccgaaatggtcccgaggagagggattgcccagactgcactctacacacgatccctcttttctatatcaaaagaggaaacatttcagtctggagtgttccagaggtagttcggaggcagggaaccttttctctacagagcatgactttccccctttgtctgggacccctccctaatgttggtggttaaaggttctcatctactctgcactttcactgacacaggaaagatgatatccgggccgggagatgggactctcagaaacgaac

SEQ ID NO: 331453 - DNA, 75 bp, Homo sapiens
  chr2:137181225-137181300
  hyper
cgcagccaagggcgtgcgcagcccgcggccggaagcgtcccggcagatcgcagacggggtgttgagggaccccgc

SEQ ID NO: 331454 - DNA, 930 bp, Homo sapiens
  chr2:137522848-137523778
  hyper
cgagggtcgtgcgggtgcgcggcagaggcggtaggaggcggaggagaggggggagaaagagggggcggtggggaacagctgccggggtaggcgaggcgcaaggtggctccccgcggccccgcgccccgcggctctcggacgcaccaggcagccaatggctgcgcagaggtgtacagcagatggcgtctgactgcgccgttccttcctcctcctcctcctcctccttctcttcctcctcctccttctcttcctcctcctcctccttcagtgctgaggagccagagtcgccgccgggttgccagacgctggaatgggtggtcttccgacacacaccaccatctttcttgcgctcgggaagctcggggctcagcggctcccagaggttacggcggcggctctggcgagacgggtgagtgcaagcacgcggagccccgagtcggggatgccgggccccctggccggccgactggggcgcggggtggcagcgccggggaagggggcgcgctgccggcgcagactttgctctttcctcgccggacagccatcgtcgccccttctcccagccagacgcgggaacttggaagcggatcttctcggacgcctctggcttggggctgcgggaagcgtgggctgcccggggcgcagtgtgcggagaccctctaggcgggcggggacgccccacgcggcgacctgagcaccgacctcatgcaacgggaccgaaccttgggacccgggcagcaggagctctgttcccttcacctccagcttggtttgagggatactgatgaaggaaaccgggggtttcccgtcctgcgcggagagcctcggcgcccaaaatcgaaaggccgggagttgttctgcaggctttgcaaacaggttgactgagggtttcctttcccgtagcgctgactgcgaaatctgtgcataggc

SEQ ID NO: 331455 - DNA, 878 bp, Homo sapiens
  chr2:139537357-139538235
  hyper
cgtgaaaaataaacaccaccaagcctctcaaactgtgaacaggaggaaggtctttctgccccttctcatcctatcaatttactttccttcctctccttgaccgcttatcaataaaccgcttccttctcccggacctacttcccggccaccttctgcctactttaccccagcgctcaagtcccaacccgtgctaagcccctgagtcgcctgtagatcccgtctattccgttcttcaattcttccctttcgacctctaaggcaacccaaaactccttgccctccgcgcgcccccaaccccacttcccaagcaggcccaggctgggctccaagtcagccgcctgcgcggttttcccgccgaaacgcgtccccggcgtgtgggacggcgcgcgggccgggcactcaccagctgcagcaagccagggaccaccacgaggggcagcggccgcaggcgcatggtgccggctggcgcggcttttcacgagctgcgcgccctcgcctgcctctcgcgcatctccacttcgcggggcaggactgaggacgccagggacacagcgcggcgcttccctcccggaatccgagcgctgcgccgtgccgcgcagctctggccgggtgggcgggcagggaagggggagggtgggcggaccggaggtgcctctcccggccccccgcgcgcccctcctcggagggggccggcaaagagcctgcggggcagctcgagctccggcacgcggcggggggcttcagtcgcgccttggactctcccgcttggccgggcttggggtgagcgcgtggggcgcctgcgggagggaggcggcggctcgggcgcttgggtgatgggttcagtgcgaggctgccctccagatccgatcccgccgggc

SEQ ID NO: 331456 - DNA, 858 bp, Homo sapiens
  chr2:142887740-142888598
  hyper
cggcgctttcgccgctccacggacctcgaatgcagcaggtaaggaagttaacctgggagctaagttgagggcggacacgcttaacgcggagaacctggagctcgcaaaagctcgcagttgagggccatcgcggagggaagtctttcggaaatgcgaattctcattccaacatctgcagcgcttagaattcgcggacagaagcgcacagccaagtgcacacactcccggaggggacaaaatggggaccgggaaacggccaaagggaaaagctgtgggggtgccgaggactcaggcacttggttcagaaatcccgcaccgcacctctcacccccgcacagggccagcgcacggtggtcacccggtcccggggagcggagctgcaaggacttaagtttcacactcacttatctgcaagcatcgcccagcaggaaagccaaggaagtcaggggaggggagcggggaggtgttctccttacctcggtcggctcccacggtcagcaccctggcaatcggcaataatcccgagagagtgagtaaggcgaggagaaactcggacattgtggtcgcccggtaaggaagcctgcgctggagactgctcggcggcaccttcggcccggcggcggcggcggcggcaggggccgcttggagcctggaatcgagcggcgtcatttacaaatgtcactggaaattcttcagctcaatgagtccagccagtcagccttctcctgcctggagcaggatgtggaaggtggagggatgcgcgcgtgcgggagagaggaggcagagcgtgtgtgagcgcgagcgagacgcccgtgtgtcttgacttttcaatgcagggtacgtctgatcttacatcac

SEQ ID NO: 331457 - DNA, 1005 bp, Homo sapiens
  chr2:144694306-144695311
  hyper
cggtgtttctggttttgcttagtgcgtcttcatcgtattccctcgctgaggactgagcctggccgactcagggaaccgagttcaatgaaatcctcagacgcataaagcacagggtgccggcccaccgagctgcgctcccttcccgggggtgcccgagagagagcacgcgagcccggcgcagccaaacccgggcaggggtgggtccccaccgcgtgtgcgtgtgccagcctgggagtgtcggcgcgagcgtggcgggtgcgtgccggtgtgtgtgcgtgacagcgcgcgcgtggcagggagttcgcgcgccagggtgcgcgtgccagcgcgggtgtgcgagggagtgcgcgcgggtgggagcgccaggggctggcggggcccgcgccctgggacgagcccctcgtgctccggctctgcgctcccgcagcgcccacgcagccgagaggagtgggtgatgacttcgtgacctcaacgtcctcccccgtccctcgacatgttcccgcgcctgaaaggtgcagaaaactccccccaccgctctggacgagactgagctaggcgtcgagggcgggcgccgccgcagaccggagctcgggctcgctggccgctcaggcgcagcggtgtggagggaacggacgcgcggcaaggcgacccgctctgggcaacgcgggcgcagctgccccgacgcaaggcactagctggtcgggggctcgggcgagccggggccggcgtgccggggcgtgcgctctctcggcaggcgagcgccgggctccgcggaggtccctgcgcccactgcctgcttctccgcccggcgacccggagtccccaggctgcggtgcgccaggccagacctgaccgagggcggaagacccgagcggcagggaggcagaaagaaaagaggtagcaagccccagacaagggatccttaattacagataaaaggcaaacaaaaccgtacaccacattttccacgtgtcagctgacggccgcgacaaaaggaaacagaac

SEQ ID NO: 331458 - DNA, 2594 bp, Homo sapiens
  chr2:145273332-145275926
  hyper
cgcacacacacgcgtacacacacacaaaacctagagagagagagagagagagagaaaagcatcatttgtctctaatcaaaattctctcgtctttgtgttttgctccttccagcacctcacactgcgcccccagccgccccctccccgcgccgcgcagctctggggcaggccgggggcgcgcacaattgtcttctctagaggaaagttgctccaagtgggcccgggcggtccccgcgaggcgcgggctggggctgcggaggccgggaggccgggtgggcgctgcgtcccagcgcctgcctcgggagcgtctacgcggccccgcgccgggtgatcgggctgagagcgaggggagcgagaagtttcctttccgagtctgggctggcgctcgttcgcttgtttgttttcgggggttggtttctttctttttaaactcagttatcctccgtcagctcccccacccccccccggcaccctcgctagtccccagccctctcccctcccccaggcgccttccgcgctcttgccaatcacttttctcttttattcccacgattttgtttggggtaatacctagggggtctctctctcactctcttcctctctctctgtttctctctgtccccccgcgtcccttctctggctgtctccaaaacggacctaccaaactctcacccccccctttaatatcccacctctgatctgcgtgtgcccctcgaacccccatctcctttctccttcctccttcctgactcagcctggataacgggctcctccagaccatgtagaaactgccgggaaaagtctcgctgcgccctgcgactccttcagtccccggcctgggggcagagcctgctggagaggagtcatccgtccccgagccatcatcgaccccaccggaccccgcgcggggccggccgactccctcccaccccggggtctgggcgcgatgggccgggccccgctgcccgcggaccgttacttggcgcaccgagaagcggccgggcgactccggcaagaaactttaagcctcgctgaggcgcagacccggttcccctctcctgccttcgcagtctctctgccacccccgcccccgccccgggatcctgcgcgatccagcgcctgggcccccgccctgccccaggcggacgctcccgaagcccggccggagacccggcgggccgggcgcgagcggagcgggaggcggaggcggagggagggcggaggcaggggctcgaggggggcagcggggctgggggcgcggggccccggccggacccccgcgctcggacccccgggtgcctgacgctcactttgcccggcacttccccaacaccccccggtccagccgccgcgcgcgccgggctccggcgccggccgcggagggaggctcgccctagagccctgggcgccgccgccgccgccgcctcggttccttttccctttccccctccttctccctgggtctcgagccgcgtagtggcccggaaaagtttggttcgggctgcttcttaccgtttttcctcctgggattggcttgtttgcgcctcttgcaccgggggccatccgccatgatcggctgcttcattgataagagcggatcagatggcagttcgcatggactcggcgccctgcttcggcagcacgcaggctcgatctagcaaccaaacacagcgacaatgtgggcatcgcccgcgcccattgaaacgcgcgcgggccgcccaggggagccgggccagggccccggcgagcacccatccgcgccccccaacgccaaagcgaaacttcggcggccccctccccgccccccacccccagccttggccccgaggcgctttgtgtttgttactgtttggtgtgttgcacccgcgaggggatcagagagacaagaattacatcttcaaaatgagtcataactcctgaccgtatgagggaatgcacacggcggtacagtaagaccgcttgactcagggctaggcggaccctttccttcgaaaagtcctcagcccccggctcgggaacttggggtgaggcgaggttttcttttcgttctcatcttttctcatccccccaccccccaattcccagaggaaacaaacaaacaaacaacgcgaaacagcccctggatgaagcacactcgggcaaattgataatagtaattataggaagcccactcgcccagcgccccctcccctccccttttggagtttatcgaggcactgtctcttcctccccccaccctcgcccccaaattaagatttcccgttttacgccgcaatgataaatataattataagcctctttggacactgtcctttaccccaccccccctcgccactttgacaatatttacttaagtatttccccccacctcactcacacacatgctcccccacactggttcccttaaatagttccagtagaattttttttttcccttaagaaaggaaagagaaagtccaaccactacggcaatacttttaagctctactaaatgatcgtatcctttctggcttcgaaacttttgtacctaaaaatcgagagaggcgctgcattttttcagttgaaactgtcaaaacttggagaagggggacctc

SEQ ID NO: 331459 - DNA, 428 bp, Homo sapiens
  chr2:145277508-145277936
  hyper
cgaagtcttgtttgtagttttggccagaaatggtgagaagaaaaagcatgaagaagccgcgaagtgtgggggagaaaaaggtggaagcgaagaaacagctcccggagcaaactgtacaaaaacctcgccaagagtgtcgggaggcaggaccgttattcctgcagagcaggttagaactgatctctttcggccactccaggaaacacaaacctggggacggactgacgtgttacgcctcttctaatgacatttttttctttttcttttctgtaggagagagacgagagaccctgaaacacgcgccacctatctttgtggggagggataattgaagcgccctgagcgtgagcatcatgtgaaaacgtgatcgccaagtttctctctgggaaaggatctgggatagattataccttgaagtctccgcaaac

SEQ ID NO: 331460 - DNA, 919 bp, Homo sapiens
  chr2:145281302-145282221
  hyper
tgtgtggaggaggtggggggcggcaggggtccaagccaagccaaacggttttctcacgtgcagactcgcaatccaatccattcggagttgagcctaggataggaggggaaagtctattaaaaaaaaaaaaaatcaggagcatctctctgagaagccctttcaaacaaaaccaaaacaggaccagagaagctcagaccgtccctaacatccctgctgcgagacccgcaggctgtggaatctcgcacgtcacctggccccagcagggcggccagctgaggggttgattttattttatttttttgaagtaaaggctgaatctcggcttcagggcttttgccaacgtctccactgacaggaaccagcaaacttcaggacccaaatgagcatcttaatttattgatgctaaacaggtctggttgttgtccccaattttccgcgcgctctgccactcccccccccacacaccccgccccaacccccgccgccagcttcggtccctgcatttgatctccaggaagggccccgctgcacaggcggaggagcgcgtcgcgggggggggcggtgttcggccccctcccaccagaccgccctcccccagacctgtccccgcccgggatcctgcgacccccgcccgccgcccggtcagctgacctggctcgctcgcctgctccccgcccgccgccctgtttccggtccccggggtccgcgagccgcgctccgagcgggcgcagccgcggccgggaggtgatgccgggggctgattaccatgagaaaggctgtgcctggaaaagcctcctccacgcgactgtcaatctcactaaggcttggggggcggggagcggggggggggacggaaaggggccctgtaggagtcaccagaaaacttggagtaagttggatgcgacgcaggcccgaggag

SEQ ID NO: 331461 - DNA, 186 bp, Homo sapiens
  chr2:148602743-148602929
  hyper
cgtttgccgtctttcttatctcctgttcttcaggtaggtgcagggagcgcggcgcggtggggctgctcctgcggccgcggcggccgctgctgggggccgcggctggtgttgagtcggagagtccagtggagcctggggaggttgcccactccctgcgcccctcggctgccaccgcccccccccccc

SEQ ID NO: 331462 - DNA, 2098 bp, Homo sapiens
  chr2:149632592-149634690
  hyper
cggttccggcttgggcagccagaccggacttgcaggctcttggaggtcgcatcctgtccttcccccggcaggtagagtgactacaagtcccgggatgcgcagcgctcggagtcgggcgggggccgggcggacctctacggtgacgtcaccgtcccggggcgggccaggggagggcggggcggaggggcgggtctcaaggcggcagagcgcgctggtgctgatgcaggatggctgagcgcgcaggagcccgggaggtctgagccgggcgaggctcgctccctgcgcatcgcctcctccgcccgccgcgtggtcgcgggcaggtgggccggggggcgctgggcaggggcggggcagggccagggcaggccggtctgcagccggaggggccggagcggagaagctgcccaccttcccgggctcggagcggccggggctgctcagccggccgggctcgcgatgacctgctgagaagcgtcgtcggaggctgcaggaggcggcctagctgtgggcggtgcagctcgcggcctcctccctcgtcgttcccggccccggccccccacccatccccgtgccccctccctaccgccggccgagatggcggatccagccgaatgcagcatcaaagtgatgtgccggttccggcccctcaacgaagcggagatcctccgcggggacaaattcatccccaaatttaaaggcgatgagaccgtggtgatcggggtaagtggctggggcgtctgccttccctgctgctccgcgccgcagctgggcgccccgacgccccagacgcagcggaggtgtttaggccgccccctcggacattcccgcggggctggcctctcgggtggacctgaccagagacccctcgccccgcgcactatggttccctcccgggcgggtggagaggcggccgggagcggcgggccgggcgggggtggcgggggtggggatggggggcgaagacgggctcggcgccgccattgttcgccgggtgggggcccgggtgggcccattgttccccacgctcgcctcgccgcgtgggtagtgtgttcgggtgaccctcaagccgggtgcccaggccccctttaaagtgtgagctctgcaacccgcaaatgcttctgggcatcaatcaattcgatttaccaaacgccttgcctcttcttctcacgaccctagcaaaaaagaaagaaaaaggggtacaggaaaatttctagtcgcgtctcggagctcccgcggcagtgtagacgcggctccccgcggtgttacacctggctccgcgcgcggaaggcggagggttgggggagtactggtggcctcggtgtcccctggaggcctggtgtgtctcccgcttcctctcacgcctggctgccctggatgtggagtcccggcttgatccctcccctctgggatgacctccctcccatgtctgcagaccctctgatgcgcctcacgctgggtggagaggaggctgtgtccacatctgtggggcgagggggctcagagcgcagtagccccctgtgccaagagcagaagttacttcgtgcggctcggacccccctccctctctatctcccttccccaccttttctcccccaccccctccccctacttagctccctctctgcagctggggctgctggtagggggagggaacaccaatggattgtagttcttaaaggaatctgtcagatgaaacaaaccagctcggtcccccgccccttccccgcccgctgtccgtagcgtgtgtggctgatggtgccccctttgtatgcgagccgcgtggggagggaccgagttaatgggagcctcccggtccccgctgacacgttcctggcagcctgctccaggctgctgatgcagccttcccgtccccagcattgattaagtgatgtcatcctgatcactgagcatgctccgactaaccccctcctccccttcctccagtggctggtgtatttaggtcaagtgattgacaggtgacagtttaccgagggtattgcaggagtccgcctggcctttctcaagcgccagaggccgacgttttccagcccgggcggtccccagcatctttgccaaggttgtctgccgcagtcgcagc

SEQ ID NO: 331463 - DNA, 667 bp, Homo sapiens
  chr2:149645384-149646051
  hyper
ccctccccacgctagtagtacgcttcggttactttgcacttctccgtagctgctttacatgtttgcgttttgaatgttgttgaggaaagatgcgaaaaagaatgtgtgctggaggctggaccctccccgcccctatcactaccccttacccccgcagcaagggctgcgaccccgcgggtccccgctgagcaccgcagcaattaagtacgtgcaagccatttgcggcagcgggtttgagatgcgttcgtagtgggtgacattgagaacccccagaggcgacacgggcgcctggtctctgagaggtggcatgctgcctgccgccctggtgcctggctgccccggaaggggcccccagtcgccggccccgggaaggtgctccaggctcgcggctcctcgggggtcgcctctgcaggcggcctgtttccaatttccaggcgaggagcgacgccgtgatgcaaatctgccacttaccttctgtcaccattctgtcgctaacgctaggaatgatgaaacctcctgttctggaaatgcatttccctttagcaccagcgccttctaatgaggtccctctgccccgcaggacaaaagcgcccattagggggccctgtggtgggaggcggccactccgcttggcgccgtgagggaaaccaaggaaaccgtctttgtc

SEQ ID NO: 331464 - DNA, 767 bp, Homo sapiens
  chr2:150186920-150187687
  hyper
cgcgcgcgccgggccaatgagcgcgccccgcggagggctccgctccccccgcgcgcgctgattggtcccgcggccctcgaggccgggccggccgcggctgcgggcggcggccagtgcccggcgcgagtgggagtggcgcgcgcgcccctagccgccccccgcctctccccgctgcgctccctcgctccttccctgagctcccgggctccggcagcgggctggcggggcgccgcattgcacactctgggggcgccgcagtgttcgtgggatggggcagcgggctgcagctggcggccggaatccgcgcgcagcccgggtgagtagaggcgggcttcccgggagagcacaaaagaacaggggattggtgccagcggccccggcttaggcggggcctggccaaggcagggagtgcgctgagtccctggaactacccgatgctagggcagtcccctggggccagaggaactggggtcccggcctccggcgttttgcccctagtgggcagagagccccgcgagtagcctggacgggtccagaggggcgtgtgtactcgtgtgtgttgggctggcgcgtggagggtgggatggaaaggtcaggagctgccaagttcaaggctggaggaacctttcccaggagtaattcagcatcttctcacggcccaacatgcgtccaccaggaactccagccggagggagttcctgggcggcggactggcagcaccccacatgttgctgcggggcggggggcagtggcggtagcccggctgc

SEQ ID NO: 331465 - DNA, 763 bp, Homo sapiens
  chr2:151341770-151342533
  hyper
cgctcgctcgtgcgagacttctcgcttgcctttgtgctgggactgcctctggcgaccctgtcagtctggttccttcctcttgctctctgaacccccgcgtccctcgggggctccagcggttcaagcccagcggttctgtgggaagctcacagaaacacctccacgaggccactccccgctgggcgcggctccacctcggggcctccccgcctaacagcaaacctgcttgttggcacttgcgcgttcctcctcgccagtttcacccggatttggctcggtccgccagcaacccagctccttgctaaattcccagccctaagcgcaggggcctttacccagccttcccagtgggtcctgcttttccatagccgacacccttcttggaaacaaactcgctagacaccgctggttagggcggcgggtgcctatgtcccagcccaagacctcagatggtgcccccctgccactccccggcctttgacctggcctaaacccctaactcagccggggggccggatgccttcccaccgggagggtacctagccctccctaccaccgcgcgccaggtaggtgggtgggcgcatgggaaagcaataacccggccttgaacctcagacccatgaatataacccaccgcggcgccaataattcaagtagactggaaggtcaaaggcgaatagtgttgcccgcggccttggaggcaagccgagtgggggatgcaatagaggtcaggaggggctggtgtggtgaaggggaaacggac

SEQ ID NO: 331466 - DNA, 1246 bp, Homo sapiens
  chr2:151342572-151343818
  hyper
cggtacaggtgggcaccgaggcaccgcgggcggccggcagcgcgaagaggaggttcagctgctgcccggcccctgcgccaccagcgcattcctgggtgtaggcgtcacgggcgccgcggctgcctgcgctcagtttctttccctcaacagcggcaattgcacgtaaccgcgtcgcctctgggattttctcccgcctcccatcacccccgcggcgctccccgcctccccgccaaccagcaggttagatctaggaggggcgcccgccttgagccgggtggttccgccgaggcgcacgcagcgcccatgcaacaccccacagtatcgggccacctcggccgacccaaggcgacttgaccacgactccgcgggcggactgcgcctggccactagtggctccaaccgcggggtcaccctgcgggcacacagcgctctcctctccccactgctatctcctcgtccacgctgtcgtctgccgcccccacccagaagggatacaattttcgcccaacagggaccgtgggaatcccttgggaggggcgcagacggcttgtagcgcgcggtttcccgagacccgccgcgcatcccccagcgactggaaacccgccccaagcgccacgcggtcctcccactcttacccgaagtgtcccacaggctcaactctattctttgtgtgtcgatttcaaaactggccgtgtaattctcaaacactgtaggaacgtaattctggatagacaaaatgggcaaaagaggaaggaaagagggcaaagaggttacgtttaaacgcacgacacccattgaacacccttcccctccccgctccccagttaagaaagaaaaccttcacacatcagaccacacactaagcacatggaccctttccgaaacccctgtcctactccccactcaccccacccggctctcacagatctgctgacccgaatctcccaaccccaggttatgcacacaggaacgaacaagtttcaggagctaaccagcccatgtgcaggcgcgtcccaaccctaaaagcttccagcgcactttccctttccccgcagtctaatcaggggaaagtagtaaggaccgagaaagacttttttttttctttttttttttttttaagggaaaacggatgaaagcggggaggcccacctcgggactgggatcccactggccgaccccctcgtggaagccgcggccggccacactcacctcggggaagcagtccttggcgaagacatggagcagc

SEQ ID NO: 331467 - DNA, 282 bp, Homo sapiens
  chr2:151344070-151344352
  hyper
cgcggcgcagacgaggaggagagcgagaggagcaggctggttactcccctccaacaagttttaagcctgactcctcaccgcgcctcccaagtccaattccgagccgactgctttgtttcacgctctctgcgcggctttatacgcccggccttccaatcctcttctttctcaatgagaggaggaaactgatctgcctcctccccttttatggagcctgggagcgagcgctgttggcgttgcatgccgaaaatgtaagcagtgcgccctctagggtgcccattc

SEQ ID NO: 331468 - DNA, 791 bp, Homo sapiens
  chr2:152954365-152955156
  hyper
cggagcttgacgatctctcccaagatccagacagataagagtattcaaattaggacaaaacagaagaaaccactaaatctcaactcgaatcaaaccaggtccccggccccgaggggtctggttactctaggtcgagttatacgaattaaagacatttctccacgcaccaaagatacaaccagacatatttccagctcttaaattcaacgtccctgacttaagccaggtccccaccgaactgtccacacacatgcacaaactaacttcccggggcggtgcggagacgccgggacgcgaagacgtcaagagcccaggctagagggagagggactgagcccgagcaccggccgaggccgggaagagacgcgcgcgggcttgacccgcagctcccgcacgtgtgggccacggccggctccaggacccccgcgccgcgcgctcggcctcctccccatcctggtctcccgcctccttctcatacctgtctgaggatgaagctggtcgaagtggtgctgccatcggatcttttcaacctgctcctccgggttgtggtgcctcgggccacctggactcgacacacgggggccagagagaagccggtgaggaccgcagcgcagagcggggcgaccacccccggctggagtccgcctccggacccgctccctggggtcccctagagcccgcacccaagtctcctccgcgactcccaaatacagcccccacccccacccacccactgcaagcctcgactgctgaaaagatgctcgagaagagcagcccgcaagcacccacca

SEQ ID NO: 331469 - DNA, 703 bp, Homo sapiens
  chr2:153192142-153192845
  hyper
cgcagcagaccgatttcagggcgcacaacgtgcctttgaagctgccgatgccagagccaggtgaactggaggagcgatttgccatcgtgctggtaagtgcgcggcggcggtcgggcgcggggacccggggccccgggccgggcggcgcagctgacccccgcccctccccttcaccccgtgccgggagcgagcctccattcccgagggggaggctcccgctttcccctttgtggccccccagcactcctcttcacccccctggcagtcccccgcgctcagtctctcggggtcccgggatggggatgggggctcagggccggctgcccaaccagcctcgaacccattgtctggctggagaggcacctcacggcgcgtgtgcccgggaggtgcggcgtgggcgtgaagagaaggtggcgcgggctgggaggaggaggtggcgagccgcttaggctttttttttaaaaaaaacaaaacaaaacaaaacaaaacaaaacaccctgagcccctgcggaccatccctcgggcggccagcccgggacctgcgaagtccccggcagatggggcgcatgtggccggccgcgggcgccgcgccgggcggtgagcggaggcgaacttggagggctcacgtcgcggcttggccaaggggagcttccccgaaagggaaagcggagacccacagcagtgcggcgccccggcccttggc

SEQ ID NO: 331470 - DNA, 967 bp, Homo sapiens
  chr2:154334805-154335772
  hyper
cgaggaagttgatcatgccctcggacttgatgagcagattgcagccgaggaagaagatgccgaagaccacggtgagtgagagcacgcacatgaccgcgatctgcaccacgcgcattatgtacaggctacgctcgtccgggcctccctccgcgaagccgtcgtcggtcaccacggacgcctgggtgcagcagcgcacggctcgctccagcgcctcgctgctgttggccaggaacaggcccgccacgtccgtctggttgcctagggccggattcatcgcaggaacgggcgggcgccgcgagcggcgcgggtccgaggggtgggaaggcggcggcgctggaggaacaggtgccgggctgagcgctcactcgcagactagcgcgtgcgagggctcctcgctctgctttcgaaagtccctgggccgtgggagtttcccaggagcctctccgacgcgcgcagcagctaggctcttctaaagccgtccgctccagccctggtggtgctcgttcccggcgctcgctcgagggggggctgttggaacttggcggggctggaccagcccggccgtgggaggtgcgggccgcggcggctgcagcggcggggtggctgcgctgagcaaacagcggccccttccggccgcaccgccgcgctgcgcgctgctcttgggaggtggaggaagcaaaggggcgaacctggtcttgctttttattgcttgcttcttttgcaaactccaaaggccaggcagaggtcactgtactcttctagcttgatggatgattaaagagtttgtcgggggagggtgcggtcagctgaaagtttcagaggaactgggacacacgagctctgcgtgtcctttgcctgctgcccccctgacctctgggcgaatggaaagtggcgatgaatcgcaggtgccagatggtgccggctgaggcacccgcccactgcctgtgcttgactccgactcgcctgc

SEQ ID NO: 331471 - DNA, 1244 bp, Homo sapiens
  chr2:155553956-155555200
  hyper
cggaggtgcaattcaggctggtggagcagcgggggaaggcagggacaggcggggctagcgcggctctgcagctgatcacacgcaccaccacacacaccacattcctgctgccccggcttgcgcctcgcatcttccacccggggccaccgaggcgctgacaaggagtgggggaccgaagaaggaagaggcagaggaaaagctagagcggcgctactgtttaacctgaaagtctgaccggcagcccaaggctcgaaccccgtccagcagcaccgctgtcgcctggaaggagggcacagcgccaaggaacccacgagcccccgctcgagtcattctgtgctctgtgcgccaaggatctttctggcagggacagcgcggtgccctcagggaggtgcggagcttgggggacctgcattggcgcccatcgtggtacaccaggaaaagtgggaacgaggaaaacagccgtgagcgcagagtgcgaggccaggctgccgctaccgcccgctgcgccgcctcctgccctctcccgctgggtgagtgcccaggcttcgcgcactgccgtgtctcagctgagcgcgggggcggcctgcgggcccttgagggtccgccggagggccccggtggcgcccgcggaaactcggcggtcgggggacgccaggcggacaggtctctggagtccggaacccgggaatctgagcccggagggcgtgggtagggggcgttgcaccagtgcccggcagacatgcctttgggcgggattttggctaaaagataggagacaggtgcgccgggggtgcggggagcggtcccagggggcgggagattggggagcggcggggaggggggagggtctggtccaggcaggtaaaggcagcttcttaggcagccagcgagttggcaggtgggttgggactcgcttgtcaactcattaattttaagcagtcagtttgggggtactgcaggataatcaggagggccgtggggagtcaagaggtgacccgggatgccggtggtggggaaagaaaagaggagcctctggaagcttggaggcaaaattgcgcttgggttcctgttccttgcatccctcctggcttgagtgcgggagaacactttttaaagactcaccttggaaagaaggcctccgtcccaggggagaaggagaggcgtctgcagggggcagagaccgcagctacctgccgggtgcgccccccacccaggagcgctcgcttcgccccctttcctccccc

SEQ ID NO: 331472 - DNA, 1350 bp, Homo sapiens
  chr2:157176355-157177705
  hyper
cgctcccagccgcgggaagataagcgtacaggcggccccaaggcccctacaggcgcagccctgatctggccacttgactagacgctcgctccagcgctcgcaggcctagggctcattacatgcgttgcgaggagacctgaaagcagggcgggaacgcacaatctatcttcagagctttgggtcgtgagcacacgtgtggagcatggttgtggcatgggcgtctgggcccctctcctagacctccacgaggtgcggacgcgcctctgccccgcccttttgtgcgccctcaccactagaaaaagagttttccccagtgtcgcgtgggaggtcgccccagtccagctcagcgttccaagagaccagagactgaccggaaatcgttgggtgcagggagaagcaggagacgcgctccgcctcctgtgctcgtgccctagcgcaacagacgcgacctagaggcgacggcagcctgttgcagccttcgccctgagggtggggggcgggggggtgtagaacagctgaggaagacgcagggagcagctggggaggaaagggagggacaccgaggaaacaaagttcacccaagtgaatgcgtcctaattgctccaaggctctctccgcaaagtctacgactgcaagccgcaaagtcaaactacgtctccaaaacgcagtgggcagagcaggagggcttgtgtctccattttcgccgcagggcggatcgcggacacaagtcctctccagtaattccgaagcctcgaaataagactatgctgggaggaggggttggggggtgactaataagaaggcgtgggggtgggggtggggagtacgcggcaagaaccctgctttctggaattctcccgccactgtctgcagggcccagagcgcacttcgcggctagggaacaaaattgccgctctcttcgagcgcccccagcgtggggtggggccctgctttcccgcgtcaggaccgccccaccaggcgccctccgacggaagctggacttttcctaaggaaaggcaaagtcaaagtcggaggaaagatctttcttgcggccccagctgtcgctcctaatggtctcggggaacatactaaaggaaaatgactttaaatcacagtcttgccatcctaaatagttatgtgcaatattttggtttctagcaaaatttaaaagtaaaatggggatttccatatgttcattttattattaaaaacgaattactaaaaagtgatgacctgtttggaattcatatcttgctttacgagcagtcagccagtatcgactgaacacaataaatgcaggggtgcgaaacgtgattgctcgggttcgagttctgtcggatgcaccgatct

SEQ ID NO: 331473 - DNA, 337 bp, Homo sapiens; identical to SEQ ID NO: 228752
  chr2:157177922-157178259
  hyper

SEQ ID NO: 331474 - DNA, 459 bp, Homo sapiens; identical to SEQ ID NO: 221907
  chr2:157292163-157292622
  hyper

SEQ ID NO: 331475 - DNA, 1811 bp, Homo sapiens
  chr2:159313069-159314880
  hyper
cgccagggacaaaccctaccaggcacagttgggattggcagtaaggcaaggaaagcctgccccagatttcagagccagcgctggggaatctccctgtcctctccgccaccccctcccgcgcccgagacctgagacaccttctctctcacacccaccctctccaggccctctcgcgctgaacagcatcggtctctatggcgacctgaaaccgcagctcccattggcctgttcaatatgagggccgggccaatggggagggccagccctctccttcccgccaatggggtggcgggagctggcccggggacggcggcgtgctgacgttcccgggagcccggggctggccgggcgggagggctggcagcggggcgggcggcggcggcggcctctgggcagtagagggggctccggggctgagtccgcgtcgacgccggccgcggaggcggcaccatgggcaaggggtagaggggcaagttggccaccgccgccgccgggggtggtgggagagccgctccgggggcgggggccggtgggggagggaggggcgggcagccgcgccgccgcggcacttttttaattttttcgggtgccgcagcggcgacccctcggcgccgatgtccctgatccctggagcgacgacggccgctgcctaagctggaaagtaagtgtgtgggctcgcgggagggcgcggagactcctgcccacgagaccctcggccctcgccccgaacacgcgccagggccaggacctgcgcgccgggggccgggggcctccctcccgctgccgcgtccccagcgcctcgcggccgccgcggctttcctgccccgcctcgtgttcctgcccgcactcgcctgctgctcccctccccccggcaggcgcacaagtttcaccctccatttgcttttcccggcgattcctctccccggtctcccgtacgcgcagcgcacgacctctgcccacgctgggctgttcggattcagagctcccagccccgaacttgagcgccgcgctgagccctgctggacgccctcgcggcggcttccccgctgcctgccgccgcgcgccccaagtcgccctcgacaccactgggcgcccgccctcctcagcactcggggccggctgtctgtccttctagccccagatcctgcaccttggtcccctccccgtcttcccacgcccctgctgcccgcgcggtcttgcgtttgtccccgaagtcctgtactccttgccggtcctgcccacccctctgcctagtgcgcccctctctaccggccgcggatcctcacgctccacccctcccggctccccagcgccgagcctcgccgctgccctcctgcgccgccgcttcctcctctccctgccaggagttgaagcggagctgcggcacctccctggcggatctggtatccccgcccgctgccgaggctgccggccctctcccctggaccgctacccggagagcgagcggcggggccgggatttggctgcgtgttggctgagtgcgacacaccgcgagcgcgggcagtggaggtgccgcggcggccgtggccgctcggggcgcagcggtagtcaggtgtgtgtgtacagcgggggacgcgcgctgccggctcctgggctggcgacagattgtgcaggaatgcgaggaatgcaccaggggcagagtccacacagcccgccgcggctgccctagcgccttccctccccagctctcgccgcgcagccagaggtcaccggagcatcttcggagctggtgagcctcattccactcctctcctcccatagcttccctccatgcggcagaggggaagcgc

SEQ ID NO: 331476 - DNA, 768 bp, Homo sapiens
  chr2:159825050-159825818
  hyper
agaggaaggtgccttcgggaacacgcgcaagggcggggattcgcgctgccaatgaggccccggtgtgggccgagcaaggcggggggacgggccggagcggaggctttgctgtggcagctgctggagcggcggccgcctcgggagccggaggagaggcagccgcggagcgccgagctggcctcgccccgaggcccggccctgggtgtggggaaccgcgctgaggagctggaaactttcccggcaggtaactcccgcagcccggactccgccgcgggcctgcgagcgccccgggcatggccagctgccagtgtgcggagaggtcgagagggacccggggtggagagggtgatgggagaagggaaaggcgtgtgggaaagtttctggagcgccccctcctccgccgggcacacccgggagctttccgggaataggcacagacatgttgggcgccccgggccttggtctctcggcggctttggggagtccgcaccttccttgcgcggttcccccgcgccggaccgagccggcctcccctggaaccggtgtggtgggaaccgggaacgcttggggcacgctcgagttctgggaccacccccgcccggcgcgcccgctcgccccctttcccgccttctctgtagccctcgggcttggcaagggcctgggctacgcctggtacctggcgcgggggaggcggggggaggcgcgcctggcaccgcggggtcctgggcgccccccggagtgttggggtgcgcgggtcgcgaagttgcc

SEQ ID NO: 331477 - DNA, 741 bp, Homo sapiens
  chr2:160760627-160761368
  hyper
cgggaatcgtggggaatccttggcgctgtgggtggaggctcctcttggccctgtggccaaggtgaccaagggccgaaggaaaagcgagaacgggagggacgggacgcaagagggcagatggggaaccccatactccagcaacattatataagagaggcgacgatggagcagcgcacccggccaaaaaagcctccgtgcgcctactctacggtgcaccgcgtcccctctgcaccagaagggccctgtcctcccacatccaccgcgccctcctccgggcccccgagggcactggggcgcttcctctgccagacctcccctgcgactcactcttccggctccagagcccccccgccccaacagcaaagcagccgtgacctgccccaggggcgcagccctgccccaggctggaaggcagcagagctgtggcgtcgaggcacccagcggactgcggggctggcgtgcccgcggttacctgcgcggccagagggctccgcgagatcgaagaaccagaagagcagcatgaggagccccgccgggcggcgaggggtcgcccagcctgtcctcatcctgagctggcgcaagccttccggccgggtcctcgggcgcacgcggctcccgccccgcctgctgagcgcggcctgccccgcccgcacctctgtctaggcctctgggggcgccccggccccgcccccgccgccctcggccaatcagacgtgcgtctcctcggccccggggcggagc

SEQ ID NO: 331478 - DNA, 703 bp, Homo sapiens
  chr2:161264043-161264746
  hyper
cgctgcgggcggcggcggcgggtgcgggcgcgggcgcgggcgcggggcagcctcgccgcgagggggagggcgcaaggaggtggccggccgggcccggggccgcggcagctctgggaactccctctcgccgcgcggcggcggccggcgggggctgcagctccgcgctgacttcccctccgccttcgacctccgcactcgcctaaaagtacggcgcggcagcgggcgagactcgagcagctcgggcagccgccgccctgcgtgccatggacgggagttcgcgcgcggagctggcggcgtcgccgactctcccggcggcagcggaggagcagcgccgccgcgtccccacctaccgcggcctcaaccaccgccctgagagcgcgccggccgggggcggggaggcggcagcgcaccgcctcgcgccgcgcccaggcccacccgcgcctccccgcccgcccgctgggcgcggcgcctgccgccccatcgcccgcccggcccccgcgctctccctcccgggatcggggccggagccggggccgggcggcccggggagcagccggcgcccccgctctggtgcaatggttgggtctggctccccgcatgccgcacattcctcggagtagccaacccccctcctctgttctttttccccctcggttctttcctaagcaccagcggcagctttgcaccccggctcgaagcccct

SEQ ID NO: 331479 - DNA, 517 bp, Homo sapiens
  chr2:162094194-162094711
  hyper
cgggagggcccccccggtgcagctttccccggaggctgaggctgctgccagcggggacatctgctttcttacactccagcctggctcaccccgccccctcagccccgggttgcgtggttattttaccaacacggggggagggagagctcgaggaggtagaaaaggggtggatagaagcttagaagattttcttcccactccccccacgtcccctcctttcgtcacatcttttaaccttcaaggtaaagacttaaggaaacaataagcgtgtccgctggctcgcaggcccgccggggttctcgggcgcggggccttgcccctctccatcctccctgagtccttccccgagtcgggccgtgcttcggcggttcggctgggcgcaggggccggccgggcgcgcccagcctgtggcgcctcctctcccgggctgctgcctcgacagctgcttgtagctacagtaattagactgtcagtgcttgttagaggagagaggggaaaacacgcttctgacagcaga

SEQ ID NO: 331480 - DNA, 746 bp, Homo sapiens
  chr2:162271679-162272425
  hyper
tacacacacacacacgttttcagtagcgattactgtgttgacaccacttccactctgtctccccagatcagcgcttctgacgagcccatttgcacggggactcggccctctcttttcctggcgaggcttttgaacctgtcgccaagccagtacctcagagagaaggaaatgcagagggacgagaaggatgcatggcgcctgcccccagttagatgttcttcagataatctgcaaccaagtgcgctgataaaatatttaataaagagccggtaaacatcactgcaaatacattaaggcatttcagcccgacagcttatgattatttcaaaacttaaaaaggagatcatagattgtcactgtttctgtactcaaccaagaaaccgaaccttcctgaggtgggtggattggtgggtgagttgctgcttttcgccccctctcctccccccttctgcttgtcgctgtggctctcagcagcagggatttatttatttatgtttgcagtttaaaaggtgggggtgggggcgccgaggacatgtaggatctgctcacaaagcaccagctcaggtgttgtgtgcttttgtattagctggaaaagacagactctggaacttttacagggcgagaagaggccaccggctcgcgctttgtatactttgcacttgaaatcgttacattcaactgaatatttggctcattcagatccgaaaagtctcctagcatcgtcgaattccctcctccgcccctcc

SEQ ID NO: 331481 - DNA, 671 bp, Homo sapiens
  chr2:162273294-162273965
  hyper
cgtaccccggccagcacggaccggcgcaccccgccttctccatcggcagccctagccgctacatggcccaccacccggtcatcaccaacggagcctacaacagcctcctgtccaactcctcgccgcagggataccccacggccggctacccctacccacagcagtacggccactcctaccaaggagctccgttctaccagttctcctccacccagccggggctggtgcccggcaaagcacaggtgtacctgtgcaacaggcccctttggctgaaatttcaccggcaccaaacggagatgatcatcaccaaacagggaaggtaatactacatttttggctgccgctgctctaggcgcagccggggacaagtgcacctaggctgtgactgccgcggcagcgacgatttggggtcgggagcggagtggaaggcgccctagagttggctagttttggaaagggggaaagtggaagggataaccgccagggtgatgttggtgggggggaccccgttctaggaacatagtgggagagccagtcagtggccagaggaaggcaagaaaaaggaagagccctggccagcggctgggcgatgggagggacgcatcaacactggcatgcacggacaggtggagacgcaggtcgccaacctcgctctccacctgggcagtgat

SEQ ID NO: 331482 - DNA, 1024 bp, Homo sapiens
  chr2:162274764-162275788
  hyper
cgccaagaaatctcttttggaaaattaaaacttacgaacaacaaaggagcttcaaataacaatgggcaggtcagtggctcaagcgctcgtgttttctctctctctcaccccttcctccctgacatccagttcgtcagtgtaaagcagcatatggaactggatacacgtttctttgcttcattaaaaagacttaaaaattgtatttccaccctccaaatttatattaaatctgtaaagttgttctcattggcaacacctccgtcggcccaattttggagtgcccgaccttcccaagtactaatactgattgattttgagaagaaaccccacaagatctgcaggttgtggaaatctttgttcctccttacaggaggactaggagaagggccctgaggatcgggcggtcggcttcccccttttttccggtgccccggcttatcttcgctcccagaggtgcgaaagccggtctgccccagccagccagccgccagccaggcgagtcccgcggtcagttagcctggaaggcgggctgcaggctgcctccgccggcccgggcgcgcagccgggcgcacacagccacgcgcacagcgaccgcgttaacacgccacccggcgctcccctttcttcccgccggacagatggtggttttacagtccttgcacaagtaccagccccgcctgcatgtggtggaagtgaacgaggacggcacggaggacactagccagcccggccgcgtgcagacgttcactttccctgagactcagttcatcgccgtcaccgcctaccagaacacggatgtaaggagacctaggggctgggggcgaggcgggcggcacagacatctctcccaccctctcacattctcccgccatgcaaggctagggtactagcagcgctaacatcagcaacagctggctccgctgtgcgttttaaggcttagggctcggggcctgcccacggcacctttcctaaataccaagccggtgggaaaaagctttctatttgttttcgtcgctggtcaccc

SEQ ID NO: 331483 - DNA, 707 bp, Homo sapiens
  chr2:162280181-162280888
  hyper
cggcctatgacacggccacggacttcgcgggcaacgcggccacgctgctctcttacgcggcggcgggcgtgaaggcgctgccgctgcaggctgcaggctgcactggccgcccgctcggctactacgccgacccgtcgggctggggcgcccgcagtcccccgcagtactgcggcaccaagtcgggctcggtgctgccctgctggcccaacagcgccgcggccgccgcgcgcatggccggcgccaatccctacctgggcgaggaggccgagggcctggccgccgagcgctcgccgctgccgcccggcgccgccgaggacgccaagcccaaggacctgtccgattccagctggatcgagacgccctcctcgatcaagtccatcgactccagcgactcggggatttacgagcaggccaagcggaggcggatctcgccggccgacacgcccgtgtccgagagttcgtccccgctcaagagcgaggtgctggcccagcgggactgcgagaagaactgcgccaaggacattagcggctactatggcttctactcgcacagctaggccgcccctgcccgcccggccccgccgcggcccggacccccagccagcccctcacagctcttccccagctccgcctccccacactcctccttgcgcacccactcattttatttgaccctcgatggccgtctgcagcgaataagtgcaggt

SEQ ID NO: 331484 - DNA, 577 bp, Homo sapiens; identical to SEQ ID NO: 228782
  chr2:162283416-162283993
  hyper

SEQ ID NO: 331485 - DNA, 250 bp, Homo sapiens
  chr2:162284276-162284526
  hyper
cggcgattcctctccgtaaactcagatttcctcagtttttaacagtgtattttcaaaaagaggacgaaagaagaagacgagcgtgcggctagcactgtattctggctcgtgtcttcccgccactcgcaatccgcgccatcttaactaactttcaatgtccctcggggctgagcgtgccggcggcgggtgctgctcgggctgggagatgctgcggcctgggttctcaaccttccgggtggacgccgcccgt

SEQ ID NO: 331486 - DNA, 91 bp, Homo sapiens; identical to SEQ ID NO: 228784
  chr2:162284567-162284658
  hyper

SEQ ID NO: 331487 - DNA, 854 bp, Homo sapiens
  chr2:162930102-162930956
  hyper
cgttagaagagggagaccgcgggctgggggtgggggtggcgtctggagtgcgccagttggagttctctaaggcgggtgcccttgaacttgtgccttcagagcacattagcgttggtttctctacccctgcccgggttcgggcgtgcgttctgtgagtggctctccgggacattcaaagctcgacgccagggtcctagcagaagccagggtccgaaagctaagcgagagctctgggacgtcccttcacctgtcagagggtggccttggggcttccgcctaaggggagtccctggtccggtttcgccagcttttgggccatttggggagtttggcgaagaggtccccacagctcgccccggggacgtacgtggcgcggcactcaccttcatcgtcggcgtctcctcggaagtgagcgttcagagaaggagcgcaggcagaagtcaccgcgggcggcggagacgcgcgtcctgcaccgctgctccgggcggtggagtcactcgccgctggcaagtttcggccccgagttaaacattagtgagcgccgagcccgctgggtataaaggcgccgcgggcaggctgcagggcaggcggcgcgggagcaggcgcgcgtggcgcggggcactggcatcccggccggggggagcccgcgagggccccctgagggcggtgtagggcgctgggcggcagccggggcgcagagtgcggggcccggaggagccgtgggggaggggaaagggcgcgcggcctcggatgcgcagaccctgggccggcgactcggggaccctgctccctcttagctaaaaatgacgtcggcgttcagctcctccaacctcacgtggacaggcgagggaacc

SEQ ID NO: 331488 - DNA, 205 bp, Homo sapiens
  chr2:165873413-165873618
  hyper
cgccatctctcccttttcatagttctacgttgaggtcgtcctgagtttgtttttaaggtattttctgcgctgctacacactgtcatttcacgtgagggcagcagagaggcagcgtagaagcccctgaatagcaaatcagaagagcccgaagctcaaattttgggcgtagtgttttcagaacacctcttcaaaaattaaatcacac

SEQ ID NO: 331489 - DNA, 1297 bp, Homo sapiens
  chr2:166649934-166651231
  hyper
aacagagagagaggggtgtccgcgtcccggccacagagccctttccaaaccactcggaaaccatttaaatggctcggcggccgcggtttgcagcctagaactgtttggggtccccggctaggaaagttgcctggcaaagccatgtctttcgctgtcgcgggatgtcctctcgggcagagaggctggaggagacaggcaacctgctagccggagtggaagcgcgcccgcctcccgccgggccctccctctcagggtccccacgctgcgaccctcccaagggcaagtccggggccaccaggtctttggtctccgtccagctcctcaggggccgccccatagggactggcgggggcaccgtgggcgagagggtgtgaccgggctcccccccgaggcgccacctgccccttggcccagggcgcccctttcgggatctctccaggggcaaccgacacactgctctcgagaccgtctccaaccggccacctggaccgtagccctgtccccaacacgtgaacccctgcggccgtcctcccgcctgctctaacgcagcccaggggtaccgcgtctccctccgcctgccgccggcttacctggcgggtgggcagggcagggtggcgggaagcggcggccgggcaggcgctggacgtgggctaggcgccaggtgcaggtggcggcggctgcgactccggttgctgtcgccacagttgcggctcagtagagctcctcctccgccgccgcctcctgccttcccgctgggcctcccgcgttgcctggagaggcagaaccgaggctcggcttccacttggagtctcccaggtgagctccagcctgcgacgtcggcaggggcgaggccccacttccgcgcctgcgcgccagcctcccgccccgccccagccctacctgagcgctccaggtgagaaccttggatcgcgcgcgcagggtgggggcgccgtccgggccaagcctggctgtcgcgcggcttctctctgagtggtcggcgaggctgctgctccgcgcaagttgtggctcccggcccatctacattggaggaatcctgcactgacctggtggcagtgatcaccttgtagccagaacacagtctgctgggtccttggggaaccagaagttctagatttcccccacacggttcctcccttcctcctcggttcgccaaaatgaaggggtgcgctgcctccgaggaccacttcgggagggcagcaactgctggctcatgtggtttcttcgggcagggttcagcagcttctgtcaccagttaggtttcgtgagcttccttccc

SEQ ID NO: 331490 - DNA, 2180 bp, Homo sapiens
  chr2:168148871-168151051
  hyper
cgtttatttggagggaagacggggaaggtccactctgcctacaactccgacatttctccgtgtgcctctttgctagctggggacacttcgtggctgattactatgaggagtggttcgaagcctaagaagtagtactcttttcagctgccaaagggagaaggacgggggcgctgtctggtgactgttcgcgtgattccttcaaggcggcgaccacctcctgggattcgctctccagccgcgccgttcgtactcgggtcccgcgacccctccccgctcccccctcgccccagcgatgccaagacgctgaaccgcagggacgaggctctggggacaaagtcaccccgcggcgccctttcctgccaagccgcgggctcctggcggtcagaaagcgccccaggcccacccctgcgggcccggctttccctcctcacctaaggctccggggccacgagtcccccatcctgcgcccctcccgcgcctcccccatcccaaaccccagcagcgtcgctgcctctcccggaaacaagcccgctgagcaaaggcggaggaaaaccttgggccttccgctctgattggtctccccccgccgagcggggcgaggcagcgattggctgccgggcgttgtcagtcgccgaggccagagccatcgccggggaagcgcagccgggctcgggtgcttcggctgccgccgcggctgctcggctagtgcagctgggcgagctcgcgcgggcgccgccgccgcctctgctgctgcccaccccgccgcgccgccggcgctgccggtcttgcaggcggccgccggggaggggcggccgagagagcggagcacgaggaggcgggggcggcagagaagtgatgctggcgccggggatcggggcagcggcagcggagcagcagcatcttcgggaccctggctgcagcgtccctgtggcccgcgcgccagcccagcggccggagaccacgcgccccgcgggtaaggttctgtccggcagcgcccgcgacgcccccgggacggctggcgtggtctttgggggttacgaggcgcgtggtggccggggcatcccgacgaaggtgttgggacccggactgcgtgtcccgacgctgggctgtgctactgcccgcgcccgtgcggctccagctggtgcgttctcccttccgcgctcacagactttgacagcgcggggatggcattgtgtgagtgtggatgtggatgcgtgtgtgcgcgcgcgcggcttggggcactttgcagcgagaacagtgggtcccctctgcgtggcccgacgtccttcaaggacccaagctgggctggagtgagtaggatgctgttggctcggcgggaggtagaacgcacggagcgcacgggaaagtccaccgtggctcgtaaagagccgagcaaattgaactttattgcggtgattaaaaggagctgtggacctggcgcgccaggggagaggcgcgttccacgaggctccccaaagtcccactttgccccggggacttcggaggggaagggaagagagggaaaagtaactgttggtccacattgctgaagaaaaggaggaaagagaagttgggggtgggggtgggggtggaggttactcttgggggagtggcgacttttaggtgtctgaagccccgcgtgggaggcttgctacacttttctggagcgcagacttgaggatggagagtcccactctgaggtactggtagcggctcctcctgcctggtggcggcgtagggcgcagcgggacagcttggtggaggcagagcggggctccgacgcccgacggcccggcgtccaggtggggccactgcctccccaggccgctttggcccgctgacctcccaggttgagacccggcctggtgcgcctctggcagctgccaaatgcctggcggctccgctttccgacaaagttcaggcccgctggggtctggtccatcagacctaggacacgttaaccacgcagagtaaccaggttagggtacccagctgcctccagagcgtttttgtttcatattagattatcttatttgataaagctgttgagagttccacccgtgctgcaaagccttccgcagaaggcgaattctttgcgctgctgcaaatggatggtgctactgggccagatccgaatctccgtagttcagtgcagtgggttctccatccctgctcaggac

SEQ ID NO: 331491 - DNA, 1368 bp, Homo sapiens
  chr2:169312417-169313785
  hyper
cgcctccgggcgcacgggaagaggactgagagccctgaaaccccagcggggcaggagccagcattctgagcatgtgcgagccagccagggggctagggcggatttggggggtcgactttaggtcgtcgccctaagcgcaaagcgaaagagcggtgagagcaggggcgggcgacactccccggagcggtgcccctgcgcccagggcgcagcgactgcgccctgccctgcgggtgtgggcgagttggccgcgtgtgtgcctcgctgtttgacgcgaagacgagccaatcagggcgggcggcccgagctgccatgtgacgggcaaggcggcccctttccccagcgcggccagagggaggagagaaccggggctcgccgcgagccttcgagagcagcggccgcggaggaggcggcggcggcgggcgggagcagcggcggcggcggcacaggctcggggccagccgggcgcgcatccccgggcgccctgcgcggtggagagcttggcgggctgcgggtgccgcaggacaggagtggacaaagcaagatggcagggatcttagcctggttctggaacgagaggttttggctcccgcacaatgtcacctgggcggacctgaagaacacggaggaggccaccttcccgcaggctgaggacctctatctcgcttttcccctggccttctgtatcttcatggtgcggctcatcttcgagaggtaagaagggctgaagcccctcctcccctccccctgcgcacacacacgcgcgcacacactcgcgcgctctctggcgcacgcccccgcgcccccaacgctcgcgttcacgcctcccaacctttgtgttcggggaggggttgctgacccccctgccccgctggctttctgggagccagaaagggtctggcttgccacggatttcctcccgggcgccggggaggagccgcggagcgttagggtcgccccctgccctcctcctgggccctgctctcctcccggcaagggcaggcgaacaaaggtgagcggtggtcgggctcaggacccgccgcattccgcggggctcgcccctctccgccggcgcgccacgcaaggctgccaggcagggcttcccgccggggcccgcgccacccacctgacagccaggaacgttccggacgcgcggcccggagggaggaggaaccgcgcacacttcaatctttatgctccggcacacggattgtaggggttgtgcttcaaaagaattcgccagggacttcctggcttctggtcgctgtttggtttttatccgtgaaactatcaggcccacagtcctggcaaataggggataatagcatttcaggttatcagcggtttctttaaaagaggatgtgacaggac

SEQ ID NO: 331492 - DNA, 536 bp, Homo sapiens; identical to SEQ ID NO: 228807
  chr2:170219963-170220499
  hyper

SEQ ID NO: 331493 - DNA, 1014 bp, Homo sapiens
  chr2:171567970-171568984
  hyper
cgattcagtgccgcattagcaccggggaaattctgtccccaccctcccagaacctttagtatagcaacgatttaactaggcagatatgggcaactgcaaaattgagtctccttggcaaggagtggggagatccagccgattaagcaacatcttactgtgaaaggccaaagcattaagaatttgctgaaatgatctaaataatatctagatttttaaaaaatctagcttgagaggggtgactctctggttggatttatgccagaggcatgcgtcccttctagctgcaagaaaatgcccgaggcgaggtaccaagcttgggctggaagtagcaacccctgacttaatcccagagcgcgcagagctggtccgtcccctgcgcaagtgtcactgcgggttcacctaccggcctcttcctctcgcaggtggcatgcagtcggcgctcgccgcccgcccgcaaagaaacggcaatgcaaacttcccagcctgggaaccccgctgcttggagagcagctccgctgtgccagccgccgccaggagactggtattcaacctccccgccccccgccacggttaaagtttgctccacattcgcagctcccaccccacccccatctccgccccgaggcaggaggaccacataggagttcctgggtccaccgtgcgcaaacacacccaccaacaaaagaaagcccattaaatcttccctcctgtgaactcgcgccccaacggatacctctttgaactgacccccgcccccgcagcccccgcgctgtctggggcgcgcctggccctcccgggcttactctctcccccacagctgcgcacttttgcagcgcgctcggtctttgatgtctctttacattatggcagagcagccacacgctcttcccgggcgcggggctttgtgtaatggaactgacatttggccttgatacctgtatctcttggtgattacaacaaatttctaaaataaatattgtactttgatctcccagcattgcatttttaatggac

SEQ ID NO: 331494 - DNA, 1866 bp, Homo sapiens
  chr2:171569931-171571797
  hyper
gggggagaagggggcgtgcgagtgcaggatgtgcgagggacccattgtatttgggtcgcaagcagcccacccgtcttgagtacgatattctcattccgcaggcgcgccctgggcgtgggagaaggtgggcccggaggcatcgcatccccgacccctgatggaagtgcggagggcatccttatacagtccagattccgagtccgttgtagttaggctaacctctgacgctgcatcgggagataggtcaccccgtccgtcccggtcgcagtgcggttcccgtgaggaagacgggcagagaggccgggcgcgaactgattaggggctcccccacggccggcggcctggagagtggagactgtgtccgacgggaggtgggtgggggagaggagtaggccgagctccggcggccactccgcagtgcgctctcgcgagccggggccgcgaggcctccaacgcggttccgcacccctaatgccccagggcggtgagcaccccgcggttccccgcccgcctcttcctccttccccgcccgcgcgcccgggagaggcgatccccgcgtccgcagtgccggggcaggacgcgccctgcgccctgggccaggaggaggcaggtggccctcctcggcaggaggtgagccgccagggagggatgggggtcacccaagcccctgcaagcgcgaccctgcccagagcaaagcacgccccgcgcctggtgaggaactttttctttccaaaggtggcaggaacaagtctgtactgacttttctcccgccttcgggatcctctctcgtatgatttgtggtttgtgggaccacaacaaccaggcttcctcgaccgcgccttttttccagtagctcctggtctgccaggcttgcgagagggcgcgctggcttggcggggctccgggcgagaaatcaccagcagcgctggggctttcggccccccacagcccagcccgggcctcctgggtggcctggggagaagggggcgggacagcacagcttcttcccctcgggtgggcatgacgggtcgccttgggtgtcctgccgagctcagctttgagggtatgcgcggcgcgggtgtttttcccaggtccactctgcaaaagttgtggcctgaggaaaacttccaggtcgccagcaggaacgtcacaggagagccccggtcgctcgtcaggcgggcggccctggagcgtgcgcgccacccaacgccgcgctgggcggccgcccggccccgccccaggtcacagccctgccctcggccccaccgcggcgggcgggggacacgcggcgggccgggcgctgtcggtcccacgccccaccggggatctcgcttgggtccgctgtgtgcgcgggcgggtgcgtgtgcggcgagggtgcagggtgtgcaagtaaatacaggggagagttacactctttgccgtctcaaagtccggcgcctggaagccgaaggcagatttttccagagataacaaagacactttgtcactttgggcgctgcgtcggtgcaaatctttaattgcaagtgtgtgtgtgtgtgtgtgtgtgtatgttggggggggcgggaagagtgtctcgagcaacccaagcgcgggtctccaggcggcaaggccccctttgatcaggaaaatccaattatttgtgtatatacatttcccacatagtgattacttcattaattgtcccgcctttatctcctcccttcccatcccccctaataatcagttcttttatccagaccaacaaacacaccataggagctttgtggattcaaaggatttgctttcgcttctgaaagagccgctattctttgatgattgggtagcggcaaacttcaaagccataaatcttccctctgactggctggc

SEQ ID NO: 331495 - DNA, 981 bp, Homo sapiens
  chr2:171669897-171670878
  hyper
cccagttctcgtctcgggagacagacgtttaaccggtgagcactgccattttttttttcctttctggtcataaattagacacttaaaatagattttaaggagccagctgaaacgaaccaataccatggctctaaattacgtttcctggaggctaaaaattctaattgcgtcaaaaaaaattgacgtgtcctgtctactcaccttgactgaccacgttttaggcgtgaagatctccccgcagcccgtttgggcgctccttcaacgcctcacgctcctcctactcacccgtttttccctttgcagaaaaggcttggccccaaatccggttggaatatctttaaacaatcccccacccacccacgacggggaaaggaataaagggcattgtgggcggagggtcgtgttcccaagtcccagcggtggttgacctaaggaaacgttatcctcggcagacagggtggagtagccggggctgcaagctcgcaaatccctaatgccggagagagactggaggggtcgcatatcgccccctccttcttctgcctttgagcgccgcgttcccatttcttcaaagcgcttcaaatacaatcgaaacagctgggcggacaccactcccttccgggccacccctcatcaccggttcgagtccccggagaggatatcttttttccacccccattatcccaagaatcctcccccaggaatgataaaagattaaaggaagagtgaaagacataaacaaaaatataggtttcaaatgttgtttagagccgaatgacaaccacggccactcttagttcaaattcctaccggagagaagagcagtgggcgaaatacctcaccccccaactaggcaaaacaaacagcagttactgtcaggagggaggagggctggggcgagtctggtgggttggcccatagctattggcggaagcaaacgaaacagaggcatggggaccagaaggacgggcgctgtccttc

SEQ ID NO: 331496 - DNA, 826 bp, Homo sapiens
  chr2:171671330-171672156
  hyper
ttcattggctaaaacgttaggggtgttttgaactctggggtcaaaggaggaagtggttggaaatgtctcaatctcgtgccacaggtgaagtaaacgaatcttcctttccagggaatcacgggttttgggaaaaggttgaggcgagcgggcgtctatgctggacaatgaagaacgaggggcaccgggagatgtgttgcctcctccttcctgtctcctgccccgtgcgtcttgaatgatttagcactggcacctggctccctgattggtgcgagcgtctcgtttagggaaggctctaggagggccggtggatggaattccgagcttcacctggttgtatgccgcccacttcaagcagcgcagagcagctgccggttgagtggtttggggggacgtttcctacgtggagcagacacccccagcctgtccagccccaagcctcagtgcccggggctgcagtcaccgcgcgccccgccgtttaggatgttttttgtgtccttaaaaagtgccggggatttcatcgtcaggtggagacaaggcgacaaaacagtagtttctttagtaccaaaggcaacgcgattatttcaaaccccacagcgagatccctcttgctgatcaggccatgtctgcccagggcggacccttcgatctcccttatggaactctcggtaatttataatatttttgtgtgtgtttccattgtgttgtggtgaaaggcgataaggcattcaaagaaaacggacgggcctccgctgaaccagtgaggccccagacgtgcgcataaataacccctgcgtgctgcaccacctggggagagggggaggaccac

SEQ ID NO: 331497 - DNA, 1759 bp, Homo sapiens
  chr2:171673109-171674868
  hyper
cgacagcctgcctatttccaaaggaaaaaaaaaaagcgtgttgagtacgttctggattactcataagaccttttttttttccttccgggcgcaaaaccgtgagctggatttataatcgccctataaagctccagaggcggtcaggcacctgcagaggagccccgccgctccgccgactagctgcccccgcgagcaacggcctcgtgatttccccgccgatccggtccccgcctccccactctgcccccgcctaccccggagccgtgcagccgcctctccgaatctctctcttctcctggcgctcgcgtgcgagagggaactagcgagaacgaggaagcagctggaggtgacgccgggcagattacgcctgtcagggccgagccgagcggatcgctgggcgctgtgcagaggaaaggcgggagtgcccggctcgctgtcgcagagccgaggtgggtaagctagcgaccacctggacttcccagcgcccaaccgtggcttttcagccaggtcctctcctcccgcggcttctcaaccaaccccatcccagcgccggccacccaacctcccgaaatgagtgcttcctgcccgccctagtccctgctctccacgggtgcgctgcgcagggacccccccccccccgcctccctcgtcactcttcttatccctgccctccggattcacgccccggggaagcacggaggctgaggctctagttgaagtggggcaagagcgattttcccttgagcttccatgctgcgagcgcctgtccctccaaagggcgcctgggcagcagcagccgaaggcgctactaggaacggtaacctgttacttttccaggggccgtagtcgacccgctgcccgagttgctgtgcgactgcgcgcgcggggctaggagtgaggtcggagggagggtgtggaggcgatggccggtgggcccttctctgtggggtcctcgatctacccagattagcccgcaatctctctgtcccggggccttcgggcgccatcgcgccagcgccgagagtcgagcaggggcgccgcgcaagatctttgtccgccgcctcctgcgcgctgcgcgcaagttcgtttccccggtgacgttccccatgcttacttaccccaccctctctggatctgtaccgcgagaaatctggggtcctcagggggctaggtagaggagaaacgctgaaaccggaccgaaacctcgccctaggcttagcgatggctaaaaaccggctgggataagagggaggcaagcaacattccgactcgctgctttctggctgtctggagtgcaaggtgactgtggttcttctctggccaagtccgagggagaacgtaaagatatgggcctttttccccctctcaccttgtctcaccaaagtccctagtccccggagcagttagcctctttctttccagggaattagccagacacaacaacgggaaccagacaccgaaccagacatgcccgccccgtgcgccctccccccgctggcccacacgccggctgctgagtgcccaatggggcttgtagcggctcggctggaaaatcgctcactgagcgctcccctgtgctcctagcctagtcccccacacccttgcgtcttgtactggccttggacccccaccccgaccccgaccccgcctcgtctcggcgcttcactccaggtcgcgccgatgcaccgccagactcgagagcggcccagggctacgctccctgcgccccagtaccggagctagcgcgcacgtctcctcc

SEQ ID NO: 331498 - DNA, 279 bp, Homo sapiens; identical to SEQ ID NO: 228817
  chr2:171678073-171678352
  hyper

SEQ ID NO: 331499 - DNA, 169 bp, Homo sapiens
  chr2:171678799-171678968
  hyper
cgaccacgctcccctacaggccctgaccctcctctgcccgccccagacctggtccccaggggtcttttcctctggagtccccaatccccaacacccagtggagcgaacgccgggtgccctgcctgggcgcagaagcgggaggaaagcgcccccgcgcggcaaccccgcc

SEQ ID NO: 331500 - DNA, 163 bp, Homo sapiens
  chr2:172378960-172379123
  hyper
cgacgccccggtcccgccgcccggccactacccagagggctgccgccgcctctccaagttcttgtggcccccgcggtgcggagtatggggcgctgatggccatggagggctactggcgcttcctggcgctgctggggtcggcactgctcgtcggcttcctgtc

SEQ ID NO: 331501 - DNA, 731 bp, Homo sapiens
  chr2:172947590-172948321
  hyper
cgccagcggctcggcatcagagggcccgcgctcagtgctcctccctagacctttctgagctaagaaataattccggagtgtagccatctcttgctcacacacaacccgcttctaaattaagcaaggctctgaaacagtatcccgaggggctcatgccggacttttgttccaagaaggcaaccaggtcccctgtgctaccgcaaaagtctttgatccttttccagctgtggacacagagcacccaagagactgtcgcgatgtgcggccgtctctccccttcccccaccttgcaagtctctggaatacactgtccctaggcggcccggccgtcgggtttcctcacgccttgccctgagctccgggaattaccaattccgctttccccggtcccaaccccgaccccgcgcccgccgcggcgatcacttacttgggcaaggccctcagggcacgcgcgagagacctggggcccggcagtatccgagcgactgtgctgggcacacggcgtggcactccataccctaaaacaggcactaggaaggagcaattaaaaccacaagtgcgacacagaaatcaggacgagccgagcggctcccggagttgcctggtggcggaatcattagctggctgttgctacaaagcctcaccgtgtggttcggtgattaagaaaaaaaaaatcttttaaacgttggcaaacccgttattggtttggcgtattgggttttttttgcttt

SEQ ID NO: 331502 - DNA, 1545 bp, Homo sapiens
  chr2:172949181-172950726
  hyper
ccacaggcctgggtttgctgcgggtttcggtgtcccccagggactcctaaactctggaagtcgcgctagacctcaggaggccggaaaatgaccacctggcgtcggtggctccagcagatctgagcccctaggccccctgggctccacgctgagccgcgctctcggggcgagtgagcccggggctctccgcgcatggggagtggagaagggagggggaggaggaggaaggctgggagggaaagaggatgtgtgtgttgggggagggggcggtgcagccgcctttcctgggaggagaagcgcgggttcctggctctccacgcgcactgctttaatcagacccgtgcagcctcgagctggagtggccagctgggcctggagcaatgcgagcgggccccagggagcgacagcggcgttggcgcagcggccgagtgagtgagttcgcagggagggcccctaagccccgactccagggatgcggcagagcgtaccggggaggcgcggccggataggcgctgcgctaggcacaaggctcttaggagaacctctgtctgttggccgcctcgggcgcccccagtgcgcgactccgcgctccagaggcagaggtcagtctcctcctgagccgccctagctctgcgccgaactgagtggcagcgacgagaagcggtcccgggtgtccggtgttagggaccgctgaagggtggggacagtggtaggggggcggcggcgcggagccgctggttggttcctggggaggaaagcgcgcgagggaggcgggaggccgatgagccgcgggccgcaggggccccggcgcagacgccgcagcccattgtgcttcctgcccggcgcgctctgttgcagaggagccccggccgggaagtgtggatgcgtcttacccgaggccgggccgcctcgcccgctctagtccagcggagcccgagcgcctcggaccaatccccagtgattatgcaagacagcggaccaatcagctccgccagctcatgaatatttatgaccttcgctgagtcaaagctttgaaccgagtttggggagctcagcagcatcatgcttagacttttcaaagagacaaactccattttcttatgaatggaaagtgaaaacccctgttccgcttaaattgggttccttcctgtcctgagaaacatagagacccccaaaagggaagcagaggagagaaagtcccacacccagaccccgcgagaagagatgaccatgaccaccatgccagaaagtctcaacagccccgtgtcgggcaaggcggtgtttatggagtttgggccgcccaaccagcaaatgtctccttctcccatgtcccacgggcactactccatgcactgtttacactcggcgggccattcgcagcccgacggcgcctacagctcagcctcgtccttctcccgaccgctgggctacccctacgtcaactcggtcagcagccacgcatccagcccctacatcagttcggtgcagtcctacccgggcagcgccagcctcgcccagagccgcctggaggacccaggtacgtgc

SEQ ID NO: 331503 - DNA, 886 bp, Homo sapiens
  chr2:172951266-172952152
  hyper
cgttctctccctggtgctgcctccgccacccttcggtagccactcgctctcggctgttcgcactaaaggcggcccctcgtattaacaacgggccctacttctgctgtccctccaggggcggactcggagaagagcacggtggtggaaggcggtgaagtgcgcttcaatggcaagggaaaaaagatccgtaaacccaggacgatttattccagtttgcagttgcaggctttgaaccggaggttccagcaaactcagtacctagctctgccggagagggcggagctcgcggcctctttgggactcacacagactcaggtacctcgccgctgccgctccgttctgccacgcaggctttccgcggccggcctgcgcccgggtcttcatttgttgctcgctgggactcagggtcggggtgtcactgtgtgtatgtgtttgtgtccacccctggctctcagcgtgtctccttcctccctcattccctctgccctagctctgtcactgctctcggtatcccgagctgcctgccgtccggccctctgtccctggacaatctgattagggcgcaggaaggatttccccagacgatttgtttgggaactcagaggtcacacgtgcctaaacaactggaacaatagactccgggcttaatccctcctttgcctttaaattgtgtgactaatcactcggggcctgggtccgcgcctcagcctccctcctcctcctccttcttaccggttgggggtggggggagatcctttcctccgccctctcacctctcaagtcccagaccttagagaagaaacgggaccttccttcccggctttctgtaagactccggggagcccgtgagcgttcctgacggcggcgggcgcgggtttccgacgtc

SEQ ID NO: 331504 - DNA, 148 bp, Homo sapiens; identical to SEQ ID NO: 228831
  chr2:172952394-172952542
  hyper

SEQ ID NO: 331505 - DNA, 294 bp, Homo sapiens
  chr2:172952840-172953134
  hyper
ctccccacccgtgccgcccggctggaaccctaactcttcatccgggaagggctcaggaggaaacgcgggctcctatatccccagctacacatcgtggtacccttcagcgcaccaagaagctatgcagcaaccccaacttatgtgaggttgcccgcccgtctccttcttgtctccccggcccaggtccctcccgcctccaggtccatccatcccgtccggaaaagaaggacccagagggaagaaggaacagtggaggcgggacgccctccatctcctcggagccccgcgaggtcc

SEQ ID NO: 331506 - DNA, 689 bp, Homo sapiens
  chr2:172955255-172955944
  hyper
cgcttgctcagattagtttcctccagaggaacacgggcttcaagggactagaaccagattggttcccttctcgtggccctgcgtcccagcccagccccaacccccaccccagatctcgcagccgagccgaggcagtcccggagagctgcgggcccagacaggctgccaagcgctgttcctacttctcccgcactcgccttccagcgctgctgcccgcgggagctggccctccacctttggggggtcttttcaggcgcgcggtggggagcagagcccggaaggcagtgatctgtgttgtgacaagcacccatttttcaattggtgctggtgaaagatcagatgcgccaggctcttccgacgccctttgggaaggggaggaggaagtggtggggctgctgggggtggggggaggcggtgtgatggaagcagggaaagtagtcgggggtgggggaatgatgccggggacctccaagccccttccaggcctgagattgggacttctccgcagcacctagaagaaccagcgctgatgggagagatcagacctcagaaaccaggatgtgggcagtcagatgggcctcaaagctgaggaaagaatgaatttcccagctcccgcgcggggtagggggtcttcctaggttcaatttcccctaggagatgtgactttgctagtgcgaagatttctgtcc

SEQ ID NO: 331507 - DNA, 1300 bp, Homo sapiens
  chr2:172960833-172962133
  hyper
cgactttttgagaggggacggggcttcttgctcccggacattgttctcttgggcggaggggaccacttcagagcttctctttgcacccgcctcttctgcccctcgtcttctaccactgaactgtttgtaaacaaagttccagtcttcccccgctctctccgcctccaccaaaccggtatttctcccaaattcgctccatcagtctgggatcgttacacagggcggatattcacaattttcacaagtgatcctgaaagaaggcctaggggaagcctcctaaacggtcccacattgcagcagggctggtgaggcctgggatccattctctctcttttctgcccttcccatcccggagtctcggggccggcggcgggaattccgcgcagccggaggggggtctgcgcccagcggagcgccgtgctggggcgaggtggctgtgggcagagcgtgcaccggggttggggggagaaggggattgaaggggcggggggcgcgggagtacctgggcggcaggcagttggccctggagctcagtgcccgcgttctgcctgagttgggagagccctgccagagggtggagcggagagggccgtgcacccctcactcttcagcttccctccccctgcttcccagcgcttgtcatatcctgtctctggcctgatatttcacgcgagcaattggaaggagattacaatggagatttatgtgtgttctgagcactgctagtttcccagcgtagagagccgagatcgctgcttcccatttccatttttcattcgcgctttggggagctcagtagagcacggggggagcgtgtctgcgcggcggcgggctgatcacaggactccgcgtctccgggcgggccgggagactgtgagaaaggcttgccagcgcgtcgcccccggcggggctggagccggcccccgcctccaggagccaggctttgtttcctcccttgcctacccctccccctttccgccccctcatttctgggacctgggcgcgtccttgcaaccccttctctttgcccttctcgtggtctgcggaaacacccccttcctctggccccttcaccctcctgctctcggcttcgcaggctccctggggaaaggcacaccgtggcccggcccgaccctgtcgtcactgggtgccgggtaaggtgactccggcgagtctgtggggcctcagcccaccccggagctgggagctcccgccctcccgactcccaggcttggctcatgccaaggcctgttgcgtgattccaacttgggctgacattccctgccccgggctctccagc

SEQ ID NO: 331508 - DNA, 529 bp, Homo sapiens
  chr2:172963629-172964158
  hyper
ctcgagcacggccccgtgtcgttggggtcggcttgcattccagagcagccagccatgcctcccgagggtgactcacagagctctcagttcagtcccgaagggcggtgggacaaacggaggggaaggttcaaagtagggttccgaccctcaggctgctgcagagctcaggtccctgacaggaggtcccccgcggcggctggggtgccgagcctggccatctaggcgggcgcgggggcggtggcgccggcgccggaggggcagggcaggcggaggctggagccgctccgcgctgagtgagtcaccccgccgccggccggagaatccctcgcggggactcgggagggggcggggcgtgaaacccccggtgcggccccacgcccagcgcgcctgtcctctccttgccgcacctcgcggtgtcgcagcctcggaaagatgtaaacgtagctctcggccggctggcttcccggcctgggcagcggcttgagctctgagcacgtgactgaccggaccctggcaccaagaaaaaagc

SEQ ID NO: 331509 - DNA, 2540 bp, Homo sapiens
  chr2:172964685-172967225
  hyper
cgctcctgggggagcgcggtgggggtaagataagggatgggggctccgagggctgggaactgcaggaaggaaagaagcggcggggccgcccgggtcaaggggccacgtgggggagggcgggcaggcgggaccgggaggtcaataactgcagcgtccgagctgagcccaggggagcgggcgaggagaaagaagcctcagagcgcccgggaagcctcgcgcgcctgggaggcttccatctcccgggacccagctctcagcccggggcgaggaaggcgccagacaggctcacccggaggggagggaaggcaagtccgaggcggggctcgaaacagccgagacccggggctcaggtcagaaatgcggccttttagggaggcctttgccaagctgctgtccggttcccccgagagaggggcccgtttggtggccccgggagtgagcagggcctgagacgggccactgcaggtcgcagcctgcaggagaggtgggtggcggcagcgggccgggaggagggaaccccggctcggggtaagcaatgaggataagtggtctctgctctcagtctctggcgagttctccctggggttagaaaatcgtccccgcgctcaccggggcgcccccgccgccgtgatggtggtggtggtgatgcggctgcggggtctgagtggggtgcagcagcggcgccgtggcctgcaggtgtgaggcggatcccgaggtctggtggtaccaggggtagttgcccagaaaagccgaggccgcgctgctcgggctggagcccgagctgccggcgccgctgccgccactgcccggaccaccgccgcccgccatccgctgcggcacaccaaagtcccaggaggccggcgctgagactggcggcgaagcacaaggtggagaagcgctggccccagggtgctgctccgaggggatctcaccacttttccacatcttcttgaacttggaccggcggttctggaaccagattttgacctttgaggaaaaagacctgagcattagtggaggaacctagtcttggggcagtaggggttcgaagaggagaaaaaagaaggcagagaaaaaccgctggctagcggtgggcagcgagcgccctggggagataagaggatcacgggcggcggccttcgaggctctgccggttcctgctccctggggaggtaattgccaaaaggccaggactgctggtgtacgtgcactgtgatgatggtgacagcgggagggtgaggagggccagttatttcacccgcttaatcagtagcgagaggtacgggatttctgtccacccggtccctttccttccctcccacggcggccccttgggggtttccagctttgggcctagaagcttacttagggccgctcgaggcgcaggcctggaaatccttaaaagtacttaaaatgaactttaaaaagcattgtcctaaacccgcctgcttcccagccatctcaggcccgcgctctcctcgcccctgcagggcgcgagccccacctgagtctgggtgaggcccagagaggccgccagctcggctcgctccggcaaggccaagtattgagtcttttggaaacgccgctgaagagccgccagctggaaactggagtagatggtgcggggtttccggactttctttggcttcccgttcactatccgaatttcaggctcaaggtcctccttctctgcaacgataaagaatcgtaagaacagcgcaacccaggggtcctggagttcccgccctcctagagggcccggcgggggggacttggcttgagcaaagaggtgggtgcactgaactgtggcgccacgggcaggcgcaacttcgcagcgtgcgatcggagccgccaccgaccccgggagctgtaccctccagggaagggggagacaagtgcacacccaagagaaagaagctggtggcaaggagatgcccttatgaggcaggcagagcacgcccacttggctcttgaggccaccaggtcctaccaaaggagagagggacgtaaccggcgacctgcggcagattggaggctggggagggtaaagggcacaagcgggcggtgagcaggcagcgtgaaaatccagagctttcgaaggccccccgccccaaacacgtttacccatccatcccattaactagaccgactcggcactcttgacttcagcgttatgcataccaggctcgttgttggctggggacgaactggttccatagggagcgtaggaggtgtaggcggcggtgtagcccaggtcatagctgctcttggcggagtaagggacgttgttgaggccgctggcttggtactggtaggaacccatgtgcgcgtagggcgagcccccgccgccgccgccgcccgccgggtgctgctggttggtgtagtagctgctgtcggtggcggtggacaccggaagggtgggcgactcctggggcttgtggaggctgctgctgctgctgctgttgccacccgggccggcgccgccgccgctcgggggctgctggtgctggtggtacgtgctggaggcggcgatctgggtc

SEQ ID NO: 331510 - DNA, 604 bp, Homo sapiens; identical to SEQ ID NO: 228843
  chr2:172971056-172971660
  hyper

SEQ ID NO: 331511 - DNA, 442 bp, Homo sapiens
  chr2:173037307-173037749
  hyper
cgggcggtggcgggccgtggtccggcgcagtttccccgcggcccgctgggtcgcactgtggccttaggaatgtgggccggggcggggcggcttgggagcgcgctgcagccaacgccgcgttcagccccgggcgcaactgcagccgtgccgggggcctccggggccccgaccgaccgacagctctttcagaccgcagcgaagtttgcacacacgacagcacgtcccggggctaggatcttgcccgcctgcggggctgacctgcaccacccttggggaagcgcgaactgccgccccgctgccgggagttaggcgcccgggcctgggtcgcccccacagacggctcggacggcacgaacgagcggaccccaaggatagtgggctggggaggggtccagtcgtggtcacggaaacgggtggtcctcgcgccgggctgcactcattc

SEQ ID NO: 331512 - DNA, 783 bp, Homo sapiens; identical to SEQ ID NO: 228847
  chr2:173099598-173100381
  hyper

SEQ ID NO: 331513 - DNA, 1045 bp, Homo sapiens
  chr2:173600371-173601416
  hyper
cggccaccggggtcgccacccccagtgtcccccagcagcgggaccgcggggtccccaccccggggcggaatccccacccacgggcgccgcagtgcagcggcgggcgggcgggcgactcggccctccccgcacccgcgtcccgccccccgggtcccctccctctccccaccgccccaggccgcgggagcccgcggggagggcgggcctgtcgcagccgcgctggtcgccaggcgtccgggaggagcggggtccgcgcggcggacgaggcgggggcggaggcgcaggcagagcgagcgcgggaggtcgccgcagccagggacaccgcgcgccgccgctcaacatggtcgctgcgcacgctgcccattcttcctcctctgccgagtggatcgcctgcctggataaaaggtagctcgccgggggccgcagccgggggccgagctctgcggtgctgcccgggccctgagaccgccgcagctccgcacctgggcgcagcgcggccgggctgcgggtggccggggtccccgagcgggggaaggggttgaggtcctcgtccgggagacaggaggacaaggatccccgcctctcgtggggtgccagcggcatgagattattacacgtggtggagaaaatgcagcgcagtaaggggagagagcacccacctctccaaccccctgccctgccgcgactccaggctccgctcctgggtgggggtttattttctcttggcatcacgggacagaagaatcgatgcataccctttccggctattcagaccttgcggggtatgaagttttaaagaggggtgggggcaccggcaggtgcagagtaacattctttttttgttcttgaaagcaaagtgtgagggacccggtggagctgtcgaatcccttgctgaaattcacagctctctgcccccgcagtcgctcgctcaaggtctgtgttagagaaggtcatttgggaggctgctttcgtcttaatacctgcttctcgggaaaagatctttacgctaaaaataattaaaaccataaagcatgtaactcccgac

SEQ ID NO: 331514 - DNA, 1172 bp, Homo sapiens
  chr2:174219195-174220367
  hyper
aaacgccatggtgcgtgacccgcgccaccctcacgctgctctcctttaccccccagactccacttttcctccgccaccacgaaaattcttgcaaatcagacagctaaccccggggcaatacgaaccattttcgcgccactcgctcaggaccgcgcagctgcacaaggagagtggtccccgtagcccctaaagcccccctttctcaaaggggattttaggagtgcccaaggctatcctttgaggtcagaatatataggggggtcgtgttttttccagggggccacctagtcttgcgccatgtctggccgttaccacagcttgcaggacctgtgtcccaacgcgggaaagacagcccgagccccgcccctccgggcccgggtcggcgcgcccagcctgccagccgcgctgctgctgctcctcctgctgtgggaccgctgaccgcgcggctgctccgctctccccgctccaagcgccgatctgggcacccgccaccagcatggacgctcgccgcgtgccggtgagggctgggcgggcgaacccgaggggcgggcgcggtgggtgctggacgcaggcgggcgcgggccgaccctctccaactccgcagcctagcgctgccttaactggtggcctgcctaggcgttgcccgcttgggcaagcccctgattttgtgcacctgggataactgagggccatggggacgttcctgcgtggcgtgcgcacccgaagtgcgggcggcgtggagacttgagtcgtttgcaggatggctagcagcgctggaaagccctaggcacgtgcgtccgccaaaggccggacagcggccgggagcgctggccggtcccgattttgcctgccaggcagagccagcctgcctgccccctgggaggttgtcccgcagcggcccagccctttcccgcacacaactcggagccagtgcgtggctcgccgcgtctatacccgcgctcagtgggtggcccttgggcgcgcaccccgcccggcaagagacgcgtccgcttctaaccgctgagggccagcgcgtctgaggtttaaggtcttgcgaaccggtctcctagaacttgggctgcgcacgcagtgtgaagcgaccgtagtcccgggcggtggttaagtgcatttaaagggcttggtgggtcaaagcgttcgccgaccatttgctc

SEQ ID NO: 331515 - DNA, 1724 bp, Homo sapiens
  chr2:175190730-175192454
  hyper
cgtccgacttgtccgggaatggagcagagaaagaggaaccagaagaaagagaaactcgcgacaacagagttgccgaaagagaagtgttggcgcctcaaacttgaggatcagcttcttgggccccactccagggtgtcgcgggggtcgggttctttccgccgccccccgaaagattctcagctaaccctttccccgccgagaccaagaggccctcactctgacaccactccgggagccaagctactgtaaggagctgataccacccctcgccggcgcgaaccgcccatctccccagacccgcccaccccctgctgcgaatccctgacgttctagcccggcgaaggtcctcttaaattaggaaacaatagctatttaagaagaagcgcaaataacccgcgctctgcgcgcccaatcgtgggattcttgggagttccccgcgggcaaggaagtctgctgctccccgcagctgcggaggagaggagggagcctgcgtgctggggcagggtgtcgcgaacttggggcaacccacctccagagccccgcccccgctttcccgcctgccggggacctgccgaacgcggaaccaccctccttcctgaggcaaatttgggaggggagaggtccagaagctgtagagtcggggcgccaagcgccagattctgccgctcggaagttgggggcagtccccagtcccgcctcaggcccccgcgctcacagggcgctccgccgagggcgcgggccaggcgcgcggtgtcacctccacgaagtcatttacttgccctgaaggagctggccctcgaccccttggaggatggagattcctcccattccctcctccgcctcccccaggtcggcgaagagacgtggaattgagctggaccgatgattccgcgagctctgtaattatgcacacactgaaatcttcaccgttgacttaagttacttggcgctgcgagggctggggccctgcatattgattaaatgcagcctctatttacctaaacaataaatgtagagattagcaacgttcacttgatcacaataatgggattgacaattaaggggcaatgcatcccagatgtagcggaacctatgggctgcgtgcagcaggcagagggcttctcagagaggggcgctgggcagttgcggcggcggaggtagtgcagagcaggaagcagcgcggaagcacagcgggaggcggagggggacgcccagcctcgtcaaggtcttcggccaccccgcccgggaggctcgaaactggctttggggtacctgaatgcctcgactcccagggagacatcgggagctcggagccactctccctgtggcgatggcacctgcctcaaggccgtctcgcttgctgatgcctggccgggaaggaggatggacgccgctggcatgtgccctggtaagtgtgtctgtttgtcatcagtgtacattctgcatgtggcagcagggcgagggggaggcgcacgtgtctaaagtgcacggagccttcctctacccctatgtatatacccttcagtcaatgttccaagaagcgggtcagggcggagggtatccatctggactctggaagggcgtgggtttgacatcggtaggtgtgacaggaaagtccagcctgtcagagttgggctctacagtggccgaaatcaagaaaggatggacgtgtcggcccagggctggcctgtttccggatatgtcacgggggtgcctcgttcctc

SEQ ID NO: 331516 - DNA, 717 bp, Homo sapiens; identical to SEQ ID NO: 228854
  chr2:175193195-175193912
  hyper

SEQ ID NO: 331517 - DNA, 5715 bp, Homo sapiens
  chr2:175196982-175202697
  hyper
cgaaaaaaatctggacttcctccgaaagatttccttggggccccaccttagagttgaagtggcccgggtgtttgcctgcgttcgtttggaagatttccctaacttttattgtgatgcagacgcgtgtatctaaaggaatatgcgagtgcccacgtctagagtctgacagctggaactacggggaaaacggcgggagggggaggggaggggatccgaggggaggaggagaagaggaaggcgagcagggcgccggagcccgaggtgtctgcgagaactgttttaaatggttggcttgaaaatgtcactagtgctaagtggcttttcggattgtcttatttattactttgtcaggtttccttaaggagagggtgtgttgggggtgggggaggaggtggactggggaaacctctgcgtttctcctcctcggctgcacagggtgagtaggaaacgcctcgctgccacttaacaatccctctattagtaaatctacgcggagactctatgggaagccgagaaccagtgtcttcttccagggcagaagtcacctgttgggaacggcccccgggtccccctgctgggctttccggctcttctaggcggcctgatttctcctcagccctccacccagcgtccctcagggacttttcacacctccccacccccatttccactacagtctcccagggcacagcacttcattgacagccacacgagccttctcgttctcttctcctctgttccttctctttctcttctcctctgttccttctctttctctgtcataatttccttggtgctttcgccaccttaaacaaaaaagagaaaaaaataaaataaaaaaaacccattctgagccaaagtattttaagatgaatccaagaaagcgacccacatagccctccccacccacggagtgcgccaagacgcacccaggctccatcacagggccgagagcagcgccactctggtcgtacttttgggtcaagagatcttgcaaaagaggagagaaaacacgggaggcacagttccacatccttgtcacttgcaccggctccgcgacaactcgtcgtttgcacccgagggtttggggttggtagtttaattttttttttttcctaagaagcagggtgtgggtttagtggggagtgtgctatattaaaaccagtgcccaggtctgcccgagggcgctggtatttctggttcaaaaacagcttctggctaccctggagaagaaagagaaagcggggcccagaaagagaaaaacaagcaggtcagcggttgctgggggactcgaagacgcaccctggtctgcttgaggacgcctcttttcacactgacaaggtccagggaggacttcaggatgcttccagcctgcaaaatgtggaagcgcccacgtgtggcctggtcctccgccctcccgggtgaaagtcctggagagatttctcgggcgcgtccgtgaaagcagggcactaatggggagcctacctcttaaaacagcgcacttgccctacggacgagcctctaggccctggtggtctggaatgggagtgggttggagctgggacaagaaaactccactccaggatgaaacgcgacatgcaaatcttcaccgggttaaacaaacagccgagcaagctgcagcttcagcggaggtggaggtgggggcggacgccgctcgcgccggtctctgtttccaaagttgttacagtgagaaaataagcggcttcgtgcagcgtgttgtatgggctgatgcctcccacccccatgccagcccacagcaaaacccggcagataatcagcacatcccactgtttagtcatatttgacaactgggttaacctggtatctaagcgctggcgaaaccgtacaaagggtgccctcaattaccaccagaagcctctagcgtgagtggcacttgtattaccccccgggtcagaggccagagcgacaattaggaagtcacttacaccgctggggggaaatggcgggatgcagcaggctccaggccctcccaacaaatctgtggatgtagatctgtacagagaggcctatttcgctcctctcggaggagctgtcccttcgcgccccctccccagtataactgtgagagtgaaattgaatctagtggaataaggaattgggtagaagacacacgaaaatgataaaaatcacaagcaagaatgatagatacaagctgaagttgtgttctgtaggcaaaagcctggacacacaaagtgagggctcacatttccgtctccacttgggccctgctggtgcgggctgtgtctgggtgtctcctcccctcctgcctcctttcctacaagtggggagtcgagtaggactgtcagccctaacttgcaacatctcggggtggtttgtgtgtgggggggtgcttgtggctcggtttcattggtacttaaacctggcttggtgcgtgagtgtaaatttttaattgcactgtaatttcttcagtccccagcccgccctcgccccccccccgcaagtatcccccactactcccccccacccccgcggccctagctagctgacttgactggcacgcgccgggagcccgggctcgggcccctcggagcgtctgattggctgcggggcagctccggtctgctctgcctgcgccctcattgggcgagaggcgcagccagcggcacttcaaagcgggtgctcctcgcacttaggctgagtttagccggcgggagcctggagtccgctcggcacgagcgcggggacgcgggagccgcgcgggacccaagcagtttttccgagcagccgccaggctcagccccgctcccagcctcgctgcgcagccagagacctgctatggccacgtctatactcggggtaagtcgcaagcgcggcaacgcatttgcttgttttaaccggagtaatttttcgttatggcttctggggtctgcggctccggagaaactgttgctgctagactgcagcttcagcttctattagcactttccacatttctgggactgatttttccccaagtttttggaacccagaaagatgcctttgcaagaaaaggccttcttaatcaagtcctttttcatttggtttcaaaaaaaagctagaggtttcttttcttcccctcgtgatttataccccatcccccgcattgctttggggattttgttgcaattatgcgacaatggtgtttccagaaaacagtcttaatcgttttgcagtccatctagtcacgctaataaacatttacatttccgcggctccccaattcgcccatgactttgaaatctgtctctggccgcttatcctcggattattgttttcataatcgctgtttttgtgtgtatgtaaactttaaaaccaaacgttttctattaaaaaagaaaagtcaagtcgtagccaccctgggagagctgcaagtttcgcccgtccctggcagctgtttcggccgcctccgccctcacccggtgtttgttgtctctggtctctgtgtttaccttcgcgcttcaccccgaagggcgacttggggtcttctgggagatgagccggtttacggcgacaacccaagtccggttgtaggcagggttgcagcggggaacacggaggcatctttgatttatagcctcagcgaagtgcaactttccggcgcctggaccttcgcccgggtgatcgcccctgctccgcgcccggtgcggcgactcctccgcgggcgcgtggggaggaggcgcgaggcggggagccaggaccccccgggagcagccgcaggggacgaggctgctcacgggtgcactttgtttcttcccccacttcctcttgccctcctccttcttgctccctcccccatcccacccactctaggaagagccgcgcttcggaacgaccccgttggccatgctggcggcgacctgcaacaagatcggcaacacgagcccgctgacgacgctgccagagtcgagcgccttcgccaaaggcggctttcacccctggaagcgctcctcgtccagctgcaacctcggctccagcctctcgggcttcgcggtggccaccgggggccgtggctcgggcggcctggcgggcggctcgggcgccgccaacagcgccttctgcctggcctccacgtcgcccacgtcgtccgccttcagcagcgactacggcggcctcttctccaactcggcggctgccgcggcggcagcggccggggtgtccccgcaggaggcgggtggccagtcggccttcatttccaaggtgcacacgacggcagccgacgggctgtacccgcgcgtgggcatggcgcacccgtacgagtcctggtacaagtcgggcttccattcgacgctggcggccggcgaggtgaccaacggcgcggcgtcgtcgtggtgggacgtgcacagcagcccgggctcgtggctggaagtgcagaaccccgctggggggctccagagctcgctgcactcgggcgccccccaggcctcgctgcactcgcagctgggcacctacaaccccgacttcagctcgctcacgcactccgccttcagctccacgggcctcggctcctccgccgccgccgcctcccacctgctctccaccagccagcacctgctggcccaggacggcttcaagccggtgttgccctcctattcggactccagcgccgccgtggcagccgccgccgccagcgccatgatatcgggcgccgcggctgccgccgccggggggagctcggcacgctctgcccgccgctactcgggccgcgccacctgcgactgccccaactgccaggaggcggagcggctgggcccggccggggcgagcctgcggcgcaagggcctgcacagctgccacattccgggctgcggcaaggtgtacgggaagacgtcgcacctgaaggcgcacctgcgctggcacacgggcgagcggcccttcgtgtgcaactggctcttctgcggcaagcgcttcacgcgctcggacgagctgcagcggcatctgcggactcacacgggcgagaagcgcttcgcctgtccggtgtgcaacaagcgcttcatgcgcagcgaccacctgagcaaacacattaagacgcacaacgggggcggcgggggcaaaaagggcagcgacagtgacacggacgccagcaacctggagacgccccgttccgaatcccccgacctcatcctgcatgactccggcgtcagtgccgcccgggcggcggcagcggcggcggcggcagcggcggcggcggcggcggcggcctccgcgggaggcaaggaagcagcgtctggccccaacgactcttagaggccgggcgagaggcgcgagcacacaagcgagtagagacaccgagaacgaacgagaggttcggagggcgagcgagcgggaggcgggagggcaggggcttcagtgacgcccccagggcccgggctgggcgcgaggtggagccgctcagggctcccgggctgcggttcgcccgctgtgcgaggagctcccctctgccttccgcgcccggataagaatcgaacgcgtggtccggaaacaaaagcgaaccatcctccgacacaaacactttaaaaactgtactcccagacgtacacatacaccggagacctacaaccacaagcacgcacactcgcgcgcgcacacacataccactcgcccaaacttctcgagcgaagagcaatacatagaaaggctccctctttgcccactctccacctccctccaacaccc

SEQ ID NO: 331518 - DNA, 198 bp, Homo sapiens
  chr2:175204013-175204211
  hyper
cgttttaaaaagcccccaaactaagcacttgatttgataactaggctttttaatgttatggaagacaactgctcctttccttttcaaagacggctgatctatgcaaatagtgaattggaaatgcctaggtccccgcgccgtcaaatggccctcgcaggttatttgaatatcagtggcgctgcttctgaaaaggttcaa

SEQ ID NO: 331519 - DNA, 1266 bp, Homo sapiens
  chr2:175204628-175205894
  hyper
ttttgattactgtccgccttgggaatttgagcgaagattttgatttttaggaaagaaaaaataaattcttgttattaacaatcagcaaaatgttttctcggaaactgttctgaaacaccaagtcgcaaagtagcgataaaacagaacgaaggtccccagcagggagtttgcagcgtgacattcaatggcttcttccttctccttcttgagctccccgcggccaggctgccccgctcttcttactcgagtttttcttcactttggccattttctctccccgatcaagctgttcataaccgggagccccccactccctaagcgcctctggtcgggggatggtcttccggagagccggctggcagggacgcgttttccggaggggcttcgggccggggcactggaggcccagagggtgcctggcgcgtttgggggccgcgggctggcggcgcggagtagagggtgtggtgggtctccccaggaacgcgggcgcccgggcgtcgggcccagggagctttgtttctcgttgataataaaggcagatcaaagggcccggtcgtgcaggtcccgctggccgcgcggctccctccgcaggccagtgatcaaggcctgtgtgcgctgcctctgccccgcgggtcagcggacgtccatcacccaggctcccgggagcggcgggcggcggccccggaccgagcgtccagccgggagacagcagtccgcggaacctgagcccagaggcagcggggccccggggccccggccgaagccaacaggcgaaaacagggcctaggccccctgcccggcctcccccaagccctaggcgcccctgggggcgcggggaaccttgacctgagcgggtggcgaccggccggccggtgatgaccaaattggagacagcgcgcgtgggaggcgagatcccgccagttacaacacgagttcggtccccaattgcggtggggcctcgcctccccagggccacctcggggccccagaggcctgtgcctttccggctcaggggccagaaggagctggaggcggtggtcaggggcccaagctcagaggcgggtagcggcctggaggtcggtgggggcgggggacgcggcctgggggcccagagtctcgcccgggcccggtaagggcagtgcgatttcgagtcccccggtttccctggcatttcctgtcccatagcttccagcgcaacagaggaacgaaaagcaagttttcctcggccctgcgcccacccagccacgatccgcaccatcctccagc

SEQ ID NO: 331520 - DNA, 831 bp, Homo sapiens
  chr2:175206781-175207612
  hyper
cgcagacccctctgactctgcatccgtggctcccggcccgcgaggcccgcgtggactacccggggcccggctggaaccaggccgattcaaacaggccaccaaaccatcccacccccctaccccctcgtgggcaatcagggaggcaagggacccgccgctttcgcagccccaacccgaggcgggccggagcagccttctgcattgccttcgtcctccggcggacaccccagcccgagtggggcgcggggggcggctgggcaggcaggagccgggccggtcgcgcagggcccccgagggcggcgagaagcccccaaattccccgctcgaggcctccccaaagggtgcgcacaccctcctggagcaaaccgaccccttttgtcctctccttttccctttgaaacccaaatctgaaatcgggtaacagttgggggcgttggccgattttctctcctctcagcgtatcgtcctccccctgccgcccctttccctcctcttccagtccactatctccccgaccccagcccgtcttcatactgcgtggagtgacttcctcctcctccatttttgtgccccccacccccagcgcgtatttattgtattttaatttaaaaagcgacaccttcaaaccctgcgcccgaggcggcggaggcgccgtcacccgcagccgcgagagcccggccaaggcgcctgggtgccgggctccctgaactcgcgccggggagaagcagtgcgtttccggggactcgcagccacctttgcggcgggtaactcggctgggtttgtatttgctgttttaatacaaaccccgccgcactgcctatttcaaagatg

SEQ ID NO: 331521 - DNA, 975 bp, Homo sapiens; identical to SEQ ID NO: 228860
  chr2:175208099-175209074
  hyper

SEQ ID NO: 331522 - DNA, 1341 bp, Homo sapiens
  chr2:175546713-175548054
  hyper
cgactgggtcagctgctttcccttacactcacaacgctaacagttctttctttaaaaagaaaagtatgtatagtagaaaaaggtaggggacgcgagactgaagtgaagctgtctctggagagttcgggggatcaccccccctcaacccccgtccccactccgggcgaaaagcactgaccgggactggagatgtctctaaggtcgacgcagacccctaacgcgcgcgtctacgccgacctggggcgagcgggccgcccgggagggccgggagggaggcgggctggagcgcgggaggggcacggttcccatagacaggcaggcgggcggtgccagaacttgagccggccccaggggatgcccgaacgtccccctctgtcctagctggggtgtaggtgcagccccagggcatcgccgcgaagcccctgctcgagacctacggagatagtgggtcccgagccccacggggcggccccgggtccgcggagtccagcggtgagctcagcccgaggcgcgggacccaggctgtccacggccccttcctccccgggccatcagcgggcagcagaacgcgcgggccgctggcctggaattgcgcccctcccgaggccgcgcgcccgcgcccaccgctcgcaggggacgcggcctcgacgtccccagccgccccacccgcgtcaccggtgccaggcggcacttccgtgccccgccgtcgagcccagcccctcccggcgtctcccccggcccccgggagcccggaacccgggtcgcgccagaggcgacgcgtcccttaccgcgcagcggctccggacgactccgcagccccgcgccgcgctgggcattttttctgggaaacttctcccggggtccgcagggctgagccgggcgggcaggaaaagcgctcagcgccgggaggctgcgaccatccgggaacttcgccgagatgtgggccctcccctccggcgccgccgcccccccgccgccccgccacatgtggacgcgccgcgaggccccgccggcccgcgccctgccctccgcgcgcccgcctgccccgccagcaatggggctctgcgcctgcagcttcggcccgcagaggatcgcggcggggcgggatggtcggggctggagtccgcagtttcctcagtcccgctcccctgcgcggcgaggggaccgaggcaagaggacaggagtttgcagaggggcgggaactggaaggggagtctagcccagggcctttccccccaactcttgaatcttctccaccttcttgcggctgctggcggggggatcgggtgggggtgttccctctgttcgagccggaaggaacgccttttcccacgctttccc

SEQ ID NO: 331523 - DNA, 543 bp, Homo sapiens
  chr2:176937692-176938235
  hyper
cgggtcaccgccgccctgaatcagctcctgccaaagggctcattaaatccccctccagagcccccatcccaggactaagtaagtcatttgctggtctggcttggatgaaccaaggatcgcaggaggctgcctgtgtgcctacccgtccccccgcccgagtcccctagtgggcgaacgctgggccgggcacggtatctccctggcgagcacagcctgaacccaaggctggttttgaggtggcagttaattactagcccggaaagccgaagccccggagccgatgtctgggctgacagggttccctcctcagcctcggggcagtcagacgattcctaacaacttctcccaaggaggtagatccctgtttatcaaccagcacaccccgtcggcccttttctttggtaaacactctttaaacaaacagcccatccgccctgttattgccaaagctgctcagagctttaataaaagcccagggaagatcagaacccgcgtccaaggctgctgcttaatccaatgaaggcaatttccgaggataattgc

SEQ ID NO: 331524 - DNA, 368 bp, Homo sapiens; identical to SEQ ID NO: 228867
  chr2:176940204-176940572
  hyper

SEQ ID NO: 331525 - DNA, 1853 bp, Homo sapiens
  chr2:176944127-176945980
  hyper
cggctttgtccttcccggggaaggcggccacatccctacccgccttgctcctgaacgtagtaaacaatctcacaaacaaccaccgctgcccacgctctccatccgtcctcccggccttatcagacctccgttctcccgcactcttcgggcagggtccctaataagctcaggctgaaagaacgtttgccacctcccccaccctcgttgaaagaaaaggaagaaaaacagcagcagcgagaaacctccggggcgactcctcccccgcccccaagcaccagcgcacagcatccccctctgtctttgttgtggttctccgttgcttcgggccacgccgttcagccaagcaacccggacctgagagtgcacagccaggactagcttagggggcgaggggttggtctttgggaaaccaagcgctcaggacagaggtggaaagtgggtcccgggagccagaaaagagagagaagggcagacggctgggtggcaaatacaaaaatagaaataatttagggggatgcccgccaggcttttgcgcctgctccttctcccccaattcggagcaggttcccttcggcctcccgcgccccggggcgccccctggcggcagcggcagcagcgggcaacgcgcggagggctcagggggcgcacaggggactcccgggcacactcagagaggcgggcgcggccccctggcggtggcgacgtagttatctggtgagcggagcctcgtccctctggtccggcgggctcacggccgtcttactaagcaccgcggccgagtagggcaggaagccgctctcggaacgcggcgccgccgcgctgcagccgaagtccgagcctcccccggccccggcgcccccgccgccgccgccaccaccaccaccgccgccgccaccgccaccccgggaacccagggctgcggcagctgctgccgcggctgccgccgccgactgactgctgtggcaactgaggcacgagcagggtgcagagccgccgctggggggcgcgccggccgccgccgccgaggaggccgcagccgctgcggctgccgcggctgccgcggcagaggccgcgctgttgagccccgcggcggccgcgggagcctggtagagaccagggtggcggaagctacacagcagctccggccgagagtaggggtgcgagagggcgcggaaggtgtccagtggccggatggaagtagcgaagggcgacgaagccgcggccgccgcgcctgaggctgcagccgcggccgccgccgccgtgacgcccacgtgcgggtagtagtgcagcggcacgtgcgagtggaaggggtagggcaggcttccggtggcggccgcgtgcgtcatcatgtaggtgtagaagctggggtcggctgggtgcggccaggacatggccaggcgctgccgcttgtccttcatgcgccggttctggaaccacacctgcggggagagacgcgccgcagcctgggttagggagcgccccgtgttcccagctcctgtcccaggacctctgccccttccggacctctgaatggcttggtctacttctctccgaccaagcccaaccccgagtaccctgtggtctcccagctgggaaagtgtggacggcagtgtgtggaccgccgtgggcacaccgtcctcaacgaagagggtcctctcccccgcgtccggctgctgctgctcctcaggcttttattcccttacttcttgctgcacttttttgtcccaatccaacctttcctctccctcccgccacccaccagtgccggtctcgctgagcacccgtctctcaatcccaggatttgtacggggattctgggcagcctttgaagagaggctgccgctcagcttttc

SEQ ID NO: 331526 - DNA, 616 bp, Homo sapiens
  chr2:176946010-176946626
  hyper
tccgaactgcaaggacctgcccctaggggcacgggtccgattttgatattgaagggatgattttgttggaatcgtttgccttaaatgagtgggtagagcaatgtctccataaacggggaaggggacgtttccacccctcccaacactatctaataaagacatcattcgtcacaactctaaattaaagaaagcccgatcaaaccagagggagacttccacactcctcccctaccccgtggagattttttcttttttctgcagtgtcgaacgctccatgaagggctcaccaaatcgcctaacctcccggctatctctcccagacgtataataaaattaataacctaaagttatatataaataaggacaatttcgttgcatttttccccgcaggaggttgcccttttttcgttgcccaagaggaaaatgttcaggaaactactgtctcaaaccaatcgattttaaagatacagtatccttttctccgtgtaacgatttatgcggaaaataaatctccaagctcaagagcaaatgaaaagtttcacctctggttcctgcttgaggaacaaagaccaactgggcttgccgcctaggggaaagtggggccgtgggtatgggc

SEQ ID NO: 331527 - DNA, 631 bp, Homo sapiens
  chr2:176946645-176947276
  hyper
cgttgggcacaatggagcaggggcgagtgctttcagcattggagtcaccattcgggggccttcttagatccgtcaggccggacaaccgttcggattcggtggccgggaaataaataagccaattcctttggtgactaccccccgcggatttccagacccttagctaaatctagccacccagaaaggggaaaggggaaaaagaaacaatcaacccagatgcccccggggaggccagagcaggcatgcactggaattgataccttgatggtggtttcgggcaggttgagtgccgcggccagctcgcaccggcggggccgcgacacatagttctcccggtagaactccttctccaggcgcgcgatctgctcgcgggtgaacgccgtacggtagcgccgcacttgatccgcgccagagccggagccacccagcgccgcgctcccgccgctgcctccgctgcctccatgcaggcttccgaggcctgagcccgacgccgacgtcgtggtgccggcagccgagccgctctctgcgtaccctggcaaacaaacgaccaacagcgcatgagtggctgtaggaccaacagcccggcgctggcgctgcgcgcggatcggggaagccccgtcaggaaggagag

SEQ ID NO: 331528 - DNA, 605 bp, Homo sapiens; identical to SEQ ID NO: 228871
  chr2:176947776-176948381
  hyper

SEQ ID NO: 331529 - DNA, 2263 bp, Homo sapiens
  chr2:176956345-176958608
  hyper
cgtttctctgggctgctcctatcacaaaatccgaatttgcttggaacaagcgccctcttaatttgcccctctcagttctctgcagttgacagcttggaaaaggaagcgaaacaaaggtccctgggaaagtgaagttttcaattaatttggtgtgagaaacgggcgggagtgggtggtgactgcaaaatgcgaggccggtcggctgctggagagacacagaagtttcacggtgggaggctgagtggctttctcccccggcgccgttctcagggtctttctgcgggtcgaagaaggacccgcgggagctgagaggcccaggtcggaagcactcccggctggcccaagagtagaggcgaagagcgttgagtaggcatccatggacttttctttctgggacagattgtcaggctcactgcgccgatgcctgtctttcatctgtttaagtctctgccgccagccccaagggcgcttcatgggcattttccgaacggacagcgtgtgtgtataggaagggtctgctccaatgcctcttacctgtgtgaaatgcctttgccgggtaccagtgcacaaggtagggcaaattagctcactcggatttggggtctagaagtcgactaactgagggattcagcaacaggataaaaaaatgggcctgttttcacatcattctgatcatctctgtccttcgtcttcattttgctgtgcaactcggggagccgaggagaggtggcaaaaacagcggttgccgagacaaggcgcaggccttggcgcccgcctcagtcgcagacagggcctgggatgggccgtcgcgcaatcaactcgtgggggtggctgcagcgcgtacgcctgggtcgggggggagggcgggaatgggaggtggaccctgcaaggggcaggagaggggtgggggccggagtgggtgggtccagccaggcctgggccgggagccaggctcccccgcgttcctacccccacgtggccgcgcgcagccaatggcacgcccccggcgggggccctcggggcgggaggcggccccccgaccggcccaggccccctcccaacctgaacttcgtttttataaacgtcccgcgatgagctaacctgttggagggcaggcgggccggaggcgggaggctcacagagggagagagggctagaggaagagggcgggagcgagcgaaccagagagaaaggagaggagggaggaggcgcgccgcgccatggtgtcctgcgcggggccagggccagggccggggccgggccaggccgggccatgagccgcgccgggagctgggacatggacgggctgcgggcagacggcgggggcgccggtggcgccccggcctcttcctcctcctcatcggtggcggcggcggcggcgtcaggccagtgccgcggctttctctccgcgcctgtgttcgccgggacgcattcggggcgggcggcggcggcggcagcggcggctgcggcggcggcggcggcagcctccggctttgcgtaccccgggacctctgagcgcacgggctcttcctcgtcgtcgtcctcttctgccgttgtagcggcgcgcccggaggctcccccagccaaagagtgcccagcacccacgcctgcagcggccgctgcagcgcccccgagcgctccagcgctgggctacggctaccacttcggcaacggctactacagctgccgtatgtcgcacggcgtgggcttacagcagaatgcgctcaagtcatcgccgcacgcctcgctgggaggctttcccgtggagaagtacatggacgtgtcaggcctggcgagcagcagcgtaccggccaacgaggtgccagcgcgagccaaggaggtatccttctaccagggctatacgagcccttaccagcacgtgcccggctatatcgacatggtgtccactttcggctccggggagcctcggcacgaggcctacatctccatggaggggtaccagtcctggacgctggctaacgggtggaacagccaggtgtactgcaccaaggaccagccacaggggtcccacttttggaaatcttcctttccaggtaggggcgatggagaaaagggaccgacacgagggagggggagagagaaggagaaaagaaaggactaagagtatgcgcccctacttgggagtgggagttgtgcctgtgctccacacgtgaccagggttaacccagtggaaatttgtccagttcgtgtgaaatctgtaaattcctcctctgatttcaactgcctccgtcactgccctttc

SEQ ID NO: 331530 - DNA, 135 bp, Homo sapiens; identical to SEQ ID NO: 228877
  chr2:176959224-176959359
  hyper

SEQ ID NO: 331531 - DNA, 468 bp, Homo sapiens; identical to SEQ ID NO: 228879
  chr2:176963190-176963658
  hyper

SEQ ID NO: 331532 - DNA, 1667 bp, Homo sapiens
  chr2:176964062-176965729
  hyper
cgccggaccgcgccctctccggataagtcgagaggcgccggttaatggaaaatgcctccgctgcaacttaaagccggtagaagcaagccgggcccagaaagcctgcggaaaacgaatcgcaaagccaatcacgaccaagaagagtcccaggggacacttgggcagagtcaccctcttgcccgatgtccccagctgctgaagccgggcctggaaacccgcagacagttagtcttcgctcaacctgatttggctctgctggcagcctcgtccttcgccatcgaacattgcgggtgttatcataatactctgaagggggggaaaacgggtcggggggatgtaggcggtgctgaaatgaccggctttgaagaacctgcaggcaaagtttcgtccaatcgtctgagcctgtcctcttattcccggttgtaactaaatactgttgcgagcgcagccgaagccctttgttggagatgtgtgagcgcagtctctacagagcgggctatgtgggctcgcttctgaatctgcagtcgccagactctttctacttctccaacctgaggccgaatggcggccagttggccgcgcttccccctatctcctacccgcgcggcgcgctgccctgggccgccacgcccgcctcctgcgcccccgcgcagcctgcgggcgccactgccttcggcggcttctcgcagccctacctggctggctccgggcctctcggcctgcagcccccaacagccaaagacggacccgaagagcaggctaagttctatgcgcccgaagcggccgctgggccagaggagcgcggtcgtacccggccgtccttcgcccccgagtctagcctggctcctgcagtggctgctctcaaagcggccaagtatgactacgctggtgtgggtcgtgccacgccgggctccacgaccctgctccagggggctccctgcgcccctggcttcaaggacgacaccaagggcccgctcaacttgaacatgacagtgcaggcggcgggcgttgcctcttgcctgcgaccttcactgcccgacggtaaacggtgcccatgctccccgggccggtttgggccgggatgggaggtggggttcaagggagagtgtaaggggaggtgaaccgcctgggggcgggcaatagacagagtacgggctgggttgacgtgggttggggctgtgttgcaggcctgccgtggggggcggccccggggagggcccgcaagaagcggaaaccctacacgaagcagcagattgcggagttggagaacgaattcctcgtcaacgaattcatcaacaggcagaaacgcaaggaattgtccaataggctgaacctcagcgaccagcaagtcaaaatctggttccagaacaggcgtatgaagaagaagcgcgtggtgcttcgggagcaggcgctggcgctctactagccgcgcgcgtggccagggccgggttggatctgcccttttggacagaggccttgtttggggagggggatctggggctaaggctaaggcttttccttcggttccttctctgctggccccagaagccaccaagagatttacagaccaggccagttgggcctccttgctttcctcagtccctgagaagcccgtgagaaacgtgcggaagtaccagtgcaactctggctggccttaaggcttccac

SEQ ID NO: 331533 - DNA, 882 bp, Homo sapiens; identical to SEQ ID NO: 228882
  chr2:176969197-176970079
  hyper

SEQ ID NO: 331534 - DNA, 855 bp, Homo sapiens
  chr2:176972103-176972958
  hyper
cggccagagcgcagccagcatgtacctgccgggctgcgcctactatgtggccccgtctgacttcgctagcaagccttcgttcctttcccaaccgtcgtcctgccagatgactttcccctactcttccaacctggctccgcacgtccagcccgtgcgcgaagtggccttccgcgactacggcctggagcgcgccaagtggccgtaccgcggcggcggcggcggcggcagcgcggggggcggcagcagcgggggcggccccggcgggggcggcggcggcgcggggggctacgctccctactacgcggcggcggcggcggcggctgcggcggccgcggcggccgaggaggcggccatgcaacgcgagcttctcccgcccgcgggccgccggccggacgtgctcttcaaggcgcctgagccggtgtgcgctgcgccggggccgccgcacggccccgcgggcgccgcctccaacttctacagcgcggtgggccgcaatggcatcttgccacagggcttcgaccagttctacgaggcagcgcccgggcccccgttcgccgggccgcagcccccgccgccacccgcgccgccacagcccgagggcgcagccgacaagggcgaccccaggaccggggctggtggcggcgggggcagtccctgcaccaaggcgacccctggctcggagcccaagggggcagcagaaggcagcggtggcgacggcgagggccccccgggagaggcgggggccgagaagagcagcagcgcaggtaggcaccgggtactgggcaagcggtgggcccgggggccgcgggggagggggggggggcggaggcctccctctgcttgcgcctttttatgtgc

SEQ ID NO: 331535 - DNA, 310 bp, Homo sapiens
  chr2:176975945-176976255
  hyper
cggttaaaatgtcagtgccctaatagtgtgatcgttccatgagcttaaaactgttttttttctttctgtttccatctattttttaaaactgcatctaaacgtagcaagcttgtgtgcccaccacccaaggcaagccgaacccgagataccattttccgtttgcaggggcctggagatccacacgagggcgcgctcacgttccagaagccgcgtttgaccaagaggccgcggtaccttgtctgtccaacactggattctaataggcgacctcaaccccttagaaacaggcggcagctaaggtgtttgctag

SEQ ID NO: 331536 - DNA, 826 bp, Homo sapiens; identical to SEQ ID NO: 228889
  chr2:176980658-176981484
  hyper

SEQ ID NO: 331537 - DNA, 245 bp, Homo sapiens
  chr2:176983768-176984013
  hyper
cgctggaattagaaaaagagttcttgttcaatatgtacctcacccgcgagcgccgcctagagatcagtaagagcgttaacctcaccgacaggcaggtcaagatttggtttcaaaaccgccgaatgaaactcaagaagatgagccgagagaaccggatccgagaactgaccgccaacctcacgttttcttaggtctgaggccggtctgaggccggtcagaggccaggattggagagggggcaccgc

SEQ ID NO: 331538 - DNA, 1830 bp, Homo sapiens
  chr2:176986474-176988304
  hyper
cgaaccgcgcgaagcggccctgcccggggagactcgctgaggcagggctgaggcggcgggcgggagcaagctgctctagcatttgggttctgccctgtggcgtgttctcttccagggcctttccagcatcatcggagaagacgaagcaccctggccgccactgtccgtgctgcgccaactcgcccggccgcccgcccttccgagggcaggcagaagcccctctgtgtcctccaccgccgcgccccggctcgcccctcgggccgcggcgtgtgcccagcctcacgtcggggtgtgtgtggccgcgcgggcgtgtgtgagtgtggcagggggagggggccctccgatctgctccatccgtccgttttattagggacacattaatctataatcaaatacacctcataaaatttttattgaaaggcataatatcattacagaggtcttccacctgttttaaacaacacgacaagctgtgagcaagcgtgtgtgtggggatgtgtggggaggggtgggtgtgagtagggagagaggcgaggggagaacagctcccctcgggcgctaggggccgccccgagggcccgcctgcctcgggcgacaccggcctggcgcccccgcggccgctccgtgtgccctggactcgccgcccgcggctcggaagctggagagtcagcgacggggcccgactgcgggaccgagggctgcaagaagaagcgaacaaatagtccccagcgcctcctctggatgcggtcgcgtctgtggtcctggcagccgctgggcgggccaggccaggtcgggccgggccgagccgggcacatggacctgggcctgcgggctctaattgcggcgcttatgttgatgattttttttttaatcacagcagcccccagtttagcggactgatttactcccggtattggtaaatatgatcacgtgggccgcgcgaccaatggtggaggctgcagcctgcgaactagtcggtggctcgggcgccggcggggagctgctcggcggcggacagtgtaatgttgggtgggagtgcgggacgcctcaaaatgtcttccagtggcaccctcagcaactactacgtggactcgcttataggccatgagggcgacgaggtgttcgcggcgcgcttcgggccgccggggccaggcgcgcagggccggcctgcaggtgtggctgatggcccggccgccaccgccgccgagttcgcctcgtgtagttttgcccccagatcggccgtgttctctgcctcgtggtccgcggtgccctcccagcccccggcagcggcggcgatgagcggcctctaccacccgtacgttcccccgccgcccctggccgcctctgcctccgagcccggccgctacgtgcgctcctggatggagccgctgcccggcttcccgggcggtgcgggcggtggcggtggtggtggaggcggcggtccgggccgcggtcccagccctggccccagcggcccagccaacgggcgccactacgggattaagcctgaaacccgagcggccccggcccccgccacggccgcctccaccacctcctcctcctccacttccttatcctcctcctccaaacggactgagtgctccgtggcccgggagtcccaggggagcagcggccccgagttctcgtgcaactcgttcctgcaggagaaggcggcagcggcgacggggggaaccgggcctggggcagggatcggggccgcgactgggacgggcggctcgtcggagccctcagcttgcagcgaccacccgatcccaggctgttcgctgaaggaggaggagaagcagcattcgcagccgcagcagcagcaac

SEQ ID NO: 331539 - DNA, 2519 bp, Homo sapiens
  chr2:176993210-176995729
  hyper
cgagaaaggccgagcaggagaggggaaaacacacacacacaacagagaaccattgcatttattggacattgaaacgggagcagagagggaaaggaagtgtgtggggaggcggttggtagggtaaagccagacagctttggagagagctgctaaaatcgggaatattttgtcgattcacactcgactgggccacatgactcgggcaacttttcttcatctctgctcacaaactaggctgagccttctctttctctgctttgggaaaaattcgtaactttgaggcctgcgcgctctctcggcagtaatttcacaggcttggcggaggaagtaggatcgttagcataagatgggccgcctgcagctgcctggaaccggcgcgatctgaacgccggctgggaggctcctggggggaacttgcggtcgtctgccctccgcactcctccgggaaccgcagccggccctggttcgctgcgcgccggggctgagacccgggagccgcgtcctgcccgaggaaatgtcaccctccccagcgcgagccctttttcccgcctcagaacgtttctgtccgctcttctatttactctctcagcaagcctaatgccccctcctgcattcttcagcctccccctgcgcccagggctgacgtctatcaagggtgaaatgatggaaactatattcatgggcatgatttccattaaatatcaattaacctgagagcctcggccaggcttgcggtgcgtcaagggtaaatgtacatctcatttccacagggcccgctcggctggaaaagaaaggctttgatttgctttgataacgccaggatctggggccacactcgcggcttttaattaaaccacttcgatatgccccaactcaaatgcacggtccggtccgtcaacacctcttgtccacgttccctgggctgcacccgcgtgtccagagctgcaaaagccacgggcaacctctgcttttgcagccaggggctcggggaggcagtcatttgctccgcagcctcctgggagtggcctccttggctcccccaagtctaaggctccgccgcggcccctccctgccggctgcgatccgcattcccgcggccccggggcacacggagcccttggcagtgcgtctttatgggccccctttaaggccggcggaggcatctcgggccgggcgcggcgctccgtccgtcggccgtagcgactgaactgcgcgcggatccctccgcggggctcctcgtccccgtcacgctgactttccgtgcagtgctgtggtgcgaaaatgcctcgccggtgcgcaccgggtcggcagcctcggcggcgggggcgagattggcgggaggggggcgcggggggggcgcggtaagaggtggcggcgggcagagggtgttttttttcttttccctccagagccggggtttgtaaaccgaggccagagtgtccccgtgggccgagcgcacttttttcttgtccgggtgcgctcagtcactggtgcctgagaggaaacagtggaggcagcggggcaggtcgcctggggcgtcggcgattatattgcggccgagccggggcgcgccgggaaaggccgggagggcggcggcgcgcgggggctgggcgaggccccgcgacccgcgagggaggcggcgcgaagccgaggcggcgggcgcaagagccgggcatgagcgcccagtagctgagcgcccgcggctgcctggcctcagaagcgacgcgcgagcgcgggcgggcggcagcagcgacgtagcccggcggtcccggcggcgagagcagccgccccacaggcccccgcggcagtgcggccgagtcgaggctcgctctctggctgcttagcgccgcccgcccgcccggggccgccgccgctgacgccccaatgagttcgtacttcgtgaacccgctgtactccaagtacaaggcggcggctgcggcggcggcggcggcgggcgaggccatcaatcccacttactacgactgtcacttcgcgcccgaggtcggcggccgtcacgccgccgccgcagcagccctgcagctctatggcaacagcgccgccggcttcccgcacgcgcccccgcaggcgcacgcgcacccgcacccgtccccgccgccctccgggactgggtgcggcggtagggaaggccggggccaggagtacttccaccccggcgggggcagcccggccgctgcctaccaggccgccccccctcctcctccgcatcctccgcctccgccgccacctcccccctgcggcgggattgcctgtcacggggagcccgcgaagttttacggatacgataacttacagagacagccgatttttacgacccagcaagaggccgagctggtacaatatcctgactgtaaatcgtccagtggtaatattggcgaggacccagaccacttaaatcagagctcgtctccttctcaaatgtttccgtggatgagaccacaaggttgggatgcattttttttttaagaagggagagggggagaaatctgctttcatctcac

SEQ ID NO: 331540 - DNA, 849 bp, Homo sapiens
  chr2:177001081-177001930
  hyper
cgggggagagagaaagcagaagaggaaaaaacatggcgcttgcgagctgtatgtgcaaaatccgcaaggaattgcagtaaattcctttttgtttgaagaaaatttacaacttggtaatagacctttttatgacctatttgcggtcgtcattggctgcggctggtcatgtgcaggcgccgctcgccttcacggcctttttcctgatttccccggcgaatttccccccgcattctgctttcccagagcctcaccccctctttttctaacctttgtctctgcagaggtgggctccagtcaccggctgcgggattgcggagtccgccgcggcctcggctcccgcccggcgcccggcctggccccaccgccgctcactcggtccgcatcgccgccacctccggagctggtggggagcccggcgagggagggcctggaaggggccctgggcgccgagtcccccgccggcgccgacaccgcctgccaggagcagccggcctgctcgaggtgactgcagccgcgcggttctggcgcggcttcttcaccaacatgagcgggtctctgcgtccgagagtgagcgcagccgggcagcgcctagtggattacagcagacgcccggaccgaccgccgcctgtagctcggcagccttcgggtaagaatcgccccctccccgctccccagcatgccaccaagaagcctggggcgccgacccccttgggcagctcagtccggctgctcccctacatttcccggggaagtggggggtcgctgtctaagccccttcccccaatcacttcgttcctagggcgtcccctggggcctggggtggagtccggctgggttcagaagtctaag

SEQ ID NO: 331541 - DNA, 105 bp, Homo sapiens; identical to SEQ ID NO: 228896
  chr2:177004525-177004630
  hyper

SEQ ID NO: 331542 - DNA, 668 bp, Homo sapiens
  chr2:177005051-177005719
  hyper
ggggggcagcagctcggcgaagagcagtcaaataaataaataaataaacaaataaatgaacggacatataagggcttttcccgcctgggttcgcttaaataatgggggacaagcgcctctgggccacgagcttgttgtttgtcctgggatggggggtaggggatgagaggtggcctcaggtccctcttgctccttccagccgccccaggggacactgtagaaccagcctctggtgcggggagacctccgcctgccggaggaagtcccagcctcaggtttccggggctggtggtctccctgctctgctgtctggcgcctcgtccaggaggaggcgctgtaggacaagcgtctcgccggctgcggcgggccggggagggcgggagcggagggatcggtacccgctcctcccttcccgcgcactctacctccgcgcgccaagtgtgtggggcctcgaacaagggtcgacggtgctgcgccccgtcccccaaggggttcctttccccagactggcagtggaagcagctccgaggcctgggagcctagggccgttccgggttggcgggccacctcgctttctccgcgctcccggagggggcgcgatttcctcgtgctgcgcttgtaggagcagcaacttgaatcctgtgtggggcaagctgggcccaatccgc

SEQ ID NO: 331543 - DNA, 1050 bp, Homo sapiens
  chr2:177042492-177043542
  hyper
cgtggttggtgaggaggctgggagaaggcctttttgatggctccattgttcacagcgctgccctacaaataccatatccgtccccacctcctctgcaagggtcgagcggaagagtaggtctggtgagctgagctctagggagctggtaccatcttccctcaatccccctcggttaccccttggggcagcaacgacgccatcccagccccttccagagaacacacaaaggaagccccacccgtccttagacctgaggacacgctcgggagcgggctgacgtggaccccgtttcagggcgccccgggcccctgcggggaacaatagccgccgcctcctgggcggtctggcgggcgcgcggcacaaacgtccgcgccgccacgtgatgcgcgcgctcgttccgcgctctccgcgcctcagcgagcggccaggctgcgggcggggtgggctggcgctcctgatccacctggaacacttttgcaaagacagacggtgagttaatcaccctaccggctggcggccgcgtcccctctcgcccgcgaggaggactggagaaggggctggggtggaggttttctctgtgtgtgtctagggttgggggcaggagaggttagttctattaagagttcatcaatcacccggtgtgcacttttcgctcgacagcggttcctcctacttcagagcaagtctgggccagctgggatccgaccagaaatcgcaagcggaggagacgcagtagcgcaggctgagcgctaactgaaggcgcgacctgagcccggcgcctgctggggagctgcgcagccaggacagcggtcggcagcacagggcctgggcgcagggcccgccgtcaccacctcacgtcggaagccagcactgctgcccgccagccctgccgcctgccctcggacttcccagggcgcccagggtcctcccaacgcgcctgcacccacacccgcccctgagccacagtgaccttgcattccccgccccctgccacacctcctgcgtgcccgagtgtcacccttaaataccgctctacacccagagagggac

SEQ ID NO: 331544 - DNA, 1676 bp, Homo sapiens
  chr2:177052673-177054349
  hyper
ctggccctcatcacgccgccacaaattgcgagggatagaagaaagctgcaaagtcacgttaaaaggaagcctagtcaaaaagtgaaaattttgtcccgccctaggcacacagcactcacagcataagatgtagttccatgagtcctaggaaagggggaagaaaggaaaaaaccaaacatctgctctaggtttagaagagggataacatcagcgccaagcaaaccgaaagcgcagaggactcagaagaggggaagaggaataactttatctgtcctggaggtgggcgaagagcagtctccaccggccgcgcgtcacgctcccatttaaccttttccatgccgcgacgcccacactccgccctcgagggactagccccccccacgatccagagcagaagcggctcgccccgctgcatccacgggccctcacccaagcgtccagtcctgcctttctccccccacctcgcccaatacctgtccgagagcaggcgttctgccctctcgccccgcccttgcccaggcagcccccggtcgcgacggctctcctcggggctcgggggcgctgggcggcggccctgggctgctttggctaacttggctgcggggcaggcgcgaggagcggcgcgccgaccgggccgagcggagaggccgcccattggccggccagcgccacgtggccgcccccgccggtatattaggccactatttacctccggctcactcgccatgggttggagagggcagctcgggtagagagggctggcggagcggcgcagacggcggcagtcctgctcagcctctgcccggctccgtactccggccccggcctgcgccctcagaaaggtggggcccgaaccatgagctcctacctggagtacgtgtcatgcagcagcagcggcggggtcggcggcgacgtgctcagcttggcacccaagttctgccgctccgacgcccggcccgtggctctgcagcccgccttccctctgggcaacggcgacggcgccttcgtcagctgtctgcccctggccgccgcccgaccctcgccttcgcccccggccgcccccgcgcggccgtccgtaccgcctccggccgcgccccagtacgcgcagtgcaccctggagggggcctacgaacctggtgccgcacctgccgcggcagctgggggcgcggactacggcttcctggggtccgggccggcgtacgacttcccgggcgtgctggggcgggcggccgacgacggcgggtctcacgtccactacgccacctcggccgtcttctcgggcggcggctctttcctcctcagcggccaggtggattacgcggccttcggcgaacccggcccttttccggcttgtctcaaagcgtcagccgacggccaccctggtgctttccagaccgcatccccggccccaggcacctaccccaagtccgtctctcccgcctccggcctccctgccgccttcagcacgttcgagtggatgaaagtgaagaggaatgcctctaagaaaggtaagtccgcgggccttggatggggccacctggggttggggacggagcctcccccgcggaaatgcgctgggagcgtggtgtcgctgcctttccagacagcggtttgggttttgtggaggagacgcgttcccgggcgaattccatggagtctgcctcgagtacagattc

SEQ ID NO: 331545 - DNA, 995 bp, Homo sapiens
  chr2:177502170-177503165
  hyper
cgcacccctctttacaaacctgagcggggctttcggggtaaggggaggcaagactttggtgggagctgctcgtcttcagcaaagcgagggccggctgcaaaggcgcaggctggcagttcgggtcatttcctgccgattccccattcccctcggagcagcttggagaggaagtcggacttcttttccaggcggagcctccacgatgggcgtgggcgcctcgtgcgtgggccgggggcctcgtgcgtgggcggggatcggggcctgggaaaaacgggaacccggtacccgcccgcgccctcgcgcgtcggccaggaacctcggccccatgcgggcgggccagcgcggccaggagggccgggaagaggggtccccggggccccggatgcgctgaactccggggaggggatgggcaggagagagagcacactcctggagccgcgacgtccaaacccggacgcacttgaacccgcagcgaggcccgtggctcgcggccttcggagagcacccgcgccccgcgcagaccggacgccggccttgcccgatcctcggcatccttcggcggggcggccagtcccagggcgctcgctgagggccacaccctggccccagagtttagcaccgccgcgggcagggcgctccgctcccggaccccgaatctgaaagcggagaccaagggctgcctgcggcaaagctcgacatacacttgattttcttccgatttggagaaaatgtcacgggcgagagcaaaaaaaaaaaaaaaaaaaaaaaaaaaaaccctaactgtaaatattatttggaggtgggcgagggcgcggcgtgcgcgcggcggcgggtggcgggcggcgcgggcgcccttgcggggattcccggtctctcagcgcgccctagtggacgccctgcctttcgctggctccccgtgctcgttacaatctgcaatatattatttcttccgaagtattgacaatgtgtgagactccagtaaccccggagctctc

SEQ ID NO: 331546 - DNA, 794 bp, Homo sapiens
  chr2:178257227-178258021
  hyper
cgagggcggacgtggtttggctctcggtccagctggaccgggctgggccaaccgggagtcagctcgaactcacctgcttggcaggtgcgcgcttcccgaggcgtgacaagggagcgccggcgcggtgggtggggggcagagaatgtgaagctccagacgcatggcacccgccgccaagtcgccgcggtggctgccgggatgcgccgcagcgaatggtcgcgccgggcgccgctctgagtgacctttcacccgcgcccagcggttccgggcggcagcacaaggcggtagccatggcggaggcggcggctgcagcgggtgggactggcttgggcgcgggcgcgagctacgggtctgcagcggaccgggaccgggacccggacccggaccgcgccgggcggaggctgcgggttctctctggccatctgctgggccggccccgggaggctctgagtaccaatgagtgcaaagcgcggagagccgcgtcggcggccacggcagcgcccacggccactcccgccgcgcaggagtcgggcaccatcccaaagaagcggtgagtagcggtatgtggaaggagttagcgtcgagggaccaggccgggcctgtgctgcaggagggcacaggcgaggtgggaagggaagtgacacgggtgggcggaaggcatcccggtccctgaaagtagggacccacctctctttcgagagagtggactagaccctggattctgtcaggaagggggcgggatgggatggtggattttggtcactatgtgagggtaacaggcttgaagaactctc

SEQ ID NO: 331547 - DNA, 353 bp, Homo sapiens
  chr2:178483339-178483692
  hyper
cgcctcggcgtagcgggcatcgcggatgagccggtacactagcgcggtaaactccccgtcggggatctgcgcgccgctcagaccagccataaccaccacggctgttatgcgtgcggttaccacggcaacagggcaaccgggcaaccggaaacggaagacgacgggttactttgccacggaaggaatctgttaggaataaaaagggaccgttctcgttagtctctcaagttcggtttgatcttcaaatattctggactgcagcgtggcggcagtcagaaggggaaagacgactactccgggccgttcagagactgaatcttcccggtcccggcatgcatcgttcctgtggcgcc

SEQ ID NO: 331548 - DNA, 487 bp, Homo sapiens
  chr2:178937351-178937838
  hyper
cgccgaccccaccccgtggtcctgctactcctgctccgcacaggtgcccagcactgagctgccgccgctgccccggctcctgttccggaaacccgagctatcgctgctcctgttctggctgccgccgctgctgctggaactgctgctgtaaccggatgagtggaccgctgtgacagggaggtagggcaggacacgcccctgagtgaggcacggagcctggagggaggagagaagaggagggagccgcggacgccagaccagccaaagtccacggcccaggctgccaggcggttcctggaagagtctctggacggccggaatcggcgcctgggtacaggactcctgattggaacacgattagaagagggaaacgcaccttgttccttccccgcttcttgctcccttacctccccaaccctccctactcaccgcgccccttaatccgttagcgtttcgaggaggcccagcgggagcccagtgggagtcc

SEQ ID NO: 331549 - DNA, 486 bp, Homo sapiens
  chr2:179343487-179343973
  hyper
cgctaaacccgcgtattttacagcaggtttcctcagggttcggtgacaacattcgcattttctaaaatgaaactggcataagacgaaataaacagcctgggatgtcgtagagtcagggaatatggttgtcatttctggaagcaaaaggcttctaagacccctagggaacgagcagatagatactggggggagggagaggcatgctggaaaaggagcgtaaaaaataggctggcggtggctttctgggtgcttcggaggtgtccttgaagcgcattctcaggtcggaatcttgcattcagaggttccaggctgagtcgcacaacctgaaggccagcccgatgcaacgaaactgcggtaccgcaactcctctgcctggctgcaggcgtttccgagagccgacctccacaattcagcatcctccgctggcttgcatttcttttccccgccactcggggccgcccttgattcgagggcctctggtagtgc

SEQ ID NO: 331550 - DNA, 773 bp, Homo sapiens
  chr2:180725140-180725913
  hyper
gcacataacagtggcgaaacagatggtcctccccctccccttctcctcgtcccttccgcagtcccacagtgtcctcccacccttccctgacaccttcaccagcgcttagtggccgaggccgcccgtcagggctcccaacaagtgcaaacttcggggaccttctctctgctcctctgcccccatctcatctgggttctgctgcagaactctcccacgaccccaagcttcgaccgctaccctcctcacacacctcggtcccctaactacccatttcccggtcattgagagaaagacaaaccccaaacttccagcccaggtgacgaggcgctgcggctaaacatagcggggcactctcctcgtcctttcccctctccatccgtccttgggaattggagcctaccctggggaacagaggagtatgctcctgtggcttccacgacctaatcctaactccagggactcgcaggagttaggattaggtcgtggaagccacaggcgcctgggcgccctcctctacaagtgggaccttgagacaaagtgcaaactctaccgggaggggggctcctggccattccctcgggcggcgcgcccaggtgcaggctcgctctgcggaggagggcgggggccgggcaagcagagggcgcccagtccgggggcgccggtctgggctgggcgcccagagcttacctcggcgcgcgggccgcgggcgcgtggggcagtggctcctccagccgggaagctgttgctcacgctccggtggttgctgcggtccc

SEQ ID NO: 331551 - DNA, 771 bp, Homo sapiens
  chr2:180725926-180726697
  hyper
cggggcttcgcgcagacgttctcccgcgatctgctgcagcccaggcggtggcggtggcggtagcagcggcggcggtggaggtggcgcgggcgacagctcggcccggcgcggcccctgaactgtccaactcttgcccgcgccgggcttaagcgcccggccgctgcccccgcgctgagcgcctgcgcaccgggcctcgcccaggtgaggggcgtgtgcccggagcccgctgggcgcgcccggcccggcccggccccgccgcacgcccgcccccctggcctggccgaggaccccggggtttggacgtgccaacgccactctcgcgcgccgaagctgtgacggtttactaagcagagacttgcgaggcacacagagagggaatgaggcggaaccgttcgggggctcgttgacactgcagagcctcccgcagcatcgctgccttaaatcccgcctttccaggcgtgcgcgcacagcgagccagaggaggctccgtcccgacctggggtcccccgcggtcctcagcccgggggctcgggtccccgaagagatccttggcaatggcagaggtcccaaagcctagatgccaagccccgcgatggggcggatgcttccaatattagtcaacccagagtgaaactctcttcttggagatcgtcagaccaactatttgtttttcctctttgaccacccctgggctagcagagcacagctagcagcttcggcatatttggcggagccgggaaggcccggagcgcaagaaggcatcgcagcctc

SEQ ID NO: 331552 - DNA, 1772 bp, Homo sapiens
  chr2:182321357-182323129
  hyper
gcaactgagtgggtgcgtgaaaaggggggatcatcaattaccagctggagcaatccgaatcggttaaagtgaatcaagtcacagtgcttccttaacccaacctctctgttggggtcagccacagcctaaaccgcctgccgttcagcctgagaggctgctgctagcctgctcacgcatgcagcccgggctgcagaggaagtgtggggaggaaggaagtgggtatagaagggtgctgagatgtgggtcttgaagagaatagccataacgtctttgtcactaaaatgttccccaggggccttcggcgagtctttttgtttggttttttgtttttaatctgtggctcttgataatttatctagtggttgcctacacctgaaaaacaagacacagtgtttaactatcaacgaaagaactggacggctccccgccgcagtcccactccccgagtttgtggctggcatttgggccacgccgggctgggcggtcacagcgaggggcgcgcagtttggggtcacacagctccgcttctaggccccaaccaccgttaaaaggggaagcccgtgccccatcaggtccgctcttgctgagcccagagccatcccgcgctctgcgggctgggaggcccgggccaggacgcgagtcctgcgcagccgaggttccccagcgccccctgcagccgcgcgtaggcagagacggagcccggccctgcgcctccgcaccacgcccgggaccccacccagcggcccgtacccggagaagcagcgcgagcacccgaagctcccggctggcggcagaaaccgggagtggggccgggcgagtgcgcggcatcccaggccggcccgaacgctccgcccgcggtgggccgacttcccctcctcttccctctctccttcctttagcccgctggcgccggacacgctgcgcctcatctcttggggcgttcttccccgttggccaaccgtcgcatcccgtgcaactttggggtagtggccgtttagtgttgaatgttccccaccgagagcgcatggcttgggaagcgaggcgcgaacccggcccccgaagggccgccgtccgggagacggtgatgctgttgctgtgcctgggggtcccgaccggccgcccctacaacgtggacactgagagcgcgctgctttaccagggcccccacaacacgctgttcggctactcggtcgtgctgcacagccacggggcgaaccgatggtgagtagagttggactgatgcgccctcagcagctcagagcggcgtgagaatggcgccctagggattccctgcccgattcaaactttcctccctcccaaggaggcaggagggaaacgctgcgagagccagctcgctggaaatctgccagggaaactaacttatcttggggcggcagcgccccgggtgcgttatggtgcaaggtcttggagcttcgagtcgggggtggtgggcggaggaggaggtggggaagctgccctgctgcggactgcacatctgtggcgacagggagctcagtgggcagcacagctcacgtctgagcgcacgtgcacgtgtctcgctttaggctcctagtgggtgcgcccactgccaactggctcgccaacgcttcagtgatcaatcccggggcgatttacagatgcaggatcggaaagaatcccggccagacgtgcgaacagctccagctgggtgagttgggtatgggaccaggagttagtgacctcccgaccccccatgtggaccccaccatagggcaagtcctggaaagattcac

SEQ ID NO: 331553 - DNA, 595 bp, Homo sapiens
  chr2:182521331-182521926
  hyper
cggcgacttggggactcggtaacctgtccgggcagtgaggcgagcacggggaggggaggcgagaaaaggggagggtggagcaaaagctcgtgggtgtaggccttgggccggggagagggaggaagcgcggagggaggcgaagacgcttggggccgggcactcacccgccgggcgctcgggctgaatgggccgccaccgcagtgctcgctcgctcagcaccacgtcacaactgtccctcccgatctcgaagatgccccggagcagaatccgctcggccgccgcctccgtctgctgcggggacgttaacagcgccggaggcacagcggcagcctccgggggcgcctcttcctcccggccgccctccagggcactcacccggttcctgcgcctcctccagggcatggcggagtcgcaggctgggcccgagccaggggtccggggaggcctttggagaaggaggtggagggcgcggcagccccagctctagccgcgtccagcgctgccacagcaacggcgcgcagggcagggacccaggagggaggcggggccgcgcctgacccagtccagcaccctggcctgccagcctcgccgcttc

SEQ ID NO: 331554 - DNA, 260 bp, Homo sapiens; identical to SEQ ID NO: 228922
  chr2:182547284-182547544
  hyper

SEQ ID NO: 331555 - DNA, 366 bp, Homo sapiens
  chr2:182547747-182548113
  hyper
ctctaatcccactgcgcgttgttcgctcaggcctggagatttgtacaaaggaaaggccactccaggatgtttcagagacagggctgaggttgggtctcacggtagctgtccttgggcttcccatcccgcagcgctccgatgtgaccctcctctgcgcggaaaatttcgacccggggcgccggcatcgcgacgctcagccagtgcccgcgaggctcccaggagatgcggggtagtaaggccctaaaaagaggagcctggacacggcctggattgaggtgcgttttgtttggggttgaaggcgcgagaaattggggcgagagaagagagtcagccggatcccggagaggacagagctgaaggcgcggc

SEQ ID NO: 331556 - DNA, 982 bp, Homo sapiens
  chr2:182548138-182549120
  hyper
cgcggccccgctcctcctccttattttcttctctttggacttgtttggacggttgcacacttttccccctcctgattccctaagttttttgtctctcccctcgctgcccgttagctgtactcccccagctcccgtccctactgggcgctgcaggctacccagcggcacgcgaaccgcacgcgcggacaacaaaagcctctttcatgactcactgccctcgagcaatgccccaaatctgccgcctcccgggtccccgctctgagcgcgcggcgcgggccgggcgtcccggccgttacagcggcagccggagcgcccgcgggaaggggggcgggaggaggcgtgtggccaggggtggggagaggggagtgtggcctgggccgggcggaggggaagggggaggcatgtgggaggatgggggtggggaagggatggaggcgtgtggcccggacgtagggggtgggaagcgtgtggctggaggcgaaagcggggagcgggaggtcgggggcgaagcattcacagggccaagataaagcgcaggggccgggccggcgtccctggcggtgacctgtttctcagggaaacagatgctcgctcttgcaaagggaggtttgcgttcaatgaaaggatcaagtgtggccagggcagcccggccgacctcgagaggttcccgcgtcctctccccgccctgcctaggagtggggtgtcggggcctgggcgcgggagagcggagtgagggggccgggtggctgaggggcccgcgagaccgtggggctcaggggccgcaggaacggagggctgagagctgcaggtcctgcacaggctgggtagctcggaggctcttgagagcttcgggggatgaaggggggttgatgcgggttctgaccagaccgccgacgcggcgcctccgccccgggggaggcagttgggctcccgggtcctggcctgaggctggagctgcccaggctcgacaggcaggcgaccc

SEQ ID NO: 331557 - DNA, 191 bp, Homo sapiens
  chr2:182756176-182756367
  hyper
cgactctttcaagtgtatgtttcagggtgcccaagcagacacttgttttctcgcgggggatgttttgtgagacttggcctccccacttacgttctatttttaggtgagggaggaggaggaggagaggaggaaagattattaacaaactaatcttgcccattccgcgggcagtagtcgggggctggcctgct

SEQ ID NO: 331558 - DNA, 376 bp, Homo sapiens
  chr2:182818959-182819335
  hyper
cgcgccccactacccgctaaccgcctcccgccacacacacacacacacacacacacacacacaccccgcgcgcgcgcacacacacacaccccaccccaccaccccgacctccacatacattcccccgaccccctccagcagtgaagtctaagagcaccgcgaagtaatttaaattttcgagggaaagcacagcgccatctgtcggacatcatgccaattactcttgttaagttcctacctgacggttactttatactttgaactgctaggtactccttttggcctaaggacacagtgaaaaatgtaccgagaccttggagagccacgaaccaagaaacttcagaaacctctgatatctgatcaagagttaagagac

SEQ ID NO: 331559 - DNA, 985 bp, Homo sapiens
  chr2:183731188-183732173
  hyper
cgagccccgggcacccggagcaggcagagagcagccagggcaagcagcccggcccgcagcagcagcatccctcccgggctgccgcagaccatgatcccggcaggatggggcagggtgcagccgcgcagtggacgccaaaaggcccgctccgccgtctccgcctcccccgctgcaagtggacacaaggatctgggagcttctcctcccccggcaatcaccgcttccttggatcaaattcccccaatggggtcccacgagctttaccgagctccagccaccgcccctgccgcccaggctgctctttcccaacgtctaagccttcggaagcagcaacatctatttattcctctccctctggcagaagcatcagacttcgcagatcagtcagataagagggacacgagaggaggcgaggaagacataaaaacaaaagtagaattcagctgagagctagttggagctctggggtgtctcctcccctagatcacgcacacaaaaagatgctaaagaaagcattaaattccccaaagtgaggaggacagaggggttggggggaaggagggaggaaaagctcctaatgggagagaagggtgcagtaagagtttacaagtcctgtgtgggctaagagctgcggccgccgctgcggctgcgaccctggctggcaggagggacgctcaggaggagccccgcagggacgtctgtgcctctgcccgggcggctctgcactttcctacctcccgcctgagagggagctccgcccctggggcagtctctgccctccagtgccggctgctcttcccgagaatggagtgggcgcccggggaagagaaggcctgggagtcgcaggcggtggggtgcgaagccgtgcgagtgcgagaccccaagacagcgccgagtcgagcgcgccctcacactagggaacccgtctttggccccagaaacgagcccctagcccctcactgaagagcccaccccaattccctac

SEQ ID NO: 331560 - DNA, 1312 bp, Homo sapiens
  chr2:183902312-183903624
  hyper
cgtaagaatatggaacactcaagttttcctacccacctagaatttcgcccacccaccaccctccctttcctatgggccccatcatgggggcgggggcgccgaggaggggacagctcccggctcccagcggcgcccccaccccgtgcgaggcccagcgcccgatcccgccgccgggagccgggaaatggcttctctgccttcggccggccggcgaaccacagggagaggcgcccgggactccgcattaggccgcggcgcatccaggcgaccccgggccgggcctcgggcggcgacgccgagatttctacacccggcgcctcctgccgcccccaccccacggcctcccttgcccttcatccctcccgggcccgcccgcctccgccgcggcctccccggcccgtgcgcaccttcttgatgttgtagaggcgggtgagcatgccgacgccccggtcgttgaggatggtgagcttctccgccagcttctgctgactgggctgcagcactgagcgcgacatggtggtgctggtgccgccgccgccgccggccgcctcgcgcccagtcacgggcccgcggccttcgcagcagcctctctcgggcctcctcccctcccgcccgcgacctccgccttaggagagcgcgcccatggccctcgcgccccaatcccgcgccggcgacagagcgagccgcggcggactcctcggagccccttctcccgcagcagcccgcgccccggcagcctcctgccttccgcccgccgcccttccgcccccacccccggcgctctccgccccagcccccaacgagccgccttccccggctgctccactaggtgtggcggcggcggcggcggcggcggcgtctccggcggctgagaacgaggccgcttcccgcagccccggacgggccctcggtcacctgatcggcagcgccggcgcccccgcgaggccggacggggaactgcggccgacgggccctcggcatggcctcgccgccgccgctctggccctggccctggcccggaccgcccactacgcctgatgccgggatgggagtcccaagcggggactgagtggggtcgcgttgtgtgctctttccacttcgccccacaccccactccttcaagttcccaaaagttgcttttccgcaccacccttctaaagaaaccggcagaaactctgctgggaggcggggtgttttccaggcgagtttcgcttaagagtgggctggtggctccaagcgctttttcctcccactgcttgacaggcgctcgccgcagaacacagcagatgttgtgctccgcgaggtggggatc

SEQ ID NO: 331561 - DNA, 1535 bp, Homo sapiens
  chr2:185462268-185463803
  hyper
cgggctgatggctgccttggacccttgaaaaccaaccagaaagtctgtctccagggaatgctgcagacccggttccctactttccgtgacaaacccattagttcgtgtgcagatttttccattcaggtcgcttctagggcgaacgcttttgttcgctaccactctgtagtgcgagaggaactagagaggcatgtaaagcaagcttgaggcagcagcgcctttgccgcaaagcatccctttcccctcagctttagcaatttaggaagaactgaggttctcaggggaggtggggtgagaggattgccaggaggagggacatataaatcaggagtccctgcttttaccctctactcacttgtactcgcatcgccacaactaccctcccccgaaactatcatcaacacaagcacttacggtatctacaaatgtgtgggagcaggggtgggtggggggcatattttctttcctcgcctttccctaagactgaacagggtaccagcctccataccaaacacacattaaataacaaaatcaaataagccaaacccagtggatagcaattatcttgagaaagaagccgctgctggcaccggcctggattcgctgcagtcggaagcgggtggctttcggtattgaattattaatttatttatccccctcgcccccacccccacgccgactgccaggcaagaaatcgcggcctcttcgcttcctctccgcccccaccttccaggagtctcccacttggcggtggccgtcgcgtccccggccctctgcggcagcggcgccgcgcggggcgctcccactcgcgctcgggctggcgcggccgcgggtcccggcggcggggtgggcgggggaggcagcgggtgacagatgtactcctctgacagctctcagtatcagcccagtggctccctgccattggctcagtgcaatggaccggcaacgccgctcactataataacactcatgcctgccagcagcagcaactccgagtgcaggcgccgagcgcgggggatgctgccgccgccgccgcttctgctgccgcgcgggcggctcccgcagccccgctccgcccggccaccgcgcgggcactgactcccgctcggttccgtttcgccggcccggccccctcctaggctggaatcctcccgcggggctcgtcgtcccgacgcgaatctgaggagaaacaggagcgagagactgaggggagagcgcggcgagcatgcggaggcgggggagcctcggcgctcaccacagaggggtgcagtgagccagtctccagaggacgtgccgggggtggctgcgtgccctcgtggcgggttcccagcccaccgtcgccggccccggcgcgctgcggctgtgggcgcggggtgcgtggaagcggcggctgcggcggaggaggcggcggctgccccatggagtgttactacattgtcatcagctccacgcatctcagcaacggacactttcgcaacatcaagggagttttccggggccctctcagcaagaacgggaacaaaactctggtaatc

SEQ ID NO: 331562 - DNA, 182 bp, Homo sapiens
  chr2:188418970-188419152
  hyper
cggagttgaggttattttgtttttccttccaggtattgaagacaggatttatcttctctacttcttcttttagaagcagatcaagaaactggcgattgaagagtaactgaaagaaacgcaatctgatcttactagcagtgaaagagcgaggtaagaatttgactattatccagcctaaagtc

SEQ ID NO: 331563 - DNA, 898 bp, Homo sapiens
  chr2:189156820-189157718
  hyper
cgccaggctcggaggaaccggcagctctccacgcccctgcccgaagcctgacccgactgcctctctcagtgaggtacggagatttatctaggctcttccctggctgcgaacccaggctccctccaggtagcgtggaatcgcttagaagctgatatcccgaggggcggtgggggtggacagctccggccaccagtgcccgggaaggagggcgcggggctgcgcgtagccgctggccagcaggttgtaaaaaattaggacagctaaatgctcagggagtcgtccagcactaaaggaggctaagacctgttgacgcctgctatggcagcgcttgagaaatgactgggggagtccagcgaggtcggggacgcagcggtctccgggctccagaaacctccttagccttttgtggtaactttggtccggcggcggggggccggtgagcaggaactggagggaggcggtggggaaaccgtggatccgtccggctgagggtgcgtggatcagactgggctgagcaggcaagtcatcgtcgggtcacagcgaggcgacccaggagcgaacttccagggcagcctcccttttgttggcgctgggagagaatgtgggcatgggggtggggaggcgcgaagctccgaggccgggccgcggatactttaaagctcagagctgggagggcccaaaggaaggggcggcgtccacatggttacccttctgctgcgcgggtcaagtagcttcttctggagggcgcaaggcgcggcgggggtgatgagcccttgggttctcgctccgactgctaaattcgcttggccgggtccaccttctcgtggcctcactcgccacacggatcagaatccggagcaggcagttctctctattctgaggctcctgcggctgccgc

SEQ ID NO: 331564 - DNA, 1315 bp, Homo sapiens
  chr2:190445073-190446388
  hyper
cgtgtagagttgcttgtctccaaagccccacctgggtttccaccatatgctttcggtcaacgacactcaccacagcatcctctctggcggttgtgatctcccgccctggtcatgacactaggcgaccccgctggctcttctgcggctgctatcgctgctgctgctctcgctgaggtgcttgttaacaggagtgcaaggaactggagatagcacctctaaaaacacaacagccttgggcaaaaagactacaacgacgactttggcaaagaacaaaagaaaaggggcccagggattttcttttttccttctttccaaacttagctaacactgtagctgaagttggaaaggcaaagccttatggaagcggtttgggaggctcagcaggtcgtccgagcctagcggacgccctgagccagctctctccgccgccgccgccgccgccgtgggccgggcccagctcttataccgagtcgggggcggagctccctgcgacctccgactggggccgccccgtccccttcagggccgcccgggcgtccccgcggcgcgagacgagctcccgtcaaccttgcgcgccgggccgtccccgcgcccttgcccggaggagtcgcccaccccgggcgcaagcgtccaaccggccgcagacaccctgcgcggcttgcggggaccttcgcctcgacgcgttccactccccgggttttcctgctctccgggaagccgcgagggcaacctcggggggcggccgtggggctgggaaaaggaggaaggcgcgtggagccggcggggcggcgtagggagattctgcgcgaaactaagcgtcaggtgctggaagaaagcgctgcgcaccggctaccccgcagttcagggaaagggcggccgccggacggtcgcagtgcaaagctccagcgcgagcttggtgggtggggattccttttttaacgaaaataatttttaatacaggtatctaaataaatataattcatgccacagaggccgctttcctggccgtcccattccggcccgcctgcagcagagaatgcctttccttccccggactgcatagcagggcttccctcaaagaaccagaatcaaagggcaggaagggggcgcaaagatcagagtccatccctcttgagaggagcaaacggaggcttgcaaaggtgaagtcccgcagcgagttacagacctacccgtatccccaaactggggcctccaaatccgtcctggagacagaatgaggatgctgcagccccagcaaacccttcaccatcattccttctccctctgtaccctctcaccccgcccccacgcgcgc

SEQ ID NO: 331565 - DNA, 1026 bp, Homo sapiens
  chr2:191044992-191046018
  hyper
gaacccttagctgggaaggccgcggccaggctgcggggccccctgcaggcgggctcagtgccccggcccagcacctgttgtcccaaggcaggccccgcgggggagaggccttggagggcagcgccccctctcaccagggcggagctcaggagagttcgcagcccagggggccgagaccaggggcagggccagcgaaatgcctcgctggctcttactttcattgacctctgcgatgcctcgctggcttctgctttcattgacctttgcgggtctgttcccgctgcggcgccggcagctgcttggtagttgcggggggcgtgagggcggtggcccagaccaaccggctggcagcccagctccgctccgcccgcccctgcctcggaccctgcgcctgaggaagtatcgaggcaaccctctgccacccgaagttcgtgggtcgctcccagagggcgcgccctggagccgagcgcccttgggcggccatctggaggccaggtgcgggccgcgaacccgcgaggagcgcgcggcgggcgcggcggcgacggcaggaggaggggccgggagcccgggcgccgccgaaggacgccccgtcctccacatgctgccacttggctgagccgggcgccggcgagaaggcggcgccgctgccctggcagctggactgcactttgcccccgcccggcctcagctgccgcccgcccagacgccagcaagcccccctcccacgacagggctgctccgggagcttcggagacccgccccgggcctgagcgcaggctgcctccgggaccccacggctgtccggacgtgccatgggcgcgcagctgccgggcaacgtgttgtgtaagtgaacatctgggaggtgggtgactggtgaagggcgggtgtctgtcggtctttgcttgtcagctgtgccttttagatttttcaatggcagaaacccatgagttacaggaggctttaattaaacgagaccgttctcagccagctgccgtggatagagcctcacatctccgtcccctaatc

SEQ ID NO: 331566 - DNA, 170 bp, Homo sapiens
  chr2:191208170-191208340
  hyper
cgcagtcccctatgagagtacagatgaatggaggaggaagatttaaaagtgaattcgtgggcggcgacaaggaaacagcagccgtggccaagctgaccccagagcccttcccttcctggccctccctctgaatcatcgcgctccacttgtgacgtcgcggacgcccggct

SEQ ID NO: 331567 - DNA, 361 bp, Homo sapiens
  chr2:191514839-191515200
  hyper
cggggaaagggatagttgagatggaatatacatttgtcgattctgcagaccaagctttgcagcgagtgatcgggaggaatcgtagacttgcatgtacttacacctcgctccctgagattcgggaggcacggaaaattttgggatggctgttaatttaaaatttcatctgaaagagtcgatttggagtaacttgtcactaccagttggtttgccagtgacgtgtctgccaactcaaagagtgcaaagatcagaagctgaaagaggaattctcagatcttgtttaaaaatattttggcagttttaatagataatatgagattgcataggaacagaggagccgaatttaaaatagattagtcac

SEQ ID NO: 331568 - DNA, 834 bp, Homo sapiens
  chr2:192015084-192015918
  hyper
cgttgcttctgaaaactcagtgcctgtctgtcctttttgcgtgcatttcctagaagatcccactaaaggggcattttgtcccaccgtctgtgagctggtggtgccgctttggctctgtggcctgtagcttgcaaaaggagatgacctgccctaaaatgtcactcgcgcccatcaaagccacagtcaccggctgccgtagctgcaagcttttttctgaaatccaggtacgctaatctaaagtcagacatcacagctctagagaagctggctaagaaagtgaagaggggctcactttcagcctccgcgaggacacacctccgcagccgccgcagctcccctggcccccgcagggagattcgcccgggcaccgtggcgcgggcctgcggagcggtttccgcggagaacccgtgccagggcgcatctgtgggtcgtggagtcgggcgcttccttctataataagcctcctcaggaaggttaaaatgaagcaattgtcaaaacgccaagggaaagcaaagcttcagagtatcctgcataataagcatgtcctccttacaagaggcagccagaaggtgtggtctggccacttacctagcgctctctcagcacaggtcccaggcagtgctcaagtccaaagtcagaagcgcccctcacagtccctaggagaaagccgctgacgccatcatcagtaggggatttgcatttctcctcccacttgaggctttcctgtgcgtcagtgttcgagtctctgggactttacttgggtcagttcccacccactctattctagaaatgctaacacgcagaaactgccaggctggagccccttcaccgggc

SEQ ID NO: 331569 - DNA, 1293 bp, Homo sapiens
  chr2:192109730-192111023
  hyper
cggaatgtgaccccaggctggcttcgagttgtcaaatgttgtatttctcattttatgtcagtgagtctggaagcaaaaaaggtagaaagactgccttccgtgggggccgcgacgatcgcccctccttccctcaagcctcgtcccatccaggctcgccccgggtgcggagggtcgggccgcaaacccgcaaggcgcggaggccgccgcgacgctcaccggggggcgctgtgaagccggcaccgggcggacagaggtgagtcggctcggaggcggtggctcccgttcctgcccgcgcgccgaggggcgaatcccaggcagcgaggtcgccgcccccgcccctcggccggcccctccgccagcgggcgagaggggagtggccgggctcctcccgccgccgctgagcactccgcagctgggtgcgcacgggagcctcaaccgcggcgcgtggaggcagtaccagagcgcgcggcgcgcagtcggccggcagccgcgggacagccttggcagaacagccgcggcgggagccccgcagccccgggctgggcccgcgtcccggagcgccaccggagagcgaggacgacgtggaggcggagtggcgcccggcgaggtagcgccaggcgaggtagcgcgagcgctttctctctctctcccctgcccttccctctgcgtccgtcgtcggcccccgaggcgcctgctccgcgcctttgtgcccgcggtccctggccccgtcgcaccctgcgggcgggggtcagcgggctctgccgctctcttgggagacgcggcgctgcggcgggaacggcgcacgctgtaggttgcggagggtggtcgtgactccgcagtggcttcgggggtggcgggagggaagaagggcttgtaaactaagttgctcttactttgccccatgcctctcgtacctgtgggcagagtcgaatctcggctgtcctcgtgttcacccacagcccctccattcctctggcccacagctgtttcctggccccctggaaagacacggtgtggcttcctccgggcaggaaagcggagggagaacaatggggcgtcctggggagtggggttcaggtgcggtgtgccccggcggcggcgggggaggaggggcccgggacgctgtgggcctccctgcgcgtgcagctgcgctcgcctcctttgttccgccgcagcggagggggttgccctgggtctcgtttcctgcccgggatgggattgattcacggtcccagagagggaaggggaagggggcggggctggaatggaaaccagattagagacgggagctac

SEQ ID NO: 331570 - DNA, 1461 bp, Homo sapiens
  chr2:193058995-193060456
  hyper
cgcgctagggtaggctggtctgtgctggatacgcgtgttcttctgcggagttaaagggtcggggacgggggttctggacttaccagagcaattccagccggtgggcgtttggcagtcacttaaggaggtagggaaagcagcgagcttcaccgggcgggctacgatgagtagcatgacgggcagcagcagcagccagcaaaagccctcgcaaagtgtccagctgctgcactgccgcggggactcccacagcaccatgactagttcgtgcaactctgcagcagcaaacggcttccgaggaacacaggatcgcgggggccgggcagcgggctactgagcatcccgcggacggcggcagcagaggcggcggcggtggcagtggcacccggcggggaagcagcagccaaacccgcgcatgatctcgagagtttcagcaacatccagggactgggctcagccccggagcgagagggtcgtccgctgagaagctgcgccggagacgcgggaagctgctgccataaggagggagctctgggaagccggaggacaggaggagacgggagtccaggggcagacgagtggagcccgaggaggcagggtggagggagagtcaaggcgccccgcagcccggcagccgcctctcgagctctgccgcccgcatccctctggcgtttgggaagcagcaggtcctcagcccgcccggggtcacgtgggaagaggcagtcgggctctgattggtggagcaggatgcaggtcccgggagggaggggtcgacgaggaggtgcaaggatgcaaggaggaggcggccgcggaagccacagatgggctcgctcgccaggcgctggcccgagtggggctaggcggggatggctcaaatgagaagctcgggcttcagggtgggctacccgcacactcatataccattcgcctcactctccgctccaggacgccccctaccgaaggcggggtccggactagcgcccctcttccgcgcgtgaccccgggccgcgagtgcgggccgcggctgggtggcgtctctccgagctggagatggtgggggcggaggtgtcagaggagcagcagcagcagggcagagaggggcgagtcggcgcgggagagggcgtcctgctggcgaccggcgctccagcgtgcgggagcgcgccgcctaggctgtagggggatgcaggctgggaatgtcgcggcggagaggccagggacgtttctctagggatttacaggaaagagggtgagaggcgatggtgttagaaccgctcttgccgacctggaagcaacagcagcatctcccacaagagcgtgcaaccccaaggctgctcgccgaggcagctcagccatcccggcaggcgctctccttccttctctcttctcccctctctcctcccaggccccccgcagctccgacccagcccaagcgttcgcaggtttgaatccctctcctcatcaccc

SEQ ID NO: 331571 - DNA, 1350 bp, Homo sapiens
  chr2:197457198-197458548
  hyper
cgcgtcctcggaaacgtctacgtctaaatctgcagccccagtttgctccaggccccaagctccagcagaggatgttcacggcacattcccaaccaaaaaggaaatgaagcgtcctctccctcaactgatgctcaaatagaccccaaagtcccagtttccctggagaaccaaaccatccaacacatcctgggcagcggaaaccgaaatggcaaatgaatgaccgcgccggggcgcaagggaggaaaaacaaagccacctcccgccgtccgctacctgcggcgagggccgcgcgctcacctgggctttgcgcccgtcgccacaagctgcgggtggggacccggccgcggggcgggagggcgcccccaaagtcgcccggacccgcggccccggcgccctgcggccggtccgtgcgcgccgaggagaaagcaggcggccgggggcgccgccgcgcgttgcatgcagctcacggctgctgcggccgctgccacggagccgagagtctctgcgctgcagtccccgaccccgagaccgcgagaagcgcccggagagacgcggcgcaggggcagagcgcgctcggcgcgcccctcagcggctcttcccgccgccctccgcagcgggctgggtctcggctcgcctttgtgctggcatcttcctagctcccagcgacacccagagctctcgaggcggctccgcgccgccacccacccccgggttacgccacggcccccgcgcgacccgccgattgtgtcgagtcagcagcggcagcggggacgcgcgaagccatggctcccgcccgcgctcgggagggcgccgggggtcctgcgcctccgggaggtttgtggccgagcgcggcgcggccccgagcggccccgcagcgcccggctccccgccgctcgctctccaggcgccgacccgcctgcgtcgccaccctctcgccgctccctgccgccaccttcctcccgcccgggtgccgggcgtccgctccagccgcggtgccccggtccgcggagagcgaagagtccggcctcctcacctccagccgcgccggcgcccttcccgctagacgcttcggcggcatctgcccgcaccgccctgcgggacgctgggctgggagctggcggcacgtcggggaccggtggaagggaggcgggggcagaggacaggagggacagccagaccttggccagcgggacctccctgaggaaggtgcggaagaacggggcgggtgcggctgggcggaggacgagtcccgaggctgcggcggagcctgagttgctctccttctgcgaagtcgaaggacaggaggattcctagaggtgtcgcggagggtggaggagaccctctgaggtc

SEQ ID NO: 331572 - DNA, 688 bp, Homo sapiens
  chr2:198174658-198175346
  hyper
cgtagcccaccgcctgtgagtggaggctccgagccgacttcacctcctcctcagagggaccggcccgatccgaaagggcggtctccaggggtccccatcccgcaccacgcacacagcctggcgcaactaaagaggaagtcggatgtcacatccaacggataaataaagacagcccggccacacaagagccgcattctgggcaggactcctgctaggtttggggaggggtcccagtctgcgatcctttctccctcttcgtgcagcgtcctcctccccggggcccgggccggcggcgcccacgcaacgcggcgcggtgcgagtcccgagagcacctcgagcccccggccccctccccagccccgccgggcccgcggccgccgcactcccgcacgccggctgcccagcgcccacgggccctgccccagactcgggcgcgcagttccgacggcccagggcggggacggcgcggcggaggggagctgccgccgcgggctctcggaggcaccggcggccgcacacagtcctccccttcgccgcgagtaaacagctcgcgggcgcgctccagccgcgcccccatccccccgccgggctccgcgccgccccgcgcccgcgcgtcccgcccgccggcgccgccgcccgctacctggtcggtgagtttgagcactgccattcttccgctccttcgcgc

SEQ ID NO: 331573 - DNA, 897 bp, Homo sapiens
  chr2:200320451-200321348
  hyper
cgacgggggcattatttggcaacctggaattcacttcctgtaatcctacaccgcgacagcgcctaatcaacctgaaccctgacacccgggccattatcactgggccgcgggctgcgcgcctccctgctccgggctgttacctcccacggccttggccacggcgccgttgggcctcccgcgggctcccatggggctgccgttctgctccagccgggccaccttcactgggggaggccccttgacgtccgggctgccgctccgccggtcggggctgtcccgcagacacgggctctcgctccgccgctccatgctgctccgactcggagacaaagttcccaccggcaggtcgcaataaaacgcacagggacctagggagggggtggggggaggaagggggagggagaaaaaagagggaaaaccgctcatacacgtgatagacgttcaggccagtggcagagcgctgcaccacagccacacaaacttcctcccacgctgcccgaggggcccgagccgggaagccggtcccaaccttacactgggcggcccccaggaagcccagcgcctcggttcggcgactctgcccagtcgcagctccccagaagtcagccctcggggtcgcggccggggttggcacccaggggcgcctagaagtggtccattcattgggacggggttggcataaaccgttcctgggtgctacagcctagcccgtcccggggtcagggttgcggaataagtgaacttcagaaaaagacgttccacccacatgggaagggagttgggggtgtgcgcaagtccataaccgaattaaccacccggtaaatgcgctgtgaatggccaggcaggagccaaaggccgggcgaaagaaccccttgaatacccgctttttacctatac

SEQ ID NO: 331574 - DNA, 389 bp, Homo sapiens
  chr2:200321661-200322050
  hyper
gaagccgcaggtctcgacacccctggattgggggggtgggggggggcggggaaggaggggaaacacctgatgaaacggcgctcgcgttgtcactgacacccgcaagaagcaagaccccggcaccgtactgcgtgcgcgctgggaatcctcgtgggcgctctggccgcgcgagcagtgtcggcgccacgggtcaaggagacaaggtgggggtggcagggggaggtgaaaggaaggatgcgagatgaagacacggagcaggagggctgagggcgaggcttccgcctgcattccccgacttcgcggtccgagaggccgagagcggcggggaggggacttcgttggccctgggcttccccgaactcccgagcgcggcgcgggagccctcgccc

SEQ ID NO: 331575 - DNA, 213 bp, Homo sapiens
  chr2:200322457-200322670
  hyper
cggcggcggcgagccggggctgctggttcgcagggcggctagctcgcgaggaggcgcggccagagcggtgggaccggtaacaccaagagccgagaagacgcagggacccgggaccgcgcgcgggaggaaacgcggcggccgcccaagctgtcacctccagcctctcccctctcggccgcctctgccagcagccagagccggactcactgacaa

SEQ ID NO: 331576 - DNA, 1853 bp, Homo sapiens
  chr2:200326720-200328573
  hyper
cgggcgcgggacttcggctctcgcctgggccatcccgggctctgagggcccggcatccatccccaaggtccatggctttcaagttcggtcacccaggcagagagaccctgccttttaaagagccctggaaagttgcgccgcgttttccctcaaccctggaacacgcagggaaaactatgggaatcgcccgcgtcaaaagctttcgacggcttctaggaacccaagcgggcctgcctcttcccctggagcttgccctcctgggggcgggaggagggcgggagggaatcatttctttcaaatgaagcccacgccagctctgaagccaatttccgccgcggactgtccgtggagagttggcgaccaacactttctcggacggcataaccgcgaggggcttagactggaaatcagatgcgccaagaggacaagagccaggggccagaataccccagtgggggacgcgccttggaggacggttcgcccagggtgggcttcagccctttcccagagtgctccgggcgtctggggactgaccggagcgcagggcgggggacacttacttcgttatccgcacgccttcctcgttggcatcagagccggacaaatcccaacccgcgccaggcaaagataaatgactcctggctcccccggcagctcagggggtctgggcgggggcggagagggaaggaagccgtcggccgccggaggtagagactgtggaggtcctcctcccggccccaagcgaatgagcccctgcggcccgagcagagagatacgcctcagagggacgactgatggggaaggatggtgggcaacgagtctgcgctaggcggtgagcctagcaccccagaggcccgagggtctggggctagtggggccgaccgttcaggagccgggtgggcgggaagggaattgccaaggtcggcccaggagctgcctcaggcgaggacggggagctttctgcactgggcttcccggggtaggagatgggcgtcgggtgtgggcactgcctgccctgggggaagaaagcgaggagataggtttcagagctgggggagtcgttggtgggagatctggtgtcccttcggcggccgcgggccgggggaccggggaagacggagggtcctgcggcctggagcaccaccctaccacaccaggcaacgccccccggggcgcccttcattcttttgcagagcccagaacttaataggtgggtccccttctgcaaccacgctgcgagagaatgactgccctgctaatctagtttacttgtagaaatcgactgtaaaccgggacaacaaggcaagggtgggggaagaaaaggaagcgccgaaggagccgccgctgcgtccccgcccccagctcggagctgccggggttggggccccgggtggcgctcccgacccgccgcgttttccttagggaaacaccgagtgaggcagaggatctcaggcccaaggtggctgcgaagagccccgaggcctcggcttggcgtcaatgtcccgccaccctcgagcccgggtcactgcccgggtcccggcccggagccccagcgtcctctcccgacagcgccaccgcgtgggctgaggccgaaaccttcggcgccggctctgccggtcgcgtcccggagccaacccttccgcgtcgcctgcagtccacgggttaaggatgtggcgggggatgggcaggtccctggcccagggtaccaccgggccactcaacacaaaaacgccctggcgcgtgcaaaatacgaacgcccacagtttgtcccaaccccttgaaatgaaaagtacacctggaaagcccaagatagcacccggtccgcaccccaaatttcaggcaggccagcaggc

SEQ ID NO: 331577 - DNA, 859 bp, Homo sapiens
  chr2:200329083-200329942
  hyper
cgggttggggtttattttcaataaattcagctgttcacatacacccccaccaccatttccacgcgcgcgcgcgcacacacacacacacacacacagagggacttgtcaactattgagacagcgacccagaaaggtgtaaattcacctggtgcccacccaattgcaaagctcccagacccacacaaaacactagcgagccctggaggtctgagacgccccgcgcccgactcacggcgcgaacaccagcgctccggccgggtcgcaggggccggtgcccagcgggccggggtctggcgagccaggcagcgggccggctgagctcctgcgccccgcggtcgcgtggcctactcgcctactcccttattattggctgggacctgttcctttccaaagtgtgatgcccggtgtcctaccctaggccacgcggagctctctcccggcgtgtcgggccctgcgcccctgcccagtggctcacctcggctcgctgcgcccgccttcgccccaagtgcccaggacggagcgaggggctgtgggtcggcgcagggacgctggctgctcacctccaggagccgacagaaggtgccttcggcgtcacgcgtccaaccctggggctgatttaaataactaataagctcagagaaattttacgaggggaacttttccttttagtatcaataaagcctagtaattgggtttgttggttacctaagctcgagttcgactttctcagtctctctctctctctctctttctcattcagaggcaacgttttcaaaaaccggcaattgcgtgtgcgtttggggtgtgcaagtgtgagtgtagatgtgtgaaagttatttgtttcagcagtccttgtctc

SEQ ID NO: 331578 - DNA, 507 bp, Homo sapiens
  chr2:200331873-200332380
  hyper
cggccagactcaggcctttctaatacaggcgtgaagggcgggacgcccagagccctcttgttggccggtggctaaggagccaggtggataacttctgcggattcggctttcaggctgctggagctctccccagcccgaggccttagcccagcgcaatcccttgtccagaccggccagtttccgcgtggcgaaaaagggggaggcaagtgtgtcttttccaaggagcttttatccaacagcctcccctccccccaactctcagccttaggtgccgggcttcagccgaagcgtttttcaaatttgtcatcattggaaacctcggacaagtggagtgtaaaattttgagggtttccaggtaggctctgacttcaggcattcaatgaaaggggaagagggctgagggcgggggagagagacaagcacagagggctccctgtagtcggcaggaattccctccctctgcagcccagctgcacccactagcacacactagtcttgccttctccc

SEQ ID NO: 331579 - DNA, 223 bp, Homo sapiens
  chr2:200524001-200524224
  hyper
cgcggcgccccggccgccgcagagccgagccgagccaggcgagcccccgcggcgcccaagcgcgggccccccagccgccgccgggcgcggcatttttattcaagcgagataacggagcccggccgcgcccggtgcattgtgggaacggcccgcggcccgttttcgggaggaggcggagggcgcgaagcgagctggtggatccgtaaagaacccagccaacccc

SEQ ID NO: 331580 - DNA, 111 bp, Homo sapiens
  chr2:201727391-201727502
  hyper
cgtgaaacacacgtcattctccccgtttaaacgtgtaccagaaactagtctccaactcaaatgcaatcataaatgttcctcaccaacaccgcattactgattactgcaaac

SEQ ID NO: 331581 - DNA, 132 bp, Homo sapiens
  chr2:201828586-201828718
  hyper
cgtttccggggaagggaaaaggaagtgttgtttggatctgaggaagtttgcacagtagctggctgagtggtagctgtttgtcttgtagcaatctttaaaaagtgttctttggggtcgggcgcagtgtctcac

SEQ ID NO: 331582 - DNA, 754 bp, Homo sapiens
  chr2:202897429-202898183
  hyper
cgagaacaaaagaacgtttgccaatcagaaaacgctacccgagaacgaggataaccccgctttgtgttttgaaaactctttaattagcctggtttctaagacgcattaaaacattcctacgcagattctaaatggaggatcaaatggttgcttctgcaacgaagatgggatcccgaaagggcacacgccgcagaaccaaggcacacggggccactgagacgcccggcgcgtcgtacagagtgttcctgggcgctcggtctcaggttacttctagaaccagtctccccaacgccgtcttcgtttccttaaaacctcgctagagtcaccccagttccccagactccaggccgtgcgcgcgggcggggtggcctgagcccgggttccccgctctccctgcttcgggcccttcctccgaggggtccttcctcccgccgtcactcggccccctccgcccgactcgggtttctcctcggaggcggcccctcctcctttttataactcgggggaggggagaggggactgtggcctcgcgtggactctttgggtccggggggaaagaggcgatccgcaaggcgcacccccttctcgtcccgtcccaaaccccacattgaggacccggcgacccgaaagccccgccagagccagcctttgcagtcctaacgcgactcctggtcacgtctctccccgaaggggcgctgcgcggtcctcgctcccctcaaacgccgctggcgaaggcgcccctgctcaggaatgc

SEQ ID NO: 331583 - DNA, 173 bp, Homo sapiens
  chr2:206750391-206750564
  hyper
cggggaaggcaaacgtctcctcctccctcccacaccctctgccggttttcccgctctgcctcctggcgcccttttccgcccagaaagcaggagcccgcctagtccttcatggcgggagaacagcgccctcgtgtggactgccgggttcttggtgctagaggcagtttgggtcc

SEQ ID NO: 331584 - DNA, 229 bp, Homo sapiens
  chr2:206948646-206948875
  hyper
cgcccacactggggactggcagtggggggtggcagggtctattaacatttcaatgtcaacactcaagaacaacaaggaggtaagcatagccacgggaaacatcctgtccctgaaaagcagaaaatcgagatttggaaatttatgtttatcactttttttttttttaacgttcagagctcagggcaccaaaatatagctaaaattgaatccatttaaacagaaaacatac

SEQ ID NO: 331585 - DNA, 1264 bp, Homo sapiens
  chr2:207139040-207140304
  hyper
cggaaacgactagctctcttagccccgttttcttttctacattcatacgttgctttgaattggcaagcagtttttatttggaccctcaaacgctaaaaccttggtctctacttcgcgtcccaactgtgcttatgagtctagtcatttttgttggaacgcgatagatttcccaagctccggagtggggccctgaccagggaggaagtgtccgctttaagagcttctggaggggaggaaggggctcctccgcccgggtgggagagtgagtgagtgggtgggcgggcagggggcggtcccgccgctcctgcgtcagaaggggtctggttttcgcaccttccctgacgtcaaacctccatcagggttgcaacgccacgttgccttggatgcctgcgtgagtggagtcgcgactcggggcccgcgtcctgagagacgcgctcccgcgccgcttctcgcctccggaccgcaggggccgaagtcgcctatttctggctccgcgggcagcggggccgtggcgctcggacggtctgggattcgggcgccgccgcggaaccggaataagaagggagagcgcccggctcggtcctcggtctccaccgcggcccggaaggaatccgggcagcctccgcggaggtgagtgccgcggcgggggcggggcgcggccggggcgacgcccgcgggcggggcctgctcgccgggcgcccggggcgccttcttcccgagggacgccaggaccgctcgctgggctcccgcggccgcctcgcaggtcctcggcttccccccaccccgcgtccctttctgcccctgctgcgtgagaggtgtcggcggctccgggccgggatcgaggtggcggggcgagggaaggaggtggggcgcaggctgcattgcgcttctgtccggggccctgggtcagaggggccggcggacgaggcctcgggtccgggcttggggagggggcggtctgcggggtcggattgagggccgggaacccgcggagtcttgcccctgggcacctgtggggccgagatcccgagccacctgtccacacacccccttcccccagtgccctgcgttgggtccagctggccccagacctaggcctttcccagcctcgggcgattatagtttatttgaaaacgtttgatttttgtgttaatgattcttttactaccgccgtgcaacagttgtgtaaatgtggtcgtgttacgccatcgtttttacttgctcctaagaagggccttaccagctcctgcgattatctcacgcg

SEQ ID NO: 331586 - DNA, 1829 bp, Homo sapiens
  chr2:207307406-207309235
  hyper
cgtggttgacaaacaacggatttcccaagatagctgccacacacttggtttctaatctctgtattgcttccccgccagaatgtcgaagtccttcccgaatatgcccagtcatactttctgaacttttgagcaaacaccgtccggcttcttgtgctttcctcaaagaccccaggcaccggcagggaggacacaggccggggcagagcgcccctgcgcgggggattcctgccactccgcgccagcctgcggcgcaaacgctcttctcagccgcagtcccacccgctgctggcaatctgaatgaggagccgcgctatttttacctccccggctgcaatcctttatatttacatgcaggaagcaaatatataagggattaagaaggagatgcgtggccttagtttatccagagcaggaagaggttggaataggagagggtatgtgaagtctggggtggtggaaaaggcaggtggacttcggctggttgttttctcccgatcatccctgtctctggcctggaaacccccgtactctctttcttctggcttatccgtgactgccggctccccctccaccgcccccatcttttgaggtaccacccgtcacctccgatgctgcttgggctgctgcatcactctgctgctttacccccttccccgccccccaacaaagcatgcgcagtgcgttccgggccaggcaacagcagcagcacagcatccagcaacagcatcagcacccgaagccccgctcgggcgcgctctcggggggcggggcgcacgcccgctccgcgcgtccccgcgccgctcgctcccgcgcgtccccgcgccgctcgctcccgcgcgccgcctcagcatcctcaggcccggcggcagcccccgcagtcgctgaagcggccgcgcccgccgggggagggagtagccgctggggaggctccaagttggcggagcggcgaggacccctggactcctctgcgtcccgccccgggagtggctgcgaggctaggcgagccgggaaagggggcgccgcccagccccgagccccgcgccccgtgccccgagcccggagccccctgcccgccgcggcaccatgcgcgccgagccggcgtgaccggctccgcccgcggccgccccgcagctagcccggcgctctcgccggccacacggagcggcgcccgggagctatgagccatgaagccgcccggcagcagctcgcggcagccgcccctggcgggctgcagccttgccggcgcttcctgcggcccccaacgcggccccgccggctcggtgcctgccagcgccccggcccgcacgccgccctgccgcctgcttctcgtccttctcctgctgcctccgctcgccgcctcgtcccggccccgcgcctggggggctgctgcgcccagcggtgggtatggccccgtgccctttgcgttggctttcccgcggggccctgcagaggaaagcgaagggcgcgcgggtccgtgtgctccgggcttgtccccggctcggcctttccttccctccctgcctgtctttccacccttctcgttcccaaacccccattcatcccagttcacttttggaagtccatttctgttgcattcgcgaaaaacccattccaattcttgttggttccactgggaggtgtttagtggatcctgggtccctcagcgatctctgtgcaacttgcggaggggcaaccagtggatgggaaatacagcgagggagcaagttgctacttgcgtggtggaaccttaatgtgaatgcggggaggatgtagtgataatagtggtaatgggctgtttcctcaaatttcgtatccggcgcattcagtgc

SEQ ID NO: 331587 - DNA, 497 bp, Homo sapiens; identical to SEQ ID NO: 229010
  chr2:208029821-208030318
  hyper

SEQ ID NO: 331588 - DNA, 1330 bp, Homo sapiens
  chr2:208030665-208031995
  hyper
cgctgttcgctcctaatgcaatctttgctctttattttgggaggttgcatttttttctctcgcgatcgcttctcttccccccccttcccttccctccccaccccccaccccatccttgctagtttgtagtcttccccctcccttttctcctcctcctgctcttccccctccccaaactccctccctccgttcggttctccgcgcagccgtgggatctcgaggagggcgtccattaggccgcgtgtgaccatgtaaggtaaacagggggctcatgaagtcactgaggaccaatggggagcccggagcagagcctggggcggggcttggccctggcggcgggcgcggattggcacgctgcggatctccctgctgccttacaaggcggtgcgaggcgagctatttttagagggctatataagggggctgaggcggccgcccggcggccgggcagcgcgagcgcaagggacagggagggtcgtggcgacactcgcgccagctcccgggacggctgggctcgggctggtcgccgacctccgaccctccactagatgcctggcagagcccggcgcgtccggagcccgcgcccctcagagggaaggggtcgcgcgtcgccgcggcggccctgaggctgacggtcgggaggtgaaaggccggagtgcggggtcaggacgcctcctggagggggcgcggcgcagggggccgcggggaagccgccgagggcgcggagcgggaaggaaggacagtggccaccccgcctccgcctgggcacggggcagggacccgcgcgaggcggtgccggggaggtcctcacgtactcaaaaacaagcagaaaaggcatccagggccccttcccgaactccccacgggctgccagggtgcagagaagaagcgcctgaggaggaagtgccacacaatgggagagaacaaaggggagcggagcgagaccgcggcctgcgcccgccccccgcttgcgcacagtccccgccccgccccgcgggcgccgccgccgccgccctccctcccgcgcctccttctgaccccgagcgagagacctggtcgggagtccggcggctagagttgattgcaaggggcctgttgctcgactgtgcgttaaagaggctagagggagcctaggtagacgtggggcgcaagctggagccggcagcttgcgagggggcctttacgtgatgaggctcaccatggggtctccagcgaggtgtctgcagagcttcgatggtgagaggaggaactcgatttctcgttttctggagttgggatgtagacatagagagatctgttacatctgagatgaaaaccctgcacaattcac

SEQ ID NO: 331589 - DNA, 226 bp, Homo sapiens; identical to SEQ ID NO: 198671
  chr2:208633317-208633543
  hyper

SEQ ID NO: 331590 - DNA, 254 bp, Homo sapiens
  chr2:208635464-208635718
  hyper
cgcgcccggcccgtttacatcttaagacaagatctcactccttacaacaattctgaggcaggtacttcctacaggtgaagaaaccgagactgagacttggccaaggcaaccgagctaatcatagttcccccaagaaagggcgacctcggcaagcaagttcacctccgtattccgatcacctggcacatagtagccgcccaaatggcaaccctgggattcgaacccaggtagttggtcagcggcactcaccatcg

SEQ ID NO: 331591 - DNA, 750 bp, Homo sapiens
  chr2:210636344-210637094
  hyper
cggagcggggaaagccgaattccgggggctgaagaggccgcgcaggggacgagcgcctgcgatgcggagcgtggacttcttgggccgtacccctgcggctcaagctgccccggattcgcttctccggccgtgcagcccggcgcgggccgctgtccacagtgggaggtgctgaaagcagggagcgggtgcgggggcggcgaggcggaccgctgctccgagcgcccccctcctcgctccgcggctcctccagccctcccctcctcccgcagccatgttccacgcgcggggaggggtggggggaggggagaggcacgggggatcagggcggagagagccggctctgcctcggggaaggaggggatgagagttgggagcagcgggaggaggcggcggcggcggctagcgaggagacagagctgggtcctgcagtaggactcccgggagccaccattatggtgaagaggaagagctccgagggccaggagcaggacggcggccgcggcatccccctgcccatccagaccttcctgtggcggcaaaccaggtgaggggcgcagagggcgcaccgcgggccgccctgggctgggggcgctcctggggccgcccgggtcgccgctgccgccgccgccgctgaggccgcgccacagcctgcagctccctctctggggctggaaaacaagccctctgcaccagcttaaaaacacgcattaaaatatgtatatatatgtatatatttcagtgaagtttgac

SEQ ID NO: 331592 - DNA, 823 bp, Homo sapiens
  chr2:211089500-211090323
  hyper
cgaactgggacacagatcgcagcccgcgctcctgcagccgggcccagggggtgaccacctcctcccaaaacgcaggctcccgggtcccactgcaggccgctgaactagacgggttggattggggctccggaatgaacttctggagaaatctttcggctttccccgacgtgggctcggcggtctgttctcggggcggcacggctgacacccctttttcctccgcccagatgctggttgcacccagtccgcgggatccaggaaaggaggccagctctagcccggcgccggagttggggagcactcccagccgcgcgcgcaccgccctgcttcaagccagcgacaggagtgactcgctgccccaccccacagcctcccggcctgcagccgcggaagtcccggctggcactcaccgcgcggcgggcagctggcgcggcgcacggtggccgcccaggacgcgtagggaccctcggagaaggcgtgcggccatgtccgaaacacaggggcggcggggcgacggaggcgactctgcggctactcggcgactcggggcagggtccccgggagggaggacgatcagctgaggcgtccacctgtggtgtcctcccaaaaaagcgctcgcgcgcgcccttccggagccccaaccacgccacaggctggtcgcgagggaatacgcccgtcttggctgtcagcaataggattttacagcgaaactgctgcctttgcttgcagcattctttcttgtttatcgaagcagctctgagcctttttagcgtcctgaagcgctttgagtaacggatgaaagctatggagcccccaaatacgc

SEQ ID NO: 331593 - DNA, 2447 bp, Homo sapiens
  chr2:213401528-213403975
  hyper
cgtagaaattcctctcggctaagcctgcatgtcggtcgccaatgcctttgaatgggtcaatgtgcataatcaacccattgagggaaaatatgaagggactcgaagtggggagggagataaaaagagatgtatctaagaggccgcttggaatgtcaagtccgtgttggtgtgattccggaggtggctggagcgcgggacctggtatgcgtgaagaatttcggagtaattgggagggtgcaaacggccagcacaaacgcctcacatgtgccattcgaaggtcattttgaaagactcgataattgtaacttgttatttactaggcaaaggaggcggcggcggcggcggcggcggagcgggaaaactacagctagccgttttcttggtgaggtcagaaggacaccctccgggggcctaaagcgctccctatcgccactcccgggggctttatcacctcaagctacttcccacgctccagtcaccatccctggatggtttcggaaatctctctggctctccaaaaggcaccccttggccacgtcaagacaccggtcctcctcagacctctcccgtcccactttcatccccaggaaactctagtgtcagaaactttgagctccattgcactgcaggtgctgtcattagtcctgcaagccgtggcgggccagccccgccgcgctgcctctcggggtcaattagccctttgcctgcccaggtacctggggctcgagctctccagcaagcagtggccgcgcacccatcgccgctgccgctttcgcctcgggtggatccagtgacccgcaggctcggcagcctggccgggcagtaaacagacaagtttgaaggactccggccaatagcaagttgaactacaggaagaactcttcccggagccaaacacggcaaccgacgggaaggccgggcttctggctcaagtgtgccaagcctttttttttttttttaagaggtcaggcaggcgagtaagcgcccctcaagtcaatggggagagggctccgggaagccggcggaagaggcccagaactccgggccccggaccgaggcgcgcccgcctgctgcactccggctgcccgggctgggcgcgagttgcgtctgacgccacaaggctcgggcgactgggggcgcagcggtcgccagcagcacacacaggtgcaaagcccgattttctgagcgccgctctccaccgcccttcgggctcggctcgggagaggcccagccagcaccgccccaggaccgcggccccggcggtgcgggttctgccctcggggacccgacagggacagaagagtctcctctgactggggatttgggtctcccatgtcccgaacaacaggcgccaccagaagggatcccgcttaggctcccaaacaaaacgctcgggaaagaaaagcagggggttaaggagagaaaagagggactcagagtgatttttcacgataaataaagcaaacgcacacatacagggtaagtttcaaatggaaagaggggtgaccgaaagcccagggaagaggccccggtcaagcggtccctccacgcctcccgggatgggtgaagagggcaggggagccactcgaggcagccccgccggcggctgcaggttcggcgaccggagtgccagaaggaacccacctgactgagaatcgctgggctggacggtccccgccgccacgagaaggctcacccagacccaaagtcctgtcgccggcttcattttttggaagtctcagatcccgtgctgacaattacatgtccaaatggcatatccccctttcgggcacgcggaggagatcccccagccgggcgcgcgtgggggtgcgaggggggcgggcgcggcgcgcgcggtgtggcgactcccagggcgggcgaccgagtccgcgcccgcgggtccagggccggggcccgaggagggggcgagtgtgagcgcgtgtgtgcgcgtgtgggagtgtgctcggtgtgtgcgcttggcgctctgggccggactgtgcagctatttccccgcgtgagccttcgcttgctcgctccctcctcactttctctctctctcactggttggtcaacaataaaaaaggaaggggggcgaaaggtttccaaaaaaagttgattgcaaagaggcggtaggtttccggcctctccccgcagccgggctatgttctgctccttcttcagtttccttgcacctccagtccaaatcgggaggggagcggggcggggggagcttctcgcttctccccggatcccgtccttctttttcctctcagctttcctcacacttgtccggcggctgcggtaattaaagctccgagcgtcatttccagcgctccgcggtctccagctgcagcccacagagaaattaataagactccagaaaaaaaaaaaaaaaaggtgcggggggcggtgggaataaaacaaccctccacgcaaccaggccggct

SEQ ID NO: 331594 - DNA, 426 bp, Homo sapiens
  chr2:216946200-216946626
  hyper
cgtaatttcgcccacacctgccccgtctttgctctgcagctccacactccctcagccccgccgagagctcctggctcccgtctccaggttaccccaggtcaccacagccacctctctgcaccagcggcccgctcacgtacccagctccaggagctccttcacgatggcttttccgatgcccgtggccccgccggtgacgatggccacttggccctgcagcaaaccaggcgccaggtagctcctgcccttagcccaggaggccatccctgcagcggggtgccagagcagctgagcgcaggcccttctgggtctcagggacattcgaggcgggcgggcggacagggcggtgctcgagcccacgtgaccaccagaaccccgcaccctccccggcccggccccgccccgcccgccggccgcggcaaagcc

SEQ ID NO: 331595 - DNA, 233 bp, Homo sapiens
  chr2:217497773-217498006
  hyper
cggttagcccagtgccggccacaggggaagcgcgcaaacgaagtcctcgcgaactgaactgagagcagacaaaagcacgcgctcttctccaccgccacgccggtcctacccaaacccgcgagttatccgtattctccttcaggagtcatagtcaggccagaagagtgcggagggacggggcccgggaagagcagggaacccccagagcccgcagccaacgcggaggtgggcga

SEQ ID NO: 331596 - DNA, 349 bp, Homo sapiens
  chr2:217498225-217498574
  hyper
gccgcgctgccgaccgccagcatgctgccgagagtgggctgccccgcgctgccgctgccgccgccgccgctgctgccgctgctgctgctgctactgggcgcgagtggcggcggcggcggggcgcgcgcggaggtgctgttccgctgcccgccctgcacacccgagcgcctggccgcctgcgggcccccgccggttgcgccgcccgccgcggtggccgcagtggccggaggcgcccgcatgccatgcgcggagctcgtccgggagccgggctgcggctgctgctcggtgtgcgcccggctggagggcgaggcgtgcggcgtctacaccccgcgctgcggccaggggctgc

SEQ ID NO: 331597 - DNA, 973 bp, Homo sapiens
  chr2:217556802-217557775
  hyper
cgcccagtggttgtccggctaaaacgccctttccaggagcgcccactcccatcccatctgttcgggaagaagatgtcggcaccagcagcggtggagcgccgccaacccgcaacagcagccggccgggcacctgccttcggcggggtggagtcggagaggagtgctggggagggggcgggtagaagaggcggcttcgggttggcccaaaggcactcagaaggtgggggttgagcaaggggcggcagggaattctacaggggatcttgcttgggactgaagtgtcgtgtgtgtgtgtgtgtgtgtgtgtgtgtgtgtgtgtgtgtgatgcgccctccgtgctcgcctagcaattgcgcgcgcgtgcgctctgcgtgtacacccttcacactagccacatcacactacacgcttggtaaataataagtggagccaggatgcggctgagtgacaccttacgttctttcggtgtgactggattgttacccagggcggtggctcccaagccgggaaatcaattaatgttttccttctccgctaggcttttccaaatccacatcccccaagatgaaggcgggcaggaccgcctttgaaaagtggatcttaataaaaataatctcacaagccggtctctggggttcccagagcctgcacatcctccccttttcctctttttgcaggctgcaacctgcaaaaagatcgactttttgcaggtttggagatcgactacctcttgcaaagctagaggggctggcccctgcgccactcaaaccctgcagggtttgcggggactgaggctgaacacaggaagctctccggcctcctggcaagcgcggacgcactcctctcctgcactatagtgactgaaatttgcacttcagaaaactcatgttagggtgctcgtgagtaacggaaagggacagggagggagaaggggattgcccccgtaactaaactgtctccgtaactaaactac

SEQ ID NO: 331598 - DNA, 86 bp, Homo sapiens
  chr2:217558012-217558098
  hyper
cggcgcaacccgggggcggggcaagcggaggcgaggctcccagtgcgtggcttttctgtctccgccccctgaattttgcattctgc

SEQ ID NO: 331599 - DNA, 1116 bp, Homo sapiens
  chr2:217558872-217559988
  hyper
cgaataagagctcagaatcagtattcggacagagtagggggagggggcgggcaacgtgtgggtaggaggaaggagaaagagcgaaagctgggatagactcggctagacagttcccccgggtagcaggatcctccagggctccaattccggggtgcaaggaccctccccgactactcccgagctgcaccccagctcgaagccacttgctgcgcaaagcgcgcgggcccagccggtctcgtgtcccccgcccgtgcgccgcgtaactgactggcacactgagcgcgctcaccgatcttgacttgctcgcggtagctcttttcgttgaggcaaaccccgcggccgtgcagcagggcgtgcagcggcttctcctcgtcctgccgggggaggcagcgcagcccctgggcgcagcgctcggtgtagacgccgcacgactgcccctcggccagggcgcaggtcatgcagcagccgcagcccggctccttgaccagctcgcagcccagggggctgggggggcacatggagagggctttctcgtcgcagggctcgcagtgcacgaaggagcccaggctctgggccggccccgcataggcggccagcagcaggaggaccgcggtgagcaacaccatcttctcttagtcgccccctttacctcggggtggggcaggagagcgagagtgcagggataaaggggccaagagggcccccggagatttttttgtttttgtttttgttttaaaatttctggcaggtagagcaggtgccctcccccagacacttgcaaaaatgtagagagaggtggagggctggggtgcctgcgagcaggtcccagttgcaagaattaaagccttgcaacaggttgggggaagcagggcagcgccaggtgcacgcagtgagcggaggccggagaaaccctcaagcctgagcgggtcagaattataggggaaaaaaagccacaaaattgttcacccccaagcaaccaccgaaataatgagatcggatgcagtggagatggcgttgggggtgggagagaaaaatggatttatctttaaaatttttgcttaaaatctaaaatacaccccgctttctaaccctcagctgccagcggtgcgcggcgcc

SEQ ID NO: 331600 - DNA, 669 bp, Homo sapiens
  chr2:219232221-219232890
  hyper
cgaagttcctggaccggaaggtgaggggaggctccaccagcctggggttcccattcccccatgggccttaaattcattactgatctctgcacctgattgaaatgcacacccgtaggggctagaaggctccagcgccccttagctctccttggagcgagcggctgggggctcctggggcgcgggggtcccgtccggctgaggctcgggctctgtcccctgccaggaggagctccggctcggccacgccagctatctgcggcagcaccccgaagcccacgcgctcatctccgacttcctgctcttcctgctgctgcgccagccggaggacgtggtcaccttcgccgccgagttcttcggccccttcgacccgtggcgtccgtcgtcaccggccttgggctcctcccaccggcccaaccctttccgctccctggagccggagggagacgcccgctcgggggcggcctaagcggggcccaggcccggacagggcaggaaaccaggggtcgggctgggacgcgggcgggacgcgccggggcgggtgcgctttccgggctgcggttttgggggaataaatggggccctcccgcttctctgcagcgcccgtcgacagcgtccctggctagcgtctagtgtctcgggctagaaataggaaccgttaccgtcgtacct

SEQ ID NO: 331601 - DNA, 1020 bp, Homo sapiens
  chr2:219735657-219736677
  hyper
cgctgcgggctgagtggggctggtcctcctcccttccaccccaagcccttttttgggttacacccctgacctgctattctctgctttccagggctgtgggcagccccttggttatggaccctaccagcatctgcaggaaggcacggcggctggccgggcggcaggccgagttgtgccaggctgagccggaagtggtggcagagctagctcggggcgcccggctcggggtgcgagagtgccagttccagttccgcttccgccgctggaattgctccagccacagcaaggcctttggacgcatcctgcaacagggtcagtgtggggagggggcggaagtggggctgctttctccctgctgtgggacccgaggagaggagaactggttcgctgaagttgcctgagccccacttccccctcacatgtgtctgggcaccctgcaaggaccctgcctcccaggcccctggggcagccctcccgccgcaggtttcaggtcccaggccccagctgaccgccccagcccgcgctgattgcacctgtctgcattcacagacattcgggagacggccttcgtgttcgccatcactgcggccggcgccagccacgccgtcacgcaggcctgttctatgggcgagctgctgcagtgcggctgccaggcgccccgcgggcgggcccctccccggccctccggcctgcccggcacccccggaccccctggccccgcgggctccccggaaggcagcgccgcctgggagtggggaggctgcggcgacgacgtggacttcggggacgagaagtcgaggctctttatggacgcgcggcacaagcggggacgcggagacatccgcgcgttggtgcaactgcacaacaacgaggcgggcaggctggtgcgtacgggcaggatggagtgagtgtgtgcggaaatgtgagtgtgcgcgcaggagtgtgcttgaggaagtgttggcaggagtgagggtgtgtaggtggaggggggcgttaatgtgtgggggagtgcgcacgggc

SEQ ID NO: 331602 - DNA, 427 bp, Homo sapiens; identical to SEQ ID NO: 280644
  chr2:219748349-219748776
  hyper

SEQ ID NO: 331603 - DNA, 707 bp, Homo sapiens
  chr2:219757371-219758078
  hyper
cgctcccggcctcagcgtttgcctctgtataatgggagtgggtttcagaagcaggccaggctaagcgctgggaggggagtggggctgcgcgccgtgtcacccctcacggtgcctccctccgcaggcagtgatggagaacatgcggcggaagtgcaagtgccacggcacgtcaggcagctgccagctcaagacgtgctggcaggtgacgcccgagttccgcaccgtgggggcgctgctgcgcagccgcttccaccgcgccacgctcatccggccgcacaaccgcaacggcggccagctggagccgggcccagcgggggcaccctcgccggctccgggcgctcccgggccgcgccgacgggccagccccgccgacctggtctacttcgaaaagtctcccgacttctgcgagcgcgagccgcgcctggactcggcgggcaccgtgggccgcctgtgcaacaagagcagcgccggctcggatggctgcggcagcatgtgctgcggccgcggccacaacatcctgcgccagacgcgcagcgagcgctgccactgccgcttccactggtgctgtttcgtggtctgcgaagagtgccgcatcaccgagtgggtcagcgtctgcaagtgagcggcccggggtcccctgggccctgatcgaggtcccctcctggagcctggccctctgaggcttacggtcttggcaaggcagcatc

SEQ ID NO: 331604 - DNA, 208 bp, Homo sapiens
  chr2:219762346-219762554
  hyper
cgcccgcccctgcgccgcccgcccgtcctccgccaggccgggtctgcgccgccaattgcagcagcacgcagcagctgattacccctaccggagcctggggagcggccaggggtggggacagcgggcaggtcaagggggcagggtccctggggttgtccctggccccggggtccttcactggagcttctgattctagcgcagcttctcc

SEQ ID NO: 331605 - DNA, 168 bp, Homo sapiens
  chr2:219763162-219763330
  hyper
gggccttggggcgcgtagccccagttaattgggtgggtctcgggttcaactcatccgctgccctttgacttgggaaccacccgccctctgcctcgcacggcgcccaaatccgacttcacgggcccattgctttccgccggccgcggccttgctggccctctttcctcc

SEQ ID NO: 331606 - DNA, 421 bp, Homo sapiens
  chr2:219773646-219774067
  hyper
cggtggccttaagagtccagtcgatgctgccacgtgatgggcctgggggaaagccccgatcccaagcgccaacagagcagccgacctcagccaacctcaaccaacacgtaggcgaggatgcccagggtgagcgccagcggcgagaagacgcgctatcgcgagatcggtgggacctacgcgtttacaggccggaagtgaggggcgggcctaagggggcgcgctccttttgaaacctgagacggagacctgcggagggcgagggctggttggaggtcgctgtcctttctgggaaccaagcaggggtcgcaggagggcggggatgggtcagcggggatctctgagtggggttcggctgagagaggccacagtttcatctttgggaagctaccctgggccggccacgcgccgtgagccggactgg

SEQ ID NO: 331607 - DNA, 807 bp, Homo sapiens
  chr2:219824277-219825084
  hyper
atcaggagtgcaactcgggagcggattggccgcgtgaggcggggcacggcgcgacgaaaaaaggggcccaaggggtggggctgacgctgcagctggcgcagctcaggattagagcagcggagccgcctagcagccaccttcccccgccagtccgcgcgcccgggccggggctaggccccccaccgccgggtcccccggggctgcagtagcagcggcgccgcccgcggctcccgctggggcctgggcgccggccccgctctgcaggatgggcacagtgctgtctctttcgcctgcctcctcggccaagggccggaggcccggcgggctgcccgaggagaagaagaaggcgccgcccgcgggggacgaggcgctggggggctacggggcgccgccagtgggcaagggcggcaaaggcgagagccgactcaagcggccgtccgtgctcatctcggcgctcacctggaagcgcctggtggccgcgtccgccaagaagaagaaaggcagcaagaaggtgacacccaagccggcatccacgggccccgaccccctggtccagcaacgcaaccgcgagaaccttctccgcaagggccgggatccccccgacggcggcggcaccgccaagcccctggcggtgccagtgcccaccgtgcccgcggctgccgccacctgcgagccaccgtcggggggcagcgcggccgctcagccgccgggctcgggcgggggaaagcctccgccgccgcctcccccagccccgcaggtggcgccgccggtgcctggcggctcgccgcggcgggtcatcgtgcaggc

SEQ ID NO: 331608 - DNA, 120 bp, Homo sapiens; identical to SEQ ID NO: 229063
  chr2:219826729-219826849
  hyper

SEQ ID NO: 331609 - DNA, 511 bp, Homo sapiens
  chr2:219827659-219828170
  hyper
cgcggctccgaccctagtctggccgtggccgagaagatccggaaagaacccggggggacctgccaagacgaggcccgggttcgctgtccgtggtgctgaatggcgcgctcgggcggggtcggggcttgtaagggcaggaagagttgcagactcggcctcaactaggtcttccggataatttgggaatagggtgtcatctattctggcggcgagttatagaagtctggctccagaacccaaaaatgtcggtccccacttgccctcccgggacgacaggactcgattcccctggcctcagcccagcgcccttgtaacctgcctggagccggaaatccccagtccagatttgtgaattgagttcccggagggagggggagagctggcggaagggaaggcgggagcagccgcccattggctggaatttggcgcagtcagcgcggtgccgtcatctctcttggtttgggaggagggagggaggatcactagggtcactccgcggctgtcggctgtc

SEQ ID NO: 331610 - DNA, 2248 bp, Homo sapiens
  chr2:219845565-219847813
  hyper
cggaagggagtgaggtgagctggggtcgcctggcagggtgggtatgaggcaaggcggctccctcgggctgagcccaccatccaggcctctcgctgcctgcgggcggcgcccaagcccgcgccaccctccttctcgggacgttttccttggcagttctctgctcaggcccgagatgagcctctccctgctttcccctaaccacgggttctggcgcagcaaagaacagagagagaggaggcagcggagagctcaggagctttaatggggctgaaagggtcagaaacacaccgggagtttctcctgggagtgtggggacaggaggaagggggccgtgtgtcacggaggacggtggctttcaccaaacctgctcaggtcccaggaaggaggaccgtgagaggcctccacgtgctgaggtgggagcagttccttggggaagagcaaaagtgggaaaagatttggcactcgttaaagagtagtgatattgaatggggcttctaggagccaggcggaaatgcactggagtggtggggagacaagagaggtccacaaatcccctccgggacctggagacctagaagaaaaaaagtgaaagagggcgcacatcgccctcctcaggggactgcggggtgggacaggagcaaatctagtaccagacaaggattgagggagcttcggtcccgtccccctgctaagtgcggcaggtggagtaaactctggattagaggacggttgacggaggctcccgggccctccccgggatgccgatgggatcgggcgagactctaggcgtgcgggcgaggccgcaggcacccgaccgccccgtctagtggtaatggccccccaagtgcgaggctgcggccacggccccgaagggcccgggcgggggctgcaagctgggactggggtagagcgcggcggtggcggcggcagcggtggcggcggggcccgggcccggccagtaggagaagccggcgggcgcgaccccggccgaggcggccatgaggttgagtttggagaggccggggaagggcagcggggcgaggccggcgggcagcttgtagagcgcgccgtcctgggcggccgcggcggcggcagcagctgcggcggcggcatgagcgtgcgcgggcggcggctggcaggcctgcgccaggccctggaagtcgaagcggtaggcgtagcgcttgccatgcaccttgctcatgatgttcttgtcgtagtagtagcgcagggcgcggctcagcttgtcgtagttcatgttgggcttgctcttgcgctcgccccaccgccgcgccacctcgtccgggtccgtgagcttgaactcgccgtgaccgccctcccacgcgatgcagccggcgttcgcgcggtcagccagcagctccagcagaaactgccacagctggatctgtccgctgcctgtggggaggggggcggtcagccacaggcgggagcggggaggcgggaactggggaagagtgctggcgggaaactgacccaccccggcaggaaccggcactgggggaggaaaagtgcaagtcaaactgcagctgcgttcggcgggagaggccggccccggaggggctgatcagcagagtggtgtgtagccttaccgcgcttttgcacaatggaaatgcggcttccactgaagagcacgtagctttccagatgcacggttttgtggaacttgggggttggggggaaggggaagcattgcctccccccacgtgagcgcagcggcgcaccaaggcacttggctttccaaggcgagcaaggacagatatccgccgccactctccatctcagccgggcgcccttatttagggaaaagacgcacaaccgtacagggcggccttgggcagaatgatcggactgccccatcccagctggaccacatccagaggtgggaagggacaggcgtgcagcaggacgaccccaaccactgctggacaaggcccagctagtcccgagtccccaaagacgtagttggacaggctactcctgaggtggagtggtggctggctcccttgggacaccacatccgacaggagtaggaacgaacagtggccccctatacgtgacaggaggggcaagctctcatgggctcactatcctagccaccttcgggtgcgcaggcctctgcgctggccctgagaatttggcctcttattttcggaacaggcgggattccctgcctacgaaggtgccatagttctcggggcctgatgaacaactctgaggaggggaacggacc

SEQ ID NO: 331611 - DNA, 860 bp, Homo sapiens
  chr2:219857682-219858542
  hyper
cggtggaacccagcgcccctcaacccagcccagccgcggccaggcaatcactcacacgccgttttccaccttgaccgagcgcaccctgggcaggcctccgcgctcgcagacgttcgcacagtcgcttagcagccgacagcgacggccctggaagtcctcctcgtcccagagcgtgaggctggcgggcgccgggcccggcgcgggggcgctgctcatgccgctgcggacaggaagggtggcaccacgcgctcagcgtctcaagagccccgtttcgagccacacacagcctgcccaacctgggtagcggatgaagaacccgggggctggacccggcctagctctggacccggctgccaggggctcgcagtcttcccgcgctcccctcccttccccaccccagcagagggcattcaccgggtgggtgagcgcggcacgcgagggaaatggaccggctgcgaggctgcgcgcggccgggcgggccgagctttatacctgggccttgtccccctgtccgcaccctttccctcgggggtggggtcgctgagtcagcaggcaggctgcggtcggctctggtctccgctggggagccgaggcctctcccgcagccgccgctgtggccccagcccgcgggaaagacaacagaaagtgctgaggcgcgcaccccgcgcccgccgcagcccaggctgactccgcgctttctttctttccagcctgagccaggcagggcacgccaggcctcggggcagaacgcgccctccctgtcccggccctcggggacgaagggacctggcctcccctgggcctcgggctaagaccgcgctgctgactcgctgagcggaagttcttcccagagtctaatc

SEQ ID NO: 331612 - DNA, 1342 bp, Homo sapiens
  chr2:219866310-219867652
  hyper
aggtgcctgcgtggcgatcaggccggcccccgggctggtgctgagaggccgcccctgcctcacgcgagccgaacgaacaaaacgctcaggtccggtttgtgcgaggggctcgtcgcggggcgggagcggagggcccggggcctggcggtcgccctcggtgatctcctggtcctggtcttccgcgagctcagtgctgcacagcgccccgctagcctccgccctcacctgaacgcatctgcggctgacacgtcggcggccgcggcggccaccgcaggtgcgcacctggcccgcccctcctttcccagccaccctccgcccggctttcctggcccctccgcccggcccagcctagcttggcttcgtccccagcccacgccttggagcttgtcccggagcccgggctccgtgtgctcttatactgcctgttcagtccccgcccccagacacacacactcacacctgtccaggcgcccgtttgctcggggcaaatattgactcatggaggcggagcgctcccccctcccccgcccgggctctgagaccggagcttctccgaggccttggtggcgggggcggaggggagggtgctggggaccctgggcgcctctggaacaacaccagatgtcacttttccacccacctgcctctgggagggaggagccgagaagcagaggacagaagctcccgggcgggggttaggaggaaccgagaggtgggtatccatcctcgtctgaggactgattcacagtgggagtcgcttagcagggtctgtggcccgaaatccagtggtgacctcgacccgccccagcctagttcctggccctccgcggcgtgcctcagttcttcctccccagcctcttgggcactcggagctcggcaaatgctaaggggctggccctgggggtgctaagcctccgagcaggcgcggcgcggaaaggtgaggggtggccgccctgcccagtggacacctgcttcgctggccaggcctggcactcagttactgtgcaccaaggtgcgctggggcaaaggccagccaggccccgtccggagcgccctccactggccagacccggtccagcggccggcagctagcggccaggtctcagtccagctgcagtgtgggcggagaggtgcatcctcccgggccctaagttcccgccgcgcctctgcagtccgcccgggctgctccctgccatccttccctctcagagctcgcgcgcgcgttccccctcgtcggggaaataaagtcaaggtagatacagaaaaaagactagatgcttttactggcggtggagagggggccaggcgtgacccctagcggcatgtcggagaggctgggcgc

SEQ ID NO: 331613 - DNA, 464 bp, Homo sapiens
  chr2:219922768-219923232
  hyper
cgcccggtccctctgtgcctccaaggcaggagggccagccagcggccgggagggaggagtggcagcagagccgactgcctgcggccggcctgcgaggcgtgcaaggcccgaggtgcccagtaggtgtcaccgcagcctcagggctgaggcctggggacgacaggctctggaggcgcggcaggtgcagagcgtctcggtagcttcagggggtgtgttggaggggaatcgccggcctgcctggatccctcgagcaccaccgaggattcccgccgggaccctcttataatcttaaaccggcccacaaccccgccagagatgacagggccagggaaccagaaaccggcggattagcgccagggccgcccaatggggggccacatgcaacgtcttcctctgcaaggcgcaaaaggggctgacaatcccagacctccaggacctctgcaccggtgccccgcccctatacc

SEQ ID NO: 331614 - DNA, 948 bp, Homo sapiens
  chr2:219924173-219925121
  hyper
cgtccccaccaccaagcccaggaatcccctaagctcagtcccagagcccgaaggccccaataacccacccttccaccgcagtagcacccctcagctctccggacagacacgtgggctcgctgggcaggttccttttcccacctccgcctcccgattcaactcttcctcgctgttcttaaccccagacccagccgggacgctgctcctggaaggggcagcccgtagaaccaagagcgcacagggaggaaaggccgtggtgaccctacgcacccagagattctttgcctcaggggtgccgaaaagtttcaaaatgaaaggggcacagctgtgcagaaggttaggccgggagggactgcgtgggtcctggaggcgcaggaggcagccgggtagaggtacctccgggtgcagcgtctggctgagctgccagtactttggggcagaggagccgccgccaacctgctgggctgtggggcttggcagcggggagctcttctagcagtctcctccgggcttggggatgccgacactcctgcctggacccctggccagcccatcttgggcaggaggcagcggggcttggcgagaggggcaggtgccagggagcgtgccagccagtcgagaaaatgtgccagggggtgggtagggccgggcaggtggccgtgcttcggtggcggcgcgctggtagggcggatcgcgctcacctgggtcatgaggcggtcggcgcctgtgttctcctcgtccttgaagatgatgtctggattgtaattgggggtgagctccttgaagcgctcggagctgcgagcgatcttgccttcatagcgtccgctggcgcccagggtcttctcgggcacattggggctgaactgcttgtaggcgagcggcacgagtttgcgtggcggtcgccggcggctgcccaccacccgacccggcccgcagccccatgccgcc

SEQ ID NO: 331615 - DNA, 1192 bp, Homo sapiens
  chr2:220348591-220349783
  hyper
cggagccccggggccggcaccgccgagcgggggcgcccctcgagatccccgtggccaggcttggggcccgtaggctacaggagtctccttccctgtctgccctcagcgaggcccagccatccagccctgcacggcccagcgcccccaaacccagtacccctaagtctgcagaaccttctgccaccacacctagtgatgctccgcagccccccgcaccccagcctgcccaagacaaggctccagagcccaggccagaaccagtccgagcctccaagcctgcaccacccccccaggccctgcaaaccctagcgctgcccctcacaccctatgctcagatcattcagtccctccagctgtcaggccacgcccagggcccctcgcagggccctgccgcgccgccttcagagcccaagccccacgctgctgtctttgccagggtggcctccccacctccgggagcccccgagaagcgcgtgccctcagccgggggtcccccggtgctagccgagaaagcccgagttcccacggtgccccccaggccaggcagcagtctcagtagcagcatcgaaaacttggagtcggaggccgtgttcgaggccaagttcaagcgcagccgcgagtcgcccctgtcgctggggctgcggctgctgagccgttcgcgctcggaggagcgcggccccttccgtggggccgaggaggaggatggcatataccggcccagcccggcggggaccccgctggagctggtgcgacggcctgagcgctcacgctcggtgcaggacctcagggctgtcggagagcctggcctcgtccgccgcctctcgctgtcactgtcccagcggctgcggcggacccctcccgcgcagcgccacccggcctgggaggcccgcggcggggacggagagagctcggagggcgggagctcggcgcggggctccccggtgctggcgatgcgcaggcggctgagcttcaccctggagcggctgtccagccgattgcagcgcagtggcagcagcgaggactcggggggcgcgtcgggccgcagcacgccgctgttcggacggcttcgcagggccacgtccgagggcgagagtctgcggcgccttggccttccgcacaaccagttggccgcccaggccggcgccaccacgccttccgccgagtccctgggctccgaggccagcgccacgtc

SEQ ID NO: 331616 - DNA, 677 bp, Homo sapiens
  chr2:220361418-220362095
  hyper
cgtttaggggtctggccggtccagggggcaggtaggagatggtgcgctcgcggtaagggctgtggccgggcctgtcttaggaactctgggccctgactcggcccgcgggtaggtcccggaaggagctgcgcgagaaggggccgccgcgggtgctggagccgctgaaggacgtggtgctgatcgaaggcagcgcggccaagctcacttgccgcatttcggctttcccggacccattcatccgctggagtaaggacggcaaggagctacgtgacggtcccaagtaccgctacgtcttcgaggaccctgacgtggtggcactggtggtgcgcgacggcgagctggcagacctgggccagtacagcatcaacgtcaccaaccccttcggccagtgctccgactcggcgcgcatcctcgtggaaggtacgcgcgccccgggcgcagcgccagggcgcagaccagcaccactcagccagagcccgcagcccggtccagctgcgcgtgtttacctctgggcctagctacagggtccccgccagcccagctctgggcacggcctggggcgcatcgccgcgccagccaagtgcgtccttccctacctcgggatccagctccacccgggctgagcagtcagctgtggacttccatcacgcggctccgggtccccaaggtcacacagc

SEQ ID NO: 331617 - DNA, 302 bp, Homo sapiens
  chr2:220362304-220362606
  hyper
gaggctaatgatttgctcaacgtcacactgcgagtttaaatgcatctgtatttagtgccgggtattagccggtgaggtgatgccctgcctcatctccgggtccttcacggggtttcgctcccctttccttccgctagtcccgacgaagattcaaaagggacccgacaacactaaggcgcgcaaaggcaccaccgtgacgctgactgcggagatcctgggagagcctgcgcccgacgtaggctggaccaaggacggggaggacatcgaggaggatgacaggcgagggccgggacctgcggcac

SEQ ID NO: 331618 - DNA, 247 bp, Homo sapiens
  chr2:220377745-220377992
  hyper
gggccaggcctgacgcagggggcggggtggccgttgggcagcgggtggacctcgggctctaatccccagcagctgccgtttccctcagatcgattcctttctcactttttttctcagctgctggttctgcggcttggatcgatggagccacctccccccgcccgtccacgcttcctctccctgctgctcattagcgccccgattaatcagcccccctttcctcccggggacaagggcttcctccccc

SEQ ID NO: 331619 - DNA, 280 bp, Homo sapiens
  chr2:220378995-220379275
  hyper
cgcccgtgctgccggtgaaacgctgttgacatgtcctgaattattaagcgtggggagggctccggagcacatgctgagcggagcggctggggctgcgcggcgtggcggagcagcgctcgctccctcgctcactcgctcgctcgcagggacacacgcaggggctgacagctgtgctggtgctgataagggaagccacaaggagacgatcgaggagagagacaagcggcagcagaggcagcagcggcagaggcagcaccagggctgcggagctgctgggagt

SEQ ID NO: 331620 - DNA, 1399 bp, Homo sapiens; identical to SEQ ID NO: 229093
  chr2:220416369-220417768
  hyper

SEQ ID NO: 331621 - DNA, 1040 bp, Homo sapiens
  chr2:220435309-220436349
  hyper
gtgcgcgttgcgggcgtggcacacgtagacgccggaatccggcagccgagccgccaggatgcgcagtgccaggctcgcgccggggccgtcctcggcgcggcccggctggagcgcgaagtggctgctgtcccacacttcgtccagggccatcccgtccttctcccagtacagtgtgggctcggggaggccccccgcccggcacgtcagcaccacctccgccccccgcagcacccactgggatcgaggccccgtgaggaagaccggggcgccctccccggaccccggcgatggcagcgggcgctcggcgggctgcagctcggggtcggaggccggcggctccagcacggtgacggcggccgccgcgtaggcctcgccggccgcgttgcgggcgcggcacacgtagacccccgcgtcggtgggcagtgcggcggtcagcagcaggccgtgctccgcgccgtccgccgggaagctcaggcgttccgaggccgccagctgctgcccgcccttctcccacaccactacaggcggcggctcccccaggaccacgcacttgagctcggcctcggcgccacttaccacccgcacaggccgcgggaagcgcaggaagcacggggggctcccctgatcccccgagctcgccttcatcgcggcggccgaccgcctgcagcggcgaacggtgggggggcaggggggggtgcggagggcgagccgaggcccggggcggcggggtcggggcgcggctggggactgggcgcggggacccgcggagctctcccgggcctcccgctcccggctcgcctccttaccctcggccccgagctgcagctctgcggcggcggcggcggcgattcccgggcccgaagcctggcgctcagggggcagtccttcctgtttgcctctccagcgagtggccccgcagcctcccctgcccgctgcctggcttcctgctcttaggagcctctcttcccagccccctcccacagcttgggcctcttccccctcctccctcccacctccagccgccaggtccccagccgccc

SEQ ID NO: 331622 - DNA, 230 bp, Homo sapiens
  chr2:222435635-222435865
  hyper
cggatggacggacggatagatagatggatgccggaaaggagaagaatgagagacggatgtgagactagatgcacgcaggccagagcaccagcatacgctggaacagagcacgagcatacactcgaacacacgcgcacacactcaggacatctgcgcacagacatacaatcctccgcgtccgcttccacgcaggcattcgcgcacctacatacacgcagttgcacgcgcgc

SEQ ID NO: 331623 - DNA, 2230 bp, Homo sapiens
  chr2:222435997-222438227
  hyper
cgcctctccctgggtttctcagaaactaaatgatcaccgcccccccgccccgccccacctcccgacacagacacacaggcacatacaatcctcccagcacgtccgaacggatgcacagaaaactgagcacccagacgggtcccgtcgaccccgcacgttagctctaaactgtgtgcaattctggggcgaaaagctaaaactcgactgcgttcaacttgccggcgggttccccaagtctgcggggcgaagagctcgggcccctcaggcccgcaatcgcaccctcggggcgctgggcttggcgaggagaaaggtgtctgactccgggtgctagaaatcaggtcactggcgcctgacgagcggcgccacgaccgctgcgctgcggagcaggccccgcagcccggtcccgagaagcgcagggctcgggaaactttgcagaaaccagagctcgaaaggctttcgctagaatccgggagcaccaagccttcactgtgctccaggctgcgttttcccctcgccccgggctggctcaggagaggacgtggttcttgtaattttttttttaaatcccggcgttgtctcccgtgcatcccctcagggcgcctcgagcgggcctctctggcggatgctgataaactttggcctttggttacaaacttggacagacccgccgcgtgcacgggtcaccgcctcggggcaggctgtccggcggttccccgctgccccttcgccgatcccctcgcctcagcccccttctcccgaatcgggacgcaccattcacactgggctccccccgcaccacctggccctgcgctcctgaggacccctcacccgcgatggcccctcgctgtccccgaccacagaaaggccgtcccgctcttaccttcattcgcggggtataccctggaacctgtgacagcgtcgcaaatcccgaagagacacgaaaatagggcgaaatagaaaatcccagccatggttcgccggtgccaacgctgctcctgccgcttctatcccagtggaataaatgcttaagttaggagagcagcgggctgaagacattgccaagggggcgggcccggccggtgacgtgagcccgccagtccggggcccgcggccaatggcggcgcagacagggcggccgagccccgccttcaccgagcagggcccgccccagggttccgccccctccgggctccacggggcgcgcggtctcccggggctctagggggcgagcacggccggtccccgcccccgcctgccggagggagccagcgggatcccccacgttacctcgaaggtcgagcccctggacggcggagggactttggaaaagctcggaattgaccgaggggagccagagaagaggttggaaaccttttctcccaccacgggcggtttaagatggaggaaaacgctcttttattgaaataaaagaagtctaagctgacctgcggttgcttctttaggagagtcgacgtgtctgcgtccagcgcgcccgggctgagctgcagactcgcgcctgccaccgccaccctctgccaccttgccctgttttgtctttatggcgcttccccctctgaaatactctttgcggggagttttgtggctctatcactcgcttcttccctggctccccagatgcctggagagcggggacctacttggtccccaacgtccagtccgcagcagggctccgtcactgtctccagagactgaacgaatgactttctagcagtaaggaagtccccgctggccccgtccccctgcacacgccgtggacctcgcccagggcccaggacgccccgagatggccttgggcagggaaccagttgtggatttcccgggggcagggttgggggcagtccctggaaccgggcctagcccgtctgggagcggtggggtagaagtgaaaggcttaagtgtgggtgcggggacttgcagccgcacagacaaggcagaccgggactgggaagctgcccggagcggctgctgcgactctccgctccgacctagccggggcagccctccctgccccgggagaagacggcgagcaggaggacccgcagagccccgcccggctgctccggccccgggggcactggcaccatcgggctgtggtcttttcccgatgcccgagccgtggacgcggccacctaagagcggtccggcgaaggcagcgcagccggtgtcccagggaccggtccccaacgccactcggtgcatttccccaggc

SEQ ID NO: 331624 - DNA, 196 bp, Homo sapiens
  chr2:223104742-223104938
  hyper
cgtctcacagcacgaggtcattagaaggaaaataagctcctgccaggttggggctaatcaaaatagcacaaataaaccctgacactcaacaactccccgagtgcctgctgccctgggaggagagtacagattggttatgaatatggccggccacgggggcagtacaggagggcctggccgtgtgctccgttgctcc

SEQ ID NO: 331625 - DNA, 390 bp, Homo sapiens; identical to SEQ ID NO: 229106
  chr2:223155738-223156128
  hyper

SEQ ID NO: 331626 - DNA, 372 bp, Homo sapiens
  chr2:223159081-223159453
  hyper
cgggaaggaccccccacccccaaacaccagccagggccctagagccgctgccctgcactgctcgcgggtgtctcctcctgcatctctggacatcctcatccttctccagccctctcatcctgccactcaaacccccctccctattatctgtatctcggtactgaaagacggaggctgggaaaaccgtgcctccaagttagggccggatgccatctttgtccctcgattctgggcaggaagcatttcccttcctggactccgaagaccgggctctaggtctgcaatctaagagaattctcccaccagcccaccgggtaccctccttcctccccacctgaatgcatggatcctgcggttcgccttaagggagga

SEQ ID NO: 331627 - DNA, 678 bp, Homo sapiens
  chr2:223159732-223160410
  hyper
cctctcgctggccccgtgcttgcccctcttctccctccgcctcccccaggctgccgtggcggggggctccggaccgtccctgagactctcggaggaaatcggggccgttgtggaagcctccacggctttgcgcacacggcaaagtccctcccggcgcgggccccatctcccttcggttggggttaccaaaacatttgtttctctttaaaagggaacatcaatattaataaacgctctgcctccgcctcacgtttcctgccctgcctcctcgacagaaatcttctttggggcgtcctcagcggtggtctcgccaccctccgtccccaggacaagcagctcacccctccctccataaagtgccaagaacaccgggttggcaaatattgcagggcctcgggagaggccacctcccaatagctgagatcgataattggggtgattacgtctgggtcgacgtgccggggtaatagcgactgactgtcgcgcctcggggagaggttaatgggcctagtacctgacggcacggtgtttcgatcacagaccgcgtccttgagtaatttgtctcggatttcccagctgaacatgcccgggttctctcttttgtattcctcaattttcttctccacgtcaggcgttgtcacctgctttaagagaacaggcgggcaggcgttggtaccc

SEQ ID NO: 331628 - DNA, 545 bp, Homo sapiens
  chr2:223161531-223162076
  hyper
cgcgtgcacacgtacacacacacacgcgcgcctttacgcaccttcacaaacctcagaaataactcattggagagccccagatgtcagccgttaccccccgcccggtcttccccaacacaggggaccacagtctgggagccaggagggcaaggcccgcccgctcaccttgggcttgctgccgccgatggcaccaggacgtatggagccagtctcctggtacctgcacaggatcttggagacgcagccgtgggacacgcgcagctggcgcgagatgacgcagggccggatgccgtggtgggccatctccacgatcttgtggcggatgtggttgggcagcggcctgccgttgataaaaacaccgccgagctggttgacgcggccctggccgaggggagtggacactgtgggaaggtgaaaaagagaagcaagggaaaagtcactggaggaaaataaaaagcaaagaacagcagcacgtaatttcgcagtcttctgtcctatcctcatgttacagcaccgacgctgaaactgctcgacatcggactccc

SEQ ID NO: 331629 - DNA, 1243 bp, Homo sapiens; identical to SEQ ID NO: 229110
  chr2:223162677-223163920
  hyper

SEQ ID NO: 331630 - DNA, 2133 bp, Homo sapiens
  chr2:223165484-223167617
  hyper
aagccacttctcagcgatagcattttgagagctagactttttccaagttttcttcttcccaaaggttaagcagagtcgacagagcactttctggggtcagcggtaattgctgtgtgaaggaggtaccagaagtgtaatttcaagaaggcaaaagtaggctcaactctcagctaaaataaactcttggaccccgcgagcagttaaagaacatctagagctgagtctcatttgtttttgagccggaggcttggtctccaagccctcccagcgtccacccgtctctctcctgccgggagttttctctcctaagagccggcagatgctggagggaagcgcttgctgcaagattccttctcccggtcccgtagattgcagagtccgcgggaccgttgaacggaggtactgccggctgagctgggtcttaagtgcccatgggttcataaactagctgtcacttgctataaacatgtacaaatggaggccacaaggatgtgggggtgctggggacctaaagctccggaatcaggaggcgactcattttctctcctttccggcctctttcttttctgccgagcgctctgagattcatatgtacccagatgatcagcccggcccttctcaccggccagtggccagaggtccctggacacccggagaggggtgggagggcacccttaggctctggacagctgggccacatccaaagacttaatgaatctaaatttcttgtggcctgtgtccccgaagtccgacctgggatggccaggacagcaaagttggctgaggctgcctggcctagggcgcccgcacgccgccaaacctaacccggctcagagccgtgactccgcagaacagggcgcaacaggtctcaggaatgccgggtgattccagccactctttctctgtctccgagtcttgggcctcccctttatttctttctgaagtctctccggagcccaagccaccccacacccaaaccccgcagctggatgggagtccaggccacttccctatccgcagccggtgggccaaggagtcctggtgccaaatttggccgcggtacaggcgctaattggtaaagggatgacccagcggtggggcttggaaggcgagggcccgcgccctgcatccttgaaccctggtttgggaggcagtgacttttacctgggctaacaaattacccagaaagcatcagtgggactctccacaacggtgttgtgaacgagtgtagggtccactcacgctctgtgcacgttcgaaatgaaacgggagccttgaagacgatatttggataatttgacaaaaaaaaaaaaaaggtgggcgggggagatagcttctattgtcccctctgcgcctctgcccccagtttcagagacactacaggtgaaaataacagcgggctggctgtccaggcctgagtggagcgtgcccttgttagcttgaaagttctccctcgcagcccgtttggatgcgtgcgtctacagcccagtcgcactttggtgaccggcctgggctgtgaagcaccctttagcgaacagcctccgcacttggggacactggcacaagggtttcatggcccgtggacttctcagggcctctgagggttgacttcatactcagccagacacaggtcttaagaggaaattatgatctatgcaaaataatgtccctgacctagtggggagcgggggtggtgtctgccacccagacctttttcctcccgtctgaagggccgagctctggcaggctgacacggtcgagcagagaagttcctggccacccgcccggccccaggcgtgattctcaggatgcagtaaaagttgggcaaacgccgagaaaccctcaatcccacagaaaggctgccgggggctcacggggaggacatcaaaacgccaggttcgtgatcatgagcttccggtccggatgtgatgatacaggattggtgaatgcccgggttaaacccgtggtccttcgcagccgctgcctcagtgacagtcattaggccccccgcagttatttgtcaaaagcattggcgccgctcttctccccatcgaaaaatcagtcgggatgagttcggattaagggactagatgaggatgtggacatcccattgaaacatggtgtaggccagcc

SEQ ID NO: 331631 - DNA, 516 bp, Homo sapiens
  chr2:223168452-223168968
  hyper
cgctcggatcaggactggactccttctgactccacgcggccccagctcctgaaccagcgcagtgagcctcagccgcttctcaaactgggtctcagaaaatttctcctcgagatggatttcagcggcaggaaagaggggccagtgacgcgaggagcaagaaaagagtaacatgggagatgaatgttcaaacccagatctcctcgctgagcctggaagctcgccaccgtgggatcacgggaaccagaggcaagaggctgcgaatgagtccaacacccgcgttcctcgagttttaaaagcacacctggggccagagactgcacagccaactaaacggagtaaacgcaacaggtggaggaggcagagttgtcaggggccaagcccggcgcgatctggccagttcttggggagcgcggacctgggactgcagagaggcgttttgaagagtgctgcgcgcacctgcctctcggagatatccaactccacccgggcgtctcctgagagcgcacagtccacaga

SEQ ID NO: 331632 - DNA, 3019 bp, Homo sapiens
  chr2:223169338-223172357
  hyper
gtacgtttgggagcgagggacaggagaataattttgatccagaaccttggagattggagaagcaggtggaaaaattctaaaaagatgaaaactgaccatctccgacacagaaacccatcgaaaggggccaccgagacccgttgattagctggagggagcatgcggcagaagtgcagacccctcgctaacccgccaacctccaagagccctcttgcagaaagctgcccggctccccacggtggccctgcgcgcgcaccatcctcgcggtctcgcttcttcgccccggaaaactctatgaggggcaccccagcctcagccgggttaagacaagtagccccaagaggaaggagcctcagagagcctttcttcctgttcttcttcgtcttcttttttttctaaacgaaatctaatactatctggctgcaaaaatatattatcaccggctctcagcctaagagactaacatttggatatgtaggaaatgtaatctgcatggctaattgattctcagcgtatcagtttaaaggataaagatcgatatctacatgatggatattgtattaataggggcataaataaaggtcgaagagtcgttaccaaaacctttgaagccgcttttcggctctcgggccctccacgcggccagtgggtctctcccacctccccgcccccagctgctgctgggcagggagcatttgcttccccctccaacccgggaccagggtggaggagtctatggttaaagcgaaagtgtttcactgcggcaacgctggggaaaggaggttcttttttcctgggctgcagcaggtggacagtaaggcccgagaaaatgtaatattttaacaaaacgcaccactccccgaaacacacgtatacgacccacacagggacacaaacaaccacacatgtacacacacacacacacacacacactcacacacacacaatcacgcagggcggggagggttctcagcgttccctgagcgccctttggccttagagacagggaataaattcttctttccatccctcggccccctcccagagggcagcgacgaaagccctggccgagcacaaggatcggtgatctgggctcctggaggtaccctctagatggggtaaggacggggaaggatcaagaggttctgcgggaagtgtgcggggctggggggcgggggtgcccgccaatgtccgcagaaggcaaggaggcccactcgaggagggctggatggagacagacttgagtcgggccctgagccccagggagtgcggcccggtagatctcggggcgaggggaacaggatcgggtacacttgatccggaacaagaacgcctcggcctggcggttgcccgttagtcccggatcccagcggccgcttcaccactgagcccgagccgccgagggaattttccaaatgcaaatcaaacacccttggcgccccgcttcttcattaattaagaggaacgtttcgacaaaaccggcgtaatctttattaattacgcagcccttagcgcgccgttcgcatcaatcacgcccaaagcgaaagtgcagggggcgcctaatcccttcccagagcgcgtttggagaaggagccgcgtggccggcgtttccaccgtgacttccacctttctgggctcgcctggcactggctgctcagccggcgcgcagggaggcctttccggaaacaccggctggctgcgcgctagcaggaccgctctagatcccctgacaggccggaaaataacccccactcactatttgggcacgcgctcgtacgcagaaactcgcacagggactcgcgtggacactttatggcccatttcctccgtcccctcacccttaggctcagtggggaccacgcggttctcagtcctcctcttccctaggaccctctaaaaaggagcctggggcgaaatgacagagggaggcagaaaacctcctgttgccccaggacgccccgaaaaactgctctgggggatggggcggggaagaccttagaagttgtcagggcgaccaactcctcccaggtgaccaggttgccataggaccagcacactgctcaggagtgagttttggggagagagagggatcctccagttattgccatagagaaccaggaaagttcgcagcctccgggtcgcaagtgggaaagttgactggagattgcggttagagggggtgggtgcaaactcagggtatttccgggtagccccgcagcagtcttgtccgctgaaggcaggttaccctgggctttcaagggaaaacgccttggggcggggtgtcctgtgcgaccacctctctcagcaaagcagggtttgacctcttggcctgaccttgctccctagtcccaccctatactagtaggtcctaacctttctgcgctttgagcctggaccatcgtcccttcaagagattctactggataaaaaaaaattataaaagctggatcaagcttggcgtcggaggtctggccctcagctggttcccaccctaaaggactggcctgcccaccctcacgtcctcgggcgcccttggctcgagggcctttcggagcctccgcgggaagcagaaagtcgcacctcacactgagcctttccttcgagcgctctgccgggagctactgagccccagcacgcagccttgggcacccggtggcgggcgaaggaacctgccccattgtgctgctgggctgcactagcggagacgagagtgcgtgtgggagtggcccactagcaccacccgccagggtttagcagcgcctggagcacctccctcttccctgctgtttccttaatgctggagctgggcacactccgatgtcccgcattctcacattcaatcattcattctccctctgaaagttctcaggctcctttgctcacgggtcgtctctggacctgagacacctgcgaaccttgcggatcaccagattgttttattgttcctctcttcccccactgaatcgtcggccgggctagtcttccagtttcgcctggagtcgattgcactctggcgcac

SEQ ID NO: 331633 - DNA, 1408 bp, Homo sapiens
  chr2:223175977-223177385
  hyper
cggggaacatttattagcctatattgccatgagaaaacaacttgagacacttcagcctcaaccctcctcctctaagtcggtcgggacaatggcaggcggaagatgaagatataaagtaagaattctaagcttctcgccttcctgttacagccgatctgctctgcatttggaatgcggcgtctttgcgggcgttctgagtcattcctactccgctgcaagccccgcagagaacctcgccttcttcccgaccgccaagtctgattgtacagacttcatagaaggtctggaataaggactgtgttgctgcagaggccgggtcttgggcccctgggcgtgaggacgcaggctcggcccctgggaagaaatgtactaacgcacctcaagactcctaaggtgtttccaagtcccccctccaactttcgtgtccaggtcacgctgccccgccctcggacaatgagagggtgtgtcaagatgctctttgcatctttggaagccgagggggaaataggagactttcgacggggagcaggttttccggagccgtttggggctgagattctcgaacccctgctgggggccgaaagcgccggagaaacctgggactaaacgaaggcgactccccgcagggcgcaggcaccgcacccggcgtttgttttattcttaatttacttttttgggcacctctgctattgttacaaataaatgcgaacgcggagctttcgggcgggctctgggagcggcccgtgggcatcttggaatattaaaaacgtcatccggttgtaaataacctactccccagcccttgaaatccgggacgtcacaggtgaggctgaataccaggttcgcacaaaggcaaaccaaactcagccgggatgccgagtgatggggttggcaagatagtgtggcctctggttccctccacgcgtgataagtgggatcatgacagcgtccttgtgccttcgatttgtccccaagccctcctctgcctttccgatctcaaactaacccgtaatggagctggcaagtgggacgaacgggacagcctaaagcgtcgttggcccggccaagaggggctcaacgcctgtcaccccgggcggccttgggtcctttgcagtcggagaggctgcaggggaggaggaagacccagccagctccagggtgcaggattctgcccttccacccgagagcctcccccggtgtcccagtggcagtggctgccccgggctgcggtcgcagagtaagcaggggctccagtcctcggtccgcgcgccctgccccttgggctcagctgcgagccaccgccggcgtgcgcacccacaaggagagaaatggaggtaatcccccgcttcccaccgactgccggaagctcggcctctgtgcaaaccgaagtatacctgcacccaagagc

SEQ ID NO: 331634 - DNA, 863 bp, Homo sapiens
  chr2:223183542-223184405
  hyper
cgcgaagggcgaggggcgacagaagcccgagggacagaaaaccgaggctcctcagtggccgagttgggagagagtgtgagtccaggagagcccgggggcagcagggagagggtgcagaagctcgagcgcaccgagccagaggccccctcttctcccgccacgcggggctggaggtgcaggcgccggttccgcggcgtggcccggctatgtgtcgctcctccgcgcgccgcccgccgcagcccgtgccctcgggccgccgccgccgccgctgccccccgtcgagcccgcggccgcaccctcgggccgatacttgagccagcagatgacccaggtgacaacgaccgagaagagtgccaggatgctggccaccgacaggcagatgggccccacgggcgagggcgagggcgacccggtggccggtgcctcgccagggggcgccccgcctccgggggttcccccgccgccgtagtggttgacgaagatgaggccggtgaagagcagcaccaccatggagaggaaggagaagaccacgcacacgcagccagcggtgagcgccgcgcgcttgcagttctggcagctgtcgtaggcgcccggggcgcgcaggccggggcgggctcgaggcccgggggccgcgtcctcggcaggcggcggcggcggcggctgcggtggggcgggggagggcggcggtggcggggccggggtgggcggcggggcagcagcgggcgcgggcaggcgcgcgggcagcggcgggaggcggtcctggggcagcgggtcgtgcgctgcgcgcaaagccagcgggaaggcctcggctagcttggtgttgttgggcaggccgtgcacgcggctgtcgggcagcggcgtgc

SEQ ID NO: 331635 - DNA, 419 bp, Homo sapiens
  chr2:223185036-223185455
  hyper
cggccttctcaacgcagctttcccagcagcttaggatatcggtttttgttggacttgaaattgggagttgagggcggcctggaggcgctcgggaaggagatttggggtgcggctgcttataaagatgttgccttttaccccagcagtcccccgccccctacgcggggtggtggcaggaaaccggttcctgagttttccttctttctcttcctcgacacgacctccccaccagtgtgtttctgtttatcctcctcgcccgggggctgggtccctggcgaagcctcgttttcacccacccacccccaagccagagctcaccagtgatgtaatgcgggacccgcgcggggaggggaaacggcagcctcaaccgcctggcagcggcggtttcttctcttcgtgaaaatcgtgatctcatctct

SEQ ID NO: 331636 - DNA, 1337 bp, Homo sapiens
  chr2:223288951-223290288
  hyper
tcccattagtgttacgtctgccgggggaagaaggtggggtggggggttgggggcgccgggagaagagaggcgcagttcggagatcggcactcctccgtccagttacaggcggtcctgcccccgtggccgcccggggccgcccaagccctccgggacggagagaaagggggacgcgttgcgcaaggtggaggcagacacctgggcgggcgctaggacccgggcggcgcacctgttggctgggcccggggccccgcccgcccggcctccgcccggagtgcgggatcggcgggggcgaggcgggagtggcggtgccagcggagggcaccggcccggcgtggcagcggcggcggagcgcggccccgggcacaccatggccgagctgctgcggagcctgcaggattcccagctcgtcgcccgcttccagcgccgctgcgggctcttccccgctccggatgaaggcccccgggagaacggcgcggaccccacggagcgcgcggcgcgggtccccggggtcgagcatctccccgcagccaacggcaagggcggcgaggctccggccaacgggctgcgcagagccgcggcgccggaggtaaccatgggcaggtgttcgccgggtacggggagggggcggctgcggacgtgcgggtccctgcgactccgccacgcggggccggccgggccgagagggcgccgtccccggcagtgacccggctcccgccgctgcgagcggacggggaggcctggccttccagtaaccaggatgccaccctccaacgctgccaggggcaaccgggtctattgagatatccccagacgctttcaatgcagtccatttagagacttcccactttcaaaagtagttaaattcacgtagatgccagcaaatatgtaagagttacgtaatggaacggaggagcggggatgtccttggcacttccccggggagacgttcttagactcccccccacccccgtattcttgcatttccgcccatcccccttccctgatgcgcacaaatgcgggtgcagccgggctcagcgcgctcctcaccgcgctgcaccgccagctctgggcacagaacttggggctcacacagctcctagagagatttacaacctccctgcactacccccggcgatgatgtcttaacagcaactctcgcttgccctcccccagagtctgggggtccctcctgcctggtgggtcttttatggaccgacaccagtgacttctaacagatgcttctgggagggaagctcgctacgctcccgctaggtgttcaaagcgtggttatacaacccactgcggcttggggggaaccagcgtgcgtcgtcgtc

SEQ ID NO: 331637 - DNA, 163 bp, Homo sapiens
  chr2:224702626-224702789
  hyper
cgagagcgcgtggcccgctaggaactccctgcgcggggaactccctgcgcggagaacaccggggacttttcgcgattctgccgcgcgagtgtgtcctgtattccttccgcaaacgtttatcaaacctggcaaagatacttccgatacactcgcagaaagtgcc

SEQ ID NO: 331638 - DNA, 372 bp, Homo sapiens
  chr2:224808923-224809295
  hyper
cgaaggcggctggagttcctcgcaaagaagcaagccccgggcaccagggtccgcagtgaccagccgccggtcctccacgcttccagaggagacgatttggaactgacccgggagggccaagaaacaccttccgagtaccaggctaaaccccgccagggagagagaccgggacgaaggtcccaggctagtgcgacaccgcaggtcggggttccctggttggaggagcgcggtgggctgggaggggcgcgttggtgcgcactggaacaggggtccccggcttgagcagcgcggtgagacagagttcccgcgctggaggggcgcggtgagacagaggtcctgggctggagaggtgcgttggggcgcactggaacc

SEQ ID NO: 331639 - DNA, 1535 bp, Homo sapiens
  chr2:225906071-225907606
  hyper
tgttgttcccactcgcttcccgtttccactagagttgatttgtctcttgccacctctccccggcagtgtggacctactgcaacgcaggaacatctgggttggtatggataggatcctagcatcagatgctggctgctgccccagggacttcccgcggaaatcacccagcacttagaagccgtttcaataaggaagtaaccagtaaagcattgctggtgggagaaccccgcgaaacatcttagaaaaatatcagaaaccgctggagacctaatgacccacgtctcctccagcctgtgttcctcagccctttctggaggagtattaagtggtttgtgggtttttaccctgcggtgggagggctgttccaagtacatctatttctgcgatagttaacgtcggggggccccagctctaaccagggcgaggaccacggactgcatccctctctctcagcgcactggtctgtttactggagggtgagagggacgcgcagacctccggactcaggggttctgttctgtagatccccccaccccacccggggtctctggcactcgtatcacttagcaccagtgtgactggcggtgcattccggccccctcgcgccccattaaagcccctgcacatcctctcccacgctgcgcttctgctacccacgcagctgctcctctgagcgtcccgcgtgcacaaacgcgcccccggtccttacgcgtcggtggcgctgcctcgctgaggtggcgccgggggagcccgcagaggcggcgggggagggagtgcggaggagaggacccgtgagctgcggggacctgggcccgccgagcttttggggaagctgggctccgttccccccgggcgcctggggcgcgcgggaaggcgcggaggacgcgccgcactcacccgctgctgctgccggctgctgactgccaccgcggcggcggacgcggcgctgtgccggagctcggccgcctgcccaggtctcaacaggctccgggtgaacctgcgggtccgctcaccggccatcgccggtcacgccaatcgcgccgcgggcccggggcgcgcctcccgccggtcttccccgcgccaaccttctctatccacccgccgttcaggaagcggaactcggagccttcccccccctcttcctcgctcaactcgcaagaggcgggtttttctctcttgcacccccactcttcccacccccttccctcctctgaagcttctcgaagactttccaaactctgcgctcccccgggcgcgcgcggccaactcggctggcggccgggccctgcagcggcgcatctggagcgggcgtcgcgggacgcgtgtggggcggctcctgcccgcgccgcccacacgggctcagctggccggccggggctgtccacgccgcccgggggaactgcaggctgcgggggagggcggggggcggccgccgaggggctccgggcggggcctgtccaaggccgtcgcctgtccaaggccgtcagcctcatttggaggttgctgggagagttggagccctggatgcatttgcc

SEQ ID NO: 331640 - DNA, 210 bp, Homo sapiens
  chr2:227700369-227700579
  hyper
cgtccgttgggtaggcggccgcgacccgctcgctgcttctcccctagtcttcgggtcccttgaacgcaggtcgcttgtttgccttacgcgtagtcagcggccagtggctatttatggcagtaaggaatattatccacatttcacatggagcttagaggacagggcgagggtccacactctccttactgcgctctgccgcggtcctgcccc

SEQ ID NO: 331641 - DNA, 754 bp, Homo sapiens
  chr2:228028714-228029468
  hyper
cgccttacctgtggggacgcccgcagcgccaggagctgccgccttgccaccccacgggacgcgcacctccagccccaatccacccgcgccccgctgcctcttcgcggcgctctcgcagccaagcccggcggccgcaagttggaggcgggctggaggcggggaacgcggaccgccgcgggcgcggggaacaagcggggcctcccgagtgcagacgcccggcgcgcctcccgcttaatctgggcagggccgctggccactccctccaccctgcgcagccacctccccaccgcgcagccacctccccaccgcacacccccaaacgccccacctccgaccgcaccccacttccccgcctgggcccccggaccttgggagcatcacctccttaaccccttaccctggatccgcgcccacctgcccctcaggcgcccagccctttctcgcctcctgggcacgatgcccgggtagaagggacactgcctggtaagttgggagggagggggtatgagggcgggacctgagccacgtcttccctcccttgaagccacaaccaaaaagcctgggtggggagggacgaaccgcgcgaccgagccctacaaaacccgccccggccgagtggcgaggcgagctttccagccgggctcccagagccgcgctgcgcaggagacgcggtggcctgagagcctgagggtccccggactcgcccaggctctgagcgcgcgcccaccatgagcgcccggaccgcccccaggcc

SEQ ID NO: 331642 - DNA, 258 bp, Homo sapiens; identical to SEQ ID NO: 229136
  chr2:228736216-228736474
  hyper

SEQ ID NO: 331643 - DNA, 794 bp, Homo sapiens
  chr2:230578412-230579206
  hyper
cgcacaccctttacacacacagggtccagccggacgtggagcgtggaccacctggacattgaacacctcgccggggacgctcggagccggctcctccgcgctgccaaggcgggcaccgctcaagtggttcttggctcggcccggcctggaggggcgcgccactcagtggccaaccggagcgtctagagccccgcgcgagaagtgccgagccccggagcggcacaccccgagagcccggctggccccgcccgggaaccagggcgggtaagggaatcagggtcggcccgggggtccgcgtccacgcgggccaagagactggatccatcttcttcccaaagtgggaaagcctgtgtcaggcgtgcccattgtcgggcagcagcagcagggccggcgggaagaggctgctggtcccggaccagcgccccgcaccgcgcccgccgcttccactcacctggcagttggcgccggagatcccggcggggcaggtgcagctgtagccaggctcgccggcgggggccgggtgctgcgggtccggctcagggcgcgaggtgcacacacccccattccggcagggctgcgcggcgcacggcccgggcgcagacaggggcgcggcgggcaccgggttggccagggagctgcctcggggccccgctccgagcagcagcagcagcagggccagcgcgggcagcagctgcgcaccgggcgcctgggcgcggcggggctgcatggccggccgggagggcgcgggagccggagccaggacgcagtgacggcggcggcggtggcagtggcga

SEQ ID NO: 331644 - DNA, 888 bp, Homo sapiens
  chr2:230932495-230933383
  hyper
cgaaatggccgtccccggtctctcaccccatttcagcctctcttgaggagcctcaatcggaagcgctaagggggcccagcctctgcgcgccctgggtgcgggatcgtgcccgcggggtccggcctcgcgccccacccttcgagcgcccgcccccacccgcgctcggtgctcccgctcccttggcaccccgagaccacatccccacttcgggcaccccgcatccctcggcgcgttcggaagccagcagcccaccggggaagctgggccggctgcagcaccacagcctgtgcagagaggcatccgcaccccgcgaagtccctaggcgcagccccgggtcccccgctctgcgcctcatcactgtccagttcgagtcccaaacgggcctagagagcagccgggcagcgaggctgggctccgggcagaacgcgcttctccagccggacgggggtgcccaggatgacgctcgcggggccccggccagcttgagcagcaaggcgcgcgtccccaagctccgcctggcggtctgccctgaaccgccggttaccctgcccgcccgcagctcccaagcccccgcggcggccttggcactaccacctgccccggcacagtctcgccctccaccgcccgggcagcctttcccgagcctgccttgggctggggctgccccttcccgggggtccctgggggtgcagcggccatctgaaacctaggctccgatgcccccggcgtcgctccattccccaggcccgcggcgcgcgcggcctcggatactcaccgcccgaggcccgctgggctgcggcctcactcggctccacgcccggatcctcgaacttgctgctctgcttggagccccctgagctgctgggtgtagagatttgttgcaatgtc

SEQ ID NO: 331645 - DNA, 53 bp, Homo sapiens
  chr2:231191875-231191928
  hyper
cggccgacttcctgctccgggtcagggcagccacactgcacgcaggctgggcc

SEQ ID NO: 331646 - DNA, 441 bp, Homo sapiens
  chr2:231902096-231902537
  hyper
cgggcccgcgatgcgggctgcgcccaggggcgcgtgcacacagaggccccgcccgggggcccgggggtccggctgggctcggccctcgggggcgtgtcctctgtgccggggcgccaccgccccgagaggcgggcagcgggtgcgcccgggccgcggcggccgcagagggcgggcggcggccagcatggagcgcgagctggaggcgctggcggcccggcttgcgcgccctgccgagccgcccttccaggcgttggtggaagcggcggggggccgcgggcaggtgctgctggtgggcgagctgtgggagcgcgaacagagccgcgcgctgctgcgggacttcgcacgggcggtgttcccgccggagccaggcgcggccaagccgggcggcgcggcggcagagggcgcggggcccggggcggcgcgcggggcgcagagggcggc

SEQ ID NO: 331647 - DNA, 234 bp, Homo sapiens
  chr2:231902837-231903071
  hyper
cggcctcccggcctcctgcctggccgtccaggcggccgcctgcagggccctgcaagccgccggagccgggcaaccaggtgagactgcgcggggcccggctgggcgcgggcgggcggtggctcgggcacgtcccccaagttggacccctttggccattcccttattgagcaccgaggtaaactgaggctcagagcagggaggtgcctagagccaggcctcgcagctagcggagag

SEQ ID NO: 331648 - DNA, 247 bp, Homo sapiens
  chr2:232260775-232261022
  hyper
cggccccgcggccctggacaccgctccaggaccctggcggctgggaccccaggtcttgccggcagctgggtcccctctcccttccagacccctgagggccccctgcgtccgggccactctcctcctctcggggcttccttccgcgggacctcggaccgccgcccgcccggcccctctccgcccctcccgggctttccctacgaatggagcggacccggcaggtggagcgcccgcagcccagggcctc

SEQ ID NO: 331649 - DNA, 458 bp, Homo sapiens
  chr2:232394892-232395350
  hyper
cggcgcccctggccggaagacacaaatgacccgagaagttgcgaggctccccggtggcggggacggggggcaccccgacggagccctcggacccttcccgccctaggacgaccctgcccgcaccgagccccggcccagctgccgcgccctagcccacgccggcgcctgcgcacctaccatgcggcccgcggcccgcgagaccccggcttccaccctccgagcgacggacacagacgcggcgcgggagccagtggactgactgacagcggccccagcccgcgccccgacgccccgcctgtccggccgggaacgccgccagggggcagtgcagtccccgcagcccgggcggcgccccctcccgcactggcggaggacgcggccgttggaggcgacacctccacaagcagcgtggaggcgacacctccacaagcagcgttatctgacggaaccctcacaac

SEQ ID NO: 331650 - DNA, 500 bp, Homo sapiens
  chr2:232479181-232479681
  hyper
cgagccgcctccccgcccccagcctcccctgccccggctgcccccgagtcctgtttcagggatcctagccctctctccagacgcgctgctctgtccactgtccccgcctccaggacctgcgtcctcccagccccacatttgtgcgcaaagttgacggtcaccgggcccgcgcgcttcggcatctcgcgaaggcgctgcccgcgccctgagtccttccctggggctgtacgttggaaaggacagaggtctcctctgcttcgcagttgcaaaaggcttcacgttttcaccaaggggcagatggggcagtaggggccctgggaggcctggtccaccaaggagggggaacccgcgcgcgcgcgcgcacgcacgtggcccggcgcgcccgggagacctccgtgtgatcaccgcgcgcagcagctcccgggcggaaacacctcccccctccacgggaaagtgggctcaaccgggggcggaaagcgacacggctgggggacgactac

SEQ ID NO: 331651 - DNA, 612 bp, Homo sapiens
  chr2:232526742-232527354
  hyper
ggaattttcacccccgccagaggaagagggcccagctgcgccattagcgcgtgcgagggaaaatggaggctcctggtcccacccgcgcaccggcgcctgcgccctgggcgcccaccccggcccgcgaggcggccacggccggagagagagggcaagggaaccagtgccgtgtcgcgccccaccctgcgcccgagcgcagtgccggcgagcccggctccggcccttgagagtccgctccaggccgctccacaccacgagccgctccgcaagtttgcagcgctccgtgctttccctccagccctttgtgttctagcgcgcgtcggaaggaacgcgggaacgcgcgccgtgctgtgcgcctgcgcaagggttcaggcggtgcgccaagcctggagtcaagagtgggcgaggctctcggccgctccgccccgggccgccttcgctccgcccctcgcccgccatttcgtgctccgccgcgtctcccgcgtctggggcgcggcttccgcgtgatggacgcccggaagccggcacaacaaatgcccaagcgccagggcttcgctgtctgcaggtccttccgctgcccgcggagcgaagatggcgcctagagcttgcagc

SEQ ID NO: 331652 - DNA, 47 bp, Homo sapiens
  chr2:232651383-232651430
  hyper
gctcctcactccacgcctgcggccctgcttggagcataccgcccacc

SEQ ID NO: 331653 - DNA, 2062 bp, Homo sapiens
  chr2:232790030-232792092
  hyper
cggctcgcgcgcctccgaaggccggctgggcggcgggcggtcccgggccgggctggggctgggcgtcgggtgggccgtactcaccgccgccagggggcgccgcactaacatcccaggccgctcatggagccgattcggtccagcttgaggccgaagcagcccttggacaagcccttcttgttggctcctttgtatttgcgcgcgttggggtgctcttgcagaaggcgagcccacgctgcccgcgacttggtgtccacgcgcaggtcccggagcagtcgcgaccggtcgcccttgagattggcgcccccgcccccgggagccttgtcgcccttcttctgaccgccgcccgcagcctgcggctcggccagctcctctgccggcggggttcgcgggacctgtccgaggaaagagcgggcaggtgaagggacacgcggctgcagcacgggggactctgatgctccagccccacgcgcccgccggcgcggggtgtccctcccaagcccagagccgcccccaccgatgccggccagcttggccccgcatccacctgccacgcggccgccttcgccgctccctccggaagccccctgccctccctttgctgctcgccgggcaggccacactggggtagggggctgcgcatgggccgatgttctccggaggctggagaagtggacccccgaatccgcgcttcgagggctccccggctctcgcccacgcgcatctcggaggagacagccgcctgccttccctctctcctgggtcctgcgcgccgcattctccaagcccccagcctcccacgcctctcccaggctcggcgtccccacgacagcacccaccttcggcggcgccccgggcttggcttcggagggccggagggagagcagcgtgagcagcagggcgcaggccagcagctgggagagatgcatggtgccgctggggtcgaggggcgcacacgggcggcagcgagggcgcgcaggtcggcgggcagaccagcagggggatgcggagcaggctggctgggctgcagggcgagcagggtcccagtgctgcgcggcgccggctgggtgcgctctgagcccgtgactctgctcgcgcctttataatccaacctgccgctgatgtcatcctcccgcccaccgggccgcccgggccaatgacaccacgcacgcggccgcgccgagggccgggagggggccgcgggggctcccctcccttatcccaccccggagggatcccgcggctcggcgggctcgctccaggctgcacttggagctgcagagctgagcgcacaggggaactccatttgcagcgagcgcgcgccctggcctgccgagcatcggtgcgcctggtgccctgtgcacccactaggtcctcatcgcactcactctacctggaagggatacgtagccctctttgcaggtgcaaagacaggctcagaggaatgaagtcacttgcccaaagtcatacaggcataaagttggcgctgcccgaaatccacgcagccctgcttgtcgccaaactcttccctgggcacctgacagccgcgggatggcattgcagctccgcctttcacctgccggtcagggcgggagcgcagaccacagcgacgtcgttaggttggggaggcagaggatggggttggaggactggggtgggaggcgcagggagagcggggttcgcctgggccgcaggggggagcgcaagtcttccacactggagagtgcaggggtgtcgccagcctgagtgtttgagcgcaaggcgggaacgaggggactgcgagcgcggaaccaagatattcatgctcatgcgtgtgctccgcggcatcgtatgctcgccagttactgctctaggttcacgttcagccggtttcggccacacagaacgtcccggggtctgactccgctggtgaactccctctgtgggaacaatgcgcacctgaccttgcctgcacccacgcgaggatccgctgctgggggaagcccgctccagtatcctgtgcactttcacaggctggggagagagcttcctagccagcggcccagtccagcctctgccagcc

SEQ ID NO: 331654 - DNA, 887 bp, Homo sapiens
  chr2:233283264-233284151
  hyper
cgaccagacatccatgggtagagacccagaagcacgcagaccccagcccctctttccacccagacgagatgaccaaagccccatccctgactgtctcagcttacccctgaaagcctgcactttccctacctgtcgggggcacttgcgcagtgccgcactgacccttggggttcctggctttggcgccagccccagccctcacggagatgtcagcccagcccgccggcgcgtccctccctccctgccctcactgccttccagagggctgggaaattgcggctcccgcggctcggctgaacacttcagttaacccagggaaattacttgcgccttcctcccgcgctctgccgccaagcgctcccctcccctgctttccctttctctcctcttgcgcaccctcctcccacgcgcagggacccctagtcagggccacgccccgggtctgcggccgctggctgggcgctcgggaatcgcactcaggcggatgacgtagcgcgaggagttcctgtaatctaggctgatctagagagagaagagcgcggcggcactgtacacgccctgcaccttgtacagcagctggttgaggtcccagctggttgaggtcccgcgacccccggacgctccgccgcgccgcccaggtcccagcccccgcagtcctccatgacctctagcatgggccgaggactcagtagctctatctcgcgcatgtcgaggcacgaacggaaaaaggcgctcaccttgcactgggccgcgccgccgggcccatccctgggccgtgccagcaggcgcctcaggcgctcctctttctgctcgccgaaggccgcgatggtgccataggtgagcttttcgttgggggtggcatggcgcttcagtcagcagccgcagac

SEQ ID NO: 331655 - DNA, 1185 bp, Homo sapiens
  chr2:233351605-233352790
  hyper
cggcggggccaccacccccgggtgcacagtggagtcttcccccctgtcccctccctgcacacacttgagggccgcagggttgggagggctcttattggaagcaagaggcgccaggcaaggggcctggcacgtagtgggccttcattgaaaggtcgtccctcttccccttcgcctttctcttccacgacctgccccagccaaggccgggtggagtgggggaagaagcggaggctggagtgaggaggtgcggtcaggggcgcgtctatgcgacactttcagctctccgcgctggacccagacagacgctccgcaaagcggccaaagaaccaaactttgtcctcgcggaagtccgcgggatcgaccacgccaaccccgctccctggctccttctgctcggtggcccgacggcccactcgccccttccctaggggcgcgcgccaacgccccagggtggcggacacacaacccacccactggacggccctgatggagaacccgagacgggttccctccccccactcccaccatctctgtccccgccccgagccactcctggcttcaacaggttctccccagaacccaaacttgggcgaagtttcacccccggcggggagcgagctggctggcgacccccgagccccggcgccgtgcggcgcagtccgcggagcccgagagccgagcccgggagccgcagccgcagccgcagccggagccgcagccgagaggacgcagacaaagccgggaggctccgcgcagtggcggcggcggcgacggaagtggccgcggtggtggcctcagcggcagggactcgggcgccacttacccggcaggtgcgcgcccgagccggcggtgaccgagcgggtcgggcccgagcgggggcctgagccgcagcgcagccgagcgggcgtccggtgtctcccagcgcccgccgcctcctctgccgccgcgccgagcccgccgcgccgcccgcctgccggcccgagggagggggcgcgccggcggctccaccctcctccgcccgccccgcgcgcccctccttcctcctgcatctctcgggccacctggcagtggggcggcagcgcggacgtgggtcggcggccgcggagacaggctcccgggggtcgtgcgcgggctgcggtcggggactccgggtccagccgcgttccgagacgagtgagggcagcg

SEQ ID NO: 331656 - DNA, 794 bp, Homo sapiens
  chr2:233367696-233368490
  hyper
agggaggtttatccgtaggagtcagcccagttgggtcaaactaaggacccagtgcagaccccgaggcccagagacacaggtgtgcgcacaaacacgcactctgcggaaggccggggcgggcctggccgctgcgggactcctggcccggcgcccttgacgtcagcggctgggccgtgacgtcacctcaccgcccccgccgcgctcccgcccccgcccgcgggcactcagtctccgctaatggcaggcgacggggaatggcacatctgtcttgccgggaattagttcattgaatcaggcggcccgagctgcggcagcgaccttagccctggccccagggaggggtctgggcgggcggcgtgggggaggttcaggctggagggctgagtgcggggacgggaggaggggactcacctggactcgcgagggggactgagcgctctccaaatataggtcaatgtcccgctcagcctccctcccccagcaccgtgaggaccgaggcctggggcctggcgcccgcctggtggacctcgggggcaggctggggaccgggcccctgcgggacgcggcgcggcaggacgctccccgcgcctttctttctgcacctgcccctcggggtgggtccccctctttaccctcgcttccccccgcgggtgccgataaaggcggctaattcccgagcccggggagggagggggcgactgttccagtcaacacttccccgcgctcttccccgaccctcccagagcgttcccgctgctcagggcgaggagcagctgcggccagtttgtcctagc

SEQ ID NO: 331657 - DNA, 1557 bp, Homo sapiens
  chr2:233497794-233499351
  hyper
cgttccaatgagtgtttgaaaagcagctcccccgccccacgctccgggcgggcgcctcccactccctgaccccggggagggtgggcaccactcccagacgcgggggacgcgtgggtgtcgctcgggggcgctcgcctcccccacccagcctgtcccgggccgcgagcgcttccagtcgggttacttctgggggacaagaaaggcaccgtctgaacggtcgagacgctttttcccgctacggttttccccggagctgacaggggcagcaaggtcggagttgatccgagggtccctgcctggtcccggggggacggtcagcctcccgcccggagccgcggggagaggaagcaggtcggggtctccgggacgcgcagacacccagacaccggcggcctcctcccaccaggctggcagtcgctgagccctggcgcctccttaaagccgcagctccgccccgaccgccccgcccgccagtccgtcctcagaccctcccaaccgccgggtccccgccgcctcggcggagtgttgtagagcctcgagcctgcgaggagcgcgccgcccgccagctccctgcgtcccgtcccgcgtccccgcgttcccgcgtcctgcgatccgccgccatggccagtgaggagctggcgtgcaagctggagcgccggctgcggcgcgaggaggccgaggagagtggcccccagctggctcccctcggcgccccagccccggagcccaagcccgagcccgagcctcccgcccgtgcgcccacggccagcgccgacgcggagctgagcgcccagctgagccggcggctggacatcaacgagggcgctgcgcggccccggcgctgcagggtcttcaacccctacacggagttcccggagttcagccgccgcctcatcaaggacctggagagcatgttcaaactgtgagctcccgctgcgcgcccttcgcccccgggaccagggagggagcgggagggctttctggtccgaagtcccgggccctgtttgtgtggggaggggtcccggggtgcaggtagcatttggcccaacgcagccagatcttgcgtgctcgggtctatctcggcgcggtgggggacggggccgaagaggggggacaccaggagcaggagctctccgggacggagcccaaaagttctcggcggctgccgggcccgagttccaggtcccccaaccccgaccactggtcccgccccctccgcccgccagtccggagatttgctccgaaagcaacttctaggaaagggagccgtcgccgcgcctcacctgccagctttcactgtatccccccaagggaaaaattagcccctgttggccttttatcttttaaaacaaaaggggaaagttaatccttggctgcagcgcggggtctgatgaatgagcggaggccgagaacggggagtttggtaaagtcgttgtaagagattcaggactttcctggagcaggcgcggcccgggagcctcctgggggcgcggggagggggggcggttgtgggaaccgaacttggccgctggcaccggtccggcgggggctcgttgc

SEQ ID NO: 331658 - DNA, 1198 bp, Homo sapiens
  chr2:233740556-233741754
  hyper
cgctaccggcaacttgcttaacctagaggtggggggtgacgtccctgtcggccccgtcacctggggccccagcacctctccttggctttgcagacgatgttccacaggagcccgtgcccacgctgtggaacgagccggccgagctgccgtcgggagaaggccccgtggagagcaccagccccggccgggagcccgtggacaccggtcccccagcccccaccgtcgcgccaggacccgaggacagcaccgcgcaggagcggctggaccagggcggcggtacgggcggggcgggggagggaggggagagggagaaattaggaggggcggggggcggggggcgcggggagaagggccggccaggcgggggctagcaggtgacatggtcctccgtcctccgcagggtcgctggggcccggcgctatcgcggccatcgtgatcgccgccctgctggccacctgcgtggtgctggcgctcgtggtcgtcgcgctgagaaagttttctgcctcctgaagcgaataaaggggccgcgcccggccgcggcgcgactcggctgcactcctcacgcgcctgtatgtccgcgcgtgcgtgtccgcgcatgcaggtgtgccagagcgtgagcgcgcgcaggcgagcgctcagggcgggggtgcgcgcggggccgagggtgggtgccgtgcacgcgcgcgggtccggaggcgcgcccgaattccccgcaggggcgccggggcgtgcgtgagcgcacagcatgtccgagcccgcctgcgtgtggcgtgcacctgagcgcgcgcagggccgcgcggctcggcgtccccgtgcaccacggctggagtgcctcaggagcgcgccgcatgtgcgtgcccggtgcgcgtgcgccggggccgccagggcatcggagcgggtgtgcggccagcggtcttagcccgtccgggggcaccgtcacggtcagggccacgccacgggcggccccttctcccggcgccgcctcctctgcctgggcgcgggccgaggccctcgccgcgctccccggggcctgcctcccatcccgctccgctggggttcagagcgttccgtgaggaggtaagcgctagggcaggagaggccgacagagaccccggggcccgccgctccttgaggccggggttggggagggcaggggccgtcggctctcccagccagaggccgcgtggttttgggggac

SEQ ID NO: 331659 - DNA, 785 bp, Homo sapiens
  chr2:234474820-234475605
  hyper
cggagggcggggaagactgccactaaaattatcaagcctaaaggccttccagtatgtatccactaatcccatcgttagccctgggggcctaggtgacttccccaaggtttcacatcgagtgtggcggagggtcacttggagatgagaaacgtaaagcgcctagcataggtaccaaatgacaggaagcgctgaaatgcaattatttttcttttcctcagaagaaaactaaaaaaacacaactcgagagtctagcctcgagctcgttgtctgcattcctgaattcccaactcctacggccggccgaggccctccaagccaccacaggcccaggggcgcaaaaaggcagaggtccccgtggcccgaaaccactgccccgactccaggagagcgccgcgtcctcaggcaggcctgggcagcctctcgcctcgccctcctcagactgggccaccaacactgtccctacgcttcccacgtccctcccaggatccccgggcgccagccgcacttactgcctaaagcccagacccccgccctggccaaaacgcgaagcgaacgaacccgccccaactgggcgccgccatgttggcgagggcgggtctccagaaagtgatttatggatcgtggactatgcttcccaggatgccccgctggagcgccggcccctcgcacggggccttatgggaaatgtaactcttctgctccaagagtttgggaactggagcgggagcgggagcgggcaaggtgagctcgcttacaagtccgctggtgagttcgcgggtccactc

SEQ ID NO: 331660 - DNA, 216 bp, Homo sapiens; identical to SEQ ID NO: 229181
  chr2:235404345-235404561
  hyper

SEQ ID NO: 331661 - DNA, 515 bp, Homo sapiens
  chr2:235404621-235405136
  hyper
ctcgctcgctccccggtcgctccgggcgcattaccgcttcttcttctgcttgagggacttcctgcgtttcaggatcatctcatagagcttgtccatgccctcggtgaggccctcgccgatgatggcgcacgccggctggacgtgataggtggtggccgggataagctcgtgcagcgccagctgcttctcaatctctgccaccggcagcgacttgggcaggtcctgcttgttggcgatgaccagcagcggcgtgccctggttctcggcgaacttggtcaccttgtgcagctccgtcttggcctcctccagccggtccacgtccaccgagtccaccacgtagatgatgccgtccgtgcagcggctgtaggacttccacagcggccgcagcttctcctggccgcccacgtcccagaagtggcagctgatgcccttggccgtgccgttgctcagcttgatcttctcggtgttgaagccgatggtgggcaccgtgttcacgaactcgttgaacttgagcc

SEQ ID NO: 331662 - DNA, 1710 bp, Homo sapiens
  chr2:235859955-235861665
  hyper
ccaggcctgttttacgcgccgggggcccagaggcgcccaggtcagacaaagtgtaaacgattccgaccagagcccttcaatctgcattccgcttcgcaggaaactctcctccttttatgattttcagccggactgccttccctgttgttagtttgtaactttcgctccggcccccgcagcctcgcgcctgccttccctccactgtcctcagccaaggtgtagtaaagcgtctccgaacgcggcgcgaccctcgcccacgcccgctcgcggggggaccgcaccgccccaggggtcctcgctaggggttcccggagaaggggtgggagatgggggtgcgggggggcacaggagcgcgggccagcacccagacctgctcggtaccggggacccagacccgaggatgccgggcggccaaggccccgctaccctggccggctccgggcggaggaagaagaggaggcgcccagactggatacccgcctggacccggagccgcggcaccacccccagcccgccccacgctcgccagcctcagacggccgcgccccgccccgcccctctcccgaagccccgccccggcgcgggaccaccccctccgcggcctcagctccggtcctggccccgccccccgcgcccccgcccccgcccccgcccccgcccccgcccaggcgcgggaccaccctccgcccgccgaggcgggggcccagcgcgcccggcactctcggcggtccgggcccctcgccactaccgccgccgccgccgccgtgagtcccgcggagccgcgcgcgcccccggctgggccgagccgctggccgacgagcggagcctcaggagccggcggggacgccatgcgagccaggtaggcaggcggcggcggggagcgcctcgggcggcagggccctgggggccggcgggggcgcggggtcgtgctcgggggctttgcactcccttgcgggcgcagatcgtgccgcgggcgccgatcgtgccaccgccgcctgagttcggggctgcgcgggtgcctgggcgtggggcggcttcggggaagcctcgcgcgcccctcgccgctcccccgggcgctcgggtctccctggtgctggtgggcagggacccggcccggggttccgggcgccgagccgcagccctccgcgtgcgctcgggccgccccccaaccccggctctggccacttcccggcgggcggccctgcggggtggcctccctgggcaaccggacgcgtcctcgggcgcaaatcggggggcgcgctcggctcacgggggccgtgggggccacgggagggcgtggaggggtcggggcgcccccctcgagcggcgctggggaggagggaaggacgcgcggtctccggttaaacttgttggtgacaatgcatatttcaacttcttcggagatccctcctgtgaggatgaaattgaaaactccggtttctggcttggcgatcgggtgaccgagcagccgcgaggtgacagcgccggcggcccgcgggcggggaccggctgggatagaggcgcgttgttctctgagcgatgtttaccgagaagcccgctccgcggcacgggcgggtgtcagttgggaccccaaccctgggtcccgcggctcctagcccggggcctgcggtgtagacgggggttggggacaggcccagctggccctgaccgggtgtcgggcgcccagagatgccgcgcgggaggagccgc

SEQ ID NO: 331663 - DNA, 1935 bp, Homo sapiens
  chr2:236402218-236404153
  hyper
agaaagttaccaaacgcgggaaggggaggctcgccaaccaagcgaggccgtgggacactggcgagtcgcagaggctcctggagccagccgcttggaaacaaacaacaacgcggcgggcgaactcccgggcagcctcccccgtgccggggcgcgggggccgccgcgagaacccgggcaggagctggcaggcgcggggcctggccggcgggagggtcccgcaccccggcccagtgtgaacaccccgcgcacccccctggcccggcccgccgggggcgcggactacaagtcccaggaagcccagaggcaggcgcggggcggggcctggcgcaattccccgggatccggcgcgctgggaagcgccgaggaggacgcagcgccggcggccggagggcggcaagcgcgcgggcaggcggggcgcgggcgcgggcgcgggcgagggcgaaggcgggggcggggccgacgtgggccggagccctgcgtgccagggagggggccggccgggcaggcggcgggcggcgctcggagcgggctccgcggcttgcaaggcgcctgcgactcggtcccaggtcggcgggcggcgcacggcgggctcgcgcgggggccccggcgcgccgggcggcgcagtacgcagcgcgcggacccacgccacggccaggagcccagagcagcgcggccacactgcccaggggtcggccctcggccccggcgctcggagcgcggcggctgcctgggctttaatggctgctccgcggagcagcgcctagggctggaaggcggctgcggctcaggaagtcacccgagcaagcctccttcggggccggccgcacccgccgcggcgcgctccatgggggcgcgctccccccgggcggcccgctgacccgggacgccggggcccgctcgctcgccggccgcgcgtcccggccatgaactgagcccgcgggccagccccgcgcctgctccgcccgcgcctttcttctcgcgcctcctccgcccgccgccggcgggcccggctccccgggggctgcggcgccccgggctcggcggcccgcgggccccggggcgcggggcggcggcggcggggggcgcgcggctccgggcgcggcgcctgcaccatgaactaccagcagcagctggccaactcggctgccatccgggccgagatccagcgcttcgagtcggtccaccccaacatctactccatctacgagctgctggagcgcgtggaggagccggtgctgcagaaccagatccgggagcacgtcatcgccatcgaaggtgagggccgggccgccttggggcctcgggaaggcacggacgcccgcggcgcggcgggggtgtgcgctgtgtgcgtgcgggtgtccacacacgccggccggggcacgcggctgctccgccgagggagcactgcggcgctgcttgtcttgcaaggccgggcgagcgtcgcctgcgccccgccgcgccgcgagctccgccaggaagatagatcgtcagcgttaatttgatcgtggacaatagagtctctcctgcgggaaagtggctcggtgcctccgcgtcctgggctgccggagcgtcccggcccagcagacgcctgggggcagccggcggggtcggcgccacccgacccctgacaggttaccaggccaggcctgggcgtcttgctggacgttgaagacgtgttctgagaagtgctgccgctgggggcgaggcccgggccggcgtgtttgggcggtgcagggctgccctccttagtgtgtttgcttaattcaggggtgcagttgaacttagtggatgccgagagccagccctagccgcgggagcatcgtgtccaggtgcccctgtgcaaacgctggaaccggtagtgtgctttgtaccaaccaaaagtccggggttggattagaggaagaaccctaccaggagggcagggcgtcctccagc

SEQ ID NO: 331664 - DNA, 751 bp, Homo sapiens
  chr2:236577970-236578721
  hyper
cctcatttaaacgcgcagcaggtgagacatgcccctcgttttgttcttgcaggccaagccccagagtgggcgtggttttagggtgcaggctggtgctgggctgggcccctcggaggctccggtccgcgctgcgtcgatccatcccggcgcttgggcctgcacgccgccgcgctcgccgccgccgccgccgccgcgctcccgggactcggccagcccggctgggcgcgcggcccgcggtcccttgcacgtcggcccccgtcgcccgccccgccccggcgcgcgtttccattttaaaccgccgcccgccgcccgccacccgccacccttcggccgcagccggtgcagctgtccgcgcgtcccggagcccagggagtggcggaggctgcggaaccgccgagctgtgcagccggagcgggaggatgcgcacgggccccgcgtcgtagacaatgaagccgcgggcgccgccgcctgccctgggccctgcgcaccgcggccgcacctgccggcgagagcgctctagcgcctgaccggccgcctcgcttggccccgccggcccatggctcggcgccccgggcccggaccccggcactcgggcggcgcggcgcacgggccggcgggtgccaggggcgccgtccccgcagcctgagtgcggccctcgcggtcagcggggggcgtgggccacactcccggcccgcctgccctccccgcttggcccggcgccctcccggcccgcgggctcgctggatgcggc

SEQ ID NO: 331665 - DNA, 388 bp, Homo sapiens
  chr2:237072775-237073163
  hyper
cgtggggaggtgacggcctgtaagtagtaaaaattaagtcaatattagtactaacccatggcgggccgcgcttccccttcttcggctgagaacctcgccgagggccgagcgccgctgcatcgcagcggctcaccggcctcccctccttcccccactcgaaaggctgaggctggcgaagccccggcttctctcgcgcttcgggctgctggcttggtggcaccacgctcacactcgctggcccgctgaacgcccctgggcctgtccgccgcagtatctggcggcgcgcttcggggtccggcagcgagcggacagggctctgagcgcagggccggggttgggacaggagtgggcttggggaccaggcacgccccaccgagatggggaggcg

SEQ ID NO: 331666 - DNA, 358 bp, Homo sapiens
  chr2:237080188-237080546
  hyper
cggaggaggaagcaccgcgaatggcgcgcttcgctgccgccgccagagtcgaggtaacgggtggtcgtggagagggtacggtgtggccacccgtggtctcggaggacgcggggaatcctgcgggcctcgagggtctggcgctcccgccagtcgcccagtcctaggcgacaggctggtttctcgggcaaccgagttgtttttatttacagggattttgagaagcccgatcgtttggtcattgccgcagctcttgctcctggcaatagttgggaaataacttgggatgggttttatttatggaagggcaattgggattcacacccagctaaccctgaacagtccctcccgagcccaggac

SEQ ID NO: 331667 - DNA, 1354 bp, Homo sapiens; identical to SEQ ID NO: 229197
  chr2:237081299-237082653
  hyper

SEQ ID NO: 331668 - DNA, 2057 bp, Homo sapiens
  chr2:237086405-237088462
  hyper
ctgggtgggcgcagcgccatccccattgcacgaaccgagacggaggtgcggaggccgtgtctggccctggagagtcctccctctgtcgtctgctctcagcaccaagtctggcatcgccagggcgccaggcacggccttcccagggagaagccttttctgtcatttttgattattttactttaaatatgtgtgcaaaaccttagctacattctcgtgggccagggataggcaacgcgtgcacctagacctcttgcttgcccccacactccgtctccccagggccaccccctcaacccccccatgccatcagagttttgaacaccgctggagatggcgggggggaggggggcgaatttggaggcgggacccgaactgccggccaaggaccaagggctggcctcgcccttcgctcccactgggcaccgttctcgccgcgggaccttgccttgagcgcgccccctgcgggccgcggtggggattggccccttggaaagagggaaataggctgcgcgcgccggggcgggagaggcgctgcctccagtcctcccgggtgggggtctcccctccgagatccccgagggaacccgtcccgtgcactaccggatttccggtctctgaccagctggggcttcatttctacgcgtgcttttactgctctcctcctcctccggcggttttttttttttttttttttttttgaaaggagcaaacatccccagctttaatgcggcccaattatctcgtttgcacgacttaaaatgtttctctttaactcatttcaatctagtaaatatgcttcagcaagtagctaatttctcagggatggcttcgcctcgccatttgcatataaagcgcgtcggggcccggccccttctccgagtgcgcgagtcccttcttccggtgcgcgggtggcaggcagccaggcctcctagtccagggaggtcgcctaggtttggcctagggaaggcggagtctggggtccgcgacagtgcctggggaccagggtggcagggagggcagggaaacttgggccggggagggaccaggaccttctgagccccccaactcccccgcctccccggcctccgccgtcccttattccgaggaggggcgcccgtggggtaacacgttggcgcgagggtcgggggcgcatttatccttaagtgcgtttattaaatcgcgtctggagatggatggacgtggatacaggagaggaaatctcagggctcagtcgagcaatctcctggctttaaattccgaataaaagtctcaaatattcccgggtcatgggggcactgtctcattaaaaccactctcgtcctgaaactgcaatgcagacattaaagtgcagtatttttcaattagagctgacgaattcaatcaaaattccatagattaggatgaaatgaggcatgggtcatttacaggggaatttaattgccgagccattagacaaatagtatatttgccattcccgcgttatccatcattttcgacatcaataccggggccgcatctccccgtcccgcggccgcccggcgtcggctgtaaacactcccttccctgtatcttctgattatatctgatttcatttagggccatgggggattataaatgttcacgcaatcaagttcattaggacttcaaatcgcatttctgattgggatcgctctgccgccgtcctcccagcgcctttcaaaccccagcgcttggctttcaaaacatctttttgaatttaaagcctcacatccttttgtcttccgacgccccctcccgccccacccctcccggcggctgcaagctcttcgggcctccttcccggggcaacagccctgaacccctcttgctgccagcgggtctggggagggtggggctgggctccgcaggctgtcggaaccccctcccacgccgcgcagccgcggggcgctcgtgtccctgaagcctgagctgggcgtggaggacaggccccgcgtgttcgcggatcgcgagtgggggccagccccgcacctcccgtcccggccgggcgctgcgggtagggggagcggagcggagggggc

SEQ ID NO: 331669 - DNA, 56 bp, Homo sapiens
  chr2:237145140-237145196
  hyper
cgccttaaacacgtgccgcttgctgaatgtcaatcacacctcggtaaagctgcttt

SEQ ID NO: 331670 - DNA, 579 bp, Homo sapiens; identical to SEQ ID NO: 229200
  chr2:237145399-237145978
  hyper

SEQ ID NO: 331671 - DNA, 226 bp, Homo sapiens
  chr2:238617178-238617404
  hyper
cgtttcaggcggaagcccggctcgctgcaaaacgggcggcccgcgcggaggctcgcgagatccgcatgaaggagctggagcggcagcagaaggaggtaacgcttggggctccttgttgggtcttttcacagtgatttgcgtgctgggcccagggtgcaagtgcaggcacctgttgctgcagacgcacctggctgtctcacgttgctcacggtcagagtgcgtttgc

SEQ ID NO: 331672 - DNA, 741 bp, Homo sapiens
  chr2:239757372-239758113
  hyper
gggtaggtgctgcgcgcgcgacgggcgccctccgctgcggggggcgggcggcaggggcgcaggggcattggggcctgctcgtgtctcctcggcgaggccccgcgggccgcgggggcttggatgccgtgcgcttttcctcttagcaaggaaggcgggcgggcgggacgctcacagtcccagggacacccctgagtgcagacttccacgcgagggtgtcagttgggaaccggcggaccggtgactcccccggcgggttctgaagatacttagacagatggtcgcagttttcattctcggtggtgtgtgggtgtccgtggttggcggtggaaggagcgagcatcagaaaaacctcctggggccggctggggactgggatatgaggaccagctgccctttgcgtccgccgcagcgcaggccgcccgcgaagctgcccgagccgggtgttgccgggcgaatggcttcgctttcttcctgggcaagggtagagcgcgtccgtcgggcggacactcagatctacccagctgctcgcgcctggggtccccggccgtcggcgccctggcctgcccagtgggcgtagaggtgcgggcctgcggctccagggtttgcctggggaggacgggaggaaactgccctgcgcttcggggccagagcagccacagggccgggtgtgcccgagaagggccctgggccgagagcgcagagcctggagcgctgaggcaggcgggtccgacgcagccgcgc

SEQ ID NO: 331673 - DNA, 104 bp, Homo sapiens
  chr2:240874089-240874193
  hyper
cggtagagggcgctggacctcattcgtcctgtcagctgcgattgtctgtcctttgacaggtctcagcgcagcgttctcactgtgacctccgtgcagcatcaatc

SEQ ID NO: 331674 - DNA, 443 bp, Homo sapiens; identical to SEQ ID NO: 222057
  chr2:241393136-241393579
  hyper

SEQ ID NO: 331675 - DNA, 524 bp, Homo sapiens
  chr2:241771598-241772122
  hyper
cgttgggtggaaccccagggtgtggaactgcaacagccccgcagtctggaaagaagccgccagcagcccgcgcggccccgcggttccacggggcctcgtccccgcccctgccccgctgtaggccccgcctgctataggccccgccccgctgtaggccccgcctgctataggccccgctccgctgtaggccccgcctgctataggccccgccccgctgtaggccccgcctgctataggccccgcctgctgtaggccccgcctgctataggccccgctccgctgtaggccccaccccgcaggaaacctcgccccgctggtggcgcgccctggttgccgtggcaacctcctccctccgccgccgggttgccggcttcgctagcctctcagcagcgccgttgccatagcaacggcgggtgggtcccgcggggcgagctgagctagggtgagcatcctgtggggtagactatggcggctgggcgcgtgcggcctgtgcggggcctccccggctgcggtgagagcggctc

SEQ ID NO: 331676 - DNA, 82 bp, Homo sapiens
  chr2:242269474-242269556
  hyper
cggggagtaaagcctttaaagaggagcctctactttttacatatacacgagctagacatggacatcttaattaaatcttacc

SEQ ID NO: 331677 - DNA, 1106 bp, Homo sapiens
  chr2:242498020-242499126
  hyper
cgctccggcctggtcgccttctccgggcgcatccagggaactcgctcggtcctccttaagcggggaagctcggaaagcgtctccccgactccgcccccagggttgcctttcccttagaaggccaagccccaagcccagcctctcgccagctgggagtcgcgcgctgcccacctcgctgcccaggcccccgacgccgcggcaggagccccccaagagcgcgggaagccccgtggacctggcgctcccggctcgggcgtggacggggcgggcgccggggcggggcgcgcgtcctcgcgggtctgaatggaagggtcgaggtcgtcgtcggcggcgagcagatcctgaagccagaactccaccccggcgcccgcgccatgcggcgggagaggtgagcgcggcgggcgtggcgtccgtgccggggtgcccggggtgccacgggaacggcgaggccggggacacgcgcgcaggacgccagcggcggaggtgggcggccccgggccggggcggggagggccgggtcctggcagtcgccgtgggggacgcgctgggctgtgccctccgcccccgccgcccacgcactcgtcttcgagggcgggcccggcggccccggagcaaaccgccgtctccccgcggccccaccggtccctggcagcctcggggaatgtctgtagctgaattcgggctctgaaagaaggtggcgctgggtttttaaagatttggggcacaaaaaacgagagcggacccggcgccggctacggcccttcccgagggccacgcccagcccggcgccccgcgcgccccgttccccgcgccgcctccctccacccggctgagcgcttgtgcccgcaggtgcggcgccccccacccgcgtcgccgccatggaggtgctgcggcgctcctcggtcttcgccgccgagatcatggacgcctttgaccgctcgcccacagacaaggagctggtggcccaggccaaggcgctgggccgggagtacgtgcacgcgcggctgctgcgcgccggcctctcctggagcgcgcccgagcgtgccgcgccggtcccgggacgcctggctgaggtgtgcgcggtgctgctgcgcctgggtgagtgc

SEQ ID NO: 331678 - DNA, 447 bp, Homo sapiens
  chr2:242549636-242550083
  hyper
cgcgccgcaagtcctgcctctgctcccgggcggccccctccagcctccgccggccccgccccggaagcgcagccccgcctcaggcgccgcatctccgccctctcttgcgcctgcgggaccgggagggccgcgctcgccccccagcgccagggtcacgccaccgcgccctgtttggggagcggcagaggagtcagggcggaggctgggcggcgctgggcggtggggcgcgctcactggctgccacctcacctagcaggcgtcacagggctcactcaagagctccagcaagagcagaggcgggagcctcgccagcccctccacagaccacagcgaccgcgcccctcggcccggaggccccgccctccccactcctgcttccccagccacggggtcttctcccggcccctcatctacttggcagacgcctctcaccggcagcctctgcct

SEQ ID NO: 331679 - DNA, 1979 bp, Homo sapiens
  chr3:238187-240166
  hyper
cgacctgtgtgtgcaacatgaaccgagtgaaaccatcggggagggggtggggggcgtttcttttaaatgtcgcttttgcagataaacgagcagggatcctacctcttttgaccggagatgttgaaaagcacgaccaaagtttttggcttggtctcttgctttccacaacgagataaagtctgaagcctgtaactctccctgtcccgcgggagcgtgcaaagggagggaagataagcggcgtgggtgaggggtggcggcgcagaacccaggaagggagcagaggcgagagccagcctccggcaggagggcgtagaccccggtgccagccagaacggctccagccttcccgcggccagagagccagcggcgggaggggacgggcgggacctccgcggacagccccgggtgcggaccagcgggcagcggccggcgagaccctccctggatccgcccagagcttaccggaccctgcgcgcccccgtcccggctcccggccggctcgggggagaaggcgcccgaggggaggcgccggacagatcgcgtttcggaggcggcgcaggtgtgtcaggggtgggggtccgctggcatctctcgtgccggcgctgggggggtctcccgtggaggaagggctgaaggtgctccgggaggggtccactcgttatggaaaggaagcggggcgcggtcagggtccctcgtccgcagtgggggtggtccgggcccctcagcctgcacccgggaggagacgcccccttttcacgccccgcccccggtggccgaggccggattcggacagctcggggtcagtcgacggagcacaccgggcgcccgaatccgccgggtcccactcacgcccgccggccgccggtaggttggccctcccgcttccagcctccgccaccccatccctcgctgctctctgaggaggattccagacccccccgtagatctccgccctctctcgggtggggctccgaggtctagctggtctgggggtcagtcccggcctctgtctcccaccgcgcccctcgctcccctggacaccgcctggtgtgtggggctcagacccccccagtccactgcccctgtgtggctcctcctctcaggagaggattctagatcccagcccggggggggttccgaaaatgccgccagcctggagcggggaatccatggaccgtggggttgtggggttggggagcacgaaaacccagagaggggctagagctccacctccccagaccgccgaggggcgagagggcgcgccgggggccgtggttgccatggctcctggtagcggagcccggggggctggagatgccggtcgcggatggtcccttcttcctctttgtgcctctctctttctctcgctttttttttttttttggagtgtgagtgtgcgtggggaggcagcacggagaaagtgattaatttggggagcagggattggagccgggaggctggggaaagccagcccctccgttcccactctccgggctcgctgcgagccacagtgtctcagccaggggcagggccggggaactcctgcgaaaaaccacgggccggaggagcagcagccgcgcgggcccaggtacccccgccccagacggccagcagggtggagcgcagggtgggcgtttgggctgctgggcgggaaggcgggcggggaaggggtgggaggccggcggcggagggcaggtgtgcgtcggcagggctgggtggcccggcagagagggcgccccaggttcagcccctcctcgaagggcgccggcgtccagtcccgctcgtgggagccgcggagcagccccagggccggcgagcggctgccctgccaggcgcgtgcgcgagggcgcgctcccgcgggaacgcgccgtgcgcggggagatttgcgcgtgcgcgtggcgatggtaactggtgggccccccgggctcgctctaggcggaggctcccgggacgcccacgtggcttcgaattccagctcc

SEQ ID NO: 331680 - DNA, 2183 bp, Homo sapiens
  chr3:2139600-2141783
  hyper
cggttaccccgaggtgtggagttgcggcgaagggagccacttctgcaaggaaacagtagattcataatgtagaatgaccgtggcaacgtcgttcaaagcacattctttcgaataacaaggctttcgacatgccccacccccgcgcacaacacaccacaaattgatccttgtacctaatttacagcaactgttccctctgacctccccccgcccccgccccacattccaacctgaaagcactttgcgtggatgagacttcaggtgtgtaacgcagcctgtccagccagtgtcctccgcctaaggacaggcaggtaaaaacctaccaaagccccctcttctggcctaagttcaatgccacccgcccacccacattccccggttcagcaattttcagcccagacgcagaagcatctgtttccctggccagggcgccttaacgatcccccgaattccgcgtctcccggaggccagaggtttgggtacccaggaaggtcgcgcctcctcgtgccccgatactcgggttgtaaagggaggagacatcgcctcggcgcatccctggccgctgaacaacgcaacccctacgtccccgcacgggaatccggctgataatctcctcttgcctgagaatcgggccaggcgccctttactaatttcgcgcgctggggacctggggctgccgcctctcggccgcgcggggcaggtgctgcgtccccagcgctcgcctcctccggccgcgcactgagcatgcgcgggctccgggcctccggcgcgtctccccgtccccgctcgtctcccgcccgttcccacccgcccgcgcctctccccttccccgagcgtctcccccgccccgcggctaaggagccggcagcccgaactccggcgcgccaggtttttccagccgccgcgagcgccgggagggagggcagcgccgcgccagacggagcccggggttcgacgccaggattggctgcaagtagggagctttcgccgccgccccgggcccctcggactgtgccggcgccgcacccgaggctctcgccagcccggcgccccggtgctgaggtaagtgaggcggcagctgtgcgggtccggctcctgcgtgggcgcgcgatgccccggggacgcggtcgcgggtgtgggggggaaagggcagggtccgcgcgggttgcccgaaggacaggggcgcttcccggggctctgactcccgcggggccgggcagcgtctgcggggccgtccagctcagagcccggaagccctgcagggtcggggagcgggagctgaacgcctgagcgcggaggactcagggccccgacgacgccaccgtcaccccacagcgacccttcttctccttctcagccggaaaataagtttgttgcgctgcgaggcagccacaaaacaaggaaccgagagcccggaatgctgcgggaagccttcaagtcagctcctccgactggttcgggctactgccccctctccgtgcgccctggcctctggcgccgggttcccggcggggcttttcttctgacagcccagtcacagcccgcagcagagggacgcgaacctggggagtggagggacctgggactaaaggaacaggagcccgtagccgtggtggaaggagccgcgtggagacggaggctgatgtctgtggcgcccgctgggtgccgggctggctgctgagcgctgaggctgcggcggcgagcgacaggccaggtgcctgctcttagggaaggtacctggcttccccagtctctgccgcgggagcctgttgggtggcattcgtttccagcaacttctggggggtttccagtttctttcgagaggcaagacaaccgccccgtcccctccccgggcccagacggcggcgaactgtgcgccgggcgccccacagaccccaatccactcactctccttctggaacgcggggctcaaaatcttcgtgcattttctctcttgtgcttcgtgtatatgttttactatttatgaagggtgtggaggtgagggtaggaggacgtgggctcctgaatccctctgaaccagccagagagtcggctgcatggaaacatttcgcagcgaagctcctgcgaggaggcggcttcgcgcgtcgggaagatcaggcggttgcttgctggccagggtctgcagattcggtgcgaagaagctggcggaggttgtgtagggc

SEQ ID NO: 331681 - DNA, 272 bp, Homo sapiens
  chr3:3221338-3221610
  hyper
cgcagcgtcctgctgatctccttcgccggccatgtctgtttacccgcaaaggaggctgggacagggcggtgccgaagactccgagggagggcccgtgtcgcgcggctgccgcgcaccggggccacagcgccccctggcggccccaggggagcagacggcggcgcgtacccaagcctgaaagtgatggcctaggcgggagggacaattacaggcctgcgctccgtcccggggacagaacgccgtcccctgccatccacggctgagtgcccggc

SEQ ID NO: 331682 - DNA, 1949 bp, Homo sapiens
  chr3:3840349-3842298
  hyper
cgcaggttcacgcgcagtttccgaagacctattccgtccccaccctcctccccttcctcggagacacctccacttaacactgccttctcagtccctcgccgcctgtttaaacacaacttccacccctcacaaatcagaaagctgtaatttcaaagtttcagaaacgttttcggaaagcctcctccaatgggaagcgacttcgccgctgagttaagcgtccgaatcctccttcccgcggcagggacaccggcccgggccaggtctgcggaggacgcccccgggcgcgcacacacagcccgaggacgcgccctgtattttaagacgcagggtcggatttcaccccgaaacttggctcccacagccccaggccgaactgtgtctggttctcagcccccgagcccgagttctacgccgcaaagagatggggccccattgtgcctagctggcctcctagcacggacgtgtattttcttttggtctgtcttttgctaaaaaccggcagtgcgcttcgcctccctgcccagccgcagcctgccgtcccctagacaaaaagcggcgaccgcggcccggccacccgagccccgccgcgctgcgcctttgttgggcggtccacagatggtgcccagcacggggccgcgccgagggcgggggcgggaggccgcgaagagggtcgggcgggaggggaggagacggcggagcagccaatccgcgcgcggcccatcagctgaccgcctttgcttacaccaggtgcacgccggctgcggggagcacaaagcggggcgcaccgcgggcgccggcaacgagccggtgaacgaggcgaggcccgtgcgcccgcggctgcaagcgcccgcctggcggggagaggggccgacggcgtcagcccgggcggcggcatccctaggcgcctggggcgccttcctccggacctggccgctcgctgccccgccctctgcaccccacttctccgaccctccttcccagtcctgcctccccctgccctggcctctgagagccgactgagcccagccccgtgcagcagcggttgcctgtgtcgccgcctagtctccggtcttggtgctctcccgggggtgccccaaggagccagtgcgcgctgcgggctgggaaggaggcgccgctcagctagtcctcctcctcctcctcgtctttctcctcctcctgctgctgctgccgccgccgccgccgtgggtgccgggtccgcgcgcaccccaacacccccaccagctgggcctcggggtaagtccctggccggccgcgccgcggcaggaggtgtgggaggcagcgaggggaagtcgaggcaaacttggtggcgtgggagaccctacggggtctggggaacctcagggtaagatcgcgggcctgagggggacgagggggcgcggctcacggagctggggaaaatgacgaagtcgggaaacgagaatatagtgccccgtttccccccgtcccccttgccaaaaaaaaaaaaaaaaaggtgtgggagagcgatagttgggaaggcaggccagatagaaacaggcaaaaaaaggcagtgaccggagccgagcctgctggatttcaggggccgaccaggggagggaggtgcccggggacggggagggaggagggctgccgggatgtgaaccggggaaggcagctggggctggagagcagcgcggaaagggggcccagggagctggaaagagggccaagaggagggcaaggaaggtggcgggcgacggggagaggaaagaaaaagggtgtcttggcggtggccttggtaagagaaaggggcaaggggtataattgacaaggcactgaaagtattgaagtcagagccttgggaaggatctaccgaactctcggcggtccacgcggggacagacctcagcccgtgagccttgagctccacgcggggacagacctcagcccgtgagccttgagctccacgc

SEQ ID NO: 331683 - DNA, 798 bp, Homo sapiens
  chr3:4909962-4910760
  hyper
cgcggcctttgaggggaaagggccagggcctagacgttcccctcccgcgtggttttcccgtcagcagctttcgtctgcaagggaaagcggcggccccacccgcagacagctgcgaggcaccgcgccaagcgtatgcgcctgttcccaggcactccctcctccgccttcacccttttgccacctccgccctccacccagccccgccgtgcgcctgcgcgccccggcccgtgggccagcgggcagtctactcacgtgggcctccgcatggcccagcgccgccaagggcaaggcggagcctcgcgatcgccccgccccctccgtgccccgcctcctgtagggagcgcgggaccctcggctggcgcgggcacttcccagcccagcccggggcgccggcttcgccgcgtgcgcgtgcgcatggtggggtttggctggctgcgggatgcggtcgaggccgccgaggccgcaaactccagtgggaaggcggcgtgccgcggccggcttcggtggaggagggggcgtttccccggaaaaggaaggaagtgggtgtcacgggcctcaatacggcccctttgacgtcttgagtgggaaatcacaagatactgctccagattttcccattttatggctaaatccaaatgactcggaccccctgccccatcacatcaggaacttcagcagttccttccaccaaagctcaactattgctgcaagcgctttggtaatcacgagcattatctatgaagctactgctgtggtcagggccccagtcgtcctgctgagtagcagactttgaaagac

SEQ ID NO: 331684 - DNA, 521 bp, Homo sapiens
  chr3:5018754-5019275
  hyper
cgtggttttgacgcagccgtgacagcccttcatccttattaaaatcacacaatgaagcaggtcgcccaagattgaaagcgcgtttccagggcggaccccggtccccgcctttggccagcaaaagtacattctggcagggagggatctctgagccccgaagtgaggtcatgccagttagcagttagaaaaggaggcatttctcacacttgctaaagagtttgacgcttgtgaaatataaacaggaagcgggagctctccaaggcgacctgaaggaaatacactgccagtttggtcaacttgtgaatgccagttctctaggtcgtcaagggcactgccagttaagactgatcccctaactgcacccgaggctactactcttcgcccagtctcggcagtgaccccatttttttttcaatccttcccacagccaggtcactcagcagtggggtgactgacccgaagcgcagtgggaagggcttacagtcatctctcaactccccgaacttgcagggcaggggagc

SEQ ID NO: 331685 - DNA, 375 bp, Homo sapiens
  chr3:5137574-5137949
  hyper
cgttttatttggacgctctgaatccgttttcccctagcacatcggcagagcagaccgcctgcctcggccttgtcaacgccaagggtgttttggacggatgtgtctatcctgaaagcttccagcctggctttgaacttgacttggcaacggatgaaaacctcggcgagcatccccagacaaccccgctgcgcgtcagagcgctgctcccgcgtcctcctgccggcagaagcccctgcagtgcgccccgcgaccaccagctggaaccaaaaggcggcgcgcaggcgcggagcccacggggagcccaggctggggcgcgtgtcagctccgcctgacctgccaccttccctaggcagcggggggcgggggtggggggtg

SEQ ID NO: 331686 - DNA, 801 bp, Homo sapiens
  chr3:6902463-6903264
  hyper
acccgtgcccagaacgtgggtgtgggtagggaggcttccacagtgagttagggtcgagagctaggctctcgcttgctccccgcaatccctagattccctggggaccacgaaactcccattccgaggaaacctccccccattccccagccgcccacccgtttcccccccttacctcagcacgcagcccctccctgcgtgatgatgcaaaccagtggggagggctggcgctgggaagggtggggagagaaggagagccagcgagggagggagggagtgggaggaggaggagagggagccgaacgaccatttaaagcgatagcagtccctgccctctccccagtgctgggctgttggagagagcgagcagcaagccggtgagcgcgagcgcggcgcgccggccggctaacccgagagcgcgaggcgccccaggctggcaggcgccgcgggacccctcaccctctctggtcgcccctccccggattcccccaccctccgtgcctgcaggagcccctgggctttcccggaggagctcgccctgaagggcccggacctcggcgagcccaccaccgttccctccagcgccgccgccgccaccgcagcagccggagcagcatggtccagctgaggaagctgctccgcgtcctgactttgatgaagttcccctgctgcgtgctggaggtgctcctgtgcgcgctggcggcggcggcgcgcggccaggagatgtacgccccgcactcaatccggatcgagggggacgtcaccctcggggggctgttccccgtgcacgccaagggtcccagc

SEQ ID NO: 331687 - DNA, 539 bp, Homo sapiens; identical to SEQ ID NO: 229265
  chr3:8810834-8811373
  hyper

SEQ ID NO: 331688 - DNA, 426 bp, Homo sapiens
  chr3:9904286-9904712
  hyper
caaaggatccatgggaagatcgggtggctcaggggagtgactccccggcttggtcggcgctttgaggccccggggacccagcggagagggctcgggtgaggcatctggaggcgctgaatggggccgggagccgcgggacccgcagagggcgcctgtccgtgtgggcgcagcagcgcctagagggaggcggccccggcagcccgcaggggtcaggctctgctggagcaggggcgtccctgtctccgcttcccagcgcaggctgggtggggccgatggccattaaagccccgccccccgcggctcaccgccgcctggccccgtccccgaggccagaaaagaggagacccgaggccgtcagaccgcctgtcaagggctgtcctggagcctggcaccttcccctcgctccccgtctgacccccagaggcc

SEQ ID NO: 331689 - DNA, 911 bp, Homo sapiens
  chr3:9956773-9957684
  hyper
ctataggctagggctgttttcggtaccaacccccagagcaaataaggggcgggggcgggggcggagaggcgagcaccctacggtatcccgagagggtggggagaagagggctgagcagtccctcagccgcccagccttcatctgttgcttcccgccaccaggcccgggcccagcgcggccagtgctcctcctgcacgcggcggactcggaggcgcagcggcgcctggtgggagcgctggctgaactgctacgggcagcgctgggcggcgggcgcgacgtgatcgtggacctgtgggaggggaggcacgtggcgcgcgtgggcccgctgccgtggctctgggcggcgcggacgcgcgtagcgcgggagcagggcactgtgctgctgctgtggagcggcgccgaccttcgcccggtcagcggccccgacccccgcgccgcgcccctgctcgccctgctccacgctgccccgcgcccgctgctgctgctcgcttacttcagtcgcctctgcgccaagggcgacatccccccgccgctgcgcgccctgccgcgctaccgcctgctgcgcgacctgccgcgtctgctgcgggcgctggacgcgcggcctttcgcagaggccaccagctggggccgccttggggcgcggcagcgcaggcagagccgcctagagctgtgcagccggctcgaacgagaggccgcccgacttgcagacctaggttgagcagagctccaccgcagtcccgggtgtctgcggccgcaacgcaacggacactggctggaaccccggaatgagccttcgaccctgaaatccttggggtgcctcgaggacgactggccgaaaagccgcattccctgcctcacaggccggaagtcccagcccagtccccgcgcgcgtccctcttcctcctcatact

SEQ ID NO: 331690 - DNA, 405 bp, Homo sapiens
  chr3:9993730-9994135
  hyper
cggatctctctgccgcagggactggggagaggccggcctgggggcagggcgaggccgttgcggggcagcctcggagctggtccatctcgggttacctctcctcctcctcctcctcctcctccgtctcctctctccctggctccgcgccttcccgcagtgtcctggatgggggtgggcgccgtgcaggcctggtcgcctgcgcccgcgacgggggcagcaggccacgctccccgtcggggtcccgccatcgccccctccctgggccagctcctcacctgcgcgccgcagcccccgtgttcaccttgcgcgcgtccctgcagccgatcgccgcgccgcatcctccgagatgctcagactcggctaacagagcccggcgctgccgatcgcgagcccgcccacaggagc

SEQ ID NO: 331691 - DNA, 485 bp, Homo sapiens
  chr3:10183473-10183958
  hyper
cgcgtccgacccgcggatcccgcggcgtccggcccgggtggtctggatcgcggagggaatgccccggagggcggagaactgggacgaggccgaggtaggcgcggaggaggcaggcgtcgaagagtacggccctgaagaagacggcggggaggagtcgggcgccgaggagtccggcccggaagagtccggcccggaggaactgggcgccgaggaggagatggaggccgggcggccgcggcccgtgctgcgctcggtgaactcgcgcgagccctcccaggtcatcttctgcaatcgcagtccgcgcgtcgtgctgcccgtatggctcaacttcgacggcgagccgcagccctacccaacgctgccgcctggcacgggccgccgcatccacagctaccgaggtacgggcccggcgcttaggcccgacccagcagggacgatagcacggtctgaagcccctctaccgccccggggtccattttgcagac

SEQ ID NO: 331692 - DNA, 747 bp, Homo sapiens
  chr3:10206343-10207090
  hyper
cgcatgatgcatggtgtagtgccgatggaagtggggtcagaaggcctcctgccgctgcggcagaattcccgtgtggccttctcccaccagggcctcagtttcccctcgcagttccgattctctggccggcgctggggtggagccggcggggccgtcgtgccgcccgtggccgctggggacgctggtgccctcccgccccgcccacttccccgccggtccgcccctggctagagaagccgcagcccgcagtgtccgacccagtcgtcccgcgccggagccggccccgtagcgtgccatggcctgctacatctaccagctgccctcctgggtgctggacgacctgtgccgcaacatggacgcgctcagcgagtgggactggatggagttcggtgagtgcggcccggggaggggaggggaccagggcgaccggagcccccagcgatcccgcctggagcggccgccaagctccctcgggcacccgggttcagcgggtcccgatccgagggcgtgcgagctgagcctcctggaccgggtccgccgcggacctcggcctgtcacctgaaggtgccgcgtggtctctgaggacgtctgtcgacgagcaggggccgccgccactgcgctctgagtccagagaacggtgggtacgggggccctcctgtcagcgctgctggctcggtgacgtccccaggtggcctctcatccagcccacaacagcctgcaaagtgcgagcctcgaccctgtagggac

SEQ ID NO: 331693 - DNA, 880 bp, Homo sapiens
  chr3:11684049-11684929
  hyper
cggagatgccctcggcggcagacccagggccattgccactttttcaaatcgcacgtagaggatgtccgagggcttaagaaatagatttttctctgactgctaccagagacagttggaaatacaagacagtgggggaagcacctcgcgggcagtaggaggtaataaataacagttcggcgcggctctctctttttcagggcaggctgggggtcggggtgttgtgtaatcgctcccacagggagcggagcgcgaggaacaccccccagtgtcagcgctccccgggctgcacaggaagcgccagcgagacaaagagcccgcctgtgctcgctgacacggtgcccttccggccccacgcgggagagggacattctccgctgtttgggacgctcactcgcgagcacaaaaactcgctgtaactttggctccccctccgtgagctgcagggcgccgtggcccacagcagggtacagtagacggtgcaatccttaccagcccctcccccaaagaggctcaacttttaccggcgtcctacaagtccttcccctaaagacaatattaacggaaatcaaaaatacatacattttaaagagttaaaaatgtgaggcgcgagtacgttgcaagcaacgagcaaactttgaagggtttctacttcactgcctccccgtccagccccctccaccgccccccgcagcctgagatccgaacacactcggtgccgaaccgaacctaagaaacgccggcctttcaagtgccctacaccccggaggaggacagcgggcgcttagaaggcaggcacccagcacactgaggaggagtggccgggacgagcaacgggcagtaattctacaacgggacatctaccttcgtagcacagaatgcc

SEQ ID NO: 331694 - DNA, 780 bp, Homo sapiens
  chr3:12045813-12046593
  hyper
cgcccgctccctctccgcgagcctcgcgccgcgcgggttgcctggcccagaccgccgctgctgtctgcggggtctggtgccggggcctgagtctctgctggctaagccgacgcctcagccgcctcagtcgcctcaatctcgccttccgccctcgctctccctccgcgccaccggaccccgtagccccgcgcgcccccagacctttaagccagatgatgaacttcctgcggcgccggctgtcggacagcagcttcatcgccaatctgcccaacggctacatgaccgacctgcagcggcccgagccccagcaagcgccgacgccgccgccccccggcccgggcgccgcctcggcctaggcggcgcccccgaccgcctcgccgggaccggagcggacgccgccggccgcctaggcgcccgcgccgtaagacgcgccgaagaccgcgcccccccccccgcgcgaacaccgtcggtgggcagcagcttattcagctcgctgtcccaagcggtaaagcagacggccgcctcggctggcctggtggacgcgcccggtgccgcgccggcagccgccaggaaggccaaggtgctgctggtggtcgacgagccgcacgccgactggtaggtgccgggcgccttcgccctcgggggtcggggtccgccggcagccgcaggccaggagaggacggtcccaggtcgccgaggaaacgtttcagaccaataaaaaggagggtccccgaggtcccgctgggaggaggtgcgggctgagcgcgcgcgcgtttgcgg

SEQ ID NO: 331695 - DNA, 1308 bp, Homo sapiens
  chr3:12329055-12330363
  hyper
cggtctccccagaccggccctggccgggggcatccccctaaacttcggatccctcctcggaaatgggaccctctctgggccgcctcccagcggtggtggcgaggagcaaacgacaccaggtagcctgccgcggggcagagagtggacgcgggaaagccggtggctcccgccgtgggccctactgtgcgcgggcggcggccgagcccgggccgctccctcccagtcgcgcgccgccgcccccgcccccgcccccgcccccgcccccacccccacccccacccccacccccagccggcgcccgcgcccgcccccgcgccgggcccggctcggcccgacccggctccgccgcgggcaggcggggcccagcgcactcggagcccgagcccgagccgcagccgccgcctggggcgcttgggtcggcctcgaggacaccggagaggggcgccacgccgccgtggccgcaggtcagagtacgggtgcccgcggcgctcgggaaccggctgctggctgggcggggagtgctcagggagggggcgcggagggctggggccgagggtctgggggctagggccgaggaaacgggaactgacggggtcccagacggatgagagctggggagaagggggtctcggctgaggggtccggggctgaggcagggtcatggtccggcaggacccggactgacgggtcgcgggcgggcggctcacgggtgaccgggtgaaggggtcttgggctgagggcacccgggctgagggtcgcgtctaccggagcgcgcactaggggcggagggcgcgggcacagagagccgcggccggtgccgactcgagtggacgcgagccggtgcgtcccggcttccaggacagcccccctcgggagagcgccgggtgggcgcggagccggggacacggggacctccgcgtccccggcggaggtgcgcaagcgtcgggagccgctccgggggaactttggagcagggtgtctggacccggggaagcgaagatccgcgtgcgtccgtcctgaggccgcgcggcacccctgctgaggaggaggtcccgttcgctgtccagagcccaggggcgaccgccgcttggggaccgggggaccgttcagcgaggggcgcgcttgtagctggccaggccctgtgccctgacgcgttgtgctggccctacgcccggcggaggggctggggacggggactgggtgcctccgtgcctccgcggatggagcgcgcagccaggacccccagccgcaccccggggggctggaaaggcgaagtcgctgctttgtgggctcctgcaagtgccaggc

SEQ ID NO: 331696 - DNA, 249 bp, Homo sapiens; identical to SEQ ID NO: 229302
  chr3:13009357-13009606
  hyper

SEQ ID NO: 331697 - DNA, 797 bp, Homo sapiens
  chr3:13324131-13324928
  hyper
cgccaagccccgagggaagccgcggaccccaagaagttcccacgtccccgacacgcccgccgccccgggccccgcttacttgtcgcggcggccgccgagctccgggatggcgccgagcggctgcgggccggggccggggcccgggtcggggcggcgggcgcacgcggccaggtgtcgccggtgtcgctccagcaggccggcgttctcccggctcagccgcgccacttggcgctccagctcctcgatgcgccgtcgccggcgcgccagcagctcctgctgcgcggcgacgatccgggtcagctcctgcaggtactcggccgcctggccggggggctcggcggcgctggccatggccccccgcccggaggccggccgcgcctcaggcgagcgggcggcggggcggcggcggcgcggccatggctgcgcggcggggacggcggctcggcgcggcgcggggctgccgcggccccgcctcggctcccgcctccgccggcgccgcccccggggcccccgcgcctcctgctccccgcgccgccgcgctccgccgcccgctgccccgcggacgcgccggggcggcagggcgcggagctgcggccgcagcgggcaggcgaggagttttgcaaagtgccggccgcggcgcgggaagagggcggggagggcgccgcctgctgggaccgcccctgggtcccgcgcccccgcaccaggcgtcgggggacagctccatccttctccggccgcctcgggcgccttaaatcggaagcgattccgtgaaatacatctcgaatccatcagcggac

SEQ ID NO: 331698 - DNA, 1302 bp, Homo sapiens
  chr3:13460995-13462297
  hyper
cgccggcctgcctcgtctcacttcgcctctgtaaagcggcccctgggcttccctccaaaactcctttcctccagggtctccgttcctccccgcgacgctaggcgctgcgcttcgtttcacagactcacttcccacgccagggcgagggcggtcacagacaaacccgagctggggtcccagactcaagggaagtgcggcccagctgccccggcgccccctcccgggtcaggccggctcgggcccggccggcttgggccctgcggtcccagacgccgctccccaggccacccctcctcccgcacaacccagaacacgcgggtcacggccgccaggctgcgcccgctctgctcgcgcctcagcggcgcggaggcccggacggcgccatgacatgagcagtggtggcgacccacgcgcacccgccgctccgagtgctgcagcctagcgcccagcgagagcgcgccgcgcacctgccggctctgccggcctcccggcgcccgcccagcctctcagcgcgaaggcccagcccggcccacggcgcccgcccggcccggccgcgcgcctcaccagcggtagcagccctccgaggcctccagcgtgaagttaacgcgcgtggcccgcgtgaagggcagcagcactttggggatgttgagcttggccgcagcggcggaggggcccgccgccaacagcaccgacagcgtcagcagcagcagcccccggccccgcgccgccatcctcgccgcgcgtcacctcccgcgaccctgcgcccggccgcccgcgccgccccgttgccctccgctcccgcccgcgcgcgcgccaggccagcaggtgatgagcgcgggggcggggcgagggccgtcggcggccgccgcttcctgggcctgagcgcgggaactctgggggccgagctcgcggcgaccccacccccagcccggccctcgcgcagggacgcggggctgggggatgggcgcgcgcccgggcccccggagctgagggagaaggcttggggcgcgcccgcggggacccctggaccctagaagtcccaagggggagcccccggggcgccccgcagcacgcatcccgccctggtatttgcccctggcggtggagccaagccgccggctttggaccttgcgctctggcccggacccacggtcagcaaggaagggacacatgccccaggacatttgggatgcagaaaaccggcgcctgccttgtcccagcccatgcttcccagaagagggaccccgggctcgcaaagggaagccacctgctgaagcgctgaaggcccggggcccgctcccc

SEQ ID NO: 331699 - DNA, 549 bp, Homo sapiens
  chr3:13590435-13590984
  hyper
ctccgcagcgagcgcgccgggcggcctctaggagccgggtcagcgagtctgggctctgagcgagcggcgccggcccggccccctctccggcgggcggccgagaccccgccccggaggcggaggcggagtcaggggagggggccgggggccggctggtcccgcctctcgcgcctccgccccgccccgcgcgcacacagccaggggccgcccgggctctcgacgcgccgacggccgggcggacggacggacggacgccgagcgcagtgccccgcggtgagtgcacgcggcccctcccgcccggactcatccccgtcggtccgcgcctcgcagctcaggactcgggggcgctcggacgcaccgacggctcggcggaccctcggacgcgcctcgcgggctgcccgcgcctccacccgcgccgccggtccgaccgggtctcgctctcccggtcccagcgcggggacggcccgcgagcgccgcgacccagtgtacagatgcgggcacagaggccggcgcggggtgggggccaggggtccgcgggcgggttccccc

SEQ ID NO: 331700 - DNA, 1973 bp, Homo sapiens
  chr3:13920068-13922041
  hyper
cgcggccggacaacttgcgaaatccccgctccagagacgtggactggggaagtgacggggtaggggggtagtagtgacaaaacacaaagggtctgccacgcacatcccctcgccgcagcccctgcggtccacccctcctcaaaagggatggtaatgggttcactgctgggggctggaggggcagggtgtgtgagacctaccaagcgggcccttcagcgccagaacctctatccatgcccagatccccccgcccccacaccgctccgagcctcacacgcgttgtcttaagtacaaagggtgaccggctttgcacaagcagctccaggacgcgtcccgagctgccccctcccaccttccagccagagcgcccccgagccccacctccacagaaacgctaggtgaagccggagggctgctcgcgcgcccggccgcctctgctgcccagttccagggggcggggtgtcccgcctctctctagcgcttgtctccctctgtgtctcagaccgcctctcgtcccacctttgtgtgtgtttgttgggggtgggacgtgctgtccccttggcccgggaaggggctctgggagtctaagggcccctggaaattgggtggtgccaaggctccgagcggcggtttatgtttttgccagcgaatgtccttcctcctgggtacctgttccctgtttgcacggaccggccccgccagccacctggggactgcccagtctctaggaacggctgtgccgcgcctcctgagagagttcgtctcgggctccggggactgagctccccgagattggctgtggtcctggcttgatgttcctgctagacctgctgtccctatgcccgggtccgaagggtccccgggatgggctgaacctttgcagcagctagccctcccccagagtccctcaggctggagcgtccctaccggctgtctctggtcctgggggattccagactcagacgtcctcaggatggccagtccccctgcctatatctcctggggtgtcctgcggggggcctttgtgcgtccaccgctcccacaccgcacccacccggcctctcagagaagctgtggaagttggccggcagaggctcgcaggcggcacacctccctccccgggccgtgccaactttgtcgaaacacgcgcggaaagggcgcaggcagcccttacccgatccggaggtagaccatgcccaggctgagaaagaggtggcccaggcagcgccgcgctttccggttcatagtcccgattggccgccggggccgcgggccgggctgtgctgatcccgcgggccggccccggcggggcaatcaacatagcccgcccgggaggcgcgagccgaggcgtccccggggccgtctgtcggtgcgcccgtccgcgcgctccgcgcctgagcctcgccaggagcacgggagccacggagcgggaggagggagggaggagcgagcgcggcgtggggcgacgccgggctgcgcgcgagcgaccggtgcaagtgtgcgagacgcggggagtgcgggggcgctgctgcctccagcccccgcccctccctcctttcccccgtccctcccccgccccctcccccgcccgcctccccggagcgcccgcccagcgcccctgcgcccgcgggacagggccgcctgcacaaggcgcgcgctcgcgcctttccatgcgcgctcccgggggccccctccctgctccggggtgcaggtggcaggctggggagcacagcccggttggaggcggtaggagcccgctcgccccccacccgtcactaacttgcagattgcagggcgagtgggcgtccagaggctgccctcgggtggagtggaccagactcggccgagaggcctagtgccttggtctgctgccctgctccctccagcccggaacagggagctggggctgacagggcacaccccagttccccaaccccagcttcaggggagggcgccccctttcgcggagcgac

SEQ ID NO: 331701 - DNA, 632 bp, Homo sapiens
  chr3:13936742-13937374
  hyper
cgacgcaacccgctgtgggccgaaacgggagctaagccagatggaacaaacgacccccaacccgagcccggcggggcgaacaggacatcccgcgttgttccacctgccaaagagggcgagcgcgcgggccgatcggagcagagcgagagggcggggccaagcggagcggatggggccaagtggacgagccgagggagtggggcgcagccgaaagtagccgagtgaagccgaacagagacgaggcgcgggtcgggtggtgccaagcggaaatgagtggggccgagcggggcagggtggagccgagcggagccgggtggagccgagcggagccgagcgagtgagaagccggaggccgagagggccgggccgacttgaagaggtggggattgctgagggctggtctgtcggctctggaaatcctgtcatactgtcacttttggattccgccgtttccgtcccaacggaaaactggggctcctggattcccctgacccgagttgtaaccaccgacgagaatctttttcactggcggcctcggcgtcggcattttataaaatgagagcggggagggcggccgaagacgagtgtgcggagccttaggccccccgctcgggtccgcttttcgtatattc

SEQ ID NO: 331702 - DNA, 92 bp, Homo sapiens
  chr3:14443834-14443926
  hyper
cgcaggcaggaggcgcccagggcgggctgccgcacctggcaacgaacgttcgccgcgcggcatgagggtgtgcgcgcgcgctcggcgagccc

SEQ ID NO: 331703 - DNA, 578 bp, Homo sapiens
  chr3:14443998-14444576
  hyper
cgcgtgtgtccgcacttggggcggggctggaagccccggccccgccccggccccgcccccggcccggccgagctggtatttttccacccagcaggatgggtgatgctgagagctgcctgctcagacaacagacacgcgaggtcaggaagaagccgcttataaattaccgcttccttcgcgccgccgccaacgccgagccccgaggaccgcaagcccagaggacaagctgcgccaagagggagtgctggagctgttcacccagcgggtcagagagcgagccgggcaggccagcccccggccggcggaaccctggcacagcctgagcagatgctgcgggcggcgccgcagccaccccaggtaccggagggaccgggagctgggcgcgcagccggcgctgcccgccgtctgcagcccctccccatccccgcgtcgccgcagtcccggcctcctcccctccgcgtgcgcccatccggcgcccctttcaccaccgcggaagggaccgagagtcgcctgctcagtcccgctggcggggctgttattgtttccccggcaaaagggctccggctcttggtgcgggc

SEQ ID NO: 331704 - DNA, 788 bp, Homo sapiens
  chr3:14644015-14644803
  hyper
cggcgggctggctggagggagcaggtgaggcacgtggccgcctcgccaagccagggctccctccaggagcccgacccgccggccgggccggtggatgccccctcgagggctcagacccttcgctccagcccccggcgggcgccctgccccgggtcccacactcccgcgccccgtgggccccactgctggctttccgggaccaggctccgctccgcagctcgcgtcctgaggtgatcctccaggctccccactttgggaccccctcctgcgcctcgggtgccggcgcctgtcttcgcctcccgcggggaccctccccggcgccccaggcgtgtgcgccccgggccagctcagctctgggtccgccctccgcaccccgcgccgcgcgcgcgctcaccggccgggcagcggccgcgtcttaccttcgtccggcagccgctgcaggcagagcgcgaggttcctccgccagccccgcatccccgcggccgccctgcggcccggcccggcctcgccagcccggccccggccccgcccccgccgggcagggcggcgcagcgcagcgctggggagggccgcgggcccagggagccgcgggcatggacggccgccgagggtgggggtgccggggcggccgccaggcgctccgctccggctcccgagcccgcggctgagcagctacgcttttcgagcgcgcgctttcccgggcgccgggggcgggatggcggtgggggcgggcgcggagaggacggctggaggggagcccgaaggcgccccagccgtctcgcaccctc

SEQ ID NO: 331705 - DNA, 802 bp, Homo sapiens
  chr3:14851851-14852653
  hyper
cccccagcgcctcccgcggtgcccatggccacggcccctttaaatgtgcgcagggacgccccggccctcgcctccctgaatctctgaccgagcaggggaaaaaaaaatccttcctcttcgggagcggaggaaatgtctaggagggggtggaggcgcggctgcggcgcaggcagaggcgcaggcggaggcacggcggccagagcgcagcgcgcccggagccgggagcggacgcgacgcccggcgctgccccagccgccgcccccgcgctcgcgccccctcctcctcccccgccccgcgcccccgcccggcggccccgccccggaggctcgcggctcgcgcccccactgccctgcgcgccgcgcggagtccgaggcgcgccggggccgggcgggcgccagggggtgcgggccccgcggggcggccgcggagggaggcggtgtgcggagtcgcactgggacccgcggacggactgaaacgccgacggcggcccgggccccgcgcgctgaagatgaacagagcaggtaggaggcccggcgacctccggcgccgaggcacgagcgcgagggaccccggccgggcgctccaagttggagctcccggggagcccggggctagctgcccgaaatcctccgaccttccagtgccgctcggcctcggccaaagcatgcgcggctccggggtcctctcgccgaggaggctgagaaccgggggtccccgtccgaagcgccctgcctcagggaccttctcagccttggcgaggccgcgccctggccgtgcgcgccagtatcccactcgcacggcg

SEQ ID NO: 331706 - DNA, 1895 bp, Homo sapiens
  chr3:16553609-16555504
  hyper
cgtaacccctctctggggtttggtgacatctggggtcacttgaacttcgttgggattcagctgttcagagatacaaattaggaatcccggcagcagagaggccctacccacaggcccagaggtcgctcacattacacccggcttccttcctggcaaggccttaacttatcctgagatgacacacgatggcaggggttggaagatgcctagtctagttgagcgcccagctcctgaaacagctgtaccgactacaagggttccagcacatgagttgctggaaactggggtgaccactgacagagattgagccagactttttttttaaaaaagtacttcttgtttgtttgttttaagcccccgaagaaactcactgacaccacccagcgtccctagggatcacccataaccacacagggcagctgagggcaagcacagagtcacagacagacagcagggagcgtgcctggttctacaaccttggcctccacgcggttcttgctgccaaaggcagcgacaccggaggtgaagggcaccagccctggcctaggactggggtgcgcgtgcctgacaacggggcttcccgaaatacacaaccacctcctcctcgcccagacccatatccatcctggcgtcccttgagtctagagaagtgggttaagacaagggaagaaaatcccttacagaagaggagatccccgttttcagtgctggggactctcggcacccgcgtccctgtgcttctggtggttccggcgcttcctcggagcgcgcggcatgtctgctcctacacgtccagcacctctgtccccagagcaaacccacctcccagggcacacgcagaggggcagtcaggcaccgcctccaccctgccccacccaggccgcgcgcaccccggaaacctggactccgcgaccagctccctcctgttcttttccgaggaccccagcggcagtgtgtcctggacccacctgtagcctccaagctcccccacctctgcgtccttcctaggcgcttctgagcctgcagagcctacgacccccaacaggctgctccgaagtgcctctccctacatcgctccaggaatgactcccctacacccgttccccgcaaaaaaaagttggcccaagatccaggcgtcccaaggatcagcccaggtccccatccgacgcgggccagggggtgctgctctggcagctccggagccccggcaaagagcaacctgcagggaggcgccacgcgcggttcccactacccgccagagacccggtccatggggccaaacggaggggcctgtgccggtcgacaccccaagccctgtcgcgccccccccgccgcctaccgtatgggaccggcggaggagaaggcgcggtcgcgggctccctgaggcagcgtgttccgtcccgggaggaaagtttgtgccatacagaggaggcggcgcggggaggacttgggcgccggtgggtggaggcgtgggcggtggcgccgcgtggtcgtgtgtctgtccctccggcgatcggtgcgtctgtccctcgccggagcccgcggccgccgcgctctcgctcgctgcgcccagcgcccggcgcgctccggctccagccccgacgcgcccccgccgccgccgccgcgcgtccgccggctacacttcctcttcctctgaactcatgtgcaaaatatgctacgctgcatcttcagggaaagcctcgcggcccctgacagcagccgctggagcggtgggcccgcccagctctccccgcgccccctcggagttccgcccggtcacctccacgcggccgagctgcaagcgaccctggcagcctcagaacccaggggtcaggggctcatcgatcctccctcccagcccctcctaatcaaggttgtgtgctgtcaggaagagc

SEQ ID NO: 331707 - DNA, 927 bp, Homo sapiens
  chr3:16925426-16926353
  hyper
gagatcctgagccccgggacccttgttccgggccccgaggcctacttggtagttgcccctcggggttccgggtgggtgactgacagttgcagcagctctggggaggcgaaggataggcaatgacttggggctcccgtccactcggctttgaggtccccgcggcccgatgacccggcctcggtgacagcagccgcgacggcggcaatctcgacagggagctaggcggctcatggtgggtcagggggcgaccgaggagggaccacgcggcctgtagggggcagcgccgagctcgggaggagacagcagccggcgggtggggtgggtctgggctgccccctccgggagctgccccggggccgcacggcgattgtcatacccggccgcccctgcccgccgtgggcttcctctcggcgccgcgggccttaacggggctctgaggggacgtgacagagctcggcacgcggcagcctctggggagttagggtccggagagacccacgcgtcgccccccgcccgcccggggccgggagatcctcgggagccgcctccgcgtgtccagagagtgtcggggcggccgccacttcccctcgcccttcgccggaggtgggcgccttttcctgcgtggcgggtgctccgaccccagttgctctgagccccggggaagcgcgccccgagcccctgacgtgggcgccccgttacctcggggtgggtgcctggggcccctgaggtgggcgcgggttgccccggggtgggcgcccggcccgcgcgggttatttttggcgcccgcagaggcgcgtgtgttggggcgtgttttccttccccaggtgccgagagccggggctccgccggcgccggagctgactcgtctctctcttctttcccctgcaggaatcttccgataattctgccgccgcgactttaaccgtg

SEQ ID NO: 331708 - DNA, 337 bp, Homo sapiens
  chr3:16926666-16927003
  hyper
ccacgggcgggcgcgctatgacagcggcggggtttccaacggagactgcagcctcggcgtgtccggggacgaagcccgggctagccctaccaggggaccccgcggcgttgcgctcgccccgacccccagcgcggtcgtctgtaccctcccccgggagagcaagccgggcggcctgccccgccggagcagcatcatcaaggtaggtgggagaagggcgctcatcgcccaccctcagccgtccttggattctattttctccctgggggagtggtggtggaaggaggaagcccactgctaacaggaaccactggagcatgggtgcttggggtggttgagc

SEQ ID NO: 331709 - DNA, 104 bp, Homo sapiens; identical to SEQ ID NO: 229334
  chr3:19189374-19189478
  hyper

SEQ ID NO: 331710 - DNA, 627 bp, Homo sapiens
  chr3:19189679-19190306
  hyper
actggctcccggggcgtgggagttgcgctcgctctcctttcccggcgtcccgtggagaccgggaggctcagcgcctctcccagctctcagcgccgccctcccagaccccagagacgtcggtcagggcgcggcgccccgggccactgcgggctctttccgggcgggcgacgtggggggcgaggcaccgcgcggcggcgcctggcgggcactgttgcccgcggagggacggtgggggggtttcagcagctggcgggggtggagggggcgggagagggagcctgcgccgggctgagcctggaggtgcggggcgggctcggggagcgctcttggggctcctcctgccacagccggggcggctggaactctctccctttctccctccatccttccacttcccctgctcggccccgccgtcaggccgggtcccccttccctgccgtcatcaggttccccttctcccttcttggcactttcctttcgaaccatccttctggacaaactttgatggagaatttcacaccacgctggaaaaatgccggttatgaaaggattactggcgccgcaaaacaccttcctggacaccatcgccacccgttttgacggaacacgtaagtcttacacttgaac

SEQ ID NO: 331711 - DNA, 269 bp, Homo sapiens
  chr3:23957838-23958107
  hyper
cggcatttcttctctaaaacattcacacctgccaaacaggtcttggcaaataaacattctgctcttctgaaaaactgtggttctcatgttagcaaatttgggacgaaatccgtatgcagaaaaagcgccgggccgcccgcaatccacccactccatgacccttttttaggacaaaatccctgggcgctggggcctgctggaggagcttcacgcagtctggagctgaagggacacagcgagcgccccgacccgcgacgccccgactccgc

SEQ ID NO: 331712 - DNA, 989 bp, Homo sapiens
  chr3:24536360-24537349
  hyper
cgcagtctccaccctcctccgccccctcctcccggcggcggggtcccggggagcgccggcgactgggcgtcgcgcgagtcctgcaaaatgtcaactccttgggcgaagagaggcggccgcagccagggccgcgccgcacctccccggtctctccacttttataggcgtaggaagctactgcggctggggcaccagagtccccgcctctccgggtcccccgcgtgcccggcccgccccggcccgcttcccgggcgctgtcttactccgggcccggggcgcctgctccgcgccgcgtctgcgaaccggtgacctggtttcccctccagccctcacggctgtccgacttgcgcggcggtggcggcggcggccaagagcaggcaaacccggctccgccaggggcgcagcgaggaaatggcctcctggcgcacaccccgccgccgccgccagccatcgccaccgccccgggctgcccagccggtacagacgccccctgccaggctccgggccagcgctccgacgcgctcacagcgcccggcttgccgaccccgaccccgaccccgagtcctacgcactcgaggtccccgggccggccgcctccgcacctgcctccccaggtgtgggcgctccccctcctcctaatcccggccgtgccctcccagggttggtgacggtgctgtgggtttggtggccgcgcgtccacccacccgattgcctgcgcgcataggtgcgggtttgggcgtcattactctagttggagaagaggaaagaatggggaacgagtgacaccgggaccggagggcgagtcttccaggagcacgtctcggccttctttgcccggcccgaccggcccgacccgtgccgcagcgctcctccctccgctcctaaaccacttgtggcgcgtgtcgggaatacagggcgctctggctcttcttggggcctccgctggtccgaccatctggcagctctcttaaccaccacggccaccccac

SEQ ID NO: 331713 - DNA, 940 bp, Homo sapiens
  chr3:24870654-24871594
  hyper
ggcgcggccgccgccgcctccggctcagctcacgcggaaaccccactgggccgtcgtggctccgcgcggttgcgggccagcgtggagaggcgggacgtggcgcccgggggcggggcctggcgccagggggcggggcgcagcgagccgggctcccgctgtctgctctcagcggcggcggcaggggctgagggcacagccagcgggcggcgcgccgcggactccaaggcagcccgccaaaaggtaaagccaggagagcgcgctggcgggtcttcctgttgggtggctgctgtccaagcccctagcgtccccggagccccaagctgggtctggaagaccagggcatttgcatggcatccagggaccggctgcctagcagggattttgcgtgtaccgcggcggggccgggggctgggggttggggggtctgcagcgggagcccgcgaccgatcccaggacatctggactcgcggacaactttgcgcagcagtcctcttccaagttccctttattgctattgtcttagcgcctgtctgacagtctccccggactccagctttgttctcattaggccaaacccgccctccccaggggcgtgaacccaggagtcgctggcaagttgcacctgccagccggatccgccccggctcccttcgcgtccctgccgggtccagcgctgtcctgcgcaccttagggctgggcacggcgaaacctggcgcccttgggagcagaggttctcgctccattcccctgtggggatctaagctccaggccggggtgtcggacctctgggttgcagcatgctttggggccgaagaaagggcgagaaaaagtttgagcattggctgggcctagggagcgggtagcgccaggctgcacatggcaggagttggagaagagtactaggggcttggcgccggacacagggacgcggccagggacc

SEQ ID NO: 331714 - DNA, 636 bp, Homo sapiens
  chr3:25469368-25470004
  hyper
cgaggcggtgggcgggaggcgagcgggcgcaggcggaacaccgttttccaagctaagccgccgcaaataaaaaggcgtaaagggagagaagttggtgctcaacgtgagccaggagcagcgtcccggctcctcccctgctcattttaaaagcacttcttgtattgtttttaaggtgagaaataggaaagaaaacgccggcttgtgcgctcgctgcctgcctctctggctgtctgcttttgcagggctgctgggagtttttaagctctgtgagaatcctgggagttggtgatgtcagactagttgggtcatttgaaggttagcagcccgggtagggttcaccgaaagttcactcgcatatattaggcaattcaatctttcattctgtgtgacagaagtagtaggaagtgagctgttcagaggcaggagggtctattctttgccaaaggggggaccagaattcccccatgcgagctgtttgaggactgggatgccgagaacgcgagcgatccgagcagggtttgtctgggcaccgtcggggtaggatccggaacgcattcggaaggctttttgcaagcatttacttggaaggagaacttgggatctttctgggaaccccccgccccggctggattggcc

SEQ ID NO: 331715 - DNA, 736 bp, Homo sapiens
  chr3:26665223-26665959
  hyper
cggccacccctgaagcttcgtccagcgcgatgggagtcagtccatccttgcacacgccacccccaactcggcaatgaaacctttggagtggcttgcggctgtgcgccgtgggaactgcaagtgcagatatgggtgggtgaagtaagtggctcagggagggaaaggctgctcgtgcggtggaggaggaagctgagggtcgggtagatctgcccacggttgagggaaatgaaaaggtactgctaatgtgggcgagcggccagccctgagaggccatctgacgaagaggaaaagggatttgagtccggagggcgctggcctgggtatgtaaatacagatgggggaggggctgggtacctgggggcgcgtggagacaaggaatggagccccggaatgccgggcccttgggtacttgggaaggcaggctgctgagtgcctgggatggggcgatcttcctccccagaagcaaacaaacctccccgcgagaatctgaatgcgttggcatcttgggtggtgactgaatggtcagatcgtggactagggatgcttctccaagctctaagaggaccatagtctgctctcttctctggcacccgcttgcttctacgctccttcacctctgcagccaggtcggtagacccacgcccaccttccctgccaggcactcaggagtcaaggatgtttccacagccgcagtgtaggaaggggactcctgcctcccagggggagacgtgtgtgc

SEQ ID NO: 331716 - DNA, 749 bp, Homo sapiens
  chr3:27410391-27411140
  hyper
cgtcggagcagattggaagagacacattcaggctccatttaaccagaataattccgttatcaaaatggaagcgccaagaagcatcgttgatggcgctttcccaccatccatccgtccaacacaaacccacctgctttgaaaagactgcctcacgcagtgactcacttacccaccacagccgcattctctacctctgcctcttgtctagtgaagctggctcccgaggcttcggggccgctccacagggacctgaggacgtctccccggagaccctgactcaagctgctcgccggcacagccgagcaccggctcccgcctactcaccgcgcgggagggacggtccctccttcaggccaatctccttatcattgtccctgctgctgtcacctgctgctgcagaccgggggtcccgtccagtctcagcccgtcccgtcctccccccagcctattcccggtcccctcaacctcagggacaccgcggccagctgcaccgttggttttccaatcaaatcctcctccaggccaccaaccagcgctggccaggccaatgccgacaattcttcctccgccacctggggcgcctcagccaatcgggagcagccatgctgcgcagtgcagaacgccatagcgacggatgacgcctgccggggaatcgccgtagcaaccagagacgcgctagatccaccaccaagcttgcaagcagaagaggcagcaagtgatgctgaaggctgtgctgcagccacttcacc

SEQ ID NO: 331717 - DNA, 1318 bp, Homo sapiens
  chr3:27754023-27755341
  hyper
cggcggcggtcagagatccatgtgacgcgggggcactttagggaccattgctgagggcctggttagcatttgggcagctgaatccttcccttggcgaactccatacgtgccctcggcgacacacagaggactcccagagttgaagaagggggtggatgtgtgtgtgcgcactcgcccacgtctcgtgttttacttttcatttaagtcgtaataaggagaaattcgatgaccagcaaggctggagtcccatcgtcttgttgggggagaggggggagaagaaaaaggtgcctgtaacttcagactgtccaagatatcgcttagctcctgcgcccggaagaaaatccagcgcaggtcgggttccggcgcgcggaagccctgcgaaccccaaatgtgtgcgctgagccgaggcctctaagcggtaggagagaatctgacctccgacattcttttcaagacacgcgccggtggaccgggtcctgggattggcttactcccgggctggaccttggggttcgcatatttgaaagcgtaaacttgaggaatgacggcggggtgatgggtattttatagagtgggactcaatcgtgctcagcaacagatttctccaaattcccttttaaaaagagcctcccagagctgtcgaaatctccgcggggtgaaagctaaacttttggagtcgctgtgtagccgggtagaggacacggcggcgcgagccggaaagataagtgtccaggcgaatgggaaaggaaagatcttaatttttgttcctactgttagctgaatgtccataaaaatcaaagggaatgcggggaagtttttattccagagcgtttccatgacacccgcagagatttaaaaaattacattcctccccctacgcaggtttaattcggaaagaagagactgcagaggagagggaagaccgtgagtctgctttcacctaggtttaaagcgaatcaaagacggctgtaaaaagggaaaccgggaccaaaaacagatttggagcctcgaaactctccattgaaggtttggaagatacgttgctgcagacttgaaaccggctccaaatccggcccaaacatgggctgaaaatatggcgcgctaatctgctgcttcccctcctcctcaagttctttctgactcttcccacctttcccagtttcccttccagacgtctgcggctccccactccacccccaggatagctactctacatcccgacaattcccagcttctacacccaggaggaggaattctggaaccacccagagcgaactcgtgccggggcggggtggggaccggaggaaggtcctgctcc

SEQ ID NO: 331718 - DNA, 826 bp, Homo sapiens
  chr3:27756316-27757142
  hyper
cgggccccagagggacggaggggaagggagacaggacagtcgaggtacaaggtcctggcggccttaattgggcgcagaaggggaggaggtctcggctgattgctcgcctcccagcagctaatcctcttagcagctgcatttccgcgctacacagttagcagaatgatcctcccagctagacctttaccccgggagggtccaggagggggctggaaaggtttgcaatctgggcctgaagccgtctgcagataagcctggcgggacgtctggctggggggacaaaggggaccctccaccccactctttggacctcccagggttcagccaggggatgggctgtccttcgtcttcccgtggagcgtgggccaaataaacggaactaagcgcaaggtgaactgctccaaggtcactgtttgcagagcggcagtgcacggaacgactggaatcctcctttgtaagtgccacgcccgtccctagcctgcgcctcagaccgagtccgggcggagtttgactgcagctactgaggccggcagccggcggcggcgggtgcgcagcgtctgggttcagaagaaagccgcaggtgggcgcagaagctgagctgtgtgcagccccccgctccgccgcgccccagggaccctgaactggtgggcgctcaaagggccacgggggttcccagggagcctaggtgggcctaaggatgggtggccccaagtaagcctagaaaaaagcccagagaacttagtggccaggcgctctgacagagcctggtctccaagagccagaagcggaggttttcgaggcttggttaagtctgatgtgggcaatc

SEQ ID NO: 331719 - DNA, 1664 bp, Homo sapiens
  chr3:27762351-27764015
  hyper
cgcgcaccgaacccgagccaggtctggctccagggcagatctaaccacctactccgaccgagcttccgaggccggcgctctagccttcatgcccacctcccggagacgccccgtggagaccctggcgcctaaaactgcgggagcccatctactgcgctcaggtggccagctcttgagccttccctatccgtggctccttgccggcatgcaggcatgcacaagcataccgccgagcaggaggatctaacgaatccagcttgtggacatgccctaatttccatttccgcctcctccaggtctgttcaggtgaggatgatgggagggaaaagcggtgtacagccgtaacattggcaccctgcaagagccgccggggcactgacacagagggacaccgcattggagatgcggtgtctacggagatttattgcgcgcggtgaaacactctaagcaccgcgcggaacaactgggttcagctccctcatcccggaccttccccaggaccacacgtcaccctttatccccgaacccaggggcccctccacgctgcgctcacctgccctgtttcgtaatgatcatctcagtttggtggcggtggaatttgagccacagaggccggttgcacaggtagacgtgggcacggaagccagaacctggaacccccaggccccccagtcctccgcaagatcccgccgctgcggctccagggtacggcccgtagagcggagccccctggctgtactgataggtgcccgggccgccgcccccgccgctgctaccgcccgcgccactgcccgcaccggctcctgggccgaactgcgccctcccgggtgggcacacagccgcggggaagccgccggggggcagcatggagccgtaggggtagcgcgccccgttaggagccgggtacacaggtccgtggggcgccccagccgccgcctggtacgggaagagtgagcagggcgcagccagctccgacccctgaggaccgggggactggaggtagtaccgctcggagctcaggctgtccatggagtagcgcgcagtggccgcagccgcggcggcggcggcggcggcggctgcagcggcggagggcagctcctcctccccgcagggggagcccttgcggccgtccgggggccccggcttggccactgccgcagcgctggcaaatgcgtccccggcgtcggtgtcactaagcatggccgcgggggcccctgcgctggcggctgcgggctccccgctcaccgcctcgcaggagagactgccggaaaacttcttggacgctttgtctaagtccaacttctgaggagagggggccgcgctggggaggtggccagcgctcccgccgctgccgcctcgcgcactctccagcgggtagaagtgcgcgccaggcaggttcactgagctcaccaagagctgctcccctaactgcatgctttgcaaagcgcagacggcagctggctgcttcctctcctccggtggccttattataaaggcaggatgggggagccagcgccctcttccgaggggaaggtaacttccccttcctcccgcgccggggctacccacctgccgactcgcgggccgctactgcgcgtactggcgcgccctgaatccagcgtcctttccggaaggaaagcgccgtgagttggaaagcaggaggt

SEQ ID NO: 331720 - DNA, 40 bp, Homo sapiens
  chr3:27764913-27764953
  hyper
cgagctaacaccaacttcatactcacgccaacacaactgc

SEQ ID NO: 331721 - DNA, 635 bp, Homo sapiens; identical to SEQ ID NO: 229355
  chr3:27765182-27765817
  hyper

SEQ ID NO: 331722 - DNA, 157 bp, Homo sapiens
  chr3:29322332-29322489
  hyper
cggcagcagcgttgctgcaaaaatcgcttgctattcgagatagccagcagagggaatcggaactttgcttgcagcaggggttgaagcagcctttttttttttttttcttggaggaaatactgcagccttctggactgcgtacgctgctccctggaga

SEQ ID NO: 331723 - DNA, 243 bp, Homo sapiens
  chr3:30648808-30649051
  hyper
cggcccggagcggcagcctgagctgccaaagcagccagcgcacctgggccactccgcccatggcgatgccgcgtgcccacccagctctttctgagccacccgttcaaaaggccagctcctcagtccttagctcctggagacggccacgctttccctcaggccggcttcttggcccggagtttttggaaacaagtttcaagaaaataatcgatttccaaaagaaagttagctggctccactgac

SEQ ID NO: 331724 - DNA, 239 bp, Homo sapiens
  chr3:32279487-32279726
  hyper
cggcccaggcgccgtcacccaggctccaccggtccgcgggacagagccgcggagagcgcctggaagcgtcgcgccctcaaagccaagcgattaagttggttcctcaaattgttcccgacaggaggggcaggaaataacaccgggctctggcggcggccgcagcaggagggggagaagagcgggccgtctcccgggcagtgctggcggcctctcatcgatctcgggtctaaggtccggcc

SEQ ID NO: 331725 - DNA, 1095 bp, Homo sapiens
  chr3:32433054-32434149
  hyper
cgcagccgcacccacacaaaatcccaggaggctcagtaccagctgtggtccgggccttgcccacctcggagaggccacgacccaaggcatccggtttcctctcgctccagtctaacttccgcgcatctacgagggccgggactgccgctacctttctggaaggcgccggccggccagtcaccggagggatcccgccagaggcggctccgcgtctccagcagcggggcagggacccgggcgccccgccctcgccagcgcccgcccccgcccgcccccggcccgccctctgtatctggcccctgggcagctgcccggggaggcggccagcgagctggggccgcgcaatgtcgcacggagccgggctcgtccgcaccacgtgcagcagcggcagcgcgctcggacccggggccggcgcggcccagcccagcgcgagccccttggaggggctgctggacctcagctacccccgcacccacgcggccctgctgaaagtggcgcaaatggtaagtgagcgcggggcgcgaggccgaggttctacagggcgtcccgggaaagcaggggtccgggagcggacgcgccgggcgtctggacccggccggagcccagggagcatcgcgcagcgggcggggcaccgcgtcgctaaagttcgcggcaggcttcctccgggaaagttgctgccgcagcccccgcgctggagctcagtccccagagccgccccggcccttgctcccgcggacccaggtcgccagggtcgcaagtttctccggccacccccctgcgaagcctgacccgcctactgactgaaaccacgggcaaagttccttttcgtctttcttcctcttctctgggccgcgccgcttcgaacccgagccgggggtggaagagtcgcccaggcggcggcgctgagggagcgaaacccgacctcttccccgtccacggcctcctctttcctccgaacccagcgcggcagggcttccctgctctgtgtgcagtttcgctcgaaggaggaggtcagagggtcttgtgttccatagtggggaaaaagaactgggaccgttgagacggccgtcctggtcccctgcgccctcaagttcc

SEQ ID NO: 331726 - DNA, 1317 bp, Homo sapiens
  chr3:32857733-32859050
  hyper
cgtaaaaagaaaaaaagaaaaggtgggtaaaaaccgagatctcccgggcagtggatatgtctcggttgagccagggattcagaatgaaatcttttcttttcttttttaaataaacggaagagtcgttctctgctcctcgctcagaaggtttcaaaggtcgtcacactgaagcccgggggcgttcatctccccagcggccgggagaagggaggaggttggagggcggagggagggagcacacaaaagcgggccgtgctgagagggctaatgtttcctgtttgcctggagccccctcccctgcctcccctcccccagccccctcccagcactcgggcggaagtgagtttgctcctttggagattaaaaggattccgaattccgatcagtcccaataaccggcgtactgaagagaagaggaggaggaggaggaggcagaggcggcaaagcagagaaagagggggcgcgcgcgcgcgcacgcaacccgaactgggggagttgtgcaaagccccaggaggccggggcacggcgggagcaaagctcggtaggcgcagcgcggccgaggccacccgcgtccggatcggcgactcctttcagaaagaagatgacgcgggcgcgagccggcggcgttggccacgcggctcccgagctcgccgcgcggggctgttgccggttccactgattccagcgcgcccgagaggagcctccatccccgaggctcgggatcggaggggggaccaaggcgagggcgaaatggcccgatgacaaaggaaatgtgatcccccttctctgccaaggtttcagagaggacggacgtgaggaggaggaggggcgcagggcgcgcgcggagctcggatagcattgcacgacggcccgcgcggagcgggtacatctaatatcttcctgccgatgaataattcagggcggcccgcggggacctgcggccccgcgcgctaagccgaaggggaaggagcgtgcgtgaggcgcccaggccaggcgaggcgggggcacgagggctccgggccgcgtggggcgcgcgtgcgtgttaagcgcgggcagccgcggcccggctgggcaggcgcgcggaagactcgaggcgcgtgggacgcgcgtgcgtactgcacgcgtgcggccgcggctgggccaccacgagctgcagctgctgcggggcccaccgccctgcaggggaggccgtgcctggctgtgcgcaagccccaagcgcagcacgccgggccacccaggagcccctggccgccgcgtcatgcggcggggcagccgacgtcgcgcggggagacaccggcttggcgacgcaccgctccc

SEQ ID NO: 331727 - DNA, 818 bp, Homo sapiens
  chr3:32859579-32860397
  hyper
cgttccccgagaccgatttccagatctgcttgctgtgcaaggagatgtgcggctcgccggcgccgctctcctccaactcgtccgcgtcgtcgtcctcctcgcagacgtccacgtcgtcggggggcggcggcgggggccctggggcggcggcgcgccgcctacacgtcctgccctgcctgcacgccttctgccgcccctgcctcgaggcgcaccggctgccggcggcgggcggcggcgcggcgggagagccgctcaagctgcgctgccccgtgtgcgaccagaaagtagtgctagccgaggcggcgggtatggacgcgctgccttcgtccgccttcctgcttagcaacctgctcgacgcggtggtggccactgccgacgagccgccgcccaagaacgggcgcgccggcgctccggcgggagcgggcggccacagcaaccaccggcaccacgctcaccacgcgcacccgcgcgcgtccgcctccgcgccgccactcccgcaggcgccgcagccgcccgcgccttcccgctcggcacccggcggccctgccgcttccccgtcggcgctgctgctccgccgtcctcacggctgcagctcgtgcgatgagggcaacgcagcttcttcgcgctgcctcgactgccaggagcacctgtgcgacaactgcgtccgagcgcaccagcgcgtgcgcctcaccaaggaccactacatcgagcgcggcccgccgggtcccggtgccgcagcagcggcgcagcagctcgggctcgggccgccctttcccggcccgcccttctccatcctctcagtgtttcccgagcgcctc

SEQ ID NO: 331728 - DNA, 1054 bp, Homo sapiens
  chr3:33259728-33260782
  hyper
ctttcacgtcttcccggaccaagccaaaatatccgagggagttttctaaccatcggcggtgtcctcaggggcacattaatagacgttgagaaactgagggacggcggaaaatcaccccttagcagaggaggttctagggcaccttagaggtgatttcattcgagctttcttggagaccttaggaaagccagcggcgggactgcgggacctacgcgctcggcgctaagggagggtccaggcaccaggcgggcgtttgggcgcacgggcacgcggagacttggtgggccaggagagggatgctgggtcgcaggaccgcggctcgttcgttcctctcaggcttgcgcttgccgcttgccgggccggtcagagggagcagccccggcgagctacgccctccctgcccggaccccacgctccaccccccgccccgccgcctcccgcacactcaccatccgcccgcaccgaaaggcgcggcagaccgagcaggagcagcgccgccgcccagagcccggggaggcgtctgtgccaacgggcaggcgggctgggtccctcggcagtcatggtccgggagtgcgcgggccagcggactcgggtgagggctctggctgcgtttggggttgcccaggccactgcccagcgtgcgccactcggctctgcgctctgcgctcggctcacgaatcgcaggcttcgcgccgggcgcgccgagagggaggagcgcggagagccgggggaggctcgggacgcagagccggagcgcctgggccgccgaactcccgggggtcttctctgtggcgccgaggaggcggctgtaacccggctccgccttcgcgctgggcacctggaaacctcggtgccaaaaggggctgcgctgggccgcgcgctctgcgggtacagcggggcggagggcgagggcgcagggaggcggggagagtagctagccggccgcaaggagcccccgcccgtctgggggacccttggcgagagggtgacgcagtctgacaggcggagcccctccggcagggccgttagacaacgagtgtctaactctgtcctc

SEQ ID NO: 331729 - DNA, 983 bp, Homo sapiens
  chr3:35680722-35681705
  hyper
cgcgggcgcccggcgcacccagcaggtgccatcactctggatgggccagttctggatgctcccagtggcgcagaggcggcgacactggcaggcgtccggctgccgccacctcccgggtgtggcgggtctggggcccggggtctccggccagagcagctgtggagccacgtgcaacacgcgcgttgccctcagcccgggcggggaccggacgcatccggagctgcggggaggagccgggcgccgcccccggcggcagtgccagccgcgtgggagggcacggaccggcggaggggcagacgacggaggcggccaagctggaggaacgggaccgagggatcgaccgaggctggctggctaggggtgggactggcagagctacggacaggtgggagcagtcagacagcctgagagagggagaccagaacgcaaagagagcgagagcattaagtaggcagggagaggcacacagaaagatagacagcaacactcgcgtgctccctccctccacacgccctcctcttaccgagcgaagcggccaggggcacagagtgggagaggactgtgggcacagaagaccggaagagggacgctgcattgctggtgggacggagggattcggacggacggacagaccagcgcacagactggcagcctgcgagagtggcagctttgagagcagagcgcagcaaagcgagaatcccgcgccgagctgctagtcggacccacagacggtcggactgacagacgtgcagacggacagaagagcagacaggaggcgggggcgcgttcactcccggcggccagccggccagagaaggcggcggtggcaccttctgagcgcgtccggagcagagaccagcagcagcaggggcagcggggacacaagccgcgaccgagccgccgccgcagccctggctgccacagctgtgtgggatcccagccgacactgcagaaagctccttttactagcagttaaataaatc

SEQ ID NO: 331730 - DNA, 615 bp, Homo sapiens
  chr3:36805537-36806152
  hyper
cgtacacccacgcggggtctggcactgctgctacatcccgcacggagcggggtccagagttagggcgaatgagtcctcccgcccccgccaaggtggcgcccagaacgggtcggtgccggagcgcacggtactcacccggggcaggccgcgccgggcaggctggggctggccgggccgggggcggcggcggctgcggggctggagtggcggcgggcatggcgcggcggcgggctcggggagagcctggagcagaggtggcagcgcggggacgcggctcgacggtcgagcaggcgcgggaaggcggggcgagacgagcagccacgagcccgcgccgactctccctcttctctccctcccgccgcccgccgcccgcctgccagccccgcgccgcgcagcgcccggcgacagccaccgggaacgtctccgggggcgcgggacttagcaaccgcgcaccagctgcagccgccctctctgcgccggtcccgccatgcgcgccgctcctggccctggaggccgggcggggccgggctttgaacttgctcccacaccccctgcttctccagtgagcgcccaaaggcggtcccgcctctccccggtcagcggagtccagccttt

SEQ ID NO: 331731 - DNA, 1122 bp, Homo sapiens
  chr3:36985571-36986693
  hyper
cgcaacgcgcctcccaggcaacagactccgagctccggttcggaaacgctccgaggcagaagcaagggcttctaagggctccgcttcccagccttgggtccctactactaccttccccctagactcggtgagcccaggctgatggaccgtgcagtccagtttgagccagcccagcagccctcaatcgggcgggcagggaagaaggcctcctactgccgggaagaggccagcgcgctccaagttccccgcaaattccgcccttcccgcctggcacggttcccttgcaccgctgtgctccgctcccaggtttctgcccgccaagaatgcttgccccgggggcgcgctcgctggtcaggaacctgtcggcagcccccgggaacccctgaggatgcggaggtgggcccgagagctgcggcttcgatgccggggtgggagctaggcaggccgcgcgccgccgcagtcctgtcgcagcgcgtgccctggtccctccggaccgaaaaggccgaagccgtcccccgcgaccgaccccgcgcaactggctcgggtctgcacctagatggctgtgggccccacagggatggccgggcgggcccgttcggccgctacctcagggtcgccagtccccgcgcgcggccgcctcccgccaggaagggtggcgggcccggaaggccagagatgccccagtgcttcccgcgccgctacgcacctagctgcccgcgggtcccacatggctgcggccggagggtccgcaccaggaccgccgccgcctggggaagcgcttccctgtgggcagggcgcggcgggcagtgcggaagcccgaaagctaccggagcccggggcaggggcggcgcgatgcagaggcggcgttcgggggcccccagctgcctgcggctcggctacccagccgcgatcagagggggcgggggacgcaggaaccccggcgtccgggcggtgtgcagccgcagacctattccaagtttccacgtagttgcgagagcccaaaaactgtcacgtgcacgtcgctgctgagtgggaggaggtgtttgtcatcgcgttcaaaaggggcgtttcggtgtctcccgtcatgcaagcaaatggtatggctctcggccgcctttgaat

SEQ ID NO: 331732 - DNA, 1420 bp, Homo sapiens
  chr3:37033979-37035399
  hyper
cgcggataaagaccaggaggtagttctcataggccacaaaagcctggtcgtccaaggcaagagaataggctttaaagtccctggctcggttaaaaagctggttgcgtagattcctgtcaatgctcaggatcctctgccttgtgatatctggagataagtcaacgccttgcaggacgcttacatgctcgggcagtacctctctcagcaacacctccatgcactggtatacaaagtccccctcaccccagccgcgacccttcaaggccaagaggcggcagagcccgaggcctgcacgagcagctctctcttcaggagtgaaggaggccacgggcaagtcgccctgacgcagacgctccaccagggccgcgcgctcgccgtccgccacataccgctcgtagtattcgtgctcagcctcgtagtggcgcctgacgtcgcgttcgcgggtagctacgatgaggcggcgacagaccaggcacagggccccatcgccctccggaggctccaccaccaaataacgctgggtccactcgggccggaaaactagagcctcgtcgacttccatcttgcttcttttgggcgtcatccacattctgcgggaggccacaagagcagggccaacgttagaaaggccgcaaggggagaggaggagcctgagaagcgccaagcacctcctccgctctgcgccagatcacctcagcagaggcacacaagcccggttccggcatctctgctcctattggctggatatttcgtattccccgagctcctaaaaacgaaccaataggaagagcggacagcgatctctaacgcgcaagcgcatatccttctaggtagcgggcagtagccgcttcagggagggacgaagagacccagcaacccacagagttgagaaatttgactggcattcaagctgtccaatcaatagctgccgctgaagggtggggctggatggcgtaagctacagctgaaggaagaacgtgagcacgaggcactgaggtgattggctgaaggcacttccgttgagcatctagacgtttccttggctcttctggcgccaaaatgtcgttcgtggcaggggttattcggcggctggacgagacagtggtgaaccgcatcgcggcgggggaagttatccagcggccagctaatgctatcaaagagatgattgagaactggtacggagggagtcgagccgggctcacttaagggctacgacttaacgggccgcgtcactcaatggcgcggacacgcctctttgcccgggcagaggcatgtacagcgcatgcccacaacggcggaggccgccgggttccctgacgtgccagtcaggccttctccttttccgcagaccgtgtgtttctttaccgctctcccccgagaccttttaagggttgtttggagtgtaagtggaggaatatac

SEQ ID NO: 331733 - DNA, 916 bp, Homo sapiens
  chr3:37493509-37494425
  hyper
cgcagggctcacggcccgcagggggcgctgccgcgccgtccagccgccgccgcccgggccgcccacctcgcgggcgcgcccctccgcagaccagcgccgcccggcccgggacccgctcgcgcagacttctcgggcggactgaggacgccgccgctcggggccgcccctgtgctcgccttcagcgcccgctcagcccgccgtccgcgccccggtggcgggcccgacgcccgcattccgcccgtgtccaggcgcagagctcccgccccggggagcttcctggccgtcggcgggccccgcggcccgcgcgctcggcgccctgctcgccgggcagaggggaaggcggcggccggctggggatgggcggcccggctgcgccgaggggcgccgggaggctccgcgcgctgctgctggcgctggtggtcgcggggatccccgcgggcgcctacaacctcgacccgcagcgccccgtgcacttccagggccccgctgactcgttcttcggctacgcagttctggagcatttccacgacaacacgcgctggtgagtgcccgcccgactccgcgaccctggcccgcgcggccaccgccccggcccccaggccagcgccgccgccgcctttccggtctcttccacgccgccgtcccgagggggcgatttaaatgtctccgttgcgcgcggctcggccgccgggggacggcgggagaagggaggacgccgtccggggcccgctaaggtcggggtcggcgcctggaggcgggcgggggcgtccgggtgcctccctggggtcccagcccagagcgtggggggagagccgctagagttgtctcctccgccgcccagctagactcggcttcactctctgaatcgaaaagtaacttggctcctctgcctccgggcggccgccgctggcccagc

SEQ ID NO: 331734 - DNA, 898 bp, Homo sapiens; identical to SEQ ID NO: 229390
  chr3:37901940-37902838
  hyper

SEQ ID NO: 331735 - DNA, 357 bp, Homo sapiens
  chr3:38035703-38036060
  hyper
cacctccgtcttccccgcaacacatatacacaaacacccggaccctaggtcccccagagcccgaaggccacgcagggggcgtccagcgacctgcactactgggtcgggaagcaggcgggtgcggaagcgcagggcgctgcggaggccttccagcagcgcctacaggacgagctggggggccagaccgtgctgcaccgcgaggcgcagggccacgagtccgactgcttctgcagctacttccgcccgggaatcatgtgagtgcgggggcgaccggggcaggagggagccgtggaggcggtgccttggctggggcagtcttgggatggccatcgtccacatccctgaatggggcaagcc

SEQ ID NO: 331736 - DNA, 700 bp, Homo sapiens
  chr3:38070629-38071329
  hyper
cgttcttggatgctgtttccttccttcgccgcccctccgtgcgagcgggatcgtggagcccagactttcatgaccaggacaagggggtccgcgaggcggagggaagtctttagacccgtaccgcccgcccacccaccccccgggctagatctcggacaagcctggaaacgcccagggtcgtgcccggcagtcccacccagggagccgcgggctgagattttcccagtccggagaaggggcagagaggcgggcccggggtggtgtggaggcggccgaaggagctgggggctccctgtccagggcccggaacagctttccaggggtccacccctgcagggtctcccgctcgcgcgggccaggcactcaccgtgcagggtcaggaagtcccggcccgagtccatgcccgacgggcggcgcggcgggaggggcaccgcgggactcacttgagtagcgacagcaccggcggcctggggtccgagcggagtgcggtgcagggacctgaatggaccgcggtgggaggaggccgggggtggtcccgggacaccgccccgcccccgctgccctgcgcccccgccccctgagcccgccaaccctcgtctctccccgcccccttctggggacgcgagagggagggcagagctgggggcccggaggactggccaaccctggcccgggccagcgggcgcgccccgaccagaaa

SEQ ID NO: 331737 - DNA, 603 bp, Homo sapiens
  chr3:38080628-38081231
  hyper
cgatgacgggatccgagagaaaggcaaggcggaaggggtgaggccggaagccgaagtgccgcagggagttagcggcgtctcggttgccatggagaccaggagctccaaaacgcggaggtctttagcgtcccggaccaacgagtgccaggggacaatgtgggcgccaacttcgccaccagccgggtccagcagccccagccagcccacctggaagtcctccttgtattcctccctcgcctactctgaggccttccactacagcttcgcagcccggccccgccgcctcacgcagcttgcgctggcgcagcgtcccgagcctcagctgcttcgtctgcgcccctcctcgctgcgcacccaagatatctcgcacttgctcaccggcgtcttccgcaacttgtactcagccgaggtcatcggcgacgaagtgagcgcaagcttgatcaaggcccgcggcagcgagaatgagcgccacgaggagttcgtggaccagctgcagcaggtaacgtggcggtggcgtcgcgtctgcggacggtgccggggtctcagcgctcggcacgcgtcagcacctgccaggtgccaggcgctgttccaggatctggggct

SEQ ID NO: 331738 - DNA, 50 bp, Homo sapiens
  chr3:39250115-39250165
  hyper
cgacgacaactttaggccctcatcagcctgaaggtggcaccagaggagtc

SEQ ID NO: 331739 - DNA, 1280 bp, Homo sapiens
  chr3:39850742-39852022
  hyper
cggggaaggacctggagtcgcacatgggggctcccgaaccgcggccccaatactgcactgcgccgcagggaagagccccgggaggggcgcgggtccccgccccgggcgcgcgcagccctgccccgcctcctcccggtgcgccccgcccctcccggcgcgtgccgcccgcgcgcccgaggtgctctggaggaaccggcccggcgggcaccccctgccccggcgcaggcgcgatcgcgggccgcccctcccgccgggcgccctgcacgcgcccccgccccgcctccgcaggctcccccgctccgggcgcctctgattggctctcggccgggccagcaggtgtcggcggtggctgcggccaggctggccctggctgcctgcggcgcgggcgcctccctcgcagccgctgctgccgacgccgctgcgctcccgcctcctgtcggttcccgggttcccgctgcggctgcggttctggcagccgagcccccgcggtgctgcagcccagctttagcgcgcagaccgacccgcgccccttcttcgccgccggcagcctctaatccacgcggcgcgttgcggcaggtgccctgggcgtactgaggcgcggtggcctgagcccggccgccatcgatgaccccggtcgcggacttgcttcaggctggccaccccccgtgagtaccgtccgcctccctcttctcccctctggcagctttgcgccactctcccctcaacgttgccgcaacttcgggggtgggtgtgtgaaggtgtggaggtgtctctcacgctcccccgcaccctgtgcgcgtccggagccaggaaccctaggcgcggccagtcagcctctgcggaggggcgaggggcgcgggtacttgaacttgctcagggatcatcgcggagccagaatcgcctctttctctcgctgctggggtgggagctcgcctctgcgtttccctcgcgttttccgatcccggatggccacgtagtgcttgggctgcggttcaccgcgtacctactgtgctgcgggcgcaccggcgggacgcctcaaaccatccgttaagcgccccgcaagcagcccagcgcgacggacctgactcaaactcttaattctgtaaaacgggggtaatcagggactctctcaaggtcacagctggtgctcagagttagaacacaggtggattgcgtctggccctcgcccgcgggctgcctggggaggggagagctgttggcggggcggtcacttcagcttcatcccgggttcctcctcatactccctttccgccacagcc

SEQ ID NO: 331740 - DNA, 88 bp, Homo sapiens
  chr3:40350800-40350888
  hyper
cgattttacttacattacccggggcctcgagggtgactcatagagattagccctgagcgtcgacccctcggcgccgccactgcacagc

SEQ ID NO: 331741 - DNA, 214 bp, Homo sapiens
  chr3:40547367-40547581
  hyper
cgctgcaggacccctgcctggggccgcccgctcgggcccgtgttgtctcaggcagtagggacactggcgctgacggcgggggtaggaaaccacagagactggcaacttcccaggttcctagagaggaggggcatggaaaacgcacttccggcggagggtctcaagctttccccggtgtcggcggcaggtggaatttccacgctttatctgcgcc

SEQ ID NO: 331742 - DNA, 167 bp, Homo sapiens
  chr3:41240162-41240329
  hyper
cgggcttggcgcccgttctacggagagttcacagccttcgtgagtggggacagaaggcggctcggcccggtgattcaggtcgaaattcaagctgaacagcctgctgagaggtgggatccaccatccggacagtggggggctttgggggtgctgtgagactgggctgc

SEQ ID NO: 331743 - DNA, 840 bp, Homo sapiens
  chr3:42542869-42543709
  hyper
cgcacattctgctcagggctctgggacccgctgccctctccgcctctccactgaactccgcctctccttctgtcacacggctccgccagccactctatcctgccgccgcgaccacatctccagcctcgattgtgcaggctcgagcccgtagaaagagggctagcagccacctgcgcttggtccacaagaagacgcgctcccagggcgcagagctggtgaccccgctccccatgccagggacgaataaacgagaaaaggggctgacccggtgtcacccagcggccgagcagccgccccttggaagctcagcaccaaaggcaggcggccagggtcctggcccctctctggaccccagtatccccagctgtaaaatagggaatgcaggaggaggacgacgtctgtggatcgttttaggtcagctgcggagtcggcctgcgggctgggagcagacctcgctccccacgcgagggcgctggcacttcagcccagcctccctggggaggtgccctggacgagacccgcgagggtgcggacacctcatcctccctggagcaggtctcccgaggcttgaagggccagggcacccaacaggtgctgagcgcgccccaccaggtcacccgggagcagggaacaccaaggaacccagagtcgggcctctttcgagccctcgcttcctctcgcctggcttcttcggcgcgaaggatgaattggggttgttgaaaattgatcaaacaacccgatctctgtcagcgcctggacacttgctgggccccagctcgcagcctgggaagataagtggcacttcctgtctcgtaatcggatttgcgcgcacgaaccctc

SEQ ID NO: 331744 - DNA, 743 bp, Homo sapiens
  chr3:42814273-42815016
  hyper
cggaagtgcacgccgtcgggtcgcatctttcagtgcggtgcgagagggcccagtggcagaggcccagcaaacagcgcttgtcaggcggacctgagttcgagttctgactgtgccatctacgctatgactttggggcaggcgacccaccctctgcgcctcattaacccatgtactgcatggaaaataagcgtctgcctgggttagaagagggctgtgtgtgaagattcaaaggacgaaggggaagagtcctcgctgggcgcccagcacgcggtgagcgcccggccagtggcagcgcgctcgggctggggttgcgctcgggctcggttccgcgcccccggcagctgcgggctttcccagctccggcccgggcccttccgctctccccggcacttacagcggtctctctccacttctcccttctaggaccgcggcggctaggtcacctcctccggacgccgacacgcgctgccctggcaaccgtcaccagggaaacaagcgacgtcacttgcgcgttttcaacgctactctacgggggccgagggggcgccaagagttctgaaagtgacagaggcgctgatggcgcgctgggctggatccaagcgagcacgatctcgagtgcgctggagattttaaatcttctggagtatatttttaaaaaagttttgtggaccaaacgttctgcacagagatgcccattccgctctcctgttggggagttaaaaagcgaacgatctcaccatgaa

SEQ ID NO: 331745 - DNA, 565 bp, Homo sapiens
  chr3:42947483-42948048
  hyper
ctgcacccctaccccggtagcggtccctgggatcgtccgtgtctccaggagaaccggaccgctctcccctccctccccgagcgagaaaggaggaccacagagatgcggcgccctccgccgtcctagagcaaccggagcggcccgagccccggcctcccggatgctggggcctggcgggtgtggagcacggggagtcgggcgtggggcgggcagggagtggagtcggggtcttactccggtggctgcagggcgcagggtagccgtgtcaggcctgcccaggtgcagagcgctcttccgcgaccccaacagcctctggtccggtctggcgcgccctcgctttcccagagggcgacctgggctatggcggccgtggcgctggcgagcgggacacgcctcggccttgtcctcgagctgctcccgggacagcccgcgctgccccgggcgcgccgggtgagtgcggggccggagcctggaagcagtcttggccctgccctgggttctaggcccggagacggggtggtgcggcggctgggaaatgggggtacaacccagagtgaggggcctc

SEQ ID NO: 331746 - DNA, 674 bp, Homo sapiens
  chr3:43147038-43147712
  hyper
cgttgcccaggtccccggcccccggcccccgacccccaatccccggcccccgaccctgagggtccacccccgccccgcccacctcccgcgcctccctcagctcgcttcacacgtcacccctcagttctgcaaactctcctggatcccgaaggcgtcctagaacctccccctcaccccggggcccagcaccgcgtcgtcccctccagggggccgagggttcgacacctccacttcaagtcccaggcgggtgtcggagtccgctccagccccaagcgcgcgcgcgtcttacctgaagcctggactccgcgggacgaagccacctccgccgacgcgtccaggaggccccacggcggcgccgctttcccaccccgccgccgcccccagcgccagcttctggcccaggaggcccagaaggcccaggcagccagcacaggtttggccgcgccgccgggttcgcagcgaccgccacctccaggctcgcaggtgtccgccgtgcgcctgcccggcgggcgagcccggcgcggagcctgtgcgcctgcgcagagccgcgagttcggttgccctggccccggccacaaccttggctcgcggaatcctgggaggtgtagttttgcgtacgaggacagcccgcgccgccaccagcctgcggaatgttgggagtgataatttgcgcc

SEQ ID NO: 331747 - DNA, 470 bp, Homo sapiens
  chr3:43935666-43936136
  hyper
cgtccggaaattgaagctaataagagcactgacttccctgggcggcggttgaaggctacctgtgtggatctgggcacagcgaagagcggagccttaacagggtgagcacgccggttgcgcgctctccagagcagcccagcatctcccgccagcctcgctgcccgctccgccccggcgcaggggccccaagcccacaggcaacgccagcgcgctcccaaccgctggagacagaaacaatgtgcgcgcgcacacggcccacgtgcacgcgcgcacgcccacgcggcatacaggcgcgcacgtgcacacgcgcgcctgcacagctctgcggctctgctccggccccacaggcccatcttaaagtgtttcgtgctctaacttaccaaacacgtggcagccggcagaacgaaaaggaaaataaatgaactgcgacgaaataaagcaggcctttccgcagtcggccacgtccaaca

SEQ ID NO: 331748 - DNA, 4891 bp, Homo sapiens
  chr3:44036214-44041105
  hyper
agagttcaagagagagataccggtcctggcctctcggtgttcaggtgtgtgtataggtgggcgttggtgtgagaacgagcgagagaaagcgggagcaagagcgagagctatgcctcccttagtgtcagggagggtggccggctgatgaaggtgctgtgcagaaagccggggaagggcttaaagagggtgctggcgcctcgggaacgccctcccgctgcaccctacaggaggtcgtgggcggtggcttaacagccccagtgcagagcttgaaccccaccgtccagaaggaaaggtgagtgggggacccgggcgggaggtgaggcctgccggcagcggccctcaggcgtgctgggcagcacggctagcagaggcggcgcctggtcttggatgctgcagcggagacgccaaggagactgaatgcagggagcgaggcgtagcggccgcggagggtggggccgcccggaaatccaggcggcgccagccttgtagcatctgcaggccgggggcgcgcacacgaggggcacgtgggtgtggaggaaccggcgcggcggggcctccttcctgcagcgccgcggcggtcgagtgcccgtgctggaggaacggcgagtggggtgcctgccccgcgcaggcggtacccgccgccccagctccgcacacagcaggcacggccagggaccgggaccgtggcccagcgcctggaggcgctctccacgcgcatctttcccgatgccggggcgggaagccgagtggctttgtccggagatgccaggggatgtgggcaggggacgaagaggtttcccaactggccaaaccctggcttgaggaaagactgaggtggtcattgacccgtgggagcgccctggggcttcgagggaacggcagccgagcccgggagactggtgttgggtacccgcgggggccggcgggttccacgtgggtggaccccgagctgagggcagggtagggtcgcggatcgctgacctatgagctcccctactcccgcacaaggacacctgcacatggacccgggcttccacccgcttctggctgggttggcgccgggagcgcgcaggggagggacggcggcggagtgcggggtttggcgggtgaggtgggtgaggtgtggccgcgggggagggggcgaaggcactagaaggctgcggtcgcgctgtcgctgctgttcccaccgtcggcgcggggcgcggagggggcgaagaggtgcctgccagtcgcactgcggtctaggggtgaaaggaaaagggtccatgtaaaggagaaagggcaggcagagactcttgctggtgccagcaggcacggaaggatgtggccgcggggacttggagtttagagggcaacgctgggtgtcataatgccggagatgaccccgggtgcagaggcgattccagttgggtagagctacagagaacgtggcccgagaaggggagcttccttaaattagacatatcctgtgttgtcctaaacctagcatttaccctctcccaccccgctcccacaacctccagggtcctagcggagtcatttaagcgctcagtactaccagcttcattttaggtaaaaatcaagactaattctgcactttattaacctcctcgtacccaagtcaccacggggcagcttttcacagccctaaggcgtggtcacttcaagcccacagcgagttgctcgtgtcctcggcttctgctccgcaaatctcggacgatgccaccggaggacgctgaaggcaaaggctggtggggccaggcgccggcgagactgccgcgctagcacagcttccgcgggagccgagtgctgacgggcctcgcgaccccctcccgagggcaaacggctcggccctccagggacacttggtcagtgtcactctctccctaccgggtgtcgcgcattttctcaacagaacgtgaccccgtagacggatgaactcggaatcggcaaaacccgcctgcccttgtctagtctctctgccccaccacaccactgcccttcactgcggactgcgccgtgtgcgctccgggaccgcccctgcacctttgcccacagcttcccattaccaaggcagccggaggaagacctttccgagttacctgtctcacgtcagcagccacaccgaggcggtccccctcgcaccactccccaagtgcagagcccctgaaagtccgaggctcctgtgccacgcaccctcccccctgcggggcgaccccgcgtatgcgtgtgtgtgtcacgcgtttaatcgcacagagtaattcccagacgtgcaagacaaagcatttcaagcaaagatggtccagagttcaaattggaaagcacatctcgaggcgctgaatctgttctcgccgtctgcctcggtctctggggcgtcgcatccaggagaagggttttaactccctgccagatccgctcggaattagctcttctggcggtgcagcaacaagtggccccgccgcctcccttgtgcactcggagggactacatcctcctcctctcccagcccctagtccaaacgggagtaggtaatggcggggaaagggggaggtgacgagagcggggagaaggaagtacatattttttaattgtgaaattgtctgtctgcgtgctgtgctctgggattctcttgtctcaatcaacttcaattttaacgtggccgtaacgttaagattaagacctagaaatgaaaacgtacccacctttcttattacaaaggtcgtttgttgttgttgtttttttaaaacaccaagtaaccccccccccccccccccacggacttatactttgtttatgagatttctccaaccttggtggtttggagaaatgaggtgggggaggggaggaccaagggcagcaagacgtccactacgaaaataagatacttactaatttaatagggccgttcctttttacataagatgctcccccaccccccaccaatttacaataggtaaactttgagcttcctcaaagtttcgctatctagcgtttatgcccgaagctttacgaataaactccctttccaggtaaacctgcccaacccttgtcctatgcccagcgaagcccaggtacgatgggtcaaggacccctggcttccacattgtctgagtcacgttccagttggaaaggccatcttgggcgagggacgtgttgcccgactggtctaaataaggaaagaaagtggagtaccaaagaatcaagggcctctgttcctccccatcccgccaccaccaccaccggtccccgggctctgctgagcgctgcggcggtcttggctgaaaactgcgtccccgcccaaatcgagcgcaaaactcccttggacagaagtttgaaagaatccagtgtagaaacagacttctccgtccaatttggttttaatcagtaatcatataagtatacccacataaccacctaagtggagagcagacgcccagattcacggtccccacgtgttgctggagttggcgcagacgcgtgtgcgggcatagcggcggacgtgacaccgcattttctccgaattcctgccatctagggtggtgccgccccaagagggggccgtggggaggtggggtaataggctgcgcaatccacttgctctgggggagcttagggttcagagcagagcgcaactccggggggctgtcgcacagccccattctcccacaccagaagagcaatgctccttatggatgattaatagccgggcttctcctgaccatgcggcgcgtccctgccggcaccacttagttgttttaatttgacctttattagcaacgtgctcccagaggctgcgagttggattcgcaccacgataacggccctctccccttccacccggccggcttcctgggaaggatcggggactgcagctcccgcgacgcctcctcctcctgcgcagggagcaggcctgagttcctccacgtaatgacctgggagacctcaggcatcccggggcctggtcggagggtcttcgggccctggagctgggcggtgtctgcagtgcaccgccgtgagtttctctcgggtacaatgtgctggtgtgcagagaggaggaaaggaaaaaaaaaaaacccaacaccactcttaagtggcactggcatctatgaagtggcagtggtctacactgagcgtgcccttgcctggaggtgtagggggcggttactgcagccgaggggagggtactgcggccaagggcagggcgagaggacagtcaaggccggctggccgcgtgggagcctttcctctccgggttcagcggccggaatcaccagcactgcggctaaaggggctggtaggctctcctgcaccccgcgtgctcctccgccttctctgtgtcccccggcttttccaggaggaagatggggtgcccatcgcgaatggggcgcgccgggccgcctggccgggcggtcacgtgtcccccctcccccgccactgcggcgggagttccaatcagagcgcgccagggggctcctcccgggcaggaaccacccggctcggcggcggagggtgggccgccgtcacctgaccgcccgcccccgccccccgcgagtaaggggcggtggtagcgtctgctcggttacaaatggcccctcccgcccggctcgcccgctcgctcgggctcggcgcggacccgcctgggcgtgctcctcccgccggctccaggcgtcccaccgccctgcccggcgccagcccgcggtcccagccactcctgagggcgcgccgggcacccagcgcgtaggctcgcccacggaggtcgacacggaagtctggaccgccgaggcgtgtggctcgtctaccggcaggtgagcgtgcaccgcgggcgtgggatgctgtggggacagtgcgggggacgtgtggggtcttcggatgcgaacgcgagtccgtgcga

SEQ ID NO: 331749 - DNA, 810 bp, Homo sapiens
  chr3:44063232-44064042
  hyper
cgtaatgccacttgcaggttacagctttcaaagcaaagccagactccggccctgcccggggtaggaagtctttgtctgcctgcgcgcccgagcgctcccggcttgggattgatttttggcccccgctgcagcaagttgggggctggtgaggagtgtagcggtgactgggggcggagtgcggactcgcatccgctgtaccaggagcccactgccacctcgggattttttttttaacttggaatttccatatgacaaaaaagaaagaggtttctcctcaatctaacggagccattaacatctattaataacgccgacagggtaagtaacggagccgcgctcctcggggtggtcaccgggctgcgtggtcctcggccggcctcctgcatccgctgcccctgtgcgctccgggccggatgcgcaagggcggcgcggggaccaagcctggctgccggccgcctactcctccccttccctaaggtaaggggtcgttttcacactcaccagagctcctgcgggctgagctcgccccctcccccgacttctttgcggggcattttctcttgctggtgtattacgtgtcatttctcacggggcattgccggccgcttttctgcaactgtcctttcggatttggtgatctggtccggcacagaggctctcctaggaggtggtgcccatgcatattcattctgtgtagtaaccgactggccgtcttgccattgcaggctgatttattgatttatgtaggaagtgtgttttattttagtaattagggaaccctgaattcacgggaaccgtctgcacttcgca

SEQ ID NO: 331750 - DNA, 561 bp, Homo sapiens
  chr3:44596541-44597102
  hyper
accccgaccccgcccgcggcaggtggccgggcacagccgagaagtaagccctgccagctctcccgggtgcggggacgcgcgcgcccaccttcgcaaacgagacttccgggatcccggagggggcggaagtcgaggcctctctcgcttccggctcggccattgtttttggtctaacgggcagtagagtgtccggcttcggtgccgagtgccaccgcgagtgggccgagacgcggagggaggcgcggccggagctcgggtcgccgacgctggccaggaccgcgcttcttcccggcggcaggcggcgcggtccccgtgactctcagaagccgcccgatgtagagccgcttctttgtctcatacccctgaccattcgtgcgtggcacggagccgggtatctgcgggtacagcgatgaacagggcagacgtggccaggtgagcggcgctgctgaagcctggtttaacacgaaaggtagatcgctgttttcccagctcttgcagtaggaaactgtatgaactgtcatatttgggtcagacccaggctcagaatcgcaaacgtggagc

SEQ ID NO: 331751 - DNA, 550 bp, Homo sapiens
  chr3:44666348-44666898
  hyper
cggtctgaaacagcggccagttcttgttcgatgtaaggaacactagtacccaagggctcaggagttccgcctctcttccccagttctgggaaaagaaacgaaccatagagatgtggcttcctagagatccgggatgaggggcggggtgcaaccggaagtcgcagtattctcggctcggccattattctgtgcctcggctgccggaagggctcgttcctgtgtcatctcctagcggcctggcgccgaggcggcggtacgcaaggctggagccgcagcgggagcccccggtgagcggggtgggctcgggggcgggtgggcgtgcagggaaggcggcccgggacgcgggcctgagcttgctgggactgcacagccctcggtagcctctcccgggccctgacccccggcatggtccgtcgccagcttcgtgttggggttcgacgtcgtggcctcggctgggcaggcagccggcccgagggaagtactgaggacagcagctccgagtctgtgtgtgtttgtggaccggtgctcctgtctaacggactctgctggc

SEQ ID NO: 331752 - DNA, 326 bp, Homo sapiens; identical to SEQ ID NO: 229443
  chr3:44726883-44727209
  hyper

SEQ ID NO: 331753 - DNA, 314 bp, Homo sapiens
  chr3:44770936-44771250
  hyper
cgcacgccaggtggggtcgcaggttgtttctggtgccggcttaaccggcgcagcaccgaaacccgtagctgcgtgcgggaaggaaccaccgagcggaagccgctcccaccttcctagagaggagacggtagtggttattagccgaggcgcggactgctgacgtcacgccggctgggcgcgtccgggacttactcctttccgcagggcagcacccagggacctgagtgttgcaaggtgcgagaggggagcgccgcggggagcgccgcgggaagcgcatggtgagcggtttctgctgtgcccggctgccgcgggtc

SEQ ID NO: 331754 - DNA, 1217 bp, Homo sapiens
  chr3:45186931-45188148
  hyper
cgtgttggtcccttcccccaaccgaaacaactcgaaattcacacatatccccggaacaacagcctcctgccctcaaagtccactgccaaaaagtgcgaggggcgcgggaatgtccagtctctgcggtggcgcagatgcctggcggctttctctgggaccccctaaaagaaatccgggcgctttcatttttgcaccaacgctcttcaactttaggagagggggaatgcagcgtgcggacgggaaaaaggggatctagtgggaaatgcggacgtgaaagcactttttttgcaccttctctctggaccaggcgaggaggtagagggcgagcctggagaggaaagatctcttcccacaccctgcctgggtgctttcaagaatcccggcaaagaccctggggcgcacggcgcgccaccttggacatgtcgcctgggatcggctaccgggagctccttttcccgccttctcggccagcaccgggctcatcctcccggaccgggaggctccccgatcggggacactctcacgtgccgagggcaaggttgactccaggagggcaaggcccacgcgcccgacgcggcgcgcgcaggaaccgaacagtccgggggtcccggagccacccgcgcattttgactacgccgtccccgccctctctccgcaccctccgcaccctccgcaccctgcgtccctcggccgcatctccgccgggcgtccgctggctggctagctcaccactccacgccatccgcctccaaagcccggcactcacctgccccgcgcggcaggcgcgccgcacccagcagcagaacccctagcagtgcgatagagaccccgcagttcaggccggccatgactccgggacgcctcggcctcggtggggaaaacgacggtggggagcggcggccccaggcgcccaagcccggcgcagctgcgctccgccctggctcactcacctgcgcgcgggcggaccggcccgagccccgccctgcgcagcaggatcgcgagctgacccggtgcgtccctcctctctctcctcctcctcttcctgcctcagcgaccgcctctccctcccagggtgcagggctcccggcaccgggttgctgggtccctactactccccattgcggcgttggagcggacttgtccccacctttccgggcttagtcttccttcccaagtctgagaatgatgaggtctttttctccagagtcgcgaaggtc

SEQ ID NO: 331755 - DNA, 732 bp, Homo sapiens
  chr3:48693398-48694130
  hyper
acggcgggaccgaccggggggacgcgggtgcagcgaggtcaggagaccccgggcggggcgtcaggggaggggcggtgtctcatggggatgccaggacggggcagtcaggaatctgagtcagggcgggtaggtgggggcggcggggaggcgctcagacacggggcgggcacctacgagagggacagcgtaaggtggaatcgctgccgcaggccgcgaaacatgacgaacgaactgggcgggaaggagcgcgcagccacctcgcagcgcgggccctcgaaggcgccgcctgccgggcactggcagcgaaagccgccgttgggcgcgtcggtgcaggtgcccccgttgcggcagacgcccggcacgcagcggccggcctcggtgtccagctcgcagtcctctcctgggggccaagccgcggtcagaggcggtcacgcccacgcccgcccctgctccggccccttcaaagaccgcgcgcccagaggccgggtgccaagacccccgaaaggtcgccctcttcggtggacacgccccttccgtctggccccgccccctccccagtctcatcgctgcctcggcggcggccccttccggccacgctctacggcttctggcctaagcgcgtccataccaggccgtggcctcagaagtgactcccagtactcactcgcattgtggtcccgcccccagccttggcccgtgcttcccccagctctggcccggcgccctgctcac

SEQ ID NO: 331756 - DNA, 1694 bp, Homo sapiens
  chr3:48698890-48700584
  hyper
ggtccagagctgccgccgtacggataaggccgctctgcgggtcgatgctgaacagctccagcgagcggctgttcatgagtgccgccagcgagtagactaggcgcccggcctcgccggcgtccgggtcctgagcaaccacgcgtagcaccgcggtgcctgctgcctcattctccggcaccagcgtctggtagttgtactgcggaaactgcgggtggcggtttgcggcgcgacgaaagcgtgcccggttcgccgaggttactttcctggcttcaggacgggccgggagtcccgggggacgcggcccggggcgctgcgggaggaagcggcagcggaagagaccccgggagcgcatgcgcttgggcgccggctcgggagctgtccgagactcgcggggtgctgaacctgatgcaggagctgtcctcgccgtgcgtggtgctgaatccagctcggggccagatcccgaggcccctggaagacagttccgccggggggctgtcctttctgctccggatgtcgtggctctctcgccctgacccttgctccctgttgcccataattccccacagcagcgcgcggtgcccactcttttgcgggagcctgtcccagcgttccgctgggaggacaccggcttgggaccgtggtgccgaatcaaaaagtctgaagggaggggcgagctgttccccgagcccgggacccctgaggacagagcccctggtgacagactacctctttgcaaaggtcctgtccgcccgcaagaggagacctctgggcgccagtataacacagaccctggtccctgtcctgtctctcgttcgcggctgcccaatggctggacgccgtgttcaatccccagctcctcattcggctgctcagggggccctcgactattccgggcgctttgccttctccctcggagccccacgaagataggctccctgacccccaggccaggccccccatcctcccggaccccggaagactccggacaaagagctaaggctccgccaccgatatgcgcccttggccccgtagtggcagctaagcctgggtcccagccctggtgcccaccgccccccagctcctcctggctgagggggaacaaagagaggagaaggagcaggagtatgggggtcgaccgtcccccgaggccccgccacggcggccgcctcgccatcatcccccgcctccctgcacggcctccaccgccccccgccccggtccgggccttgggctggccccgccgctcgggccccctcccgggcccctgccgccgccccgggcccccgcccctccgcctgtctctccgcacccccgccgccctctgggcaccatctactccgcggccggagcccctccggcgtgcggccctggctttttccgcccccaccacagcatccccgacgctgctgccgcctcccgccgctccaacatggctcccggccgccccgatggttcgctccacctctgccccggcgcccgaaacacggtggtacaacccatcgcgcatggcagctctgaggaccgaagatgttgccgccatctttattgaggacgtgagcgttgctcctggtgctgaacagagcgcgaaggttcgccgtcgttgggtccgccctccccactttcggtcgccgccttcacccacctccctccttctagggcgctgtcccagctccgtctcccagcctttttctgtc

SEQ ID NO: 331757 - DNA, 484 bp, Homo sapiens
  chr3:49027062-49027546
  hyper
cggcctatgaaaccttgcacatcaggcagcttcttcctaaggcctgcctgactccggcgagacttcccgggagatccggaccgaccgcggaaccgagctccaagaatgcctgcgaggaggctgtgggtcctaccctatcgccgcttacgcagtcccagcctccgcggcgcccccaaatgccgcactgttgagtcatctcagcgctgcctcctccgcgctgcgctccccacccccgctcctggagcaagaagatgcagacgatacttttcccggaggcaagagggcgtcttcacgcaggcaccgagaagctcccactagtgtatgccttaatggtgccgctcttgtccgcgtctacgcttgggaccttggcttctgacttggagagtgtacagctctgcccgacggcaacccagcttgggaagagaagccccagcgtgggctggggctcaaggcgcaggaaggccgagcccggcgcggacgcagg

SEQ ID NO: 331758 - DNA, 392 bp, Homo sapiens
  chr3:49027805-49028197
  hyper
cgacggcgaggacgcaccggtgcgtccgctgtgcaagccccgcggcatctgctcgcgcgcctacttcctggtgctgatggtgttcgtgcacctgtacctgggtaacgtgctggcgctgctgctcttcgtgcactacagcaacggcgacgaaagcagcgatcccgggccccaacaccgtgcccagggccccgggcccgagcccaccttaggtcccctcacccggctggagggcatcaaggtgaggacctccctgccccgccgcgctccaggccctgcacggctgagcccgagaggaccggcgctcagcccgggtccccacgctgcccccggcgctgctctgcgtcggtcccgcgcgctcccactcactcgcctgctgtcgctctccgggccgg

SEQ ID NO: 331759 - DNA, 189 bp, Homo sapiens
  chr3:49066962-49067151
  hyper
gctgaagaaacagcgcatgcgtatagcacatagtggccttgtcactgaggagctgccacttcacgtcccaccccacactccccgcaggacctcggccagttcaattaacaggcaagggtttacttctactgtcccgccgggctcctccccaaaataaagagacgttgttcactaacatgttgaaaagac

SEQ ID NO: 331760 - DNA, 115 bp, Homo sapiens
  chr3:49851252-49851367
  hyper
cgctcagagatagggtctttgtgtaggtggcggtgacagtaggggccagtgccctgctgtagccagtgcaaacaggaaccaaggccaagcgaataagggacgctgctggtcacag

SEQ ID NO: 331761 - DNA, 386 bp, Homo sapiens
  chr3:49893744-49894130
  hyper
cggtacccgggcaaacaccgggccccaacactgcagtcactcaccactgcaagtggaaggtgtggccgcagtggatggcggccacgtcgcgggagtgatcgaagaagtcggagcagatagtgcacagagcacggataggcatgatggctggactcaaggggcccaggcagccaaagaaactgctacaggtccggcttcgtagacgcgcccccgcgcctccgcttgcttcaaatttggctccgcagcacgacttcctggagcgggccggaagtgacaacacaaaactttgggcggagcgtgaatacttcgcctggattggacaaattctcggatgggcggaactatgggcggggcttagcggccccgaggccgtagagaatcctggg

SEQ ID NO: 331762 - DNA, 691 bp, Homo sapiens
  chr3:49906737-49907428
  hyper
cgcggcagccccgcccagccccctccgggttgtcgcccataaagaactctccgttgtcatggaaattagtgactgctaagcgggagggaaggggcccggggacagttgggaggggctggaggcggctctgggaacggggagggacggctcagctctcggcccctatcctcacgggggaccacgaatcttcgagggttaatcttttcacaattccgagccgcagaagcttccccccagaacccccaagccgtccgaggtaatggggaactttagcccgaccccgcactccctcccccaaatctgcaaagcccgcgcgctctgaccccgccaggacctcgagccctcgctgcgcccccgcgcactctgcatcccgcacctcgagccagggaaacaatcccccaaggccccacaacctgcgttcgggaagcgcccccagcccggcccgccccgcacctgcagcgccggttggtcacagggaggaagtgatcgcgggctcagcggggcgccgagggctccggggacggcgggcagaatccgctccgagcacgcggggcagacgcggcgccagatgcagccgcttcggctagcgaacctccagcatcgccagccgcttgccggcaccggattcgcaccccgggccgggggcgggctgggggcggggcctcccaaccggccccgccccgaccctggc

SEQ ID NO: 331763 - DNA, 48 bp, Homo sapiens; identical to SEQ ID NO: 229509
  chr3:50242721-50242769
  hyper

SEQ ID NO: 331764 - DNA, 598 bp, Homo sapiens; identical to SEQ ID NO: 229510
  chr3:50243056-50243654
  hyper

SEQ ID NO: 331765 - DNA, 681 bp, Homo sapiens
  chr3:50374299-50374980
  hyper
cggtcggctttagtcatagctggataatgcccggctcaggtctaccacaagccatacagctgctttttccgtgttcaacctgtctgtgacagaaaccaagggggccccggcacccagcatctaggcggtggaatcggggtcttacgcacggttccgcgggcaggtccccggccaggacccgcggggagccacgtagccaggagggtggggctgcccaccgacccaggacgcggcaacggaccggggagggcggagctccagcgaccgcttcccctcccgcccgccggcaccccctggctcccacctggtcccggcgcggcctgcgagctagcgaggttcgcgcggtgaagtactgctcgagctccgagtccgagtcctcttggctgcagtagccactgctcgtcgtgctgctccaggtcatttcgaaagaaggcgcctccgcctcgcccatagccgtacccgcccgtcccccagtcctgcgcgtccgtagccgccaaccaccgccccggtcgcgtgcgtgcgtgtacgcgtgtcagtgtgcgcgtgcgcccgggccagagccgcgccgcaaccgttaagactgaaacgtagatcgccgggatctagctcttgtctcattggggcaggaacgccggggcggggacacgcacgcttcgcccccaggaatgacctcatcgctcc

SEQ ID NO: 331766 - DNA, 320 bp, Homo sapiens
  chr3:50375233-50375553
  hyper
tagaacgctccttgcgcgcggcacccaggcagccctcgagaatgcctgcactgtggcctgcccatcctcgcccttcccatacgccctcggccccgcgctcaccacgttcgtgtcccgctccaccgcgggttcccagcccaggtcccggggcccgcaacagtccaggcagacgagcgcgcggcagcggtagtggcaggtgaacttgcaatctgcagagaggcctggcggtgaggcggaggagctccaggtcggggaaatgtcccggagattgaagggaagccccagggagagggccgctgctcgccaggctccgcaggccc

SEQ ID NO: 331767 - DNA, 271 bp, Homo sapiens; identical to SEQ ID NO: 229513
  chr3:50377896-50378167
  hyper

SEQ ID NO: 331768 - DNA, 862 bp, Homo sapiens
  chr3:50402181-50403043
  hyper
aggacgcccagcgacggcgggaaggaggccccgcggccacagtctgaggtatcttcctgcggggagagacaaggagctggtcggcctgggcgggcgcaaggccgcgggatttcgggtccaccgccccctctcctcactgtcgcgttgtagtcgaagcagatgtgcgggcctctccggtatcgcggtctctgcactagctcacactgctccgggccgtccgctgggcatgggtggggagtcaaggaggcggacggcggcggcggcacggagggggcgcgcggggcagagggggagcgggcggcggggagggcgggggcaggatacagtgcgtctccttctgcagcagccggccagcctcgcactggctgcacagcggcttctcggccaccacaaagagaagattggtgttggtcagtctctgcgcgtggaacagcctgcgggcagcccggaaaggcggggcgttgagtttgccccgccctgacccacccccatcctgcggccccgcccccggccgctcggaggccccgccccttccatcctcccgagcgtctcgccccgctcacaggttccgcccttggcctctggtcccgccccactgccagcacctggagcagtttccgcagtcgatgatggcgttgtaggaggcgtttaccgagccgaagtagtactgggtctgtttcatgacgcagctgctctcgcgcgtctcggggctcccctcggcctccgcggggtctgcgagggcccagagcgcctcagctccgcccacagaccctggcaaggtctccggcctccctcagtcgtagaccccaccctccccatggagtcgtcttagctcagattggggacccggacttgaggaggc

SEQ ID NO: 331769 - DNA, 455 bp, Homo sapiens
  chr3:50604957-50605412
  hyper
cggggcggggggaacccccaagcccggcgtctggggctgcgggtccgacccgagatccgccctccctgcaagccccgagccgctggccaggcccgctactgcgcaccagccgcatccgcgagcgctggctctgccggcctgagctagggtgggtagggccgggacccacggcggaggtggggccgggccgagcagcctcgggggatccccgaagctacagcgccttgcctccctgcacgctccgcgcccccggcctccgattggctgtcgggcctagagcccgcccagaattggaccgttcgcttgtcgctcgggtctggctccacccccagagggagcctagaacctggtcgcagtttttagagactaccctcaccccgtggcctgcgccgaagttgggcggaggacagtgggtggccaggcccttccgggccagaactcgggacccctgccag

SEQ ID NO: 331770 - DNA, 164 bp, Homo sapiens; identical to SEQ ID NO: 229524
  chr3:51989952-51990116
  hyper

SEQ ID NO: 331771 - DNA, 318 bp, Homo sapiens
  chr3:51990320-51990638
  hyper
actctctggatagccgcctttccatcttgccgccgctccggcctcgcctgcccgggggcaaggcggccctggccccagcgctggccgtgggccaatttgcagcctgctggctgccttatggctgcgcgtgcctggcgcccgcagcgcgggccgcggaagccgaagcggctgtcacctgggtcgcctactcggccttcgcggctcaccccttcctgtacgggctgctgcagcgccccgtgcgcttggcactgggccgcctctctcgccgtgcactgcctggacctgtgcgggcctgcactccgcaagcctggcacccgc

SEQ ID NO: 331772 - DNA, 116 bp, Homo sapiens
  chr3:52280023-52280139
  hyper
gcacgaggacgcacgctaccctggaatgcaggctacgccgagtgagtgcccctccccgacccccagctcaggcccgggcctgaacccgcttcgggtcctgcgcccgcctagaaagc

SEQ ID NO: 331773 - DNA, 199 bp, Homo sapiens
  chr3:53195788-53195987
  hyper
cgcgcctctccgagacccgatccttctgtccctcgccacccgatccgtccgtcccttgccctccgcgtgctccatcgccccacccccacccacacccctacccccgcccgccgccccctcgatcccgtcctcccggagccgcgcccccggcccacgctcgccgccccctgccagtccagccgcctctccgctctaccgc

SEQ ID NO: 331774 - DNA, 571 bp, Homo sapiens
  chr3:53527829-53528400
  hyper
cgagcggtttgaaagaccttggctttgacttccctgtacctgcctccaaacacacgtgggggcggggtggggtggggggagatattgccccccatccccgttgccttccgcgacgccaggccaggcgcagggcaggggagaagatggggggcgccctggattcgcggttccagctgcaggcagttacctggggtagtgagtgctctctacagacccgggctaccccaacccccccgattccagaaagggccggagaaaagcagggggcgcctgccccgctccggagcagccagggagcccggccgagccttgacgaggatgagctcggagaccgcagcagctaccgcccgctagcacctgagctcccagggggcggggcctcctccaggtgtgcgcagaggaggccggcgcggagtcggggccggcgcgggagcccgagctgtcccccagcccagaaatgcgcggggaggagcggttcatccgcaccccagcgccgcgggagacactggcgccgcctgcctcctccgggtcccggggggagagcgcaccgtgcggcgcggagggggttaac

SEQ ID NO: 331775 - DNA, 395 bp, Homo sapiens
  chr3:53879638-53880033
  hyper
cgaattacgggggcgtgggtggaggctcgttaaatgcagatcccgggcctgacccggacctgccgtctggatctcattttaggcggcgctagagatcccgggccagggaaacttgagaaccgcagctccaaatcgccagtgctgacggcttccgctttgggagccccaggtgttgctgtccgaactcacttggtggaaacagacatttaccagaaagcctggggtcgggcagcgggcactcctaccgctctaaccccgcgtagctgaaagaattcgctccctcaaaggagtcagtgagcttcggcagtctgcgttccacccgtttcgcttcgcgcggcggggcgattgtgtaaagcgggcccgggtctcggcgtccagcccggccccaaacctcc

SEQ ID NO: 331776 - DNA, 1821 bp, Homo sapiens
  chr3:54155239-54157060
  hyper
cgccgggagccccggcgacgttaggagcgcactccttgctggggtcaccggagttgcgcttggccgggcaaggatgactcagcctcactccggtcggtctttaccgccagcctgcgcgagggctccacaaagttcccaatcacaccccatacctcgcacgggggagaggggttctgcaagctgggtcccggggtgggggcagcggcgagagaggcggggagaagcctggttcccagaacgcgcaggggcttctccggcttcctttctcctcgcccctgagggcggcgagaaggcgcctcctccggcgctcactgcctcctgcccagtgcggtgggcgccggagtggggagcaggcaatcccccaggctcggagaaatcttttatcccgaaatccagggtgtcccccggtcaggatcgactcggcgccgcgttggcttcctcgctcaaccctgacatcccggtccccaccagtcaccgcagccgggcggactccgaaggcagcggccgctggggagccccggggcctgggtcgggcgcgcagggggccgctgcgctgcggccggatgccgggagccccgcgctggtgcgcccaagccgtggtggcagcaccgccctccgtgctttcccctgtcgggcgccgcggccggaggagcagctgcgggcggtcacgcagcgctgccctagccagagccccgagctcccacccagtcccatccccagcccgatccgccccgcgtgcgatcccgcctgccgccgcgagcctgtgctcctttctgagatttctgcttcttccccagctccctccccgcaggagaatcgcgcggcgggggcggagggcgcgccccctttaggttccgcggcccccgaccccgcccggcccaggggcggagcgggcatgctacgccctctcctagcagccgcccgcaaagtgcggagcgccgcgccctgccctcggcttccctcccgcgcccccaacccccaccctggctagggtcgcccggcccggggccagccccagagtcgcgcccgcggtggcggactgcggagttgtaaagaactcagcggccgcagtagcccgggtggggcagggcgcgctccgccgcggccaaggacactggagtttccgagtccccgcccgcgcggcgcctcctgccccgccgccctcccgccgcggcccgccggactccccggggccgccgaggcggggccgggcggctgctgctgctagaggcgcgtctcgctgcctcctcccccgcccgcctccctccccacctctcctccctccctccccacctctcctccctccctctcctctccgccctccccgccccccccacccgctcctttttctgctccccaagtgagccgggcgcgcgagaggcaggcggggcggcgcggagcggagcaggcagccccgcgcgctcgcccaccgcccgctccgcgcagctccccgcggccgctctcgtcgccgccgcagcgggcgcgtcggagggagcccagcatggccgggccgggctcgccgcgccgcgcgtcccggggggcctcggcgcttctcgctgccgcgcttctctacgccgcgctgggggacgtggtgcgctcggagcagcagataccgctctccgtgtaagtgccggctcctgcgccgcccggggaggggaccttgccgcctgcgacccactgtgcccaagtttgggcgcctgcaggtgcggctgggcaggacccgccgcgggcgtcggcctcgccgctcgcacctgcctttcgggacccgcgtcgggcggcgaggccggggtgggatgctctggcccctgcccgcaggttgcc

SEQ ID NO: 331777 - DNA, 1998 bp, Homo sapiens
  chr3:55520345-55522343
  hyper
aataatgctaataacgcgaccccgctccccgcgccggggtgcgcgctggccccccgccaggcactcttaaaggcaaaggggcctgaagcgctcgagttactcggccaaggcaagcctacaatctggcctccgtcggtgcgggggggtgtcggggaaggtgtacgccgctctggagtagttggcccctagttcctctgcgggttctctcaaccaaggagtccctttccccatcccgagccccggccacacaccgtcccggtgcccgcgcagtgggcgcttggtaaatatttgttgaattgaatcattatcctgttactgaaatatacatagtaaattacactcgatgttctcagagcaaaaggaaagtcgtcagtgaaccgcactcagtttgtctactatcgctcttccccactttttctcaaaaatcaaaattgtttgcagaacgggtggtgcgaccagaagtgatctcctgggacactgaggcagtgcgcccggcgtggagggcgaaggggtaggggttcctgccagcgacgctggagttccagcttcttcaggcggttggggaaatggagggataggaagaggcgaagggaactcagttaacttccaacagggggtggggggaagtaaagaaaaaaagtggcagcgcactgaacacctaccttcatggcgagggggagggggcgcggggaggaagtcgccacccgagcgagcgcagccgaggaatccgagcggagcgaccgggttaagcctggggggacggtcaggagcagggctgcggagtcctccggcgcgcgtccggcgggcgcagtgaaccggagctgaagcgggcactggcgcccgggcctggactcccgagttggggcagagctgggatgcgcccaggaatggagggggcgcggacgcgcgcgagccggcagcaagggcagggcctggtcggggcgcaactagggagccgccggtccggcgagggcgcgcaggcaactgttccacggagaggcgctccgtttccaacgtccatcagcgacggcggtaattagggctttccaaccccaaatgtgggcgtgattgtgcaaaagaccttacgacaaataataataaaaagaaattcttcacaagagggtgaaaaaaatgtaccactactcaactgtggcccggggcgggggaaggggggcgatctgtgcgcccaggtgcccccagttcattcacaccacagattctgcaaactcttggcggctcacgcctcctgatctccagctcctcctctctgggtctgtagccgaaacgtctgcttccagacgctgatcctgcagccgcgagttagtgtggacgtctctgtacacacacagacacacaccccaacacacacacccccgctgcagctttggggccacagaacaatcaggcgcgcatggctttttctccgggagatgccgctgaaaacgcacaagtcgccatctgagctgcaagagtcagccccaaattgtgtcctttcattttagggttcggcaaaaacggggagcaaaataggtgaaagtcgccccggaacttattgctgtgcggtgagctggaggggtgcgactaacccaggggagacgcgggctccccccccccaccacgtatcccgttctttctctcttcgggttgatctctcttttccccgtttttccagggcgaagggcgaagagcagcgagtgcaccgcgggcgcgaggctggggaagggcgagagctcggagctccgcggcggcgactcagctccggcggtccatggccggcgaagctgcccacctcctcgtttggcgcccgggtccgaggggcgggagagcgggccggcgggaggcgggcggtcccgggcacaacggcggcggcggaagggctcgctgggcagctgccgcacggaccccggctctgggcggcggaggcggctccgtggagctcgcagcagatttccacgcgatcctgtgccccgcaaacagactgaccgaccgcggggacgc

SEQ ID NO: 331778 - DNA, 716 bp, Homo sapiens
  chr3:55522560-55523276
  hyper
cgcatgcgtggtgaggccggcctatgacaaactctgcaggattttaaagccgtactacgggctggggtgccgggaggcggggtacactctccttgtctccccttctctaagttccccatcccccgcggcatctgctgaaagagagaggtccactccgcagccgctgcctgcctgccgcctggttgtctgcgctccttccagagccaccgaccggcgggaggctgaaccccaacttccccgcctggaccccttggctcgcccgcgtatcccagaccgctcccactggggctccacggagactgctgccttgacatggaacctcatgggggacctcctcattcttacctctgggggaggatacttaagcactggggctgatggatagggttaggcgctcacctcctgcaaagtccccagagtagtagggacttgggtagtgggatgcatgattgctcatctggctccggcccagagcatgaggcgcgatgcgtggtcctgccacggagatcttggcgggtgccctcaggtgaggagattgcgaagtttggcaaaaccgggttccgggcaccggaatttctagacgcttccagatgcccgtggttttggggactccggaggggcagggttggtggatttgtgtccgctacctccagcacgccgagggccccaccccacaaacagtgcctcacactggagcgtaatagttattttccgcc

SEQ ID NO: 331779 - DNA, 764 bp, Homo sapiens
  chr3:57198384-57199148
  hyper
cgcgcccatcgcccagacagtgtcaaaggagcgctcggttccacgaagacggctcaatgcacacggcgaaagtctgggcacctctccagtctcgtctcaggcacctcacccagatgacacccacgcggccctttggcggaaaaatatccgcaactcgaagcagggaaggaggatatcagccgcgagaccttcacaagacgaagggctgaaccgggaggcgaagtttctcaggaggtcccggagtcagaggaggggtaggagtggggtgacggccccaggcgaggaggaacaaagctactagaagagcggggcgcatccctccccggtgctccaagtcccctctccggccgcccgggccttagcagggttgtggactgaaagtccgggagaatacccccttccctctccaaagcgcaacccggtccgggtggctcgggggatcccagcccgggacacgcagccctgggacgaaggaggtcccgggccaagaacaaagggtggggcgcccggcccagccccgccgcccctcacgcccgccctctgaatgggaccccggccggcggccgcacctcattagcaacacaaagccggggtcgggcagccgctttcatctcggccagggccggaggacacgcgtccggggagggaaaccaggaggatgcgcgggaggagtgagacccaggccggccgcggaccccgcgaagagcagacaggttggcgcgggctcgcctccccgcgagcacctgtgcgcgctgcgtcccccg

SEQ ID NO: 331780 - DNA, 502 bp, Homo sapiens
  chr3:57204028-57204530
  hyper
gcctggcctgggaccgccttgcctgggacgaaaggccccagactcagctgattcctccagactcttcctgtctaggacgccaaaaacatggccttcctaaacccagccttggcgcctcctgcacagcccagagacccagggcggcggacaacagaaaacctggggcggcggacccaaccctgcgcccagaaatcccaggacgcccaccccatagttctggagcggtgcgtaccttggccactacacggaattcaccggcccacggccacttcccgtttcttttcccggaggaaaagaagagcggatgtctagtctccaaggtaaccgcgagggggcgcgcgcagtccaggtcggagaccgccgccccagactaccctgcactgcgaccgcacaacaagtctttctagatcaaagccgccagggcaggtgggagtactctgctgttattcagagctggtgctaagctttaggggaagtagagtccagggggtcgtaagaaaac

SEQ ID NO: 331781 - DNA, 203 bp, Homo sapiens
  chr3:57261363-57261566
  hyper
cgcttcgagcggagttgggaatgttatcatctgaggaaactaaaaggcgccagcagtaggactttctccaaggtctctgacaaaatatgttgcgggaaaagtcaacccgccccaaattcccccgtgtggccctaactcgaggctctggctcctcgcgccggcaagctgaggaagagacggtcccctgcgatttagatacaaac

SEQ ID NO: 331782 - DNA, 622 bp, Homo sapiens; identical to SEQ ID NO: 198968
  chr3:57994558-57995180
  hyper

SEQ ID NO: 331783 - DNA, 1484 bp, Homo sapiens
  chr3:61546692-61548176
  hyper
cgctcggctttgtttcccggcgggggaatgcgctgtgttggaggcgcgaacaggagccgcagacggtgagcctcaccgctgcaaatgccagggcagtgaagccgaacagaaaaccccatcgctttaaaaaggcagctgtccgccctccccctttcccctcgccagggcgaggggcccctcaagtccgggatccgcgagctgcgcggaggatctcgccaaacccgagcaccgtgcggcgtcttttaagagctcgaacaacgggaatccagcaaaaaacaagccggccccagaaggcagcctccctcctctctccgcgcacgggctacaatcgcccccagtccccaaactgtcccagtagaggccgcgcggagagagcagagccgagggacccagcgcaaggcgggagccaagcgcggctgctttaagaacgcggagagcgcgcgcccgccgccagctggcccgggctgcgcgcccccgccgccaccgcgcgccccctgttcgctcgctccttcgctcgccggctttaaagtctctgccaggatccatgctcacatgttacttcctgtatggaggcatggccagtttccagccccgcgctcttcgttccttcccagcctgcgccggagccacaactttcaggagcatggactgaaggcgccctcgccccagcgcccctctgagatcctttgtgttttcctccgtttcctccggccgtttctattttggggggctctccgctccccctgcctctcccctccccttcccctctcgcaaacatgcctccttccttcccggggccctggaaggagctgcctgcctgaagcccggagacgccgcgccgcgctcagccccgccgccgcccgccggctctcgggctgtgctgcgctgccgactcaagttggggatcctcggctgctcgccgccgccgcccgcggtccctgcctgccccaggcccggggcatcgccgccggccgccgactccgcgccctgcccgatcggctctctcctttttaaacggaaagcagcctttctccgccgagaggatcgtccccagcgtggctctgcgttcccggtcactttttgagattttccggggggcgctcggcggcttcccggattccaaggggactcgggccgccgagcgcggggggcccgtggagcgggcgagccggggaagcgccccggcttagcggaggctcgcacggaggcaagaacttattcaacaagtttacctccctgctttcctcttttcgatgtgcgttttcggacatgcggaggttactggaaccgtgttggtggattttgttcctgaaaatcaccagttccgtgctccattatgtcgtgtgcttccccggtgagtgccggccgccgaggggatgcggccccggccggcgcgcgttggggatgcggagttgtcgcctgggcgcggagctccggcgcccgtccgggagaccctggagagggtggagggtggcccggcgccc

SEQ ID NO: 331784 - DNA, 211 bp, Homo sapiens
  chr3:62353707-62353918
  hyper
cgcgttcctatttctgaatcggaggtactaaaaatacccccgcgacagcctgaggaagctgtcgccgtcctctgtgcaaacaaaatcgacaattctccttccccgcgcaatgggtctgcgaattgggcggcgggcggggacagaaccgttggctgaccaggacacaacctccatcctgccccagagcgtctttctccgagccccaaccccg

SEQ ID NO: 331785 - DNA, 264 bp, Homo sapiens; identical to SEQ ID NO: 229584
  chr3:62354297-62354561
  hyper

SEQ ID NO: 331786 - DNA, 85 bp, Homo sapiens; identical to SEQ ID NO: 229585
  chr3:62355813-62355898
  hyper

SEQ ID NO: 331787 - DNA, 286 bp, Homo sapiens; identical to SEQ ID NO: 229586
  chr3:62356105-62356391
  hyper

SEQ ID NO: 331788 - DNA, 697 bp, Homo sapiens; identical to SEQ ID NO: 229587
  chr3:62356631-62357328
  hyper

SEQ ID NO: 331789 - DNA, 117 bp, Homo sapiens
  chr3:62357619-62357736
  hyper
ccaggctgccccaaggaagccgccgccgccgatcgcccctcccggcccccctcgccgaaccctgggcctcaccttgccgcacacctcgcaggtgaagtttttgggcttgccatctgc

SEQ ID NO: 331790 - DNA, 380 bp, Homo sapiens
  chr3:62362713-62363093
  hyper
cgggcgcccaggcccgtggccttccgattcgctccatggcgtgggttgcagcccgtcacgcacggccgccgggcccgaatccaccttggcgccttccctagcccgaggcctcagccccaggcctatttcacttggagcgcctcagcctagagccggacgctttggcttcttcgccatctggccctaggttgggcctcaaactcccggcggcggtagggaaacagacgatcacagttaggcctgaggcccctcggcggcctgtgtccttcccacgccgaagaacaaggcgccaaggccgggcgcgtccgctgctctgcggggcctgaccggggcggcgacctctgggatccgcggcggtgcgacgccgcgccctggccaag

SEQ ID NO: 331791 - DNA, 65 bp, Homo sapiens; identical to SEQ ID NO: 229591
  chr3:62363628-62363693
  hyper

SEQ ID NO: 331792 - DNA, 173 bp, Homo sapiens; identical to SEQ ID NO: 229592
  chr3:62364157-62364330
  hyper

SEQ ID NO: 331793 - DNA, 158 bp, Homo sapiens
  chr3:62364748-62364906
  hyper
taggaatctgatccaatacccgcgtgcagcaatttgccagcagacgtgtcattttgtaaggcgcagtgagggaaggaagtcgtctcgcctacctgggttttccacttgctacgcgattttggtgtgcaacccaaaggaaataatcgtttatagagaac

SEQ ID NO: 331794 - DNA, 2103 bp, Homo sapiens
  chr3:62859447-62861550
  hyper
agccagaaggtggcggcgaagtcaccttgggaagaggagaatagggtcaaagacaggacggcggaggggctgacccggacggaaggaccagagggcgtgcccctgctctggggtcagtgaggaagggtcagggggactggtgagaactccagccataaggaagcagtgcccgaggacactttggcgacgctagtcggtgatcagctgacccgggcagggagaggagggtgcccttcgcagagtcacgggaagcttcgccttctgggcttgctttctcccgcctgcccctgcggttgctctctgccccagcgagcggagcgctgctccaagacgctcttctccctccacctcggcgcccccacctgccgttgcccccgcccgccgaacgcacgcccaggagggcgggcccggagttgagcgcagccgcccgccgctggagagcgctgggagccctgcaagcgagcaaggcctctctgggcgccgcgggcagcaaatcactccccgagcctctcggtccacaaagcgggacctgcctgcctcgctcaccaacgctcccgggctgggggggctcgagcaagcggcgctgcgctccgcggccctcgccggtcccagtcagctccaggagcgctccaggctgggttgggctgggcctgggcgagcccggccgctgggagggggcctcgtagccctttccccagggcgcggtctccacctctcctgctcctcctcgccagctgcgccgccagctcccattgttcaccccgcccgcctggcgacgtccgggtgctgctccctgggcctcccaggcgcacctaccttctgctgccggcgagccatgtcggtgggctgcttggcattaaaggggtaggcgatgcagcgcatcacgaacacatacagctgcagcctcttcttcctctcctcctcctctttctgcagccgctccaactcttccttctccttctcgctcaccaccgacgggctggggctggagggccggccgccgccagcgcggctgctgggttgcagccccccggccccgccgccgctgctcgcgccgctgcccccgccgccgcctgcacccaccccggctccggcgccggcgccgccgccccccagcccggcgctgccggccgagccctcgctggtacggctgggagacaggcgcgcgccggacggggccgagccgagcacctccttgccgctctcctcctccacgatctcatccgattcttcttcgctggacgaagggtccagcatagtggcgcctggggagcggggtctctggagcccccggcttggagtgcaaaaggtggggggcgctggaggcagccggggatcagctctcccgggtgggcgcttctccccaggtcagggagcgagagcgctgctgctcagcctcggccgccgcgactgatcctctgcccggcggtcgcgagctgggctcagacccagaagcgcgaagggaggaggggaagggagaggtgcgtccgtggactcgaggtgggcaagggggagaatcaattgcgagccccgagcccgcagccggatgccatctgcggctgctgaaggaggcgcctccagaaaagatgccgagtgttgcaagctgtcgatgcagccaagagccgaagaggcatcttgccgattggggagggagcggcgcttacgtgtttattggcttaactctcccgtgtccgcggcgtaaagggctgctgcagagggctggaggggggagagcgcggagcgtcctcagagcctcagtacttctgaccccaataccttgccaccctcctcccctgccggcttcgtggataatttttttgttgatatctggctctcattgcctcaaccccttttcccctcccgcggacaaaaagttcttgggggagggagaaatccagaaaccagccgagcgggctgtttggagacgctaaatcgagaggtcttacttaggaggaggaagtccgtgagatcttatacgggaaagaaagggtccatctcctttccccaggcttctttacacctggggcgtggggggcgtgggggctgggcagcgtgtttgtcccacctgtgtaaactctgattccagcaacttattccgcatgc

SEQ ID NO: 331795 - DNA, 1125 bp, Homo sapiens
  chr3:63263853-63264978
  hyper
tgtgggccctgcctcgcccacctcctcgccctcccctctggagcgcggctggccaatgacagccttcccctggctccatgggtttccccctcccctgttgtatctaccctgccccagctcttccctgcccacccctcgctgactcgcttcgcttccccgacgcgctgggttcccggagcgcagagcccagcgttagcgggtgggctccccgaggccccctgccctcgccgggctgctccagggtgtcgctcctctggctgctcccgaaggggcttctggccctgaggacggtggtgccaagcgaacttcatttttaaaaagaactggtggatgagaagagcgagcgagggcgagctatggaccctgtgagtcaggtgagacagaactgggcagggcggctggctgggagcagggggcgggggatgccgcggcttgggagaggcgcccccagccccttcctcacgctttgctttctctctctcgcctcattcccccaaagctggcctctgcgggcaccttccgggtgctgaaggagccccttgccttcctgcgagccctggaattggtgagtagcagtgtgtgtgcagggaggggcgccaggcagccagctatcaggtgaggagaggtcggatggggtgctccctgctcagttctgctccaagccggagattcaaccctcaagccggggatttcaatcctgccccctcctaagatgccgttccaaggtggtgaggacaaaatcgaggcaccctgcttggaggcgggagtgtggacgcatttttgcaggggcttagacaagtgtcgtctcacctcaccgcttgcagacgcgcaggggctgtggaaagaaacctcccccttgggagataggggaggggggcgcatggaagggctgccgctgggttctggcccctcacctggaccttcgtggggatgaggggatgggtggagggacccatagttgagcggaggagccgggaagacttggccaagctcagaaagttggtcagaactgagacagctcctctgcgggactgggatgctggaagcgcgtgttcaactgctccgcgggagcttcagggagggaaagatgctgcgaagctattacagactgttataaacggcggc

SEQ ID NO: 331796 - DNA, 689 bp, Homo sapiens
  chr3:64430605-64431294
  hyper
cgcccgccctagaccgggctggtgctcccggaaagggggcagcagaggacaccccaaaagacggccctaaagtccccgctagagctccaagtggctggacgctggagctttggtgctgggattccgatttgcccggagggagggggctttccagggatcccccagactgtgaccctgagggccacggttcgggtctcactgtcgcccagccggggggtcggaacttaacccctcccgcgccttggagcgctctctcgcgccctggacgcgccccgcccgcggggccggcttacctggggccacaggtgcgcagccgcggggcgcagtggggctgcgcgcgggcgctcgcggccggctggaggtgcccggcgatcggccccgctcgagcgggggacactcaccgagcggctggagagtcttttccgggagctccggctgaacatggccggacgcctcctgctcgcagcgccgtccgtcggtccgtccgcgccgcggccgggagggcgggtagcctgggcgggcaccctcggcggccgctggcctggctgtctccgccttgcagtccccggctcgctccggagcgcacgcctacccctcctcccttccctctgcctctccctccacgcccgcaggtccctccctctctcccggcatccccccgccctcccgggttcgccccgcggtccacc

SEQ ID NO: 331797 - DNA, 1314 bp, Homo sapiens
  chr3:64671307-64672621
  hyper
cgggggtcgacagagagtcggggaaccaacgtggattccctgctaaatgctatttggcagcgcaagaaggcggcctccccgccctgcctcagtccctagggaaacgtgcgccgcaggctccctctctccactccctggaacccgtgagtagtagaaaccccagaggaaccgaaatcacgtccggacagcctctccaggctgtctcccactatcccgtttctcccggccaccccgccagtagggtgcagagttggactgcgctgcacccccactctcggttccaccccaattcaaagcgtccggggtaggctccgccttctcccccgcccccagagccctcggcccacccttccgttcctgggacgggacctgctccctgtcaatccagttcagcctcagggttcctggcgcgtgaataaaggccctgagagaaagcggggactctagattacgcaccgccctccacaacacacactgaaggaactcccagtgccttgggcaggggatcctcagccccacatccccgatgcaaggcgcaccaataaggagtctggtccgccctgcgctcagcggctccgctcccgggtggccaagtttgctgcagggaaccgcaactccagtaactttctccgagtttggaaactgacttccaggccgcctcgcagcgttgggcaacgcgccgctgaaccgagtccaaactccagaaagctctgaaacatccagaagcccctgggggcgggtgtgtgcgctccacgccagtgtactcgcacgcacagagctagctacccaaaccatacgagtttctagctgatatttaacgccggagaggagcggagcctcgccacagtgagggtctctaggcttagaggacaattaagtcttctagaagcgggcgaggaggcggaaggggagaggaggtggcgcgcgcccacttaccattcctgagcagaggctgatgacggccgtgtgctcggagttggtattgacatagcctttgtagaaacagtgcttgagttccgcttcctcttcggaataaaacttggtctgattcaccccgggcgtcccgaggagggtgacagtgaacagtggagcgataaatccggcattggcggtgagattaaatagaaactgctggccgaaggcagagaggcggtaatgcgcctgggaggaggtagaggaggaagaggaggaggcgaaggcaggccaggggtcagtggcagagttaatgctccgtcgcgttcttttgaagtggacgttcgtgggaaagggttctccgagagcgttcactcggatgggagacacgatttcgtattc

SEQ ID NO: 331798 - DNA, 792 bp, Homo sapiens
  chr3:64673134-64673926
  hyper
cgctgcggggtgcccctgcccaggagcgaggaccgggaggcggcgtcggggccggcggggtcccgggggccggagcctggttaccttgcctcgggtgcagcctgtccttgcgcacggccgccgcggcgtctgggctccccatctcggccaggtcccgcaccaggagcgttagcagtgtggcccaggatacaaactgcatggtgcttcccacccctccctccgctgcccccacccccctccctcctgccctccttggctgcggcggcgacgcgaggcagcggccgtggagagcgcgcggagcccggcgcccgccgccaacttttgactttaggagtcgctgaggtctcgctgcgagggtcccgtctgcgctcggctgagcaacgccgccgcctgccgagagctgagccgctcgggccgcaggaggagccggaggagcaggaggaggaggaggactggggctcggctgcttggccgcataatgcccagcgagcgggcaggagaaggcgaggaacttgcgctccgaggcgcgccgggcgccctgtgctggccgggatagctgagcggcttcttgaatggggggctgggggggcggaggcgggggggccgcgggtccacagcctctcaaatgcccccggtgcacgcctctaagaggaggagaggggaggagaaagcgagacgaacggggaccgcctccttccagaccatgtcccctcctcggccggcccgtgcgggactcgcagccggaggccctgccggctgcaagaggcggaggccagaggcgtcaccagcgcc

SEQ ID NO: 331799 - DNA, 1440 bp, Homo sapiens
  chr3:66024122-66025562
  hyper
cgctcccctgcacacgctcgcgcactcaagccatcataaaacaaactttctgggcttccccgcgagccccgcacaggcgcccgcgagctttgtttgcattccggtgcctctgggtccacgttccggcgcccgcccgtgctctcccggaccagagtccactctgcgccgctcgggttatttttttttccttccttcctttctctcttgccttttacaaatgcggtgcctcctctttgcctcccgcccggctcgcctctcctcgctggcaggctgttactgagggtgagggaagcccttccagccagttgccgggagccctgaagacgcggtggcggggcggcggggagcagggcgggaggtaagtgctcgcggcccctttaagcagatacaaaggctcggcttgttttgttacagttcattctattccgcgccgcggagcgcagcggccggcgacaggagacgcgcgcgcatgcgccccgcggccgccagccggccggcccacccctcccctcctccccgaagggagagattccaacgtgcttcccgatgggtcctaaaaccgacctgccgggagaaggcaactcccccccaacccttcctgaacccctatcctctctccttttctttcagtgccctggactccgcggattcctttggggctggagggccgcacacgtgttttactccaactgtttgcaacttttgaaacccgggcaatctggctttggcatttgaaaaccatttcaaacaggtgggggttggggaggctgccacactcaccctggcgctcacactcacgcacacgcgcacgcactcgcgccggccctaagcctcctaaccgccctcggccagtggctggccaggctgtcggtcacccagcccggctggttcgccgccccccttgccgcaggtcccactgaaacccccgagacccgccccggggcgctcgccgcctccctgcctgccctgcgcttgcgggttcgggtcctggcgcggggtctgccagggtctctgcgacccgggggagggggacggtgggatcctccggttccccaactgggatccctgtgcgggtcacacgcgctcttacacacacccgcatccttaaactttgggaccaactttttaggacacgggaaactacaggcaagagagagaagccatggtgctagtgtgggttcaggtattcaaccaaaaaagagatccctctagcttttcaactgccctgccagcagagactgctggacccagtcaatcatctgccccggcctcaagttcctggcagggccgagaagcctgcggacctactccggggccaggagataaggatccccgccgggcgcggacatgccctgcgtcctggcgcccgcgggggcgtgagagaactcggaattcgcagcccgggggtagctgcggcctccggaggtcgcccgggggtgc

SEQ ID NO: 331800 - DNA, 1570 bp, Homo sapiens
  chr3:66550318-66551888
  hyper
cgcacgacgcgtgctggctaacccccaaatctctacgacccacgctcgctcgtctccagaccccacgaggcacgctcttcttctccaggctctctcgcacgcctactcccccggacctccacgcagaatctcccttccgccactccaacctgacagtcttccaacacgcacaagcacgcacaactccacacacacaacccagtccgcaccccctccctgagtacgaacccccgccgctccatccccaagtgacagagccccggggcgcagagagggcggaaagggcggcactcacaggctccgcgtccaggagggcaggtccccgggcaacgcagccagcccgcgcccaccgcagtccagcgagtccccagcgcaagtgcaggcggccgcgcagggcgcccgcgggccggccgcggcggtcaccggctccagccgaagcaaaagcagccagagaaggagaaggcaaggcgagcggcgcggggccccgagccctccccggaccggccgcgccatcttgtctggagcgcgctgcgaactccgggcgcggggactgtgaggacccgaacggccgcagacgcgggcgggcccgcggggcgctccgctcggctctagactccgcaccggggcatggcccccgccccaagttctctctgcggccgcggctccggcactcagcgtgcccccggtgcccgggccgctccggagcacccggcgggggccgcaaaccccgcgcccatccgggccggccggcccgcccgcgctagctgcgaactccgccgattcgggcaaggtgtacccagcctgcgctcttcgtccgcccggggcacgccgagtgccgctaccgacaccggccgagggcagtgctgccgctgcgcctggaagacaggcgttcagccccgcagcccgagctcggtgccggcaggcatcttcctctgggctcggagcgcaaagccgtagacctcgggctggacggcgcggccggccccgcgctgggaggccccagtgcgcctcgctgtccccacgccgcggccagagagcgcgcgcgcgcgcgcagcctcgggttccgcacggctcctccgcgcagcaagagtcccgccgacctcgcagccgaacaatcagccgcttgctgttcgcctccccgcggcccagccccggccggtcccccaagccccgcccccggccgctcgcccgcacacaccccctaggctccgcgctccgcggccgcctgctggcccacgttggatgctttgcaacagcgccccgccacgcctccccgcctgctgctcattggctgccggagtccaccgtggccagcctcgagggccattggagcgctcgctgtgatcccgcccctcccgcttcaccggctaccccgcccccacactcttttcccacccaaggtgtgaagggcgggagactgggaggagaaagggagggacggcccccgcctcttaaaggagacacgcaggttgttgttggagaacgggaacgcgggctggggaaaggaggcgtgaagatacgccctctgcgtcaagaaggggagagaaagttaagagggtaaaacgccccc

SEQ ID NO: 331801 - DNA, 1076 bp, Homo sapiens
  chr3:67048291-67049367
  hyper
cggaagctagtcactggcaggaagtttacggaagaagaaaaaggtaaaaaaatgtgccgggggccaggagagaggcctaaaatggggaaattcgcacttgaagagctttccctaccccagcccctcagaatgacagttctcctccgccagaagactacctctcccggcaggcactgcgcgctcgacggccacaggctggccagctccctgctctccacctccatccgaatcagccaataggaattcccggcttgggcctccgcccgacccggaccacgcgggagccggggcaatcaaactacatttcccgacacgcatgtgctcgcgtcgtggccaatcagcgccaggaattcggaggctaggggtggagccagatgcacaggacaccccattggccaggggaagcttagaagagccggaacccgggagctagagaagcgaaatgacatttcctttttaaatagctggagtcggggccccatcgagaaatggccgcgtcggcaggtgggtcgtgtggtggccagggcggcgtggagggaggtgagggggaaggtgggccggggccggccacaggcagtgggatgaggacgtagcggtgcggagctagagggaaggatgaagcggtggaggggaatgagaagagggaggatgaatggtgcggagggcggtgggcggtccggcgggaccgggatggggaggctgggtacccgccggcgctgcgccccaggaggcagcgggaggcggcttgagggggcaccggcggccgccgttgttcgagcttccctcgtgaggctctgccctcggctctcggcggagtccgcgcagacgcctctcctgggctgcgagcgcgtttcctccgcgagcacgggtgccgggctcgccgggctccgcaggagcaggctggcctttgaacttgttccgccgatcgcgctccgccctctgtctcccagatccttaactcgcggtcccacgaggtcgtgcgtatatccacagacatttgtatatatcttgtagggggaaaaagcctagcaagcagacacacaaacagaaaaatcccgcgatgccgtaactggctc

SEQ ID NO: 331802 - DNA, 1040 bp, Homo sapiens; identical to SEQ ID NO: 229607
  chr3:68980932-68981972
  hyper

SEQ ID NO: 331803 - DNA, 710 bp, Homo sapiens
  chr3:69434926-69435636
  hyper
cgagtgcccggcatcctgctggggccctcgggtgccgcgcgctccagctcacctggtacacgtcctgcagcccgcaccacgtccgcagcacctggtggcaagcccgcagcctctccgtgtaccatctccgcagcgtggacacggtcaagttccatacgaagcggctgccgctgaacagcaggtcctccacgccacacatgaacaccgaagccatgcctcctccttcgctctgaacccgggcgtcccggctctcgtacgtgcagccccgaccccagcggcctgcccgcctgggctcccgacgccggcttctgctggcagccggggggtcaagcctgccaccaaactcgtctttcaccgtgcgtcctggccaggctccggcggcatgccctgggattgggtgcccgccagccaacggctgcgactggcacacagaagcccagtgtccacccccgcccgctcgcagcgccgagcaagctgtgctaagctccaccaagctggccctcgatgctcccggggcacgggaagccctggccggcgaggactccccctggcgcttccccagggcgcggggcagggacggaagcggagcaactctttgcaggcagagaggggagctgcatttcagcacacttggcttccacgtcttgcgcgcgcgcgaacacacacacacacagacacacaccccccacaccggacgagtggtctcctaa

SEQ ID NO: 331804 - DNA, 1217 bp, Homo sapiens
  chr3:69590941-69592158
  hyper
ccccccctcttttcgctgccttttagaagtatctctgggggccagatctgggcttcatcagcttttctcccgacctcccacgaacgcgcggcaaccgaagcacgcggtccccggcggcgcgtttgcaaaccccaccaacgccaacgcctcgaaaccgccaaacttcctgtctccataccaccaaagcgaccaaagcgccgtgccaagtgccccagggactccagcggaggctgcactagacctcgagccccagggcggggttttccgctctcccaaactcctgggacccgcacctccgctgggggtctccaaacgtgcgcgctgcgcccggggcgcaccgggcgcgcccgtggccgcgtcttgcggcctcgccctggcagcacgcttggggagcccggggcggtcgcccacctacctgctccgccacctcctccctgcggcgctccggggctgtagacggctactttattgtctcggctgcgcaccgcgcgggacctggggacccggctctgcgccagtcctgcaagtccactctgcgctgtgccttccccggcggcggctgccttcctcttcttcctcttcctctctgtccaagctccagctcagcacgtgagctacgcagcccgactcccgggctctctgggcagccagcgcctgccgcatcccccggcccgggtctgcaggtcgcccccgccaccgccgctcgccgtgcgtcctcgctttgctccacacttacagctgtgccccgggccgcctttctcgcgtccttccgtcctgcctgcctcctctcgctgtcagccggggctttcggctccctctctccccagcagcccccgcccgccgcctctccgggggctggggcggccgctgccaatgaggctcggctgatgcgctgttccggcccagtcattgtatcgggagggaaggaaggggagggggagagggaggaagggagggggcgccctcggcccccgccgcacggggctgcgggctgggctagccttccccggcagagaaagggcgccggtgccaggaggcgcggagcggtgcctgccaggaggaggggaaagagggggtcaccagcccgcgcctctccatcgctccctccgactcctccaagctctgggcggaacttgattctgcctcaccggcttcaggcatcccaggacctgagtgctgttagaataaagggtatgaggcaccggtggcagagggag

SEQ ID NO: 331805 - DNA, 778 bp, Homo sapiens
  chr3:69788429-69789207
  hyper
cggtgtccaccacgttgcctctcccccgcctggccttctgggagctgtagttttcgtgggagcggctccccaggcgagctgggaatgccccgcccgggccgaactacagatcccaggcggcgctcggccgccagcccctcccgcccgggtgcgagtgtaaactccccgcgctggggcgggcggccgcgagccggcgagcgggcagagctcggcactgcgccggggcgcacggctcgggggacccaggcccagctaccttccctccgcccccgggctctgttctcactttccagcagtggaaggacgggaagcgggagccatgcagtccgaatcggggatcgtgccggatttcgaagtcggggaggagtttcatgaagagcccaaaacctattacgaactcaaaagtcaaccgctgaagagcaggtgagtggtgacagctgggcagaggcgcaccgggcggctggggggcactgcgtctgccactctggggcgaggagagcgggtcgcgggagctctgggacaaggacccagtgcccttgccccggagcagagggcgaactgcccctcgcagttgggggccgcgcctgcccggcccaagtgcgcctttaggaagctcggatggagcgcacttcgcgggggcgcggcgggtcgccggggacgaagcgtccaggcgcggggaccctcggccgaggatgccagctgctgagactgattgggggctggggagcgacctggcgcgatgtgggggaggaggagcgccgggccgggacgctgtccc

SEQ ID NO: 331806 - DNA, 1710 bp, Homo sapiens
  chr3:71113110-71114820
  hyper
cgtttccactgaccgtccttcatgcagttctgacagttgagttagctacattcagagccggttcagctgggagtaccccgtggcaattcctcagtctgctgcacgtccaaacccaaaccccgctcactacttaattaaccagccaagtaatgcaacagaggcttagaatccccaacctgccagagtgttccattcgctcgctcgcctgctccggtgtggggctctgtgcctctccctccccctttactgtgtgtgaactcgtcgaatttgaacagctaagctgaaaatagcctagacagatatagaaacaaactatcagaagcaaagaaacatccacatgggttacactgagatggaaggctccttgtatatttcacacgctctgaaagtgacagaaatcacaccccagatacgtcccccgaacggagtgatggcgagggcttcaccaaagtggctgcgtgaaggccagaccggcagaaaatgaatcgcaaacgaaaaagagagagagagaaacacacaagcaggacttcctccaactctcaactacaccccacccatgaacatttaaaaaaagagagcgagagtgtgagccaaagagcaaggggggtgggggggtatctctctccaggacccacaggcctgcagctcctttttcttgcccctccactccctccccgcctccacttccagagcgcaactcctacccaacttggtaaacagcgaggatgaggatgattttttaaaagactcaacttcagaaccctcgggctctcctgccttccccagcgaggcccccaggaagcgggcgccgcggagccgggggaaggagagcgaaaccggcaaagatcaatcagaaggaccaacctgacactctccatgtagccgccaggcgcgcggagccgggctcggggcgcccgcgcgggccgggcgtggggtccggcggcctcggcgtgcaggcggactgcacgcgcgcaggggcgctccggctcgcgggctgacaagacgcgccgcgccgcgcccacccgccccgccctgctccaccaatcacaacccgcctctaaacaccccgcgccgcgccgcgccgcgccgcgccccacacaatgggctccgcggcccgcgccccgcgcccgcgcgccccggccccctccgcgcggcaggtgaaatcacgctcgggtgccaccctgcttttgtctggagagcaactccacttaatagctgttaacccggtgacccgcctccggctgacgtctgggtcggccgggctcggcgcgcaccgctccctctggccggggctctgcggggccggggctgccggcggggcggcgtgtttgtttcgtctttgagactgacaaagagttgtcctaacctttccgagaaacccgggaggccgaagaggggcacccggcgctcgcggcgccaagccgactgctccgagcaactgttcggcttcgggagggtacgcaggtctcctaggcagcgcagaaaagcgcttttcctcgaaaacctccctgggaggagaactttcgcttcacgtcgggggtttcacagagccttggcctccccacacccctttctttcccagagtcggtctcgccaaagtgtgccagtgcgcaccgaggaaaactaagccgacgcggggtggaaataaataacaaccaaacgtgcctcgtcgctgaaccaggcgacttcccctctagaacgacagctgcc

SEQ ID NO: 331807 - DNA, 1326 bp, Homo sapiens
  chr3:71630573-71631899
  hyper
cgctcccggtgccttatcgctaggctcgcgccaccccggctggctctttggggacggagaacccctagtgccgcctggggctctccggtgtccctggaccccgcgcccgcggccgcctcgacttacccgcggagtccggggagggagtaggagcgccgccttcacgcccgcggaggaggcgccggcagcaccatggtccccggcgccgctgccgctgcccccggcccgctcgctcgctcgccgcgcgctctcttcctcttacaaactttcgggttctgcagtcgacaagaaaccggggcgaccctcagcaagtcttccccgtgcaggctggggggaactgaaggggacgggacgggtgagtaggccgaggggccaggacagagagggcagcgggctccgaggacccgcgagtgcgcgtggagggaagagaggatgcggctcagggaatccctgcaaggatccagagaccgggaaatcggcccgagccaaagtctcagcaccttccccaggatctcacaaagttgcaacaacaaaaaggaggggggaggaatagggagaagggggtgggatggggatacgatcacgggcgcaaggtttggagttacaactgtttatttagtccttattctcacagggggcgggagctgcgcgggaatggggggctgcaggcagcgatttcgaagcaaacacatgggaggggggcatgcgactttgtttccgggagcggagctccccagagcccgtgtgtgtcactgccagtctcccgggaccaaggcggagctcacaacaggtggggaggggggctcgtcgagggccaaaaagaagaaggaatctaagtttccgagcgcgacgttgtctgaaaaggagggaggcgggaggcgggggcgagggaaggcggaggcagcaaatgaccgcgaccccgcggcaactggcaaactcctcggctcccggcgccgccgccaccgccgtggtccccactcgaagcgcacgccgcctcggctcgctggctccagggagtcgtctcggcgggacaggaatagagcgcagggagctcgggaggaaggctgcgcgcaagcgagggacggagagccatcggccgccaggacagggccggagggacgaggcgacacgcgcgcgacgcaggacaaatcggagcttgggaaatctccccgtcccccaagcttcagaggggggtaaaatcagaaaatgtgtgtgatggtgggagagagatccgggcgcggcgactcctcgcagcgcatccggctcccgcacccacccgtggatctggccacggctgttgcggactcgtctcgggaaagcggaggc

SEQ ID NO: 331808 - DNA, 976 bp, Homo sapiens
  chr3:71802532-71803508
  hyper
cgaccctgccagcccaggcaacctcccccgcgcacggccaccgtgaccccagcgcgggcgccgccgccggacccccgttacctggggccaaacgcgacttgtcgccaccttgcgtcctgggccctgcctccctcccggccgcctcccgaccccgcggctgctgcggaggcgcccccagcccagccgggcccaggcggtgcgggatgcctcggcggggctggcggcggcggccgcgctgcgcgctccggcggaggggagggggctccgcggcggcggcggcggcggcggcagcggcggcagcggcggcggcgggcccggcggggggcagagccaagaggcgcggcggcagcagcggaggagtaggaggagacggaggaggatgcggggggctgcggacggtggcgaggccctgtccgcagtgaagcccgcggcgcctagggcgcagggagtggccgcctcctcctgcgcgcaccattcctgagatggcggcggcggcacagcggcggctcggggagcccaggaggggccggccgggagcgggctgagccccgcaggacggggagctcgcccagggccggcggagcggcggagctcgggccgggcggcctgcgggagcggcgaggcaggggacggccccggggcggagcgcacggcctggtgaggccgcgatggcgaacgcgagcgagccgggtggcagcggcggcggcgaggcggccgccctgggcctcaagctggccacgctcagcctgctgctgtgcgtgagcctagcgggcaacgtgctgttcgcgctgctgatcgtgcgggagcgcagcctgcaccgcgccccgtactacctgctgctcgacctgtgcctggccgacgggctgcgcgcgctcgcctgcctcccggccgtcatgctggcggcgcggcgtgcggcggccgcggcgggggcgccgccgggcgcgctgggctgcaagctgctcgccttcctggccgc

SEQ ID NO: 331809 - DNA, 792 bp, Homo sapiens
  chr3:71834320-71835112
  hyper
cgttataaaggctagccccgccgtgactcacgccggcgcccgcccggcagcacacgcggggggcacggcgcgggcacacaccccacgccccacgcgcacacgcgcgcccgcctcggcccggccggctcccagacgagcacgtgctatgcgcggccccccgcgcccccgcctcgggcgccacgcaggcagcgctcccggcggggcgccccgctctgcgccgttccctccgccgtcgcccagccaccgcctttcgcacgcgccggaaccgcttttgtggtctccgagacactcatttgctgtcctggtttccaaagctccacgtgctcagcgccgaaaacttgcaaatcatttgctgtacagatgtttaggggtcgcctactacgtgcggggcgctgtggacacatagggggcggggggtgggtgagggggacacagcagcccctgaatccattcgtttgttcagcaggtctatactgggcgcccgctgcgtgccaggtactgccaccggctctctcctcacggtggaataacttaacagagaagacagacatcaatcaaataccctggaaacgtggaaggcaggggaaagaacaaagggagagcaaaatcgccccaatcccacatcacccgcgacgtgaaaggatttgtccttccagctgcgggactcctatttgtttatttcaagtcagaggccttccctttatgcccacatctgttcccgaccctctcctctgattttcctcacatgtatttcctcccctcttcagccccgcgccagctccaggcacagcc

SEQ ID NO: 331810 - DNA, 367 bp, Homo sapiens
  chr3:72149806-72150173
  hyper
cgggtaagagaataataaatcggtcacttcactatccaattagcagctgttgctccccgctggaggaagaaaacaaacaggaagaccctgccctgttttgtttaggatcaaactcgcctctgtaccacctaccggagggactctggggtttgagttctggggacaagcgcgtgcccctgcctccgaatgagctccttttacgtgtgagtcctgggcacaaaaccacagccaccacaagccgcggatgcttccccagcgggccccgcgaagggaaactccgtgcaggggcaaagctgagttttgcaaccagtgagcgggagcccggggggcgtggccaggctgaggggatgcgttgtcctggtaaccc

SEQ ID NO: 331811 - DNA, 530 bp, Homo sapiens
  chr3:72787779-72788309
  hyper
cgggtgccttcccccaacgaaagccactgatgtcgcccctctcctcccagcagcttccagaccgcgaccttctgtagctctgctcagaacttcacctggaacagcttcttacaattcttaaacagcccctcagtcgactgtgattaagcatacactccagcctcagcaagcttggcgtctgcccctgccgctgggagaccctcctccaggcacctgccctgggccccgccccgcccggtccgcgcgcacgcgcagtggccccaccccgccccgccccgcgacgcccgaggacccgacggagctacacccgctagttcagccaggaggccctgcgcggctccggggagagctgggtggttatgccacctcattagacacattggtggacgatgccgcggattagcgggttggctctcagggcggggcgcaggctttctcactgatccgggagcgtgggagcaggggcaacgcggggccatccgggagctgcccgcctgcttcgcagttggctttccgggccctcgagcaac

SEQ ID NO: 331812 - DNA, 72 bp, Homo sapiens; identical to SEQ ID NO: 226535
  chr3:73045503-73045575
  hyper

SEQ ID NO: 331813 - DNA, 613 bp, Homo sapiens
  chr3:73673919-73674532
  hyper
cgcgcacttcaggtccgggtccacgtcgccgtcgaagcggtccagctcgaagcccatggtggcggccaggccccggggtcgccgccgggcggccgggcgccccctccctccccacgaggcggcccagacaggccggctacgccgcccgcgcgctcgctggctctccccggactgagcctaattgatccagacttcctcggaaaatgcccgaggaacaggactcctccggccgtatttgcgcgagcgcgagcgcacatacatcgtgccttggatgcctcccgccagccccccgaaaaagggaggaggctggaaggcagaagcgcgtgggaggacactgaggctcgccagaagggacgggccagcccaggacgccagcctgaatcttctcgggaaactcctttctgttctcttacagtctacgctataggagacaaaacgccagccgagaaaagctcgctgagtttggagctgaggctactgctttctcccaagggttctcttcgagccccttcccgaacggatcaaaacttttttactcccttctccctcccccttcctctagtggctgattgcagaggactaaaaatatcttggggcccgctatctcagcact

SEQ ID NO: 331814 - DNA, 499 bp, Homo sapiens
  chr3:79815581-79816080
  hyper
accccacccatctgcgtgggacacagtgactcctagaagggtatcccaggattttagcggccaggtgtgagcgccctccacgcggtcctccgagacctcagggcgcgtggcaactgggcagaagccgtctctgcagcgccgctgccccgggtggagcggcagcccaggctgcagcagtggggttgccacgccgagttttccgcatcggccgcccgcagggctcgcctgcttctccccattgtgttctcagagctgtgggacccagccgcgcgcgcagccgcacccgcgccaacgctggaaccgaaggctcatggaagcggggctggcaagatggggcagggagaaggagcaagaaggggccccagaagggcacggcgtttcatcaataatgcagaggctcctggacctccctgcaatacgttttccagctaaacgccaccaactggagcgcttcctggttcgtcccactcgtgtggtttttgtgtgtgaaagatgggac

SEQ ID NO: 331815 - DNA, 1260 bp, Homo sapiens
  chr3:85007731-85008991
  hyper
cgcagaagaacctcgcacccaggacctggcccaggcaccacgaattccagaacatgctggggacacggctaaccccgccccctcgcggtggcgattggctgaacccttcctgagtgcaaagcgctgattaatgaaggcagttgtctcgcctgcaagttcgggcgagacatctctaaagaggtaagatccgccaggggtgctgaatgggggcttcagttcttcctgcccgaagggtccttgagaagcctgtttgtttttcccggcgcttgtctccacccatccccttctctcattggccagacctggtgggcgggggagtttccattggccggggggcggtgtctgtccctggccggggtgggggcggggcctccgccgctctgagcttgcccttgtgtctggtgcttcgtagagctgccgccgtcgccgctgccgctgccgccacagccgccgctgcagccggagcatccgggagccgccactgccgccgccgctgccgctgctaccgccactagcgctgcttccactgcttctacctcccctcccaggaccccgagacaccccgggcgcgagcggcagtgctgcttgcttgctcctcctctcccccagcccttcccctccgtgacctacccactccttgcagccctcgcccgcaccttctccaacaccccggcatccctgcaccacctgctcgggcagccccggcgggctctgggacttgctgtgcgcgccgagaggaaggcaagctccaaacccctgcctggaagacgggctgtcgcggctgcaccaccagcaggaggaggaggagaagaaactatttcgcgataccccattctgcgggtgctttgccgctgccgcttctgctgccgccgatccgagtccgcgggttcgaacaccgcagcggtggggacggtgggtccggcgggcgccgggaggaggacaccagcggagccctgcactctcgtgccccgctcaccagcatctacttgccccctcgttccttccccagccctttagagaagggaccatgatttggaaacgcagcgccgttctccgcttctacagtgtctgcgggctcctgctacaaggtaatccccgccccggcgcagggaacatcaacttctcgcccattccccatcttccccattccaccccatatttccactctcccctcccagtctccctgtccccagcgatttccaccccctccccctactctctggtgcggcagggggcagtggcagtttgcaccagcccctc

SEQ ID NO: 331816 - DNA, 143 bp, Homo sapiens
  chr3:85010663-85010806
  hyper
cgggtgtctgacacgttacttaggtttttaatccgcgctgagacaatctcacagagaccctacttcacctctcagtaacttgcatttctcagctctgctgtgtgtgtgtgtatgtgtgtgtgtgtgcgcgcgcgcgcgccggc

SEQ ID NO: 331817 - DNA, 1088 bp, Homo sapiens
  chr3:87841626-87842714
  hyper
cccgcccttctccacgcatcagtgaaagaggagggaggagacggaggagagaagaggcagggaggcgaaaaagtgacagaagcaagagagaaagggagagaggggtgttgaaggaaggaagggaggaaggcaagaggagagggctgctaggcgtgctggagagcctggggcgtccgcccacccgcaggcgccccggacccgcaagggcggcgcaagacttccccagcgcgcagtcagcgtcgcggccccgaaagctggcgacaggcgctgctgtcttcccgccccgtggggtcgcccctgccctcccgcgccccggggctgggggcgccaccttgccagctccgactgctgcagggagcgccaggggtgagtgtgcggatcagcgctgagcccgggagtgcgggtcacgcccgcagctggcgcgcaggtggggaaggggtgtggggacgtggggagtgggaggctggacagcgcttgctctcggcggaaacgctgggaagccggcgccaagtcctttcccacactactttgatctaacagcgcaggaattcaagaattgccctttcccttttctgcccacaacctctgctccctgggggcgaagttctgtggtgctaggcggagatagtggtcaaggctgggaggaagggaggggtctgacccgggcccaagggcgaggggtggcggtccaagccggcgagaccccacttagggcgcaggctcctggcgctcctacctcgggaagccgctggggtggagagagacggggcacgggccagaatccagcagcggaaggaggggagagtcttcgaatccatctctcggtgggatcttgagaggattcgcgggggggacggtaagataaatctgaggagctggaagaagccgtagatcggaaatcgcttgcagttttccaactttatttcccgcgggtacgaaccattaaggtaaaagggtcagagagagcttctacctcgcggctgcagcttgcctagttgccgcaggtctgactcaaggtagggttgttggcgccttcctgtttggaggggcaatcaagcaaaagagaaagggggatccgagagaccggc

SEQ ID NO: 331818 - DNA, 913 bp, Homo sapiens
  chr3:96531754-96532667
  hyper
cgctcccctgacctcttgtcactgtgccatttccctcctgtgctttctgcccacttggaaaatatcgtatatcctttacaagaccgctactttctctcctctgttcacatttctccattaccatccacattttctcaaaacattccgacgggttttgaagtggggttttcaacctccctcgactgtgatagccgaagtcccttcaagaaagaaaaatgatgttggaaatactagtaacaaataaagtatcacggaaatccccacccaagcgatacggtttccttgacgcgcccttaaccaaggcgttaagtttagcctgacagcatccctccctcctttcggttcctggcctgatgagccgcctccacctgcgagcggtgcaggcatttttgttgtcgactaaccccctctagcgccgaactggcggcatccgagccgcggctgccaggccgggagaaggctgggcttggccgggctctgcagcgctccgggctccgtccctgccctgggcgcccgcctccgccgcggggcgaggtggtggagaccgcggacgccgagggtcctcccagtcagcacgccgcgttgccccggccctggggcgggggccgcggagtcccaccaagtggcccgcgcctcggcttccgggagacccgagcgcggggagggagtgggtgccgcgagggggcggctcgcgcggggagagccgtcagcccacggcgcccctgcgctgctgtggatgtggccacgcgccactcggcccttggactgctaggagagcgcggcccgacgccaccacgccgtggacgctcggggacccctgaatcccagcgtcaaggctgcgacgatgctcgtgacctccaccgcgaagtcacctccgcaaggcgacgcaaggacctcggcgatcccgggcgcc

SEQ ID NO: 331819 - DNA, 985 bp, Homo sapiens
  chr3:96532674-96533659
  hyper
cgccactttccagcctcatgtaaccccccctctgctgcttcctcccggcgctttgcttttctacaactggaagccgcgaaggcggctactgcgctgagccgctcgctctgctggtcaagtttgggcgacccgcgcggaggagggtcgggctgactgccgccgctgagctgtccccggacgggagcgcctgtccacggcactcaccccctccagcggtggaaatgtggagaagtaagtgggaggcggtgtcgggaactgactcctcttaaaacggtcggcgccgctgctctgaaatgggcggctaagtgcttgtgggactaagggcggcctcagagatgcccggaaaatcgctgccacggccagagtgcggcgcagacgcggcagagttggaggtgtccgcggtgcaggctgctgcccacgccgctcaggccaggtgctgagggctcagcccgcgcctcggccgaaccactctcagccccgttgagccacctcgtccgcccggctttcatcgcaccggccagaggaaagttcccgcggcccccacgcctcttcacagctgcagcgcctcccctgcttttggctccgcaagtgcccacttgagtcgggagaggtcctcgggccgccccaactgcccgccccacctggcagtccgtccccgcccccgtcctcgcggtgaggcgctccccgccccctcgctcccctcccccaaaccacagcccgagctcgctcttgcgcgcgcgcgctctctccggcccaagtgaatagtcctcgcgcaagcgggacactgtggtggatgcaattcccctcgcctccagccgcgaggagctccccggcgccgcaggcagcgtcctcctccgaagcagctgcacctgcaactgggcagcctggaccctcgtgccctgttcccgggacctcgcgcagggggcgccccgggacaccccctgcgggccgggtggaggaggaagaggaggaggaggaagaagac

SEQ ID NO: 331820 - DNA, 1410 bp, Homo sapiens
  chr3:98619774-98621184
  hyper
cgcgccaacttgggggacagacgggcaagaccttgcctttgcaactcaaccccgtgagtacccagccaggtccggccacgcacgaaagcgcaccgcgcctccctgcagcgtctgcagatttgttcaggggccaagagacccgcagccccgacggaggttcccccgccgctcactcccctgggaccactcaccttgctgggctccagcgtcctcgagcagcaggagcaggacaagtaagagcaggaggaacagaggcatggagaaggaggaggagttggagcagggagggagggagcgggagagggggagcgcggcccaggcgggggcggcggccgcggcccggacttggggacactgcgggcagcgcctggctctcaccaccgcccggctcgccatcgcggcggccggcagtctgcctgcatagtgcgggtgcctcggcagccccgcgcgcctctggccgcggcacccgaccaggagacggcggcagcggcgggagaacaagaggcagccctcgcctcaccccgcgccgggacccttccgcccctcaccccgctttcacctactcctccttcgtcccttccctccgctccccgcgccgagaccccaggccggagcgcaggggaggggagggaaggaagcggagtcctcgagccgcggaggacggccgcggcggagctaaggaacgtgcctcccgcgccgcgctcctcaccagggtcgccgctcgccgcgctcacccgcggctccggctagctggcaggcaggcccgcagccagctccctcgcgctccctctcgcgcgcgccggccacgccccctaggcaccgcggccaatcctcggccagctctggtccgtctccttccgcgaaacccaatcagcatgctcgctcctcgctcgacccgctagttctccggcccattcctcgagctccaccgccccttacctccctcttccaatccccttcggcctttggaggcgtcccacccgcctcctccaatccaggtcccgccctccagcttcggatccccgcggcccccgcccggcccgggcgcctgttattgttgggccctcagcccaaactgatcccgcagaggcggcagccagctcgtcagtgacttccgggacgtcccccatcccgcgctccctgctcctcaggcccagcttgctccttgctcctttctcctcgctcctccgacgcacatcagaccactggaagggggtgggaaacctggatcctgggttgttttagctgggagctgagtctaagggactttttttttttttttaatggcagagcgtggcttgttttgttaaaactgccgccagttgttgcaacagctccgagttagaataatagatgcagtgttcagtttttaatatatgtgttccctgttttctctgctctttttatggc

SEQ ID NO: 331821 - DNA, 510 bp, Homo sapiens
  chr3:99594790-99595300
  hyper
cgctttgcgaaacctgtctgcagtttgtgatgctgagacagctttaacagccacccacagacttgctacctggctgtctgacagcagtgccccttggtggagcgaagttgctctcccgggcttacctgaactgcctgcgccggggccgggcgggggccgggccggggccgctgtagtgccgcgctgcgagccgactgtgcgcgctccgagagtcgcccgaacaatgcgagcggggcgctgagcgcgcccggcctatgggcgttacgtcactgttctgccttataaggcgctccgcgtgtgcggcgctgtcggcgggggcgccggtgaccgcgggaccctcggccgcggcggcggcgcagccacacaccccagctcccgcggatgttccggccgtgtgaacggaccgtggttcccggctcccagcggagggaatgagtggtgggccggtgggccggggcgccggcgccctcctgtcgggctaacaaagtcattgggaggcagggtcgatcc

SEQ ID NO: 331822 - DNA, 434 bp, Homo sapiens
  chr3:100120034-100120468
  hyper
cgggttaagggaaagcgtgggtgtgagtaggagtcttcggaaaccctttttctttcttttcgccccgctgctgttcgggagatggacttctggagtccccgtcgtagctggtgttgtcccctctaccttcaggaaagaagggcagatggccctcttgcctactgaagccgaggaggggcgcgtatacagcgggctaagggcgctcaagagatccgagtggaagaaaaagcagcggcacagcactggaatgggcgggagtggcagaagagttgtgaaggctattggctagcaagggtggtgggcggggcgtagaccgagctacccagtttactggtcgatttcggatccagttttccagttatagccacgttggcacctcttgaacctctgtggccgttagcacggttttctgcccgcgtgcccgagaaaccaac

SEQ ID NO: 331823 - DNA, 464 bp, Homo sapiens; identical to SEQ ID NO: 222190
  chr3:101497830-101498294
  hyper

SEQ ID NO: 331824 - DNA, 95 bp, Homo sapiens
  chr3:101498512-101498607
  hyper
cggcaacgccacagctcggtacagttcggacctccacgccgcagcgaaagacttctgtcctccaggcaccttcactaacccggtgcggagcactt

SEQ ID NO: 331825 - DNA, 1081 bp, Homo sapiens
  chr3:105087465-105088546
  hyper
cggcaagctcaggtcacagaagaggtttgaaagcctctgaatctctcccaggaactggcggggagaggggtttgggggccagagcctgaggaagagattacaagtgtttgcgagctgctgctgctgctgccgttgctgtgtgtgtgggcgggaggagtgccctctccagatctctttattaaagttacatttctgggtgaggtaatgagctcacctgatgtttctgaggctgagggaaaaaaaaggcgtctgcgttctctgacaaatctcgggctctggggcggggactgtgaaaccatagttcaaccggatttaaagcaggtgtcctagtgtaacaacgctggggaggtaggtggaaaggcgagacccccttgggcctggcacagtgtggatttcactttttcgagattccactgtccgatggaggaaaggacactttggagccagggaatgagccaagaagggaggacaagggtgatgtcggtttgtaacatgcaaacgtccacacgcccacagttggttttccgattaaccccctcgagacttggagaatgtaatctcaccctcgtccacacccctgacacaggcacataaccagtttccttttcggtgccgtcacaggcgggccacgtcgcaggataggtttttctacacatttaactgctaaaagggggaaagttccgctttcagacctccttcacggtggttcttttggcgccacaggctcgtgtgtccagggggcaccgagctgcgcgctttcggcgagcggctagccccggctcaccgcaaccagccaccgtgaatctgaggatccgatatcggccctggaccctcagatccgtggtttcggtgaattaccgagctggcattgccgaaattctcattgcagtatcagtgtgttttgaaaggaaaggttacagcactaaaggcgccgtgtctacactgaggaagcaagtcttggacagtaagtgcgccttcttcggagccctctgcatagcagagcccggtgggggcgcggtgccaaaggccggcttcatttgagcggggtaactgccttccctgccggccactcttcatttcc

SEQ ID NO: 331826 - DNA, 236 bp, Homo sapiens; identical to SEQ ID NO: 229670
  chr3:106959643-106959879
  hyper

SEQ ID NO: 331827 - DNA, 319 bp, Homo sapiens
  chr3:107148769-107149088
  hyper
cgcccaggctgggaggcccaagtcccggcagctgctgcggtggacttagaggcagcagctcctgcttctgccccaaacgttcagtgtagtcggattcccggggacagcagggcagtctgcgcgcacatccccggggcatcgcaggacacctgctgccccctatcggtggtgagaacaataacccgaacccggttggaatcaactggaagaggccttttgaaaaaaagaatattccaggactacgcagtagccagacgactctctaagaacatgggtttccgcagtcagctccgactgcctcgttttaatgcagtttttc

SEQ ID NO: 331828 - DNA, 1735 bp, Homo sapiens
  chr3:110789509-110791244
  hyper
ggtactgtgcgaggcgggaggatggagagggcagggcggagagccacctgggatgagcgagggtcatggtggaccacagacgctcttcttatacgggcaaatgtttaatacttcccgaggtcgcctctctgccatcaaacgaaaacaggcaagaaaataaaactacacatacgaacatgcaaaggaaacaaaaccaaagaaaaacaccaacgcactcgttgggggaaatccatggcctcctgttgccagtcgcccggcgcggaaagtggacagcccagcggccagtgagaagcaagagcaagaaagcaaaccttctgaagacccctctcctcgcccagctccgccgaccattctaccaagctgccctcccagaaaaaagagcaggaaaaatgcctgtgcaaacgtgccttggcgagcggggaataagtgggctgggaagaagggaaggattcggagagcacagctgtcccggggaacaggaaggaggagaaagtctctccctcccttcagtgccccgcgccccagcgaggaggaagattactagtccagcaggctgcgtccagcttcctacacaggaacctttagcatgggcaacggaagggcagccccctcctgccttcccctccccaccccaccccctcgtcccaggtccccgccacagggagagcgccgcccgggagaggagaaggccgagcgtgattgtcccgcagccctcgcctcagtcggcgccggggcccccgtggacccgcgaggggtggagtgggcgagaccattggaaaggcagggaaggggggaaaccaggcaggaacgaggggcggggccgactaacctattccagattttcctgtcccttttaaatctctgctgtgggagaaaccccgttatcaaagtggatgaaaagaatatttttttttgaaaggggaggagcatgtgtaggagggcggggtgggaggagacagggcttgcgcccggggatcagacgggaggtggagttgcgcggggagggcgggcgagtcgggcgcccgctctgagagtcggtttcttttccccctcttgcgtggggcggggtggtgcgttccgagttcccaggagttcgacgcgggcgggtgccgaggggaggggagtggcggcggcggcgggcggctcccgcttcagcctcggcagtggcgtcggcgacggcggtgtcgaggcagccgccagcgttcggccaagtgtcagccggcagcgacggcgctagagctgggagctggggacgcgcgcgccggaccttccacagcctccgcccagagcctgaggcgccggggccgggggagccggggggcgggcgggcgagcgggccggggggagggtgggggatggcgcggaccctgcggccgtccccgctgtgtcctggaggcggcaaagcacaactttcctccgcttctctcctcggagccgggctcctgctgcagcccccgacgccacctccgctgctgctgctgctcttcccgctgctgctcttctccaggctctgtggtaggtgaacctcggcggccggcgtgggctgagggagccgccactgagggtgcgggcgccgcggccggctctgccagccgttctctggagcagcgaggcggttggttgtgcgagcgagtgccgaggactttggctggaaacttttcgccgcgcccggggcgaggccctggaagggccaggccagcgaatgctgagccggcggcccgctgccctcccccgc

SEQ ID NO: 331829 - DNA, 762 bp, Homo sapiens
  chr3:111578054-111578816
  hyper
cgtaaaccctcccgcccttctttcagctcttaaaaaaagcctgccacgaaagtccctactgcgttgctgcgaacgtagctttgagaagctggcgcccagtgatggggcaaacagccatgcccttccagcagccgtgaaagccccaacagcaaactgcctgggagcggggcaggtcaccaacttcgttgctcgaactccctgggtgcccgccgcggtggttacaaagggggtcaagagtgccggacccagccgcgcggagcccaccattgcggcccgagggggacccgacgggggcccgacggtgtggcgtggcgcaaggagcgcgcctgccttctctcgccgccgggaacgggctgcaccaatggccaggtgaggaggcggcggtggtcgcccgggaggagggggtggtgccgactccgtgtgccaggagtgcgtcccggggacgctgcctcccccgcggccgagttggttgccgccggttgcgctgcggagggttgggggcggagaggaggcagtggctgcccgggccgaggaggggcgcgctgactgctcaccgcgagtcaggaggggccggcgggctcacggagggagacagggtgggcgggggcaaaggctaggcgctagggcggcggcgccagcgtagagcggcggtttggaggaaagatgagacggtgagtgggctccggggacacagagtttctttgcttctttacaggctgtagggacaaaagcccgggctggggtcggcagtgcccaggctgc

SEQ ID NO: 331830 - DNA, 746 bp, Homo sapiens
  chr3:112051807-112052553
  hyper
cggtcacctttgaaaagggaaaaatgtctgaaaatagacaaagctgaatataaacatcatttaattccccccacacagacagcctccgctcctgtgagggcgtggggaaaacggagtgggagaagggggctagcgaggaggaagaggcgggaggtgcggcaggggcacaggtgacgctcctcccgcctgcctagcagagctccaggcgcacatccgcagtcagccacctcgcgcgcgcctccaggagcaaggatggagaggctggtgagcggggccggggcttgggaaggagggcgcagggcaggcgatgttgagccggtggccctggggcgggcggcgagtggaaggcgcggagcttcggctcttgccacaatctggtccggggactagatcagcggtgttgatggcagcgcttttctctaagcgctttctcttgctgagaaacggattttgccttccaaagggtggtttacaggcagctgctggcgtccagattctccattccaattgcctgaaaaaaagatgcaccaggccggggctccgggggctcttgatccgcgctgacgaagctggcgcatcctccgggcaggctcggctcggctcactggctccagctcccaaaactggggaggcacagcctattttaaactgcccccaaaagggaaagagaaatgctgtattggttccatattggcaccaaaagctgcggcggagatacagatttccaggctcgctttctccgggag

SEQ ID NO: 331831 - DNA, 838 bp, Homo sapiens
  chr3:112930382-112931220
  hyper
gaaggaattgtttgcgagttcagtcatccaaaaagcttcttccatatggagggaccgggtgcgctgggcgcggcgtcccctgcgttgtcctcctgctgccgcccccgcggccgccgctttctgccgcggggaccctgagccccggcccgccggtgtcagccgccgcgcgcgcgcacagacacacacacagagacacacaaacacacacagaaaagacacacacgcgcacacacggcgcgcacaccctcacgcccgccacagccacaacacgcccgcacgcgccctccctctccggcccgcaacttctcggtcctcggctcctttgttgctccagccgcggccgctcgcccgtgttgtgtgtccccggtgtcaccgagcgtgttgtgtgtccgtgcggcgcggcgctgtgtggctccctcgcgcccaccacgctggcccccgggccccggctcgcccttcccaggcgccggctgcagcagaggtgagtcacgtcgctgaagtttgttttcttttcataaaaagttgtgtttactgttggttcggggagaggagggggcgggaggcggccgcaggccgaggcagcgccagcgagtggctgccgggggacgtgccggcggcgggagccgggtcccagcgctcggccgggcgcccggggctgggagctgcggccgaggctgggcgcgccgggcgccgggcgaagaagttggggcgaggcgggcagcgggggtcccgggggctgcagccgctacggggcccaggggcgccgcatctcgttccctgccgcagcggtctggccgggcgatggtggtttcgcctcagcggttcccagaagcttctc

SEQ ID NO: 331832 - DNA, 1176 bp, Homo sapiens
  chr3:113251180-113252356
  hyper
cgtgatgacgtgagactctccatggagagtaggaggtaataaagaaataaaacaggtgtctgaggagaggttctattagagaggggagaatagagagtaattatcgttcagacaggcaagagttctctgcaggtagcagcctgggaaagcgaactcgcgcaccctcttgggggacgggctcttttgctttctatttcttctcctgcagccagggtgcacacgtatttgaaacagaccgaatttcctcctcgatgtggcgtcaggttgacttttcgagactagcgggtatttctttttaatgactccaatgcctttttattattgctgttattgaggttgagggagaagagatcggtctaaattctggctgggtaagtggggggattctcggcgatgagaaacgggggacttagaagccggaggaaaatcagcagccccacatctccacttctccagtccgccctactctccacccgtgacctccagtggagaccccaggcggcagcatcagtatttgatcggcccttcgtcagcacgctgccagccctggccggctgggttcgccaggcatcacccgctcggctctgaagcggacgcctggccctgcaccgggctttggaaggaccctctctgcgctcgccccctccccagggtggctccgctttcgagcccgggcgcggtgcccaccatgcgcggctgcctgcggctcgcgctgctctgcgcgctgccctggctcctgctggcggcgtcgcccgggcacccggcgaaatcccccaggcagcccccggcaccgcgccgcgaccccttcgacgctgccaggggcgccgatttcgatcatgtctacagcggggtggtgaacctcagcaccgagaacatctactctttcaactacaccagccagcccgaccaggtaagacactcgctcccctcgctcgactcctagaacttgccagatctcagagccccgtcgctgctttggagtcccctgggaattgaccttgggagacttcggggaccaggggactttctttccctttctcctccgaagcaatcgctgccctgccctagctgcctcaacacgcctcggggacaactctgcttcgcctcgcgcctctcctggcctggtcaagggcattgctgggctttgcagaggcaccagttccccgcaccgtctgc

SEQ ID NO: 331833 - DNA, 364 bp, Homo sapiens
  chr3:115231437-115231801
  hyper
cgcagctcctctggaccgagccacacctctgcctgggaatcctgggctggggctgcagaagcccgctgcgcgcctcctggtttctatggagaccctgcttgatgtcaatggcggctccggagcgcagggaaacctaagcgtttgtatttaaatgagggaaagtgggggaaggggaagtaaaagaggaagggaacagaagagaggatggtagaggtgagcgggcgggtgttgaactctggggactagaaaaatccagctgcgttactcagtcatctcatgctcgcggagaaatcagaggaagcagcagcgggcagaggggtgtttatttcttgcgtgagaaatatccgacttctttctgacatcc

SEQ ID NO: 331834 - DNA, 686 bp, Homo sapiens
  chr3:115377294-115377980
  hyper
cgttccctcggcggctctgcagtgtgatctcatctctttgtttctccccggctgccgtcagtcaccggctctctgcgcccccacccgcgcgggctcgcggccgtgctgcgggcgtggcctcagccgctgagaccctggggaccgcagggcgtggcgcggcctccgcccgctgcacggagagccccccagaggcagcgacacggcgcttggggtccgcggggctcctcctccaactccgcagacctccggggaggcctcttgctccccgaacacccgggagttcgctttcatttttaacgaatctccacaatctcttgtttgggagataattgcttctttcaggggcttggagaacaaaagcgtcagcccagggccccaggtctctccgcgggaggagggcacccaggggcgatgcgccgggctctctccttcgcccttcttggcccgctcgccttcagctcccacccgcagcagcaaccgcagcctgcttccggggactgagcagccctgggtcagccaaggttaagcagcgggtggggaagaggagagaaagctgggtcaattggaagtaaccttcttgtaccgcccactttttccttgcttggaggcggcaaaaagcactttagcattcttcgggctgtttgcgcctctttctctaacagggccaggggagtggaagagcggcc

SEQ ID NO: 331835 - DNA, 610 bp, Homo sapiens
  chr3:116163681-116164291
  hyper
cgtgtagacgcgcgcagcagaaaagttgcccgaaagccctacctgaggatggctgtgtccccctgcctcacggtgatgttgtccgtgcctcggttaaaatccacgctgcgaacaggcagtcctgtgggaagaaggcagagcaatctcagtaggaccagtggcaactgtttccgatccggctgaactctcctgaccatggtggccacgccgaggtgcgggtccgcggggtgctctggaggggtgcgcgctgctcgcgaggagaggcttcaccaacacggggctttcatccacagcgagcgcagagcgggctttgccagtttatggtcctttccactttgcctctctctttccctcgctcagtctcttttccctctaagacttaacaaagccctcataaaacccaagcagaagggtgaaaagtaaaagcaacacaatttcaaaagagagagtgcaaatagcaagccctctggaagagctgaagaggaagccaaaggaaagggttcttgtttggtctctctgtgactggatgctcctctgccagtgtctgagctgagctccttcgctctgtaacccactttcccaggctggcgggcgggcgggcgagggagcc

SEQ ID NO: 331836 - DNA, 152 bp, Homo sapiens
  chr3:117715494-117715646
  hyper
cggatacctagcctcctaaacttaatgccaattccctcctgaaagaggaggaatgcagtgatatcagcaccggggacacggggatagcgaacaccaccgcggctcttggagtttacagaggagcaaccccagctccgtcgccaccacctcgc

SEQ ID NO: 331837 - DNA, 762 bp, Homo sapiens
  chr3:117715822-117716584
  hyper
cgatgttgcagcaagtctgtccgcacaatcccgcacgcctcaggacccagcctgggcgcagagctggcagggcagggagcgcaccgcaggacttgtaaataaaccctgttccatccagaaccggagcgcttcttactccaccgaccaccccggagcccggcggcagggaggagggggcgcaaggggtcagggaatcctccccctaccttgcaatgagaagagggacaggaaaaagcccagcacccagacgctgtgcagccagtaggtcctcatgtctccgctgcgctcgatgctccctcgcgcgctcctgctctcgcctcttccgctcgcgctctctctagtaaaacgcgccgctcctttccctcggtttccctctgggttctcctggttccggcaacccggacagacaagcctcttgccgcacgacggccggatcccagaacagccttgctctcctcttcgggagcgcaagccaggggccgggatggacgctcgtagcccgtgcctggtgtaaacacaccgagcccccttgtccctcgagctctcccgctttcctgcttcctatcctcctctccctcactcccctgcagcttcaactaaatgcgatgtacttaaacaagcagcgccttataggaccgcgaaccgagccgaaagggccccgctactgccatctagtgctcacagaacggcatcgccgcggctcttcttcgctgtgtgtctgtgccaagtctatccaacgccgccaaagtcccctctgctctc

SEQ ID NO: 331838 - DNA, 284 bp, Homo sapiens; identical to SEQ ID NO: 229703
  chr3:119421925-119422209
  hyper

SEQ ID NO: 331839 - DNA, 458 bp, Homo sapiens
  chr3:120003913-120004371
  hyper
tgctatgtgcaggacgcccacggtcccccggcgtctcgcgcgttcgcggggctggaaggggcgggaaggggcgggccggggcagagacaggggcccgcgcccatcgccgcgccgggagcctggcgtggaggcggcgggacggcggcgcaggcctctgaggtgtgcgcggggcgccgggcgcctctggccggggcactggctgagccacgcctgcccgcccctccctggcgccgcccgcgtggcgcgcctcgaccctgctctcccgcgagggccgggagggctccgggaccttgcagactccacgcgcctcacggctcctccagctcctcggatctttctccttgcgtcgccgccgagtcccctggggcggccccgcctccggccgtctcctcagagaccttccctggggggcgccttcccctcagcgccccttcccgggcctcgagccagcggctgcc

SEQ ID NO: 331840 - DNA, 819 bp, Homo sapiens
  chr3:120169367-120170186
  hyper
cgtaagcagcattactgccccagctccaccccagcacaccccaaggaccgaaactcccagcgccaccccgggagagcatccccaggacgcgcgcccacccgcccagcgcgcagacccaagaggccccggggaccgagttcggactcctcggcccctcgcctacctcggcgcggacccaggcgaccgccaccagcgcgagcgcgagcgcgagccagcgtttccacatctgcggaagagagaagagagcgagtctgaaggcgccgggccccgcgctgacctgggaaacttgctcgggtcccgcaggctcgctccggccgcccaagcacccccggccgcccgaagagtccggcctccgcgccgtgcgccctgcgctcaccgtggtctggtccaggtctcctgggggcgcggggcaggacggcggcagcgagctgtaagcggaggtgggagctccgccgatcgccagcctcggaggaaatgcgacctcccctcgccgccccttaagacctctccttccccgcctgcctgcccccccagctcctccccattctcctcccccttctgctgcagcggcccccgcggctcccgctccccctccttccgacccctgctccggggagcccgcgggagtcctggcgccgccgaacccctctctccgcacggtccctcgtccggcgccccttcggccccctggacgtggagcggaggcagagggggtgtcccgtgggtccctgccacaaaggggtagggggaagggaaaccccaccccgggaggggctgctggctggcggcggcccgggcgggctgcggcggtggccaggt

SEQ ID NO: 331841 - DNA, 1275 bp, Homo sapiens
  chr3:120626737-120628012
  hyper
cgacccccagcatactggccaataccgctgtcaatcaaatacctcacctacttctctaaattcccccctcccactgtcattggctttaccttcggcctatccacagatttcttctgccctggagaccacagaacttaccctatcgaatctaggattggcgccgaagctactcccgccctttgacgtccccgggcaccccgcccccttcacctcccagctttgccggggaagaagcagggcggggcaagctaggggccggcccgggggcggggcctgcctcccacggcgggagggcggagcctgctctggagcctgactgctcggttaggacctcggagagcgccaggcgccgcgaccagagggcccagagaagcggccggagcccgcctacctcggccccctcagcttcccgggctggcaggcggctagaggcgtctgaggaaggtgcctaagtcctgggtcagatagtcatccctctgggacgccgccgccgctgccgccgtccagctgtggctccctcgcacctgtgtgtgtctgtgtgagtgtgtgtgtgtgtttgagagagagagagacagagagagacagagacagagagcgagcgcaccagcgcgcgaatgcccgtgtgagggtgtttgtgtgtgttctggctgggagcgcgaatgcctcggcgtgaggtgtttgtgtgttcgcgcgcccgcgggcgggcgagagccccgcgcctcagcgctgggcctgggggagggacagcgggagcggcggctctgcgcgcccagcaggctgaggcgggactcgggccgcagccgtcgccgccaccgcttcacgtcccccgagagcggctgccgtgcagcggggagagcggacggcgggcgggcgaacaggcgggagagcgcggcggcggctgcgggcagaggtggagggaggggagcaggagatggggagaggggggaaagaggacgcggggagggagatgagggggaggtgagggggaggcggagggacaagtggaaacagacggtgtcgccgttctcctcctccccccctccccggcagctgttgctgtgggtcactcgcagatgttttggggtccgggctgctgggggatggggactagaaaaagtacccccctccccgcctttcatagtgacaaaaaaggaagcgttgaagctgatgggggaagagcccggaaggtggtggcagagtaaataccggctcccccaacgtcgtttttctgaaaataaaatactctgagccgaacgtttcgaagaaggaaagtcc

SEQ ID NO: 331842 - DNA, 253 bp, Homo sapiens
  chr3:121741110-121741363
  hyper
cggcgctccccacggctccgcctcccgccccgcgcgccgccgtttcctgctccgcccccgcctcccgggggactgcggccaccttccctacctgctgccgcctcctgctcgctgaaacaccgtcccccaccccgctgacggagaagattcccactttcctccagaagttctcgggaaatctcatcccctgcaaatgtatccccctctccttctagaattatgtggatataactttctagggtgtgtttcctgc

SEQ ID NO: 331843 - DNA, 860 bp, Homo sapiens
  chr3:121902674-121903534
  hyper
cgcgatttgtatttattttactgtgaatctctggccttatatcagaaaaaaaaaaattgtgccaccctcggcacagagaacgttggtggcgtcgtaagcgccctaagcttctttccatcgccaaggagtaggggtcagggaagaggacagcgggaacaggatttgagagccgggaacccctggctcggcacgggagagggcaggagaggacctaagcgcggggctcgccgtctgctggggacccgagccggcctgtggccctcggggaaccgaagacgcgccctcagcgaccctgaagagtcagctaagctctctgcgggctaaggagacggtgaaggaaccgggactaactggggtaggggttagaaggcagcccgcgagtgggctacgaggggagctgggctcggcagttggggaccccgagggggcaagcgggcggggagcaggagaggggcggagctccggggccggggccggggccgcagcggccgcccagagggtctgcgggggctgctgtggccggacccgaaggcgggcgccgggagcgcagcgagccagacgcgcctctccaagaccgtgaccttggcatagggagcggggctgcgcgcagtcctgagatcagaccagagctcatcctcgtggagacccacggccgaggggccggagctgcctctgtgcgagggagccctggccgcggcgcaggtaggaccggggaacccaaggagggcgggaggaaagcgcccctggtgggggaggggccgtggcggggtctgggggccaagggctccgggccgaacgaggggcacacgccggagcagctccagcctgggagcattgggcgtgaacgtgggggaaagtag

SEQ ID NO: 331844 - DNA, 247 bp, Homo sapiens; identical to SEQ ID NO: 222201
  chr3:122296549-122296796
  hyper

SEQ ID NO: 331845 - DNA, 981 bp, Homo sapiens
  chr3:123167275-123168256
  hyper
cgcgcgggaatcggcctcgccccacgcagagcggtgttcggggcctccccggggcgccggcgccgcagtcttctgcgccgcgtagcccggggggctcacgcttttggagccggacatccccccctcggcctcgtcgtctccttcctcctcccccggaagccgggccgggggtctccaaggggagggcggacggccgagcagggggaccaggctagggtcacacgtcgggggcggcccggggccctgcgctgcagcggggcatcttggcacccccgtcctgagcggaggaggagggcacagccccgaggtgagaagtagctgaggatccgcgtcagaagtcccaggtccgaaatggagttgcctccgaggtggggtcgcagggactggtctggctgctgctgcgccgcacgcggagagacgtccgggatcctggctcgcgtcgagctcgacgagggccggagttgcggacgagacgggacggagtggtgtccttgcgggcggtgcctcctcgggccggcagtgcccgggcgcggcgctcgctgattccgcctaagcggagcccagctgctctcggggctcggcggcggcgagggcggctcggcgggggtcccggcgaagagacactgcgggtgcgctttcctcgcagcggactgggagcgactgggaggtgcgggcgccagccagcattattttcttacgaggggtggggaggtgggatgggaggtggagaggacgggggagggggcgacgggcggagcaacagctccggagccccgggggggagggtcctggagcccgggggggccgttgcccgcatcccccacctctcgcggcgagagtggatgcgtggccccggcgaaagccgagccgagccttcggcgcgtccgcgcagggggcggggtccgggtcagggaccggctcctgcggtgcggcccttcccctctcgcctctccctttcccgcaaacggagcggggccggcc

SEQ ID NO: 331846 - DNA, 816 bp, Homo sapiens
  chr3:123168265-123169081
  hyper
cggcccggagagctgtcgcgcccgcttcgcaagccccaagctcctcgtcgccggctgcgggcccaccgcggccggcgcggaacgactaggcggaggacggaatccggcgcagcgctgccgcggttctgccccgacgcaggcaggcttctcccggggagtaaggcatccagagatccagcgccggggctcagaagcagccggcccagaggggcccgcctgagagccgcggcgcccgagaggcgctccgggggggcccgcgggagcccggctcagggcgcgccatgcacgcttcgggccctgcgccgctccggccgctcgcgccgctcctcccttctcgcccgctcgccgccgccggagagccctccgcatcccctcctcccgctgcctccccgccccccgcgccgcccgggcctcggctcacagccgcgcgaggccgcctccgcccccggcctggccatggccccagcctcggcgccccgcgggcatcctcaggcctggccgcgggcaccccagttccccttcctcacctaaaattctcgctgcgcccctccctccctgggactaggagccgcatccagcctgcggtcccgtcaccagacctgggtggagcgcggtcttcccccgcccccggccagggctccagcgcccccagtcctagctcccctcttttgtatccccctttaatccccctccccccatttaacccaacttcagccccggcgctgcgccccccttccctggcccggctcgattggccgcttccggagctgtcagactacagtccggcgctcttattgggcgattctctggcccggc

SEQ ID NO: 331847 - DNA, 1298 bp, Homo sapiens
  chr3:123751655-123752953
  hyper
ggaggaggtggccgcggggccgggaggagcaccggcggcgcgagcggagaagctgagcgcgcagcgcccgggccgcagagccccctggacaagcctggcgtgtgccctgcagccccgggctcgcccggcggccccgccccctccctggcccgggcttttcctgcggagctcaggaagccggcctagcacagcctcgaacaatagctcgggactcgggctccgctccccgggaggccggcgcggggccgctgggactgggggcgtaggcgccgccgggggcccgcagcgagccctcggccccggccggagcttcaattcagctcggcgctcccggggtcattgttggccgggactgagggagcgggagccgggggaggagctggggaggcggctgctgcggcggcggcggcggcgggagccagagggggagctagagagcgagcgagcgaaggagggaggtagcgagtgagcgagtgagcgagggagggaggaggtagggagacagggagggtgggagggaggaggaaaaataaagaggagagagcggagcagggctgaacaatagagacaggcagacgggcgagcaggagagccagctgccgctgctgggggacagcgggcgcccaggcagcccgcaccccggccccgggccccggccccagccagacagcaggcggccagcgccctggggaaggggtaccatgggggagctggcggcaggcacccccagcccgccgcgcgcctccgcctgagggaggctcagcgtcctctgccccagccccgccgcccaacgcccgccctcgaagctccgcggccgccagctctgcggccgcagcagctgcgccccgcgccctccgcccaccgggcgccgagcagccctcggccccaggcttcttcggctcccggctgcccgcggacgccctcccacagtcatgaacccccctgagggagcagcggaggaaggaggagcagcagactcggacgtggacgcctttttccggacaggtaagccgggcagggcgcggggggccagggctgaaggctactgcctcggacgcggcgtctcggacaagtttggggaaggagggctgttgctgccgcgtgcgtgttggggggcagtgccccctcggcgtcggggctggagttgccgagattctggttgttatggcagtgctggctgcgtctggggagggcgtgggggctgggaactccgcgcccctccgccttcaccccagttgcgggagtctgtgttggggaggtgggaggcggtcccctcggaccgccttctcccagagcgc

SEQ ID NO: 331848 - DNA, 111 bp, Homo sapiens; identical to SEQ ID NO: 229734
  chr3:124606487-124606598
  hyper

SEQ ID NO: 331849 - DNA, 601 bp, Homo sapiens
  chr3:124773769-124774370
  hyper
ctgcgtgggacaggcggtggctaccacggagcaacagttcattgggaaaggaaaggggagggaggaggctcagggatggtcctgtatcagcctgtgccttgcaggggttcaaccatgcaaccccaaccgcgttcctttgcttttaagtcgaaccagtagagcgttttgtttcaaactacgtacatcctttgtcctttacaatatcccgtcctagaaccccttaaaaatcagttatttagatgagaaagtcgagccctgtacctggagaggccagttctgtatagcggaaaaaatgaaactggggaccggctggccagatatcggaggtgggagagatgctttgcagtctttttccctttcctttccattttttttaaagtggggtggaagagatacagggtaccccataggaaataagttttcttccaaagggttggaggagaacgggatagtcacacccctcagtccagccaactgcgaaagcgtccctccctacccgccgaccctcagggtcccgcacacgccgggcgaggagcccccaccctgggtcgcgccgcgcggaggggcctacggctggggatgcagcccggggcgcgcccac

SEQ ID NO: 331850 - DNA, 887 bp, Homo sapiens
  chr3:125898665-125899552
  hyper
ggggcctgagctctcgatagcggggccccaggagccacgttgtggggtctgctatccggcctccctctgcacgcgcgaccgtccacttgagcgcagtggctggagctgggactccagcgcagcccctgagcgctcacgtcgacccctccaatcacaagaggccctcgtgccaggcccccagatttggccaatcagggaagacctttccctgtcacagaatggggtcgaggggcccaggaaacaggtagtccccagtcacaaatcatcgcgtcgccttcgctggtccctttctcttatcgagcctcagttttctcttccataagccgggccagcagtgcccaccccacaggttggcgccagctccgtaagggccctaccaccgcggccggccagatcctcggcgggccagtcctggcgctgcggtcatttagcctgatgacccctggccaggttcagcctcaattgctccaaagaactccggacccgtaccccgagcccggcgtcccagcggcgaagttgatgggccccgcaggagcccttgcggtgagaaccgagtcctggagcccctggagcccccggagcccccggagctgcagccggggcagcctcctttccgccgggagtccagcgctctcgagagcccagaaactcaccgcgcgcaggagttggtgcgggcgtcccgggcaggttagacttctgtgagccgcagccccgaaactgaggttggtgcagacccgtcctgggagccaggaggtgggacctgtccccgccagtccgcgagctctggttaaggccagagcccgtgaggggaggggcgcggggcgggcggagagtcagccgagtgggggcggcgctcaccggtggtgggactatggcgggagcgcagc

SEQ ID NO: 331851 - DNA, 421 bp, Homo sapiens
  chr3:125986265-125986686
  hyper
cgctggggcggtgcgctggccgtgggtcgagaggtcgctgcgccctgcattcctggccgcgcgcgcacaggctggaatccgtacattccattcataacattcccgcaagcgaggggaggagacgcaaagccggggagtgagtgattaaagaaaagaaagaagggcttcttgcagctccgggctgtgttttttcctgcgcgccctggcgcagtccccggctcggaaaggcaggagcacgtgagcggtttgcagagcagcccggcccagccgcgcgcccgtggccggaggctccatttaccctccgcggagggcgctgtgcggcggcacttaagcggcagcttcctctctcccaggcggcctttgtggctgtggccgggacagggaaaagctgcccaggccaagagggcgggggcgtcagggg

SEQ ID NO: 331852 - DNA, 438 bp, Homo sapiens; identical to SEQ ID NO: 229745
  chr3:126113494-126113932
  hyper

SEQ ID NO: 331853 - DNA, 673 bp, Homo sapiens
  chr3:126373468-126374141
  hyper
gctgacctcaccgccgcagcccgggacccgcgggcgccccggcccggacccgccctgccccgggtggcgtccgcgtggcgggcccggtcgcgcgcggtggaaccggcgagggccgcgcctacccgagtactatggggacagtagctcttgctgaagatcaccacccggctgcgctcgatgaggcccacgaggtggcggcgcagctcctcgcgggcctcggacgagcggctgggcccgggggacgacaggcgggcacggcgccccggcggcgacaacacgcgcgcccctcggacatggcccgagcggcggttgggggcatcgcccgcctttcccggcccgggcgactgcggcggcgaccgctccagagtctcgctctcgctcctggcccggccgggcctgctcacaaaccgaaacgcaggcggctgcggcgccgggacggggcctgaggggcggcgaacgctgccctcgctggccactctcaccacccgcgcgaatccgcgaggcagccgctcgccccgccccccaacaccgccccgcgcatgcgaaattgggtcccccgcccgcccgcagcctaggtgtcacctgcccttcgcaaaggggcgggtaccaagcgcgagcctctttatctccaggttgtgcctgcgtccggagaccacccaatcttggcgatggc

SEQ ID NO: 331854 - DNA, 424 bp, Homo sapiens
  chr3:127633987-127634411
  hyper
cctccccgcaggccttcagtcgctctggcacgcgggccagcgcgggaacactctgcgcaggcgcacagcgttccgcgggggacgctcagtagggtacgggacgcgcgcggggagaccctgtgcagcgacaccggggctgtagtcgccgtctggaaccagcgcgggaataggtgcgcaggcgcacagtggctggagggcagcggcggcgtggtctcgggccacttccaagcagagggcagcacctgtcccctcggaggcgctgccagcgccctccctcctcctccgcagggcgcgggacctctatttatatcgcccagccagcacaggcccatattgggcagtggcctcagtcaggcccgctggccgccctgccacacggtagcgtccaagccaggtcgtggcccagcgagtggggacgcgcccc

SEQ ID NO: 331855 - DNA, 1002 bp, Homo sapiens
  chr3:127794271-127795273
  hyper
cggtacacgcctttggcaattttgcatcaaaaaactaagtgtatgcacattttttttaattgaaagcccaactcagccttcccccactgctccttccccgcatgcacggggggacacacgccttcctccctgcctgccgggacttcaacctcgcttgctgggaagtcgcgcactttcgtcgcgacttcccaagtcgtgctgggtgtgacttggaatctcggatccctgggctaggcctggccacgcccccatggggggaggggcagcgcggcgggggcggagcctgggcccgaaacgccacgggcgcgactctgtgcgcgtccgcccacacgggggcgctgtgtcctcgcaagctcccgcggggtgcctcgcggccctggaacgctgtggttttcgaggggaaaagtgagagtggctggtcctgcctccgctgccgcttggccctgagatccccactgcccacgggataggccccagtccacccagccggggccccccccttcccctcgtctcgctctccttggcagttcggacttcgggtcagtcccacactcgcgcccggctgtccctgctgcgctcctgtcactggcattgggaagccctccggccccctctctgcacacctggcacacggctcctccctggcggcatgtgggtatttgggttgggcgagcctctccctcccgattcccgagttccgagtgggtcccggcggaccagcgctattctggaggggcagtgcctcagaggcaggtcgcttcgagtggggatttgtgcgctctggcgcggaggaggggggtgggaagccggctcttgccctcctcacccggtggggagcgagcagggccaacggtgcgctgagagcgctcagggcgtccccaacagcatgacccgacccagggacgaagctctgggggacgggaccacttgcgatgacagctaaaggagcacaggggggcggccggcatggagaggcggggccggcattcctgcgggcctgcc

SEQ ID NO: 331856 - DNA, 778 bp, Homo sapiens
  chr3:128216313-128217091
  hyper
cgtgtgccagcgtgggtggactccgggctggggaagcgacagggaatggtgtgtgccggtgtgacagacgccagagcggcggggtggaacgtgctgtgtcacgggagactttcttgaccaaaacggaatgtgcgagtgtggaaggaagaggggccgtccgcggagtttggggacacccgggcgtccgagccccagagcctctgcagctgggacaaggaagcccgagcccgccgcctgaggtccccgcgccgttagtgacacgcgccgccgacaaaggctgtatttttccaggctcgcgccccgcccgcgcgcgcgcgatggtccccatggcgacgcagatagcgccgcagccattttccctatctccccagagtctattatacggcgggattagctcatctccaggcaggtcaaacccaaagtcacacaacctgcgacgcgggccccgcccccactccccggccgcccctcccctgccccggccccggccccggccccagcccggcgacccccggctgctgcccaagcgcaggcgcagagcgccacctggcggcggcggggtctcgggtggggtccgcggagccggtgcccgtgcagaagaggtggggtgagggtctctacctccagaaggcgggctctctgggagcaggggctttgctttgtcactgctgttccccagggccagactaacacacagtaggtgctccataagtgtttcttgaaaggatgtttggagggatggatggatggatggatggatgggcaggaaattatagac

SEQ ID NO: 331857 - DNA, 766 bp, Homo sapiens
  chr3:128273890-128274656
  hyper
ctggcatccttgggaaggctcgaatagaggggaggcttggtgtgaacgataccctgccggctgcgtgtggaggggaggctgtggcctgggcggaaggcaggagtcccgggaggggcagcggggacggggaccctgaggcccaggggattgggctcaggggccggattcaggatgctttccgcgcagagccagccgcagaaggggcatgggaaagagcctcatctacgcacgagaaaaccgggccgagagtcaagagccaaggcggggctgccgttccagggcgcgagccgggccgtcccccacctcgatcctgtgcgccctgcctcgggcggccagggtgcgcgcggcggccgcgggcgctgcggagagaccggcggaggccggggcacccggcgtgtttttcaggaaggaagccttcgctcctgtaacaggctggggcttggcccggcccgcggccgccccgccaggaagcgccccgtccgccccctcggggcgcgtccgcggcaggcacttttgaggacaggaaggggagaggtgacctgagcatccacgcagctgtggcattcggggacgggccgaggactgggtttcttgccatcctcagcgctgggggtgactccaagcccccgggtgggggtggggagtggccgggcatggcgcccggctccacaatgcatcgccttacccggccggaattcctgcaggacgctttgttctcagatggcagcgctgctagagccatcggacctgtgaggggggggcgccc

SEQ ID NO: 331858 - DNA, 601 bp, Homo sapiens
  chr3:128336511-128337112
  hyper
cgcgccgcctttaaattagccccacgcatgcgcgacttttctagcccgagcccgccgtctgcgcctgcgatttcgcccatactccccggtgcccgcctcgtgacgtgccgcagtgttacgaagggacaccagggcgcaggcgcagctcgctcctcaggcctgcgagaggcccgccggcccagcagagggcgcccaccaatctgcacgcgggcccagcgagttatcttgatttcggccaagctttctgactgctccaaaaaacgaagaaaaagattcagggagagtaagaggatgaagagagctggtgaagcagctgaccaaatggcccgaggtggtatgcagccgcggtaaagcagggcccctccgtgaggcacagccgcccgggggttccctaggggaagcaggggctgcggcagacgcctctcgggcaggtcagggtatgcaccctcccgcaggggctcccaaggccgggcgtgcgtgaggccaggtccacgggcacaccactgtgaacactgattaaacgtggcctccacggcttccaacccccaggacaggaccaaccctctgcccccggctcaggccagagctcggcgagaccgtc

SEQ ID NO: 331859 - DNA, 55 bp, Homo sapiens
  chr3:128713002-128713057
  hyper
tgcggcctgggggcggggctccgcggggcggggctttccccctcagccactgcgc

SEQ ID NO: 331860 - DNA, 1201 bp, Homo sapiens
  chr3:128720064-128721265
  hyper
gagcgaactctccgcgccaggcgggcggggcggagggaggagggagttgagagtggacggccgggagtgggaggaaaagcgcagacgccaggaacgccccgtgagtgaggagaggagagcgtgggagtcacgcggagaagccagacccagacgccgaccgggcactggtggcgctgccggggtcccgggggttcctggaccccctaccccaggcccctccaaagcaactggggtaaaccagacgcactgtgaggccagcgcagctgctggacacggtccccggcgccgctccaaccagaccgcgaccgctaagcccctcctttcgagaaactctggggccgcccctggaagtggcggggcgaagggaccggaggagggaccggaggagcgaggcgcgcggcgcagcgatggagccggtcagcacgggcgcggaggccggcatggagggcgcgggaggtgacccgtaccggcgacctgcgcggcgcacgcagtggctgctgagcgccctggcgcaccactacgggctggaccgcggcgtggagaacgagatcgtggtgctggccaccggcctggaccagtacctgcaggaggtcttccaccacctggactgccgcggcgccggccgtctgccccgcgccgacttccgagcgctctgcgctgtgctggggctgcgcgcggagggggccaccacggccgggcaggcagcaggtgacgggaactccagagatgtgacccccggggatgcggccgctgagttggccacggacggggactcagataccgatgaagaggcgcgcctggcgctgcgcgccgagccgccggagctcaccttccgccagttccacgcgcgcctctgtggctacttcggcacccgtgcggggccccggctgccccgcggcgctctcagcgagcacatcgagacgcagatccgcctgcgccgtccgcgccgccgccgccgcccgccctgcgcgcctggccccgacagcggtcctgactgtgagcgcgttgcgcggctggaggaggagaatagcagcttgcgcgagttggtggaggacctgcgcgccgcgctgcagagcagtgatgcgcgctgcctagcactgcaggtgcgcgccggccacgaagggagggtggtaacgcccgggagagggctcgaactaaaagctggctggctgcggagcccgacaggacagagtcagaggaa

SEQ ID NO: 331861 - DNA, 878 bp, Homo sapiens
  chr3:129345779-129346657
  hyper
cctcgtcctcccgcggccagaggtgcgacctctgagcccctggccagctcccagccggcctaggggggcgggggcacggggcggaggtcccgcagcccgtgctcgtcccgcctcgcttggagggagcaagggctccgagccctgggcccaggtcctgtgcctccgcttccccggctgcgggtacacccccagcttcccgagccccccgggccctcgctgctccacccagaagttgcggtgactgcggccccagcaccccgttccctggccgggcatcacttgcgcagcatgctgcccccagaggacagggctacagttagtcgcccacacctcattcacccccttgggcccttgagcgtcttagaagccgcagatgccaaggaggggacgctgcctcgcggatggtcacttgggagcaaagctggggactaaaggaaccagggacagagattcctgctctcgccaaattggccgctctgggccaggcactgaggacacaccgcgaagccggatagccaggtcctgtcctcagggccctgtccggaagaggactgggcagcctcgagtccgcggcaatgaatgaatgttcaattgcacagatggggaggcgaaggagggagggagggagggagggcagtcgcttgggcggtcattggaggctctgggaggctatgcgccggcaagaagcagcggggtggaggcagccctgcgggagtcggcgagggccgcgtggatgtgctcggtggttttgaggccagtggctggaggggcgtgagagtgggagaccagacttgaggggagtggctggagttgagactcaaatccaagaaggaaacggtggggcttggaccacttgcctactgagaaaaatggaagtc

SEQ ID NO: 331862 - DNA, 1542 bp, Homo sapiens
  chr3:129693123-129694665
  hyper
cgcccgtctgcgttctacattggttctgcggccgtgtccctttcgtgtgtgtctgccctgtgtttctccgtcgtctccgtgtggatctcggtctttgtctcgccctctagctctctcgtgcgcctgtgtttaatcgtgcgcttctctcaatctctctgtccctccctttgccccctacacgcgtgttctcgtcaacagatctccagaggtggtgcagaaacgaccccgcgccggcgccccatcctgcggccagtgcctccgcgccccggctccggtccccaccgtccccgccccagatttccggaggagcaggcgggcggggtcccgcggggccggctgccgtcagcgccccttcccggcggccgcgacccctccccgctgacctcactcgagccgccgcctggcgcagatataagcggcggcccatctgaagagggctcggcaggcgcccggggtcctcagcgctgcagactcctgacctgccgactgcggatcccgagtccccggatcccggacccatcctgtggagcccactcctggcaggtaaccgccccaacccctctccttccgcagacggtgtccgggagcactggaaagggagccctctcggcccgccctcaccttcggttctctgagagcttcctggagaacagggccggtgcacaggcgggcgctgtgctcgcacccccgggtcctccccgagcgcaggccggggacccgacgggaggcacggcgcgggcacatcggaggctctcgctgctgggcactcaggtcgccagagtccgcagcgcggggtgggagctccgcggcaccccctgcctgggtgccgccggacagagctgggtattcagggcgtcggcctgagaacctgggagttcgaatcccaatctcaacgctagaaatagaattttagcgttgaagttaggattttagcgttagaatcagattcctggcttagtcatgaaagcttagcattagaaatagaatcttagctttgcaaatagactttgagctttagaacctgaatcttagcgatagaaatgggatcttcgcgttggaatgaggacgtcggccacggagcttggagttagaacgtggcgatggggacctttgggggagtcttggcggggacgcaaccgttagcgtcgcggctgtgcctggcgctgcaatctcaatggttgcactcccggcgaggcagtcccagcgttggcttccccagttccgcgtcacattgaagggtggcggtggcgctggcgatggggttcctacggcctcctgccttgcgcaagcagaactgggcgcaggcactacaggcacccgtgggggcgaggacgcctagaggtgacaggtgtggacgcagagccggggcgaacccgccgctgctcccgcccctgcacgaggggcagtggtcctgcttctgggagggcggttgaactgtgcgtggtttgtttctggcgggcgtcgggggagatggagcgggatgtgctgtgattcggtgcgctcaggctccctctgtcccctaacccagacgccgcgatgccc

SEQ ID NO: 331863 - DNA, 412 bp, Homo sapiens
  chr3:130064466-130064878
  hyper
cggcggcttctctgaaacaaagccagcaaacagctggagcgtctctggacactcacattaaaacttgtgaagagttaaaagccccagggaagagccaggccaagggcacgggtcagcgccggcttaaaagaccctctcagggcacgaggcgttcgctgcgggaatccacctgcagctgtgcggcgcggaccagggcgtgcggcgcggaccagggcttccggcgcgcgctctatccaactgcgccgcgggcgcccgagaggcgcgcgtttactgcgctcaggagctcggtgcagcctcttctggagagttgggggcggtttccagggtccggagtgtcccctgaccccgggaaagctgggtaagtatgcggtgcggggacttggggcctgaggcaggcgggggaggaaacctc

SEQ ID NO: 331864 - DNA, 493 bp, Homo sapiens
  chr3:131080684-131081177
  hyper
cggcaccgcccacgctcggattggtccgaggtgagattcgcccttgtgccctcgtaggccttcggaacagcggaagagcagtgtcgggccatggccagggcccgcaggctggagctggccgaggccctggcgctggggccaggctagaggcatgcctgctatgcgctcctgcacgcgccggaccctggaattctctctggccgcctccctctgcgctacgccatactggtgaggagggcgcgcgcccggccactctccgctctggccttgcaccttccttgcggcgctactctcgggtgtccctgccaatcccagcttcctcctctctcagatgcagatgcgctttgatgggcgcctgggcttccctggcggattcgtggactcgcaagacagcagcctggaggacgggctgaaccgtggtctgctggaactgctgggcgaggcggcggccgccttccgcgtggagcgccctgactaccgcagctctcacgcc

SEQ ID NO: 331865 - DNA, 1081 bp, Homo sapiens
  chr3:131753057-131754138
  hyper
cgattttgaaaaccgtaccccttcttccgccttcgggacttccctgacctatccctcacccgtgccatgctgtcccctcccctccgcggtctttctccccaactccattcgccccaccccacctgggcgagttgggtggatgtcagaaggcgagaggtaggggatggaagtcccttcagattaaagacgttgcttgctgctgctttttaaaacaacaacagcaatgacaaacgtgcaaaggtgagcgagaaccagtgcatctcaaaagttggtcttgctacgcagcagctccaacagactttgcaatcacagcgccccaggaacacaggaatgaagagttggcatttacttacctgggtgtgccaatctcgaagagtggagagagaattcagcccgggacgaggtctgtcccgcccccaggatgcaaaatccggctttgaagtggaggtggttggtgtggtagttttgtactgatgtaaggggcgtcgcacctccttcccctctcgtcctccgaggtcagtttagcaacagcggctgggaaaggtgctgagagcagagttcggtctctccggaaaccctgactccattctcggtgatgggggtgggggaagagggtgaaaatgttggagatgtcaggtcggctctcagttaactcggagagtaaagaggagggtactgagaaaagagggagggagtggagtggagcgagggaggaaggaaaggagggtggcagaaagagaaggggacgagcgggtggcggggagatggcagcttctcacagagagatttccaccttctgacgaatcccatgcacccagcaacccggcaagagactggttccgaaacctccgcgcgagcgccccctgggggttgctgacggagacgagcattgccccgggaacccgagctcaggccccgcccaggccttggcggcggcgctctccgtggtcctgccgcgcccgcagtctgggctttctgctcagctttgtcgctcaactgagctcctggggacacttgatttagatctccaagtgcttggtctccatctccactctagggtggagcggtcgtatcgcggcgc

SEQ ID NO: 331866 - DNA, 400 bp, Homo sapiens
  chr3:132756116-132756516
  hyper
cgctgaacgacaaaggttctagctggccagtccgaaaacactgagtccttaggtcaaatttgagaaatgacagggccagtgggagtcctaacttctagactctggaattactgacagaagaatatttggacagtttttaagaccctcaaggcatattattttacaacctctttagcttatgcctgaatttgtgctgtgactgttagcttcccggatgttttctccacatgcttctttctgaactagcctgtatagttctacaacaaattgttacgttttgagaagcagggaccacttataccacttctctggccaagtgtctggcaccgcgccactcagacacacacgcccaaccctttaggattaacgtagacacagtgttctcttccatggccattcc

SEQ ID NO: 331867 - DNA, 1011 bp, Homo sapiens
  chr3:132756962-132757973
  hyper
cgaaaacagagaccctttgtgcccgcctcgcacccgctctgctaggtagcaaccgaacccccagagacatcggagcgggcgctgccgagggcaatttggtgattggctggtctcaccacgtgaccggcgctgagccttccgtgcgaccggattggctgtcgcggacgctgacggacaaggccggggcgggccagagcctggtcggaggggcgcgcgcgggggcccgaggggcgaaggcgcgagtgcgcgagagcgcgtgcgcgagcggtggggctttctcctgagccgtcggagggagccggagcgcttctcccgaggtaagcggcgctccggggcgtccccccagtccttcccatgctgggtcccggcaagcgggttaggctgggctgggcggggctcggggaggtgtggggtcagcttgccccgggagcccagcttcagggaggatgcagccccggttgccttggtttcccttttcctatcctctcaggcaccttcccatcctccccactgcgtgacgggtctgcccgaggggagttgcccacctggcagccctgcctccgcctttgtttcccgcctggagggttgctggcatgaaccccctccccaggtggagggtgcgggtgatggggcgcgggcgtcaggagcgctggacctgggctggggccgaggaggaggtggctttaatgcagggggacctgtcacatggggaaacgaagaagaagaaatgtagtgtcactttggccagcccgagggactcgaactaatcctgcggccgcgagcggagccgaattcctagcgcagctgtgcgaagagccctcctgcctaggtgccggcggcctcgccggggacggagcctccgtgctgcccgggaggttgctctgccggctggacctggcggttttcaccccagagttgcagcgaaattgaacgctttgagcctgctggaggaatccagagattggttcaggggctatttttttttttaagcagttgggcaccggtggagcc

SEQ ID NO: 331868 - DNA, 569 bp, Homo sapiens
  chr3:133748382-133748951
  hyper
cgcacacacacgcccagcacgcgtcgcccggggatgagatcggagcgcggcacaggagggagcccggggctcccggagcctcctggctccggcagacagaagcgggtgcccagccgaaggtgcgccaggcgcggctccggcccggaagaccccgcggactccgctcaccttaatgttgccgaagaccgagcgggcacagcggccggctcggctagtagaggtgtcgctgccctgggacgcgccgagcttgggcaggagccccatggctgcgggcggctggccgggcgcggagtggcgcggggtcggggcgcctcgggctggagcggccgggcgggtgagaggcgaccgcggcggcagtggccggaggagattcgcggagcggagactgagccagcgagtgcgcgcctagaagtttttataagtggccgccgccgatgatgaaacgcgctctccctcctccctcttttcctcgggtgtcaaaggcgctacgagcccccgccccgccgccgccgccgccgccgccccctcagacaggtgtgacgccgcagcgacccgcgaggcttgactgc

SEQ ID NO: 331869 - DNA, 268 bp, Homo sapiens
  chr3:134032175-134032443
  hyper
cgggctgggagcggagtggggcagccgccggggggcgcccgcaagggctagggctcggggccgggtttgggggcgggtaggggcgggcaggggcggggcaggagccggggctgcgagctggccgcggcgcaaggaatgcggcctttggctggtcccgggccggcattccggccggcgcaggaatgtgagcagggtgttcactgcgcgctctgagcgcacaagtttgttctcctctccttggagaacgccggcccgctctgtgccaccc

SEQ ID NO: 331870 - DNA, 728 bp, Homo sapiens
  chr3:134369513-134370241
  hyper
ccactgcggggaagcgacggcagccatgggggagagggtcgggttcgctgacctcgttcgggggagcaatgggcgccccccggcgggcaggcccttgtggcaaggaggccaaggtgccgggggacccggggacccgggtcgggcgcgcgttacctcctccgcgctgcagcagcgagctcgggttcgcctgctggtctgagagcgtaccctgtgcggcgcgccgcttctccgagtgcacgatcagcagcatgtcgatagatacagcgttgatgtccttcttcagctccatgatgccgcctcctttccgacctgggcgccgcggccgcacgctaggctgcttgcgctgcaaatggccccgtgcgcgcagctgccccacacgggagagggcgagggcgcggaagagggcgctcccccgccgctggagccgcagggcgctgcttttcgctgactctgccaaacacgccattagggcccgcctgggagggcgctaccctaatgaagcggctctaagtcacctttgaaaggaaatccccgggcccaagccttgacctgcaccggggccatagtcagcaggggcggccggtccagagcctccctccctgcgcccctgcctcccgcccggtgcacttgaagcgctggtcctgggctccagggcttctctggctgagcgctgcctcatccccacggtctccggagggttctcgagagggctggagccgacctcccac

SEQ ID NO: 331871 - DNA, 775 bp, Homo sapiens
  chr3:134513748-134514523
  hyper
cgaaggctcgtttgatcatttaaagcggatccagtcctgggtgggatgtaagggcacgaggcctccccagctccttcgctgggcaccctatggggggacagggtgagttgggcgggccgctgcggttctccgagagcaccacgagggggagcccggacccctcctagcgccttccgagccctcccgcacagccttgcaagcaaaagtttttcttaaactaacaatgccagtgtaaggaggtgctcgcgcctgattggccgggggaattttgcaggtttgattccttgattggacaggaggtgttaggggtggggagagagctgatggtgggggatcccgctccctcccgcgtcagtctggccggctccgtcctcccgtaggctccgctgtagctagcaatgtgacaccaggacgcactcgctctcgcgcgctctcccaggctcgttctccctcgccctctctctctcacacacgcacgcacacacccacctctcccataaacacacacacacacatgcacacccacacccacgcgcgcccgcaccgccccacgcgcacacactcctgcccacgcccacgcagcgctccgggaagtccggtccgggcgagagcgcgaaaggataccgagaagccacccgcggagagcgcagcggcgccctgggacgcggcgctctcccggcgctgctgcctcggcttggtctcggcctgcgggccgtcggccggcgatggccctggattatctactactgctcctcctggcatccgcagtggctgc

SEQ ID NO: 331872 - DNA, 833 bp, Homo sapiens
  chr3:135684610-135685443
  hyper
gagagtccgcgccgcggggaggcttggaggcaagcgctgcccgcgagctgagccgccggaggaggagccgcgggcaacgaggtaggcaaaggaacactggccgcacggcctggagccttcagctccctcgtcccggcccgagggggtggcgaggctcggggcggcgcgcggaggccggggcgggcggggccgggacctgggggcggggaccggcctggccagaggggccacacggagctgattgggctgtggaagtcggaattccagtcggtgcggtgcggtgcggtgcgttgcctcggcgcggccggccggtcccgggacacggcaccagggaggtgtggaaattgcctgccccaggggcgcccgcggaggagggtaggcgggggcggcctgggccctcccacttttcagggctcctgggccagttcgcccgcacagccctcgggaacttgttaacaggaaagcctggcagagaaacaaatgccagcgttttggaagaactgagagtcacgtcgttaggcgctgaggctttcttttccttccccgccccctgcccaacctcggcccgacttggccaaagaaggatgtgtcaccagctccgggccgcggacgggattcccggcccgccaggagccggggtacctgaaacaaaggtaaacggaggccgggcggcccctggtcctgcaccgcggccgcgctggagcgcctcggtgggtctctcccgcgccgacctggccgccgccgccgcggaggggcgttctcctgggggacctctcgatggaaaccagctggccgggcttggagttgatgttgcatccgaactctgttgtgct

SEQ ID NO: 331873 - DNA, 842 bp, Homo sapiens
  chr3:136537643-136538485
  hyper
ttgcgacttttaagcgcaaacaatgggtggaaatggacagaaactgcctccgtgcccacttgcagcggactacgtagccctggcagacaggcaattgcttcaaacaagcgccctccaagggcgtaagctagaggggcccgggcgggcgctttcccgtggaccctcccacctcgcgggtagaggaagtccttcagttcaggcacaaccctgagcgtcccccgcagtctccaactccggcgccagtcaggttgtggggtgggggcggcggagggcggagagcgcaggcgcagagtccgcgcggcggcgcccctctccctccgcagtactccgggcagcgcccgcctcgattttcccaggcgagggcacgcccgcgtcagtcgcctccggggcaccttcctcgccacgacacgcaggtaaccgggccccgggagccggtcggcggcggcggactgggaccttgatcctgcctgcccggccgcccgacaagggaatgagagcggaccccgaactccacacacccgcgtttagccgccacacctaaggggcacaacagtctttttgggtaagggccgggctgggggcgacgcgccccgcccgctttgcagacttcggggtgctctgcacgacgcctgaaaggccgcggggcccgcatttctctgtgctgccctcctggagaaccgggacacggggacgggagggccagcatcggctacggcccggtttcccgtttctttccgctgtcgcgtgtctgggccctcctgcagcgtccatgatgaaggccaggggctgttgctttcctctcgcccagtagccaacccaagcaaggggtgagtcactgtggc

SEQ ID NO: 331874 - DNA, 454 bp, Homo sapiens
  chr3:136751341-136751795
  hyper
cgtcctcttcccggatacttggagacagcagcgtcagtggcattgtttggcgtctctgaacgcggctttggcagagccctccggagccagctgtagttcccggagacgccactaggtgacaatgtaggtcttggttggtcaactgcaggctacggttgatttggttgggtcccagcggagccttagcgtcctctccggcaaaataacaaatgtccgtcgtgcagggcactttcttcgggaaggactcctgggagctcaggagtttgcatacgaagccgagggagcgaggggcttctgataatgatattcagcgtcgaacagagtcgctcatatgcagagccggagtctctcccagctttgatatatgagattattatggagagtaatgcaggccgagtgatgcttgctcggcaggctgtggatgtggattcctatgtggattgcgaggccgggc

SEQ ID NO: 331875 - DNA, 267 bp, Homo sapiens
  chr3:137479525-137479792
  hyper
cggagggtggggcggagccttgtggcaaggcaggtgggtgcaggcctctggggccccagactgccgcgtctggctctaccaggctgtgtctcgggccccgtgcctgcagctgcaaggcggggaaagacctatcgggaagatccacctcggcctgggcagaaggaaactttactgagagtcttctctgagtttggaattatgcggaaattgaacccaagatgaataacacgcagccacagccccagagaagctcgaagtctagtgggc

SEQ ID NO: 331876 - DNA, 1316 bp, Homo sapiens; identical to SEQ ID NO: 229815
  chr3:137479992-137481308
  hyper

SEQ ID NO: 331877 - DNA, 339 bp, Homo sapiens
  chr3:137481911-137482250
  hyper
cccctcggagccaacggagccttgcgcgtttctggccggtcctcccaagagagaatggtgcaaaagccaataagcctggaacacacgcaggtcccgccgggcctgggacaatggtttccatttaataaatatttcccccaagggcatttcacatcgggcaggcaattattcaaaggaaacaggcgcgcaggttggctctgcgggttatttcgtcctctttacccgaagaatgctcatttgacgcaagaaacgagtctcgcagcctccctgggtgggaagaggcgcccagggacaaaccgaccctggttgcgatacaccgtgagactccgctgtagggcc

SEQ ID NO: 331878 - DNA, 1302 bp, Homo sapiens
  chr3:137483327-137484629
  hyper
cggagactccgatacttgggtcccagcccctggtgcctgaagccccccggccgatcgccctctcctcccccgccctttctgcccccactcgctcccccggggctgcctgggcgctgggactggcatgatcagctgaactttgtggggtcagcgcttctctctggcttcccctcagcggcgccaaggcgaggggagcgcagaaccccggctcaggacggacagacagacggccagccgcgcccaggctcgtctgcagaacccttgcactccctacccccacccacctagccgccgggaccatgtccaaaccttcagaccacatcaagcggcccatgaacgccttcatggtatggtcccggggccagcggcgcaagatggcccaggaaaaccccaagatgcacaactcggagatcagcaaacgcctaggtgccgaatggaagcttctgtccgaggcagagaagcggccatacatcgatgaagccaagcggctacgcgcccagcacatgaaggagcaccctgactacaagtaccgacctcggcgcaagcccaagaacctgctcaagaaggacaggtatgtcttccccttgccctacctgggcgacacggacccgctcaaggcggctggcctgcccgtgggggcctccgacggcctcctgagcgcgcccgagaaagcccgggccttcttgccgccggcctcggcgccctactccctgctggaccccgcgcagtttagctcgagcgccatccagaagatgggcgaagtgccccacaccttggctaccggcgctctgccctacgcgtccaccctgggctaccagaacggcgccttcggcagcctcagctgccccagccagcacacgcacacgcacccgtcccccaccaaccctggctacgtggtgccctgtaactgtaccgcctggtctgcctccaccctgcagccccccgtcgcctacatcctcttcccaggcatgaccaagactggcatagacccttattcgtcagcccacgctacggccatgtaacccccagcccggcccggacctgaggcgtggtctgaaagccgggtctgcaccctgtcctctgagcctagccccggcctgcagacgcctccggggtcagccctgccgctgtcccttacaccacccagacttttcctctctcttccagggggaagggtggggcgtcctcccggacccaaggcgcagacaggtaccggaaacttgcaaacgttatgtcagctacacagctgcccctatcccgactctcccaaaacaaatctccgactgtaccccctttggacaa

SEQ ID NO: 331879 - DNA, 277 bp, Homo sapiens; identical to SEQ ID NO: 229818
  chr3:137485308-137485585
  hyper

SEQ ID NO: 331880 - DNA, 450 bp, Homo sapiens
  chr3:137485846-137486296
  hyper
cgacattgtcatggctcaggcaaggagtttttaaaaatcgtaaaaaatcaaataaaagcacagcccatgacgttaaacaaggaaaagagtccttttctttcccctccgggtgaatgttttcttgaagattattgtctttcctgagaaaggaccctccgatgttatccagcaaaactctttggaatttgttctcaaaatcgaagggtgctttccacccttggtcttggagtctcaccccaaaagccgcgctcacgcgtggttttccttaatttgcgtgcttttcccactggctttgatatgctgtggggtgggaggtggggcagcctagaggtttgtgggctttctgctgctgttgagagatttgtacgcttgcctccgctgtttccaaaggagtcggtggctcgaagtgcacgggaaacgttgtcaacagacaccaaagccgaaacccgc

SEQ ID NO: 331881 - DNA, 235 bp, Homo sapiens
  chr3:137486571-137486806
  hyper
gataaataaatgagcgatcaggcgaaggtaaacaaaggcgggctgagggaggtgtagggggagtccgggctggctgcgccacgcttacttagcattacaaaacccttttacaaatcgagacaattaggaagtgacttgcctctggtggccgtccggtctgggggcctgggcgcttagggaaggcccctcctcccgccccctaggaagcccaggaggcctgggacggagacgccac

SEQ ID NO: 331882 - DNA, 1250 bp, Homo sapiens
  chr3:137487318-137488568
  hyper
cgtttccttccttctcagactggccttccccagccatctgccctccttagacctggtcccaacctctgcccccacccccatccccgcaagagcctgcctcagctttgcctccgtcgccccgagggctgcggagcgtccgccgaggtgcgcggccgcgactcgccctaacaaacagccaaaatcctgctcgtcacgccgctgacaggggccgattactgactttgaagtcaggcgcagacaaaaagaaatcccctggggggtgtgggggggcagcagtccctgtcaaacctgtttgctcacaactgtctctttctttcaagaaaatcattaaagcaaacctgtagggagaggagcgccccgcccgcccggagtggagaagagccgcttctcccgagcgcgcgtcgcgcagcaaagagcagccaagagttgccctggacagactcctggcatccggagaacctgaactccggcgctgcaaggggcgcccgtggccctgcaggaggaggttctgcagatccctctgcgttaggcacgcgtccggtagccagggagccccagacttctctcgcttagcaacctgggcctccttcgagcggggttggcagggagggcccggacctctcgcctgaggctcccattgcttccccgggacccttctccccgccaaaagtgacccaaatacatgccgcgttcagcgccgtcgctcctctgctgggtgttccctaggacagcagagacctgaacagcatgctgctggggtggcagccatctgcgccggcgcggcaggagcagagttgtttgggttttacctaggtttgctttcttaaaccttggctgccatctggctcaggggtacactggctacatcttcagagagatgtggaattcttgacccctttccgcctctggcctccctcattccgagaactccgtcagcctttcatgcacttctcggttttggatctgactccaaaaatctttgattcccttccagtttccgagtttttctatttaaatattaatttccttaggcccgatgactttaaagacggaaaagaccagctactttgagtaaattacgctgaggtgtgagtgactgacatctgagaccccctgaacgtttgcattttggaactggagcgagctaacctgtaggaatctccggtgaaccaaagcgggatgatgtttccgtctgagtagggccaaggtactttcaatacagctcaccatttagggaagtgtgtcccgcc

SEQ ID NO: 331883 - DNA, 1285 bp, Homo sapiens
  chr3:137489762-137491047
  hyper
cgcccgagctcaggctctcctaggtgcttcagggccgggctgcactcgagccccgaggaggccctgctagcgctagcgcggcggtgataaccgagggaggtgggtgagaggtgcggctgtcgaggcaaacgcagagcacccgcccagtcctccaagggccgagagccgggagtcccgaacgccgcttaagcagctccttgcttcccgcagcccgtccacatccctgcgggatttctggacgccccgcccggggacctagggaggagggagagaggagggagggagtgggcagcctgggcgcacgccaccggtccccgtacgcccggcaccccccgtggcgcggcgagtcaatgggatttgcacactcgaggtgtaacagcattactgcattaattaccatttccatttcacgtccagattgtttacttatctgcgggaaacatatgtcgggagaagttcacattccggattctgctccgctgcccaaggtgcaattccggggaggcggcgaggggggaggggagggcttcagattttttattacaccctctagccttatctgccgctgtaaattatgaggatcctccattgagcggcatatggagattatatacttttttgaatatcgtttcccaaagcctgcagattttcactttgaaatgaaacaatcctccgctggttcccccggggacaggcgtctcctgcgttcccccgcgcggcctgggggacccttctcgcagagcaggcgcgcaccccaatgccgtggccggcgcccagtggagacttctttcacagggtctagaataatcttccgcggaacacccatccatatgcagtgtttgagaactaaggcagctcccttgctctgttttcctgcgcctagcccccggacttttgtgccgtttgcagctctttttcatttcgaatacccgcatagacgcgagcccacttctgccctcttcctacgctgggcggctccaaacccgccgcgagggctgaggtgttcacacctgcccacggcagcctgcctcgccctcaagcgcctcaaagcttcctaagcgcttacattggtcttgggacagccgactttggcttctttgtttgtttgagggaccgcggaagtggcggggaatgtgcccccgcttgagaccgcttattgtgagccctcaacggaaatcctgcacggaaggcaaccgcctccccgctcgcggtaagcaggatccacccgagtagcggggaccgaatcccatctttcttatctctcgaagactcctttcaggctgag

SEQ ID NO: 331884 - DNA, 1058 bp, Homo sapiens
  chr3:138066795-138067853
  hyper
cggggggaaaatgacgccgctggagaggagttagcggaactgaaacaatgaaatggtgcgcgagtgtcgcctgtccccgtcgcatccatcccaacgaagtttgggccctggaacggtgcacccagaaggcctgcggggagagacgctggggcatgatctggaagaaagacgtctcaggattcgaagggaatgcagctaaggtggcggcggaggttcgcctaggactggggaggcgtccctaggctcagaagttggcccggccggagcggagatttaaaggttggagcgcagaggctcttaaagaggccgagtcgaattcccactcggcgtccaccttaaagccagctccccggcaccacggatctgacccgggtaagtgctgggccgcgggagaggctgcggcgccgaccccagcccctggcgctctagcgcgccctgccgggcccaggggactcggcgcgggtgggctggacttcgtaggcgcgcgtcctgggggccggggtgcacgcgggggcgacagggtcgaggcacccggcccgggctccccactggcgcgcccgcagcggcgctctatttttagcaggcgctgtggcaatataaggaatgcgcggcgcgctaggcgctcggggcgcacgctggcggcgcggtcgctttaaggaggcgccggggcggggacggaccggagtggccggctggcggggagccgtcagtccggcggccgcggggcccggcgggcgcgacgctgcctcctcaccggcgcaggctaggagggggcggcctgagtgccgtagccgagccggggctggagcgcgcggtgagtggtcgggcggccttggaggggagggggcccggccgcgccgcctctcgccccggccgtcgctttgttccggggcgggaggtgtggccgccctccgggctcggccgcgctctccgcttgcggggtgcgccctgggaccggctgtgcgtggcgttttgcccccatcgcgggctcccgcgtaacggtgtgcgttcgtgaaatcggccacgaccaagaccccagtggggagggcctgcgcgcc

SEQ ID NO: 331885 - DNA, 1489 bp, Homo sapiens
  chr3:138657617-138659106
  hyper
cgattccatttctggggatcgggtccggtggggagccactgtccctaacgcctccagagactttaagtaggacaatataatgctggtaggagcaaggtgcaaggaatttagcggcagaagcctttcgggggggtggggaaaggcagatccgtgcctcgtctgagcctgggggtggggacagcccctggccttgtagcccctgttccggggatcagctgggcccacctaacccccctacatggggttgaaaggggccaatgggacggccccgccgcccctccctcgggattccacagggccctgacccggcctttatctctgcacggtcagcagtcgcgggggcttcaggaaggaggacaaaggcccggtgtcaccgcgggcgggggctcggtttcctggctctctgctcacactcacagcctttagcggttgttgggggaagatttttaaaaatatgtgtcgaatttcctttttttctcttctagaaacaaacaaacaaaaaaggcaaaaggcgaattccccttcactcctcgtccatagagattaaagtttcctgggatcctgccctttttttttctttgactgcctagaaatacttgttctcccttgtacatagaggaaaatgcggggaaaggttttttaaaactcggtttcatactattattattactaaggacaaccgggcaggctgaggtcccaacgtggatgatccgagttggcctcgcgccggggctctgcagccactgccctgtgcgctcagcacctctgggggcgatcagggcccctgcgcttccgcccgccgcccggcagtcgagagcaccctgtgcccagactggccgactcattctcccccgaattttgtttagagctggcaagggggacttagctcgcgccccaagacctgggcttgcagcgccgccaacaggcccggggacacgaggcgctccaggccggggtcttcccggctgctggcccctctcgctccccacccgctggcggcgcctcggtcgcccgcaattgacccaacccgcttcctgcgtttgcccctcaggtttcccgtttctccacaaaggcctaggggagcctcgcccacaggctgaccctgcaacctctggcccggtggctaccttctgcttttctgaaaaagaaaaggaaaaaaaaaaaaaaaaagaaaaaatcaaccagtcgagggaggcgcgtgaggactggaggcgccagccggacagcctatgagtaggtccctgggtcggtgccgcttcgcgggtcagcacggcctttctcagagaaaacctcctaaacgtgtgaagaccgctttgggggaagcgagagggaggttggaggagccccgggcggggtctcagcgcccaccagctgtgccttcagggcttgggtgttcgctgcaacggcaaccgcgtgagcctcactcccacggccaaggggctagggcagggtggatgcaatcgcgtgcgcctggccccggaaggtgctc

SEQ ID NO: 331886 - DNA, 224 bp, Homo sapiens; identical to SEQ ID NO: 229835
  chr3:138662202-138662426
  hyper

SEQ ID NO: 331887 - DNA, 2437 bp, Homo sapiens
  chr3:138664066-138666503
  hyper
cgctgccgacgcccggtcgcacctccgccccgggccctttccgcggtgaatttgggcaggagacgctggggctccggaaagagacgagcccagtagaaagcgcgcagagaggcagcttcaggccaggggagtgcaaggtcacagaggtcagggaggtgagcacaggaggacataaactgaggggacaaagaggagcgacaggagcttaggaaagcgaaaaagcacagagggaccctgggcgctggctccagaggcgggcccagagggtgtgaggtcaggctggcggcggcgtcgtcggctgcgaccggggccggcgtcgcgcgtccctgcatcctcgcatccgtctgcaccggcatgcggtgggctctcagagatcgaggcgcgaatgcagcgcgccggtcttgctgtcgtggtcccagtaagagcaatgcatcatggcgagctcgggctgccgggcacaagcgaactgcaggcccggcgcactggtgggcgcgggcgccgggggcgcggcggtggctgggctggcagggctgagctggcccggcggcggcgcggcggccccgtggtgcggtggggcaggcggcggtgcggcggccgcgtgcagatggtgtgcgtgcggatgcgggtgggggtgcggcggaggcgggggtgcggccggcgggcctcccaggccattgtacgagttcactacgccggggggcagcgccatgctctgcacgcgtgtgtacggcccgtacgaggcggccgggcccgccagccccttgaccacagcggccgcgccagggctaccggggcccgcggctgcagccgcagctgctgcagccgctgcggctgccgccatctggcaggaggcatagggcatgggtgagggaggctgcggtagcggccacgagttgttgaggaagccagactgcaggtacttggggggcgccaggtagccgtagccgtcggccccggcgcccgccacgccgcacccgcctgcggcgcctccggccccgaagagccccttgccgggctggaagtgcgcgggcggcggccggaagggcctcttcatgcggcggcggcgccggtagttgcccttctcgaacatgtcttcgcaggccgggtccagcgtccagtagttgcccttgcgctcgccgccgccctcgcgcggcaccttgatgaagcactcgttgaggctgaggttgtggcggatgctattttgccagcccttcttattcttctcgtagaacgggaacttcgcgatgatgtactggtagatgccggacagcgtgagcctcttctccgcgctctcgcggatcgccatggcgatgagcgccacgtacgagtacgggggcttctgcgccgggtccggcttctccggggctgtcccgccgccacccccaccgcccttgcctgggctcggcggcggcccttctggctccttgactgtgcgaccggtctctggggccagcagggcccccgccgcgtcctcgggctcggggtagctggccatcatgacaaagccggcgcgccgcggccgggccgcctctgctctccgctccaggcgctggcgcggcaaagagttggggcgcacgagtccgcttacggccaagtctcaaacttctggagactgcggatgccgcccgcgcttgcttgctggaggcctgtcgctgctctcccctctccttccccttcccctagggagcggccggcgggagtggagctcagcctctggccatggggagtccgcccaacagagaggggctccggcctcgccgcccctccccgctcaggccagtccccgccttggtgggttttcttttctgcgctcttcccctccccccgccccccggtttcccgaagcacgacccgcgtctctggcggagctgcctcctggagtccctagtgcgccaggagcctcgctctgttctgattcgtatgggctccaccgagttccgcttgcgtcaggcgccttcgcccctatagcggggcggccagccgcgcacgggcgagttcatctccaagtcactttttgtaaacgccccgcacagcctggaccggcctgcccccgcccagcgagcctcaggggcccagccgacagccaggctcacgcgcccttgaaatctgccggtactcgctctgcgggctgggctgggagatgacgaggaccccggtggggtctgcccgcacccggccaaagcccaggaagctcgggccccagcgaggaaaggcgctccaagcctcctcgcggctttcaggtgaaagaaaacgactcctttgctctgccgtttgctgccgtcttgaggctgaacttctagctcggggctggggaggggcgagacggcgagggggctggacggggtagggtggggagagctgctctgaggctttgggaaagtcagcccagaaacgggtgtgactgtacgaagaagcctcggcctggcctgtccctcgc

SEQ ID NO: 331888 - DNA, 307 bp, Homo sapiens
  chr3:138679271-138679578
  hyper
gaggaaggaaggcacgtttcccggtgttgttccaggcctgacgggtgttcagggtgtaggactcagggtgtaggacgagcgtggcgcgtccctccggaccggaagcggggctcaccccagcgacggggggcttcctcactttcgtaccgcgctccttccccgcagaggcccgccggaagcggcagccggcgatggggaccagggcccgggacaggcgggtgatgtctttcctggaggcagcgatgcaggaagcccgcggggagccccggcttcgccgctcggggttcaggtgcacgggcacagacgc

SEQ ID NO: 331889 - DNA, 787 bp, Homo sapiens
  chr3:139258152-139258939
  hyper
cggtggccgaggacgccctttctggcgtccgggggcaccggaccgcggctcgccgggatggaggcaggcaggcagcgtctcgggagggctctagggagcggcccggagctgctcggcggggcgcccagggcgcagcgggcagcgcttaccgagggcgcgcaggtactcctcgaaattctcgttgaccaacatcttccagtacccagtgaagtcgactggcatttcggggagtgactggagccagttggccacaagcgggcgggacggctggagactgccgggacagcggctgccggtgctacgcgggtggtgggcggcccggaaatgagcgccctccggggacagggggctctgcggggcggcgacagctggattcccagcgcgcacaaagcctgcgggaggatccattgtagcggtcgctcctccccgcttagcgagggcgggcgcaggggcgggggatgtcgaagggtcaggtttgtccaggccgcgccaccttcgtttcagacgttcagttcgtttcccctacaaaggaagaggagaccggagacgggacgtttgctttgttggccgaactcttcggctgctggggatttccttcaaacgccattaacttctcacactcagcagccactcgggagttgggaaacaatctcctggggtttgtgctggcgtgattaaggaaagaggccacttacaggcctttgtctaaagcctcgcgccggtggtggctggggtcaggaaagctgggaggttcaactacgggcgagaaaattggggcactttccac

SEQ ID NO: 331890 - DNA, 1750 bp, Homo sapiens
  chr3:139653430-139655180
  hyper
cgcggctgcccctgcttctcggagatgacgcggagccctgccattgccatccaggtccaaggctatctactctgcccgacaacccctagcaccactaggcgctgctctagtgtgcgcctggcgccctccccagaccagtcgacgcagaacgcccagagacccagccaagggcaagacccttagcgacgcccgtcagtcctctccgcccagatatcagttcaaagggcatggcaggtcagggtccctcgcgccaccccagatgaccctcaggcctcgggtggccactttctgggggagccctccatcccttgcggcagcttttccgagagtcggagtggaggcgcggggctggagggctctccggagccgcccaccagggtcctctgggggcccggtcccgactgggcagggggacctggacagggccccggagcgtggagacggctgaggaaagttgggggtcggggccttggggcggggagcgcggaacccggcgccgatgcccgcgttcatgaatatgcacgagccacctccctccctccgtgacgtcacgggccgtcccggggtgagcgcctgagccgctccgggtccgcgccagtgagcgcggctgctgccggcgagctagcggcgcagcggcgggaacccgaggccgagcgccgcggcggcagcgctagaagcgcacccatcgggcacggcgaggcggcccacggtgcggcaggcaccgggaggcgagagccggcgcggacagtaggcggcggctgcagctcgttggcggctgctgcgaggatgctgcctgggcggctgtgctgggtgccgctcctgctggcgctgggcgtggggagcggcagcggcggtggcggggacagccggcagcgccgcctcctcgcggctaaaggtgggtgctggggaagtttgctcttctcccaggagggaggcagggcaggcttgagggtgaaagcggcaaggacctaggctcaagctggatttgcccaccctcccttgccgcagcttctttggcctctgtgcgccctggattcccgaagtcagttccctgcgcagcggaccagagaggtccacccgcggacgtcaactcaacccctgggcggggtccgggggctgagcagaaggcgaggtctggggagtacggacaactttgagggctgtctgtgccggggtgggagcgcagtgggtgagtttcgagctctggcccagggacggctagagcagggcgctggcgcgccgtggggacaagcaggtgtctgctcctgcctgggggaaggatcagcggcggtgctttcaaggagggagccgagctgtgacttgtctcccagctcggggatggagtggaaacttgtaggctccagggaaggccccgctgacactcctcaagctcccccagggcgtctctgactccccggggaacgtgtaccctccgggtaggcggcggggtccggaagaagcgcgggatgtgaggctccccgctgcctttcctactccgctctgactaccgaggaccgaggagcctaacctggcaccactcccctgcccaccctgttcctttgaagagcttgacctccccgcgcctcccgcccggaaggaagctagatccaagcgaacgcctggctctgtcaggcgagcctggaagccggcgaaccccggactttgacagctgcctgggagcgtcgggagctctggggtggggggccgggtctgaaacaggaggtcacgtgcttgcagggggtggggaggc

SEQ ID NO: 331891 - DNA, 1495 bp, Homo sapiens
  chr3:140660238-140661733
  hyper
cgtgcacaaacctttttatgcattgtgcgagggttactctgagatagacaccaagggaactgctgggtcataaatccaattttttcaaagtaaatccgcttgcgaacccggaaccaagtcgatttttcccgccccgccagttccctgttcaggagagtgcagccgtgattggcgcgttcactcaggccaggggcgccccaggtctcaggtgctaggagcgcggtgacctaccaccctccgggcacgcgttctggccacgcctcgcggcccctttcattgaaagagcccgtagggatcacgtgaaagaacactgcagagtgcgtgacgtcacgacgctcacaccaatgggagcctctgtttatgtcgggagccatcaaatagtcatcttccccctaccatcccccgcccactctccgtcgcgctgcgctgcgtcgctttcagcctctggtgaagggcggcgcgcttaggcaggcggtggcgcggctggagtgccgcggggagggctgtgccggttgctttctgcagccgcatctcggccagctctcctcgccgtccccggggcgctgtgcgtctccagtccgggaccgaagccgcctgccgtagcgggcggccagatccgcgtcccgcctcagcggccggaggacatgcgggagagagaatgagccagagggacacgctggtgcatctgtttgccggagggtaaggtcctggcggggcgtgcgcactggggctgagggtgctggggccgaagacgcaggcgaggggggcgaggggggccgaggggggtgggggggtgggggggcgggagtgaggcctgggcggggagctgccacgggcctgcgggtgaggggagcgacccagcccgtgggtggtgaggggggctccggttcggggaagcaagggggtgaggcccgggcccgagggcgagagagtgaggcccgggcaaagagggttgaggcatgaaacccgggccgggagtgaggttttgggcccgcggggccggggtgaggcggaggccgaatccatgcgtctgaggagacgcgggcaagagctggggtcggcgcttgattacccggacgccgctggacctggccgcacgccgcaatctagcaggcgtcggggatccagggccgctttgaggagcctggcttcggatttcgcgtaggttgcatggcccaaggggacggggcggaaagtgcggaggctgaggacaaaatgggcgccggagactcctttagccctcgctccttgcagcgctcgcttgggcctctgcacgtcactcacgccccacctcggacctcgggccgctcatttccgggctcggctttgcaaggtgggtggtaagggggctacgggatcgagcggggaaggctttggtattctcccgtggttgctgtagggtgtttctagcccttggaaaatttcttgcccgaggttttccaggtggtgaatggggtgcaaagctttccagtacctttggggtcagattcctttc

SEQ ID NO: 331892 - DNA, 1718 bp, Homo sapiens
  chr3:140769466-140771184
  hyper
gtcaattctgggagcacagacgagggccaccaaaccaagaactttcaatttccccaaggaagcgcagataccagaagcaccctcgaggcttctgttttggccacgccctttaccccatcgctcagttcaggctcccaatgaggcggcccaccatcagcgctggtagagcaaagagaccgacttcctgcgcctcgggtgggcggggaacgctccttgagcaggtgcggtatgaaattggactttaagagatgagttggagcctgatctcaaaaataaagtgtggacgtgtgtgtctgaggaagggggataataaaccacccttttttcctcctggctgctatttcccacgtgcgttgagtaaaggcaccaaagctgcctagtgactgggtgtctcctccccgtcaggggcacccaccctggcgctccaggagcgcttgaatgaatccgggaggacccgcgcgcaggaatgaatgcgagagctagggagtgagcgggcgagtgggcgggtgagtgaatggcgaccgcgccgccgccttggcacaggggcgcgggcgcgggctccacttccctctcccgccagctggtggcctcgagaaggtggcggcgccggcagcggcccgagctgggacggccggggcgcgggatggtgggggaaggggcgttcccggcgaccgcgccttccgcggctattggattagtggccttcagggatgagctcagccagatcggctttcagctgcagcctccgggccggccgggaaggcggggagcgggcggcggcggcggaggagggggaggcggcggcggctgcagcatccagagctggccgtggcggccggcgcgccccgcgcacaaaagcacccagccccaggggagggcgatgaacacaccacatcccgggcccgggccccagctgctgctaccgctgcgtgcgctcagggcgctggggaagacgcccggcgcgccgggggccagcggccgaggcgcggcccgtgcgccctgagcgcgggactcgtcgccctccgggtcaggcgccaagcttccaagcggctagagcgcgggccttggagcgcccccaggatcgcttcagtaaggcgcttccccactccaggcccgacccccggcgcctgagcgccaacttcgccaagaacgctcctaactccaggccatcctgcagcgcagagggggcgctgctgccgggcatcagccgtgaggacgcgcccctggccgtgcggagagagccggcatttgcgggtcactcgggcgcccctgagtgggcggcggcggcagcagacccctctccagggagtccaggacctgccagcgctggggattcttcccgaacaggcgcttgccctctcttttatggtaagtactctccagctcctggtgaggggcgcgcgggggccgggagccgagatccggctgcacggactttgtgcgggccagcactcgacacagctggcgctcctgacgtcccagtccctgagaattcctctctgcaggttgtggcagttcgagatggttgatttgcgcgcagccctggggcgtttggggcccggcctttggtatcatgggttctaagccctttgcttctctgcgtagcggacaacgcacaaaaaactgccatccgattcacccgctttggtttggatccaggatccgtcactcactggctgagtgaccttggacagggcgccaaacctgtttcctcatcc

SEQ ID NO: 331893 - DNA, 603 bp, Homo sapiens
  chr3:140771249-140771852
  hyper
cgtaggtagacatgtgctgggcacacaggaaacactcaatcatatgttagctagtattattattagctttgcgagcccaagcttgttatccaactttccgaagctgcagcagttccgtcgtccgtgtaatggggacaataattcctgggggtctgttcgtccggggtattcggagaggtggaagtaaagcacgggtcacgcaataggcaccggtggctgttgttaccgtttattcctgactctggggcagtgaggctggtcgcctggcccgagagcgactcagggaccagtcctggccttgcttgaatacaaacttgtctatgctcgggaagggagggggttgggagctcaggaaaccctaggcgcagggctctgggaaggagggagggggtcagagacttgagcgcggcaaatgtgtccgccctggtcgctctgtacgcgccaggggctccaagccagaaggggacgccgagcccccgacctctgactggcgggagaaccgggggagtggctgctcccgccggcccatggccaagcgcagacggctgccggcaggaaggagaggagggcacttttctgtaccgctgtcgcgagaaggtggag

SEQ ID NO: 331894 - DNA, 567 bp, Homo sapiens; identical to SEQ ID NO: 229854
  chr3:141516153-141516720
  hyper

SEQ ID NO: 331895 - DNA, 755 bp, Homo sapiens
  chr3:142607214-142607969
  hyper
agcggctccctaggcgccgcgccgctagggttgttccctagtttacgtctctgggcaaagcctctcggggaaggaaaaaaaacagcggtaaaccaaaatccacatatttgggccccagtgcttccctctggccccatagacacgaggagaggggagacacaagtcagattaagccccgccacgtggtggccaagccagctgcagggccatccggcaggccgggctggggacccaggagggagccccgcgagcaaggatgggtcccgaagtcccgggcttagcctacccgagggtggcggacgcctgcaccgcgcgggagcgcagggtcgagcgctgggtcacccaggcgcgccgaagcgggttgagtaaagcagcaggcgaggctgcaggggtggaggaagggaaaggagagaaagggagcccgggcaggggtcgcgttacctctctggggactgctgccgcgagagctgggtggcggcagccagcagcaggcagagtggcgcccaggcgttcgcgcccctcatggcagcgtagacgctcggggtttgcaccccacggcgcgcgcgccggcacacacgcccctccgcacccaccgcgctcacaccgccgctcacactggcagcagcgctggctcacaccggcgctcggctgcccgcgcgctccctctcacgcgcgcaccgccgcggggcggcccaggtagccgggggatacgcggccggcagggcggaggcacttttaaaggcgattatggtgcc

SEQ ID NO: 331896 - DNA, 1240 bp, Homo sapiens
  chr3:142681817-142683057
  hyper
gtagcagccacgggtggtggaagggcacgtcgccgccgctcaggaagaacagacggcagaacttgctcaggaacagcagcagcgggatgaagtgcgtccagaagttgagcgtctcgttggtaggcttcagcaccgaggctaggcactcctgggccgtgcacggcagacgccggtagcccgacaggatgaagcactccacgaagtcgtcgggcacctcgtcccagcgcagcagcggcttggcagacgctggggggtcccgggaggcggcagagtgggagttccgggcggcccccgaagctgccggggccggggccggagggccttttgtgcccgcgccccggggctgcaggcgccgcggcatggtgcccggggctcggctagggcgcgcgcaggcgacctctggcgccggctcccgggcgctgggcagcccccgccggccgccgtcggagcctttgtgcccacgccgggggcgtcgctgcaggtttaggagaagacccgtgcctccgagcagccgctcctaaaaattaaataaatcaataagagaatcaattaataggcagcgctgcgaccgccaggagcgcggagcgcgcgaggctcagcggcttcctcgccaagcccctgctaccggcgcgcggccgcccgcgctgcggcagcggcggcggcgcggctgactgcggcggcagcgcggcagcggtgactgggcatcgcgcggtgcgggtgcctccgccgccgccgcccccggagcgggaggtggggatgtgcgagccgaggcgcggagggagggacgggcgcaccgaggaagggcgggggcctcccaggctagggtttcgcggccgcttcgggggatagagttgtcccctgtctcgagttccgtaccatccccctcctcgggccgccgcagcccgggccgccccgttaatgattgatgcgggggccgcaggctggtcggcgacgcggcggcgcgcgcgccgagtactagagtcggccctggggttcgaaacccgacagccacgcgggcgttctggaggacactggggagccgcgttcgcggggggcggggagctgcggctgcggggggaggggagggcgccggagccgggcagggcggagagatgcgccagcggtaatctccggaggtcgccggggaggggggcactccggaagtcggggggctttaagcccgcgtccggatcggggccgtgtcattgtcagctacctggggatgcgcctctcgctccct

SEQ ID NO: 331897 - DNA, 2370 bp, Homo sapiens
  chr3:142837817-142840187
  hyper
cgggacaagtatttttctgcaaattagaacggggcgttcccctcccccatcaccccaattccagaggacgtcaatcacagtggacgcagcaccgcgagcggaaatgcggagagcatcggggctccgcatgtggggcacaatgaaacaagagcagccccggccagaggtccagtaaagcggaaagacggtcccgcccgcacacccctccggaaaactgaagcgtctcctctgacccccaaggtcagaaagatttattacttccttcgagagggcgcagccacagacccactagagagggcgggcagggtgtcggaagccagagaacggcgctccgcgtcctcccaccgctccagggcgcagaggtgtcctcagtgcccggagaggttggcagtgtcggccccgagggaagcgtggagcggacggccgacaggggatttctgcccaaacttcatcaccaactctttctgagagcaaaaacatggggccgagtccggcagctgcacgcagaatccaactctctggcagctctcggcaccgacgagctccagatcccgcgttcgcatcccggcgctttgcgcgcagagctaagccttcggacccgtggactgcagcccccgcgcgtcgcggtaaagcgggtcgcgtctccagcccccgaggcgcagcgacggtgggagccggctcggcgttgggggcgggggcggggccggcgaagggggagggctgcgcggcggaggggaggagccgcggcgacagacggcggcgcgcaccaaccgggcgccggctggcaggagccgcgcagaggctggtccgagcgcgttgcgggcgcccggcgtaaggggagtcgggtagcagcatcctcctgggcgccgctttcgcgcggcggcggcggctgcggcggggtctttctttgcttaaatacctcgttggccagaagcgctggtaccgggggcgggttgggtcgggtcgggcagtgctgcacacctgggtttccttgcctagagctgtgtgttcggggtcctttggtccagtcggaggctgcggagcggcgggggttgcctgcgctgtccgcccgggcatcctcccggtgatggaagcagccgccgccgccgctgcggggtcgcgctgtgccccatccaccgctgccagagaggtgggaaaattcgccgcacggaggccgaaagcgagaggggctgcgccgctatgccgggagctgagtcccatataagccgcccccagccatcgcccccagccggcttcgttcccctgagcgagacaggaagctgcggtcccgagaaagcggaggagacgtcgctggagccgggaggcgccgggttcggcggagcgcggagcggggctctgggccgcgtgaaagtttttcttcccgagccgcagggcgcccgctgcccggaaactgcccagggataagtcggccgactccccagacccctcgaaggtgcggggacccccagcggaagcgagagggagcgaaatcgaggaacgagtgacagccggacagtccgccgggcggtgatccggggccgctcccgggcgcgccctcggctccaggtgagcggaggaaccgggcagaaccgagggtgggcgttacttaggaggaggaggctgggagggagattggggcgcatccgctcactccgcttcccctcgcaggtcctacccggagccgctgccatgggagagccagccttgggcgctggggaccagccgccgcgcccgcctcggagtcgcggcccgagtcccggcgccagcagccagcccgctgcgtccccttcccgggctgcagggctgcctccgccgcgccgccggcccggattgtgcctgtgatgagccgcagcccgcagcgagctctgcccccgggcgcgctccctcggctgctccaggctgcgcctgcagccgcgccgcgtgccctgctcccgcagtggccccggcgcccaggacgccgctggcccgcgtcccctctcggaatgaaggtgttccgtaggaaggcgctggtgttgtgcgcgggctatgcactgctgctggtgctcactatgctcaacctcctggactacaagtggcacaaggagccgctgcagcagtgcaaccccgatgggccgctgggtgccgcagcgggggcagccggaggcagctgggggcgcccagggccgcctccggccgggccgccccgtgctcatgcccgtttggacctccgcactccttaccgccctcccgctgccgccgtcggggcggctcctgcagccgcggcagggatggcgggggttgcggcccctccaggcaatggcactcggggcaccgggggcgtcggggacaagcggcagctggtgtacgtgttcaccacgtggcgctctggct

SEQ ID NO: 331898 - DNA, 856 bp, Homo sapiens
  chr3:145878430-145879286
  hyper
cgggcacgctgagttcaccgagaactccaaggagtcaacgagggcgggtgcccctacacttccccagggaccagcgccgcccgaccgcaattctggggaagaccccggcggtcctggagaggagggacaggcccccactactcacctggccagccccgcggaagggctggtggatgaatgaactgcccccccgccggccgagcctcgcgggacagcggcggaccgcggggtgctcacctgtggggatgctcgagggcttctccgagtccgcacccagacagggattccaggggtggaggacgagcgccaggagcagcagctgaggcttcaccgtgcatccccccatattcggccctcgagggccgcgcgggctcaggcgcccacggccccgcagcgccgcgcttctcgcgagaacgcagagacccgggtccgccctgagccgccgattgcgggcgggagccggcgggcaaggcgcgcggccggcagccggagcggcgcgtaacgcagctgagtgaggtcgtcggtggaggcacggagcagcaggcgcccggggcgctgcggaggccttataggctccccgaggggaggcgacggggcgggccgcgccctggctattggccgccggctgacccgccgccgctgcgcgcccggtgcggtcgcctcagctcgccctcctgggccccacgtctggactgtttgctcagcgcggacgctatttaaggagctgcctgcggctacgtgtggaggctcacgcagcgcttctggctggaacggggaagcctgcacttagctttgggagtgggtttgggagagggaggaggagccgccgggagtctggcgggagggcggtgttccc

SEQ ID NO: 331899 - DNA, 671 bp, Homo sapiens
  chr3:145968334-145969005
  hyper
cgtttttacctgcgagtggcctggcctgagtccgtgagagccgcgccgtagaaacgccagagacccatgagaaacccaatcaagcgagacctgtcacgcagagcgaaacgaaagggccgcccccgtgaagtgcagccaggacccccatccctgggcaggaaactgctcgctcccaaaccctctgcgtctgcagtgcagacgcgcgcccgacaccacggaacttctgcaaccacctgaggatgcgacgcgagcgcagtgtccgggaactgctagcgcaggacgccgcgcaacctccgcgcctgcccgcaggcaccgcggcctcgggcctcccctgacgacgccctcggccccgcagcccgggcgcccgcgccaccctgtcctgctctgcgcccgcctgtccagccccactcaccgcctgccccgcagaatgctgggcaccggggacgccagacgccgggtctagttgtactggcagaggaaagggaaaggaaaggaggcagggaagggagacggagaggatttttcaagttataaacaaagtaagcgcgcggaagggagggctaggcgcgggttctgggggcgggtccggcacgcctggaccctccttccccgcgcgcggcttccccgtctcggaccccgccccgcgctgggagagccgccagcccggggga

SEQ ID NO: 331900 - DNA, 246 bp, Homo sapiens
  chr3:147074975-147075221
  hyper
attgggctgtctggcgcggcttccaattccagtcttttccgccaggcgcggctccagtttagaccgcggcggtggtctaaattcttcgcctaaggaaccaccgcctaaggaacgatttgccatcggatttgtcctcggcaaatgtctcaccaagctgtagatggatgaatggatagatacatgataggtagatcgatcgatagatagttagagaggtagacagacggatagatccccgaagcttgc

SEQ ID NO: 331901 - DNA, 181 bp, Homo sapiens; identical to SEQ ID NO: 229868
  chr3:147079014-147079195
  hyper

SEQ ID NO: 331902 - DNA, 1056 bp, Homo sapiens
  chr3:147086665-147087721
  hyper
cggtagcatgctctcttgtcaagaccgattgtgttttaggcaaacatttgcgcaaacataaaggcaaaggtcaaggactgttcagtcccagtatgtgctaattcacctagcgaaccaatggggcaaaagttgcattttatatgctcgcccccgccagacccaaagcaggagtcgctcctgctaatgaacaaaatcgcctctgatcagctcccttgtcaatttctcttcggctctctgatccatttctctgggcttcctcagaaatacaactggtaaagacgtgtttgccaacatctggatcagctccgcccaatttctggggcagcacatgtttattccacgtttctggtagcagaaagctaataataataaataaaatctagcttgctgcagacgcttgcaggtactcaaatgaaggattgctcattgctggcgtctgaatatccatgccatgcagaaaaacaatattatttaaacctcagaatcgaatctcaaagctgcaggttagtggcaggaaagtgcatttgtaacacacgtttgtggaaatgtggtatgcgcgcgcactgggagccgcgtttctttgggacacttccctacgttcagcgaatacagggcatcactttccagtgaaatatgcctcccccaccaatatatctacaccgtctcccacagataatgccagttatttttccagcccctaaaaaaaaatacaaatgatttcaagtggatgtcaacttgagcaactcggaagtggaatatttttagggttaaacaaacgtgcgcacgcaccaaccggtagggtttactctgcatcaatagtcatttggcaagaaccaatggctgagtttttgcaaatcgtccatttaaaggaatagtttttttcccttgataaaccccagagtcgcagctgtgcgcatccacaggcaagtagtttacacgtgcaaaattcattcctgagtcaggcgagccacaggctcagctgcggcgcggtgcggcgcttgcctggggctagagagtccacgacttgttgcctctgcgacccgaaagcggctctcc

SEQ ID NO: 331903 - DNA, 497 bp, Homo sapiens
  chr3:147088256-147088753
  hyper
cgcgcgcgcgcgtgtgcggatgtgggcagttagttgcttttaaaaagacatcgttgtccttcagagtaataaaagtgtagcccccatctttgggtgtggggattttacatgcacttctcatttcagttaacttttttcgagctgagaaaagctgctagcttactttcgggagactttgctcgttattcatctgtttagtcgcctcagaggcacaaaagcggatctgcggcgttatgaaaaatggcctgggcgcggagaatgtcacagtggtcggcgtattattttagcccttcttaaaaaaaaaaaaaaaaaaaaaaaaaaaaaaaaaaaaaaactcagggaaagtttgcttttgatgaattcaataaaagcaaagctgcaacggaagagattttcagctaaaattatacagcatggggcagagtttaaaacagccagatggccaaaggtagagggaccctctcggtttcaaaccccagatatagaattccaccggc

SEQ ID NO: 331904 - DNA, 952 bp, Homo sapiens
  chr3:147108619-147109571
  hyper
cggaggcggcggcggcagcagcagggccaggtggtagctcggggctgaggatcgcggcgggggcagccgctatggggcccaagccctgacacacgtaccattcgctcaagtcggcggtacgcgccgccaccgccgccgaggaggccacctgggacttgtggccgcagtccgacgagggcgacacgagggcagacggtgtagccgaatcgtagccagagctgggcggcggcgagcgcccgtgcaccttcatgtgcttacgcagcgagctggggtgcgtgtagcacttgtcgcagccccgcaccttgcacgtgtatggcttgtcgctagtgtgcacgtgcgaatgcttcttacggtcgctgctgttggcgaagcgccgctcgcagccctcgaactcgcatctgaagggcttctcgcctggcggaggcaacgcagagacattagtgcttgtgggtcgtgttcccgtcaggtgcttgccaccctcccccattcgtctctcattttctggaaaagaactacaaaatattttcagaaatccctttccacggcgcctcaggtcgagcacccctttccctcgtgcagagagcgcccccggtgccctctcttgaacgcctccatccctcccgccttcctcctctgggctcatggggagggtatggaggaggagcgacagtgactccatcttagtcgagtttccatcctcgaaaatcctgatccactcgggttgtttcctccaaattttctccacttggaaccagaagcacctctgctcggaaatacattaacggaggagctcacaatatagttaacggggaagctcacatctgctcgatttaaagttgctgtttcagactaacttctctgccgctaccccgcccagccgttcatcccccccacccacccccatcctggcccaaattgtttcctaaagtaggttttgcgcaaacgccaaagc

SEQ ID NO: 331905 - DNA, 887 bp, Homo sapiens; identical to SEQ ID NO: 229880
  chr3:147109795-147110682
  hyper

SEQ ID NO: 331906 - DNA, 804 bp, Homo sapiens
  chr3:147110995-147111799
  hyper
aaaaacaattatttcgctccagacgaggagcagaggagaaaacagcagtgcactgagtgataccggcagccgggaagttcgcaggcccctaggaggccaggtgaggccgcgccccagcttgctccggagctgcaggaggcgccctggtctctgcgcttgacatcacccccgccccccgccaacacccggcctccagtccttccccctccctccagctccctgcactgcgccctgggtgggtgggtgaatgtgaagaggcggcgttgggctaggcccctgcagcccgctcggagcgtcctaggcccggggctgcgctgtgaaagacccagattctcatcccagaggcccagcagtcctgaaaggcctcctctccgaccctgagccgggtccgccgaacaaagttcggaagctcgggctagctgggccagcgccattttctcgcacttgtggctggatctggttgtcccggcgactgcgccccggcgcggtctcttttcctctacctcggatccccagcactgactcgccctcagacgccggggaaggtgtggtgagctcccggccccggccgaggggtccctggagaggagctgggtggcggtggccaggccgagcgcggttgctggcccgcgcctccctccccgaggcaccattgttccgggatcgctgtgaccgccacaaagtgaatcctttcggtgcggacagtcgccttcaaagccaggccccggattcaggtcagggagaatctcagctcctgagaaatttgctcctgtttgccgcttctgctactcgaggaaatgaaac

SEQ ID NO: 331907 - DNA, 479 bp, Homo sapiens; identical to SEQ ID NO: 229883
  chr3:147136959-147137438
  hyper

SEQ ID NO: 331908 - DNA, 1027 bp, Homo sapiens
  chr3:147138422-147139449
  hyper
cgagtctccgagctcaataacgcaaggatggctgaagagcgtctgctccatgtctctttgccggactcaacgaccctcacccactgccaccgagtgctaggcccacagaggcctggcagaagccactcacccctcactactcatgactaggaagaaagtggccggggcatgagggttcgagttctgtcctaggtcccggaagccagggctcccagcgtctagtcaggggcgcagaaaccctcgttcctccaaacccccgccacagggaccactccagaagaaacccattcgtgatttgggtccctttgtgtttgagtattgtggggagtgggctatctagactctaaggactccaagctaacgatgacctgtgtgggccttgctctgaacagaaaactcaaactcagcgtgggttcccgcgtcttccccaaaaggccaaggcccaaagaacccttttcatttggcgaggggcttgaggaagggaggggctggggcgggagagggtcggggtctgcaagccagcggcccggcgcagcggacttgtccggctgctcagcttggcagctagcgtccgtgccggcaacgctgttaccctctcctgggctggagagtggggacatcccttccccgcccctaggcgtccctggggtcggcgccagagcccgggagcgccggaggctctggctggatggcggcgaggagggctctgagtcctctcccggccaggccgagcttagtatgtggaggcggcggcgggagtgcgggcatggaccaagggaagggggacacccaaaccgcattggtgccttcctttccctccactcgcgccgtagacctccccaaattgcccgtctccggtatgactgaatctgtctgctggcctctcagctaccaactctgcccgaaatctagatcccagacctggtaagtcgcgttcctcccctaccccgccccgccaccttactagcggactctgcccgcgacagcgtgcgcgcgcgtggcctgaggcgcgcgctgagaagttggg

SEQ ID NO: 331909 - DNA, 403 bp, Homo sapiens; identical to SEQ ID NO: 229885
  chr3:147140899-147141302
  hyper

SEQ ID NO: 331910 - DNA, 201 bp, Homo sapiens
  chr3:147142189-147142390
  hyper
ctttcgagcgagtgcgaggaaagcccctttcgacagttctgaggttttatccgaccctgcccgggactccctccctgcatgcccccggagctccagtccgggccacccgggggctgctggggacctgacgcaggcagctccgccactgacgtcaggggctgctggcggctggaacccgagtccaggccacaggcgcccggc

SEQ ID NO: 331911 - DNA, 498 bp, Homo sapiens; identical to SEQ ID NO: 229887
  chr3:148415428-148415926
  hyper

SEQ ID NO: 331912 - DNA, 1291 bp, Homo sapiens; identical to SEQ ID NO: 229889
  chr3:149375046-149376337
  hyper

SEQ ID NO: 331913 - DNA, 269 bp, Homo sapiens
  chr3:150481645-150481914
  hyper
cgtatagcaggccgaggagggagctcatgggcagcgttggctaagagttcgagatcatctagaaatgtcagaaacgtaggttgggtcgtgaggtctctgaagacagtgggtgaaactccagtgtaaggcgctgcgtccgcttggtagagagccggccgaagtccgagtctttgttgcgaggcgtagggccaccctgcgcgcccagcagaagcgctagagggcacggttgcccggggtgaaccgcatgtccaaatgtaactgtgtgctcc

SEQ ID NO: 331914 - DNA, 2364 bp, Homo sapiens
  chr3:150802803-150805167
  hyper
gtgggttcaaattccgactcgtttcgtggctttcggcaagtgagtggtcctctctgagctggctcaatttctccatccataaaaagggtacagtaagaccgtggaaggttgtaaggaccagagattctgactatcaagatcctggcacgtagcgaaggctccataaatggcagccatcattcttggccaagtgcgggcgcattctcccgggcacgcctcccgcggggtccctcaggacaggccgagcccgcctccgcggctccggtctcgcagagctcgcgccaggtggcccagcatcttggtgcccgcgccccgaagcgaggagcgagggcgggttggatgaccaaggtctgccctggaggatcaccccccccgccccttccacgctcccggcgcaggtgaggttttcggcccaggccacggggaccgcgacctctggggaggtcgaggcggagggtgcagcggggggcttggagcagggctccagagggcgctccctccctcgcccaggttcaccccagggccagcctcggcgccggggcccgcgggctgcgcgctctgcggctgcgaaaacccggagaggcggattggagcgcgctcaccgcgctctcagccaactcctccgcggtccggccgccgagctgggcatgctcagtgcggacgccgcgccgccgtccgccaactcggaagctcgcgctcccgggccgtgggggcgagaacgccggcggcgagccggcgtcgctcgccgcccccagacagtggcaaacttcgcggcgttcccggagctcgtccgggcgaggcagataccgcacaaataaaatcaaatccaagtcccccatcccaacccgaatgatggaggctgcggcggccggagtgaccccgccgccgccagccccagcccgctagccgcggaccaacaggtaaagtgttgggggttgggggcggaagggaagaggagctggggccgtggggaggcggcgggctggaggagcccgagacgcctgcgggctggctgcccccgtcggcgctcacagccatcgctcctcacccccttccccagcccctggagggactgtaaagggttaagtcggccccacgccaccgtgagcacggccccctccagccgccgcgaccgccagcagcgcgcctcggcgcctgcccggagccgccgaggggaccgtagctgcggatgcgccactggaacctggcgggcgtctaggaggcaccggccgcttcccaccggccgcatccctgcgtctcgcgccccctccagacctgcctctgcctgcactggcccggtccgtgtccaggtggcggggtctgcggggcgcgtggcggcgggggaagggtccctgccggggaagagaggcgggggcggtccgctccacagcttcttcccgggaggggagggccaccctcgccttgggcgagcacttcagccaccagcctaggcgccaagaaaagtttttttttttttttttccagtgccccacccccacccccatcctgcgcccagctggggtgggtttgggtccattggtgaaaaaagtcacacgttcccatcagctgctcctccccctggagacaaggtaggggggagcagaggaggcaggcgccgcggaggaccctggccgacctctagtccctccgccgccgccaccggagcggtgcgtcccggggctcgagcgcagccgagtacccgccgaaggctgtccccatcagtgcgtgtctgctgccgggcagcggcagcatccaacctgctttattcctcctgcctgcagcgccacagcgagcgagcgagcgaggagggggagagagggagtctgtctgcaaagtgctgctccctggtgctcagaggcggctgctccagctccaactctcattcatttcgccggttaacatgagagatcatggccgccttcgggcttctcagctatgagcagagaccgctgaagcgcccccggctcgggccgcccgacgtctacccacaggaccccaagcagaaggaggtaagggcgccggcggcctccccggcaaccggggccgcgctctgcagcactgacccggggccaagttggcccagcgggcatcgccggcgctgcggtggaagaggtcggggagggggattagaggcgggggccaggctgggggtgctgggcgaccccccggcggcggagaccgagcggctgtcagtccccgcgctccactggggcgctcgctttccatgtgccggtcgctttcccgttgccgggccttgcacggcgccgccgggcgcttctcgggcttcttccctgccgaaaccttgctcgctctcacccgtttctgcctgctttatttttcttcttgccgcttcggtaaatcgtc

SEQ ID NO: 331915 - DNA, 1417 bp, Homo sapiens
  chr3:152552403-152553820
  hyper
cggtcccggcaaagctagacgctctgcaatgacaggcgttcccagctagggactcctggctgcttggagcttgaaaacacctggcgtggttctcgagggccctagaggctcctgctacggactggtcggctctggggttgtaggcagaaggctctaagcggtcggaagggtttcctgtgtgtcagcaacttcactttgccgagatagctggcggaagagggaaggagcgctcgcgggccaatcgcctgccagcagccaccttggagcgcacccctctccctcgccgccgactccggtagcagcgtgccggcagaggctgaacacactcggcctcggcggagacctgctccccagaagacgcctcctgcttcccactgcgccctggaggacgcgggctggctgctgggcgagctcggcggaggcacgcccctcgcctccccgcggagtgcggactcgccccggtgcccaaactccgcccaccctctagggagctccgctctcccgcctaaccccggcactccggacagagctgggcctggggaaggggttcctgaactacgcggacgccgaacgggacgcgctgcagaagcgcacgagtctgcggccacgcgcgctccgatggctgccaggagctgagctcagggtgggcggaggaagcggttagacgccccgaaactgagctgcacgtttctaaggtagggaggaggaagatgcccccaattaagttgatctttgagccaaggaggctggggagcagcctccccaagctagagccctgcagagcgagtttcccttgacctcgctgcgcctctggcgcgctctgcagcgcggacccgcggcccctcgggaaagcgcagtcggaaagttatccgcggcggttccctgcgcgccctgttgtgtaagctcggcgttgccagcggacggagaagttgctggcttgcccgatagcccagttcggtggcggcccggggcggatttcatggcccgcggcgaacgcggggccagagctggcgtgggcgagcccctgcgcgccccctcccgcggggatccagttcgcctgctcccttccgctcgctggcttttccgatgcttgctgcgcccctggccgccgctgccctctcgccgcctcctacccctcggagccgccgcctaagtcgaggaggagagaatgaccgaggtgctgtggccggctgtccccaacgggacggacgctgccttcctggccggtccgggttcgtcctgggggaacagcacggtcgcctccactgccgccgtctcctcgtcgttcaaatgcgccttgaccaagacgggcttccagttttactacctgccggctgtctacatcttggtattcatcatcggcttcctgggcaacagcgtggccatctggatgttcgtcttccacatgaagccctgg

SEQ ID NO: 331916 - DNA, 241 bp, Homo sapiens; identical to SEQ ID NO: 229901
  chr3:152879615-152879856
  hyper

SEQ ID NO: 331917 - DNA, 1690 bp, Homo sapiens
  chr3:153838787-153840477
  hyper
cgttagaactctgcgctactgcccacgcatctcacaaagtctactacgccgcgcgttctcggtttcaacgcacctccaggattcagggcttcctaagctgcaattcagcagggctcccttgcttgttctcactctgtgcccccggcaacgaccccgcgcgcctacactcccgtgccgcctcagctactagtccgcaacttctagccccaaaacgctggagctcagaacccagctcaggtgcgctcgtcggtttcccagggagactggggctgattgtaggcacgcgggggcgggaagacagcttcttgcttctggctgcgatggaggcggatctgggcggggccgaaacgggggcggggccaagtgtgggggcgtagtcaggcgtgggggcgggccggcgccggcgccgcggtcggcggcagcgctctcctaagctctcgcggctgcgcttcggtcccggacccgggccacccacggggtagtgggtgctcctcggccccggacattgcaagccccagaaggtaaatttgcgtgggagccgcgcacctggagcgcgagggtacccatgatgagggcgggaggctggatggcgacagaagggagcgtcccgcggcgagtttcccaagaaagctgaactcgtcccaagtttcttgtgcctcggcttgcactcagtgaatgggtggcgggctcatttgctgcgggtggtcttttggcgcgggagggacgcggaggtgattggattaatccgcctgggcggcagcccagatttctgccgggaaccgcgcaccgcagtggtgcagtttttgcccgagaaagggcgggtaagtgcggtgcagtcgtgtcctgcgcagcagcagggggaccgccggtctgggagcacgcgagtcggccaggcgtccccggttgtccagaggcacagtttcctaacttctttcctctttaggcaagactaactcggtgttgctcctcccggcgctgacttcgaggcccggctatggacggcgagagcgaggtggatttttctagcaacagcataacccctttgtggcggaggcggtcgattcctcagccccaccaggttctgggccggagcaagccgaggccccagtcctaccagagccccaacgggttactaattacggatttcccggtggaggacggagggacgctcctcgcagcgcagattcccgcccaggtgcccaccgcctcggacagcaggacggtacataggagccccctgcttctgggcgcccagcggagagcggtggccaatggtgggacggcatccccggagtacagggctgcctctcctcgacttcgacggcccaagtcacccaagctccccaaagcggtgcctggcggctccccgaaatccccagcaaatggcgcggtgaccttgcctgcgccgccgccgccgccggttctgcgccccccgcggactcctaacgcgcccgccccctgcacccccgaggaggaccttactgggttgactgccagcccggtgccttcgcccactgcaaatggccttgccgctaataacgactctcctgggtcaggttcgcagtccggccggaaggcaaaggaccccgaacgggggctctttcctgggccccagaaaagttcttcggaacaaaaactccccctccaaaggctgccctcccaggagaacgagctcctcgagaatccttcc

SEQ ID NO: 331918 - DNA, 1056 bp, Homo sapiens
  chr3:154797121-154798177
  hyper
cggtccacaggggagagatggagccccctcaggactagagaatcccgaagagcccgtgtattgttttcttgaaagccccgaagctaagcaattctaaaaatgtttagcaaagcccttttgggaatggtgagatggggggtggggaggatgggacattttcattgccaccgcccgccccccgtctccccggccccctcacatgaagtgactggatttgggagacctagcggaaaccttcaggtcacccagggaactgctcctctctctggtcctgcagcggcgaggcggggtagggggtggggggggtgggccgtgagagcgccgagacgcgcggggcgcggagatgtgcaagtggcgaagcttgaccgagagcaggctggagcagccgcccaactcctggcgcgggatctgctgaggggtcacggtgagtctctgtgggtgcgggtcggagggatgcccaggtgcctcgtcgccccacggcccgggcggaggcgggtccggaacctcccccaagtccggcctcagcctggagcccgcgcgccttgggcggatgcacggactgagaggcgcttggctgggctctcagcccgccactgccacccggccccgtgcgctcattggtcgggatgtgtcggctcagcagcctccaacttctcccgaatcccactggtgagtcccaggagagcgagctgagggagaaaggtccaaagggcgcgagcgcccagggcgctgggagcccgtgggacgggcacggggagggcagagccagccgaggggagcggctgccgggaggtgcgctgagcagggtccgcagctaaggtccagcgcgatccgagcgcccaggaccctgcggccgtggaggaggcgtgccctgggaaggagccgctactgggacctgaagagtgaggggagggagaggggcccagagggtgacctggaggagggctctggaagtcacgtcaggttggctcttcaggttcatttccatagttccctgcggcctctgccttggggagttatgttttgttaccgagatccgcgctaccagattgcacc

SEQ ID NO: 331919 - DNA, 734 bp, Homo sapiens; identical to SEQ ID NO: 229910
  chr3:156009078-156009812
  hyper

SEQ ID NO: 331920 - DNA, 705 bp, Homo sapiens
  chr3:156533976-156534681
  hyper
cgacggctgtggttactcaaactgatctcatcgcaggtcgtcacgacacgcgcttcccctcgcctgcacgcggcgtggcgtgagaggggccctggcagccggcgcgcccacccctgatccttcgaggcccacgatgaagcccatcctacttgcaataacggccccgttctcattcttcaaaagacggctcccagacgtcaacaaagaatctaacctacacagcgccggccctcgctcctttcagcctcagcgagcgctgcccttcattaccccccagcgcacttctggacactgcgccgggtcgccggggtcagccgcccggccacgaaagtcgcccccagcgtgccccaggcgtcagtgcacgccgggctcccggctccaggcaggcggggtgaggcagctccgcgaaggccactcgctggcgaccccttcccgggtctcctagccctggccgggctgcccccgcgcccgcccccgccctcgaaatccaggcagtgcgggaggccgccttgctgctctctccgcccgcacagggccgcccgacggagcgggcagggagcaggcgccaaggaggccgagaggggcccaggggcgaggtcgactctcagcccgctgtccccttatcccacgtttcgcagcctgaggtgtttgttgtatatcgggaactgacacttttcggcgttaaaatgagggcgtcacctgctc

SEQ ID NO: 331921 - DNA, 598 bp, Homo sapiens
  chr3:157217126-157217724
  hyper
cgcaaaacgtggcacatttcagggagtcacagctgtcccgcgcaaactcgactttacctgcgtgctactcctcaaaggcgcccttgcagttactcagctgcatggtttgagactgggcgggagattcaggcaggctccgagggcacagcgagtggaatccgctcagctcagtgaacctgaagttgttcattgcggagccggtgccgggtggaagaattcaaggaatgcagcctgatgccaccggcagccccagagaccggtcaggtgacaggctgcacctcacccagcggagttacctcccagtgcaacgctctgtttcctgaggtgaaacacaaagcctgctccagtaaaggagagttgtttttaacagagaaaacagaactccctgtgttcgtgaaaatctatactttcccagggaagaatggggggcgggggcgagccacgcaggaaacaattttcaacagaactcaagcaggtgaacggaatggctgtagggagccacctctcagagctccaggggaggagaagagaactgcagcttcattaacacttccctctccctgagatctcacaaacgttttggaaacactgagtgttc

SEQ ID NO: 331922 - DNA, 295 bp, Homo sapiens
  chr3:157260928-157261223
  hyper
cgaggcggggtgggggaggtcgtgtcccagggttctgacagtggagccaggacgtccgggagctgacaatctaaacgcgacctgggaaggggcggtagcgggagtggctgcttcctgggaggtggtgctcgcaaacctggcagctgactgggtggggcgtgccttccctggcagtcgcggaggggaaggctgagggacccggtccccgccccgcgtgctcaggctgaacagcttttcttccctgatctctcggaggcgccggctgctggccaacgcagggcagcctcctgcgtgc

SEQ ID NO: 331923 - DNA, 1297 bp, Homo sapiens
  chr3:157812191-157813488
  hyper
ctggtcccacaggccgtgcccgagtggagcactgcgaatggggccaagaaattttggcctttctcgccggacctggctgcctccgcgggcctctccgcctaccgcgctcccgccgcggcccgactcccgcgggtctccgcgccgaacccacctggctcctatcgcacgggacattcccgacccacccacgccgcgtcactgagcctctgtaccgatacccggcgcctccgccagcagggcctggacgcaccgcctcctttgacctcgggcttcccccgcgctccgctgcttggggcagactggccccgagagggagccaccatctcccctgctccagggtctccagggtccgaacccgtgttgggatctgggttaggattagggtttggagcttggagcctgcctgttaggacccccggccccggcgccgactggagctcgctggaggccacaggaccacggcggatggcctggctgcttcagggcgtaccatgcccgcaggcagatgtttattattaaaaactaccgacgttcatcaaccaggagacccgcaaggcctgcgcactgaatacggcccaaatcctgttcagtggtctttgaaagttaaaagaaagaaacctatcgcccacgtctatgctgaggaacagctttgaatacgagctaagacctgggagagggccaagtgggggtggtggggaacactgctggaggatgtggggctttggcaggggttttacgcaccctccagcacgagggtggggggtcccaggggacgctcaggactctttcagtctttgcggaaggtcccgtcatcacaagagcccgcgcgggaaggaaagttcctgccttggacatggtcagggccgagtcttcaaagtctccaactatccccacacaggcagcacctttgggctttactagtgggatttcttccagaagggggccacgacatggggagagagagctcctcattattttcaaggccaggcttttcctaaacccgattctggcttccaccttctaaatttaaccaatgaagaagctgcttcagccaaccctaaacaggagtgtcagatggggaatcctccctccacagtgccctggcctgcccgcctttgcggctcttttcccgctccgaagtcagcacctgccccgctccagagagggtcaacgaactgggactgattgtcgattatgccataccaaacccaggttgatttcgctccgcaggatccctccttccttcctcccaaaagtgtccccagataaagactggaattatagcaaaacgaataac

SEQ ID NO: 331924 - DNA, 1092 bp, Homo sapiens
  chr3:157815399-157816491
  hyper
cgtttgtctttcgatttttttgtttgctcattttttcattgttaacaagatttttttttctatgcaagagtccatcgttgcagctttgcggtgagccaaactccgcggttccagcactcccctgtccagtctctctccagactcccccaaacccgctcctacaaaacccaattctaggccctcgagtaggaaaacgggcaggagccacggagcctgcgtgcctcgtgagatccctggtcctgcgtggagtctggctttccgagtccaagatgcgataggggacgagggatggtcagtgaggcgggaagagggccggctcccgaggtctcaaaggggtaacggagaagcagcggggcgcggagggcgtgcaggctgagtgccgcgggacaggcgcgacattggtgctggcgttggcgtcacagacccagggctgcggcgtgctttttggctttcagtctgagatcggcgatgctggagttcttgctggtggtcttggcggctgctgcggccgccactaccgaggcggcggaagccgaatccgcggccagcgtggcgagcggcagtccgaagggcggtgctgggaacatcatgtagggcgcgtgcgcggccaggtgcggatgcaggtggtggtgcgcgtgcgccacagcgctgtccagctgcagctgcgcctgaacctgaaaggacaagggcgtcacgttgcaatgactatcctagggtgacaacagaatagaaacagagcattaacggcgtccagcttggccagagagagagttgggttgtgtttgggcacggggagagggcatttggctgtgcatcttgttccgacagtgaccttctcagcctgttgctgaatctggggttccacatggatactccagtgtcccctgggtctccgaaactcgcttagggtaggcttatttccccggaccccgggaacccccttctgcaggaatgtggccgtctcccctgggaactgggctgaaatggtatattggaaagactgcgggtgaggacccttaccctcttctcttgatgctgccatgcatctcttaccccactaccaaaacaacggagtatcaacaagcaaactac

SEQ ID NO: 331925 - DNA, 1352 bp, Homo sapiens; identical to SEQ ID NO: 229921
  chr3:157820689-157822041
  hyper

SEQ ID NO: 331926 - DNA, 879 bp, Homo sapiens; identical to SEQ ID NO: 229922
  chr3:157822953-157823832
  hyper

SEQ ID NO: 331927 - DNA, 229 bp, Homo sapiens
  chr3:157824101-157824330
  hyper
cgggggctgccggagggaaatgggaactgatgcttccctgccggagcgcgcttgttcaatgttaagatctttgacaattcttcctgcggagagttcagatctgatagcgacgctgcgcttgaagtcccactatttatacttcctaacggcggcctcttgttttgagtaaattacctcccctcgcaactcggagtgagcccccttcccgggtagcagtcgcgcctctacc

SEQ ID NO: 331928 - DNA, 1115 bp, Homo sapiens
  chr3:157824433-157825548
  hyper
cgggcgggctggggctggagtggtagggcagcacagggggaccggagggggcggggagagaaggccggtccccggccgctcaggttttcagatagcccctgccgcctgtgctcttggccattaatccaggattgacaagaatccctaattaatttaattaggcgtggattttgcgttggtgtcacgacttagttaaacactggggagctggatagaccccgcggggtggggccaagaggaaactgacaagtgcgcagctcttagagtcagtcaggtatcccgacactgcatccttccctacagccttgcttcgagtcagggtgcctcgcaatgctcagcttcgcattgcttttcctcgtccctgccctgcatcaaccgcccagcagtttacaggccccgcatcccattcccgcatcctgaccccgcatcccaattctgcatccccgcctctccctcacaatcccacccctgccggccgtagctccaccgcccagcatcatcctgcccagagacagggttgcctgcaccttctccgacccgcgcagcttctcttaggagcttcccggctcgcaggcaggctgagtccgggtcttctccaagctcctcgcccctcggtccgtgttattcgctctattattcgtgtcctggagcccagctgactcctctatggacagaccccgctaaaagggaccagtcgatttaacaagtttccccagcagctgttagctgacagatctcattttaaagtgtttccttagcgcccggtcaaggacagctcgacttcgttcgtttcctctctgaggtctcagaactcccacccttctcccttactctctgcactcggacccctctatggtgaattacaggacttcttctttagcatcttgggaaacatccgagtttatttactaatttgaaaaacaagagattatccctcttcgagtctgaaaaaaaaatcgacgttaagtttgtaccccctctaatttcatttattacggagagctaaaaaagagacgctcgccaggagtaaaggtctctctgcctaccccccccaccaccccgcttacgatttaaaattctatttctgggctattttcatcggaacggtttgttac

SEQ ID NO: 331929 - DNA, 382 bp, Homo sapiens
  chr3:158288800-158289182
  hyper
cgaaaagctccccggccggcgcaaggccagacttctcgcctccactgtgttgattgcggttgccagggcagcggcgcattgctccccgcctcgtcctggtgacgtcacagagcaatgtccaatgggaaagcagctcggtgtcacgcacctcctatcccggcgggcaccgcctgcgccgcggcgagtgaggcgtcgtccgtactggaggctagctcttgtcgcggccgcggcgagttaacatcgtttttccaatctgtccgcggctgccgccacccaagacagagccagaatgttcaggatgctgaacagcagttttgaggatgaccccttcttctcgtgagttacgggagccaggagtccggggtcgcgcgggaattaaggt

SEQ ID NO: 331930 - DNA, 1062 bp, Homo sapiens
  chr3:159480856-159481918
  hyper
gaggtcatcctcagcgtgcagcccggaggggaagggaaacgtgagctaaagcaacaggttccacccacagcctgaacttggaaggggatgcggcggcggcaaggcggctggagctgcgcggtggagggagaggaagcggcgaggaggaaggtggaagggaaatgatggtgcatgaccaccgagcacacgtcactcgggctcccacatgggcttgtgtatgtgcgtgtgtgaggggagggaggtccttcacagggtcactcgggcacttccgcgtggaataggaggcgccaggctcgtgctttgggatgccgggtggcttcggcggggtaacgagtcacgcagagacggcttgaggcaagccaagaaaatacgggtgtcggcgtgaaaatacaccactcttcccagcgcgccgcccttgctaactggctggacctgcgcccctaacgcccagtgcccccttcttttgggcctatcttggcccctccaaccccatcccagcctgcctcctgctccagcctgccgccgcgaaaaccgggactgcggactgcgccgcgcccggcagcctctgggcatgctcggtggcgggaccggctccaccgccaggagggcgcgtcctccctcccctagggcggtgacggcgcctgcagcgacttgccgccgcgccccggccaggcacaccttttggggaggcgggggaccaccctgcccggcgtgggccgagagcgccccccaccccgagccttccggcgggtgggaggaggggccggccagggagacgcggaggcgggagtgagacctccgactgccagcggttccttacaaagtaaagctcagctcgcgcgcggacccgggctcccagccgcgggcggggaaggggcggggcggggcggggccgggccgggccgggccggggcggggggtggtctcagcgcctagagcgagatgcgaaattagtagccgcccacccccttctcagttcccgcccccagggaattataatttcctgggaaagtgtctggttctcggagaatccttggggcggggtaaaggggcgcgcctggc

SEQ ID NO: 331931 - DNA, 965 bp, Homo sapiens
  chr3:159943217-159944182
  hyper
cgcctcccgcagcctccgcgcgccgcgggctcctcctcccgcccaagcgtggccaagtgaggactgctccggccgcaggtagctgaggcgcgggaggcggcgcgcgcgggacccgagcggagcgccggggaggggccgacggacgcgagggcggacggactccccagcctcccgtcccggacgttagccgaggtctgcgcgggccatgtggggacccggggtcactgctgagggcctgtcggtggctccggcgccgccgcctctgctgccgctgctgctactgctggcgctggcgctggtggcgccctcgcggggcggcgggggctgcgctgagctggcgtgcggcgagcgggagcgctgctgcgacgcgaccaacgccacggcggtgcgctgctgcaagctgccgctgcacgccttcctggacaacgtgggctggttcgtccgcaagctctccgggctgctcatcctgctggtgctcttcgccatcggctatttcctgcagcgcatcatctgccccagtccacgcaggtacccgcgcggccaggcgcgcccgggacagcggcccgggcctccggggggcgccggaccgctggggggcgcggggccgcccgacgacgacgacgactcgcccgctctgctgcgcgacgaggcggcagccggctctcaggactcactgctggacagtggcggcggcggccggggccggggaggcggcgggcgctcggacccctcctgcgcctcagagcacgagatgcgtgtagtgtcgccggtcttcctgcagctgcccagctacgaggaggtcaagtatctgcccacctacgaggagtccatgcggctgcagcagctcagccccggggaggtcgtgctgccagtgtcggtgcttggccgccctcgaggcggggtcgccgcggagcccgacggcggcgagggccgctaccctcttatctgagcgctcggggatcggc

SEQ ID NO: 331932 - DNA, 514 bp, Homo sapiens
  chr3:160167477-160167991
  hyper
cgcatccgtaaaggtccttagactcaccgcggggaggaagcggaccaggcaactccacagcacggaaacacagcgccacgagctccaggcggatgctgagagccgccccgagtccccgccctcctctgccccgaagggcttcaggtgcccagaccgggcggggcctcgcggagcctcgcagcgcaggcgcagtctgcaggcaacattcaactgcaaggcatcggccaatgggaactattgctgggctcgttcgaaagtaaacggtggacggcgcggcccgaggcaggtggcgggagtcagtttaaggctggcgcccagctttccgcgcctgcgtgctaggcgcaggccgcctctcggaagcttggcctcgcaggagcggctctctatcctgtggggagcttcggccagtgggcctcgtgagctggggtcccgcctggggaatccgcatggcaccggtggtctgggggagaggctgggcctggcgcgggacgaggcgaagcgccggtggccgacg

SEQ ID NO: 331933 - DNA, 785 bp, Homo sapiens
  chr3:160822422-160823207
  hyper
cgtgggatttccttctctctccgcccgttctccacattccccacttagtttcacattccttcccaatccctccgacatccctgcgccggggcccttccctagcgctccgggaaagcgttcgccgcaggcctgttaggggcccaccaataccgtaacaccgttcccgtcctcttcctcggcaccgctgcaaacgccccgggtcgctacccggatttgacggtggctggagcggcacgggcgacgcaaggcaggtattgcaccctggggcaaggcaaggtggacaaccagcggatgcggcgcggccgcggcctgggcctgggccctccgcgtcgcccactgccccactgggccccttctcccgcgctcaccggaggcgggcagctgctcgtcaccgagacccgagacccacggtgcggcggctcaacctgggccacgctccgctctagaggagtgggcggtgcctcccggcctagctgccggggtctaggcgtttccgaggacggcgcgttccgggaaaggcgggtccggtggctataccctccacccagtggcaggactcaaccgcctcggagaccctgcagggccgcccttctcactcacctcctgtgctcggcgcgcacccagctcggaagcgggaaggtggccggcgttctctccctgcgcacacacgcagcctccccgcatccgcacgcacggccgggcgcgcgcagaccacgcgccagggccgcggccggaagcccctggctgcacgcgcgggcccaggcggcccccagccctgtgagctc

SEQ ID NO: 331934 - DNA, 198 bp, Homo sapiens
  chr3:161089246-161089444
  hyper
cggcttaggtgagcgccgaggctttggctcctccccagctgctgcgagcttcccactgcgccgggcgcctgggagcctcccggagttaggtgttcggccccgccctcaggactcttgctaaaactcaaattctacctggctaattccggtgattaattattgacaaaaggaaaacactcctacgcaaacttgtgtcca

SEQ ID NO: 331935 - DNA, 273 bp, Homo sapiens
  chr3:164912391-164912664
  hyper
cggcacccgcaccctcccccccatcccccgcccagcactttgggtacccaatgtgcagaggcggtgactatttatcgggtgttatcggaacccatgatgtgatggaatcgatgggtaacccggaggctgccctgagcttccagatgacggtaaatgttgtctcggcaatgaagtctctgttatttcttgaactaaaaccccttacgttctggacctgggctgtgtcctaaaggctatctcacctttttccttttctttagctcaggatagcgc

SEQ ID NO: 331936 - DNA, 780 bp, Homo sapiens
  chr3:164912983-164913763
  hyper
gtcgtcaggcgaaacgcacaatggtctgtttagaaacggaaaattattaaaagctcaagcctttttccttctacctcttacaacaccagcgagcattccactgggggaggggtccttcgctccgccacctggcctatttgttggagttacttacgatgtcttcacccagaaaagaggtccgagggtatgttagtctccggtacccctccttccaccaacgtccttacacctaactgatccaattcaaaactgcaacaaacccctagcacctgtgagcgtacagaatacaccgcggccaaactcgatgtgctctacaatgcacatcctacatacgagaaatactggtttcaattaggcgaagtaggaaaggatggcggcgagtacctatggtgcagagcgctcaggatctccgaggtttgctgcgaggggctacccagcaggaggggcaaactctctgcgaagctgaattgtatccatcatactgtagccttgtagcttctcctcttctggccaccaactttccgaaaggctaccgaatcacgcttgtaatccgtttaaatgtttccacctttgagacttgcagggaaatggtcgctgcataccaatgggagagcggggcgcgcacctagcgcggcgatgccagcgacagggagctcacgaccacagctccctatgccctcgatggttggtaggcaggcaggcagagtgagtgtcccaggactaggttcctttgatttaaaatctcggtgctctggatcagtggagagcttcgttgttccc

SEQ ID NO: 331937 - DNA, 381 bp, Homo sapiens
  chr3:167097886-167098267
  hyper
cggtgcctccagctccacccgagctgagtctgcttcccagccgcgctgcccgctctgctccccgcaccaactagcccgggcttgctgcccgctaggcggactcagagaccatcctcccctctcatccacccgcagacagacaacccacctggagaccccagcctctcgcgtcaccaccgccggatggccgcggatagctgccgggagtttccgtcttggtctccttggttaccgcgttacctcggtacccatagcaaccagaaagctgggttctgccactgtccgccggcagagggcgaaaaggagcctgcgaaatgagagagaatggtgatcacaggaaggaaaagggcggaaaaactcaacaggctctggaagctttcc

SEQ ID NO: 331938 - DNA, 852 bp, Homo sapiens
  chr3:167967629-167968481
  hyper
cgacaagcccaacttctgcgccgggttcggacttgcggagccggaacggcgcaccgcgcgcagcccgggcggcggccagggcggatcagcctcgccgagatgtcctcgcgactgtggctctggtgcttctgcctgggcggttgccggctggccgccaggaagcgccctacagctccggctgggcatgtaagtggcgcccgcgcgctccggaacgcttggagagagcagacaacagtatgccccgccccacctcggacctggtgcggacaccgcggcccgagcccgggaagggatggggggcaggaggtggggacagacacctgcgggggctgcgggctgtcccgggcggagcgcggcggaacgcagtccccagctagtccttggggagcgccagcccgggagcggagaccgcgaccggggcgggtgtgctctccacccggtacttcctcagcgcctgacagatttttgtcccccgcccccaggtttgggtgtgtgcgcgcgtggtatgtgtgtgttttcgttatttttctgttttaagagtaattggctaatgactaccactttgtgacagggttgtgaatgaaatcctgtcgaacaccgagtttgacatttttttctttgtagagaccaatgagttcgtgcacatgtattctttctttttttgggggaagtatcgccgagtcggacggagtggtttattccacaggtttgaccagaggcaaatcctggctcgtctgccgaagtgaggagctggggagatgagtatatgaaggattgagtgctcggccacttagctgctagtccccttattagagaactgaagagttagtaggaaggtgactcaaacgcatc

SEQ ID NO: 331939 - DNA, 225 bp, Homo sapiens
  chr3:168960241-168960466
  hyper
cgctgataacgctcctgcctgctattctccaaggagccggctgctggaagactgctccgaacctcatccccttggtgctcctgatgcgggcgatcctccgactgctcggcgccaaccacaacatgctacccaccgtgagagagcaggacgcgggctgctctagtcaggacttatcgtctatcatactgattgacgaaaccaagagtgagcagaaaaaataaacac

SEQ ID NO: 331940 - DNA, 1376 bp, Homo sapiens
  chr3:169378540-169379916
  hyper
cgccacgcgctactcgggggaaggaaatcgcgctttaaaatacaaaaatctgtagttttaatatgatttcctttattacccagattgtaactgaagaattgcaacgcagcgcttctgtctgggaaaggcagctgcggcagcaacagctggagtagtgcaagcgggaatctgaggctcagtaaaagtttgtaagagttgagatctagctatcagaaagcggcagcggcatccttagagaccctggggacaaaataaatgggtctcccaccagttgaatgacaagtatcatcagatcggaaacgaggctcagtttctggatgctgagtggactgtgcgtgcgggaatattttaagacggcatcgtatgtcttgcttggcaattaaaatagttgaaaaagttgctcaagaaaattcgaagggttttgtgttctgctttcacttcagaagttatcgggcagtgagttgcggcgcgaagccttaagctttcacttcacaacttaggcatggttgaaaagggctacccacccccacccaccatcccactcccgccaactcccccccccacacacacactctctctctctcccaacctttagtccaaatcgaagcccgcaaacctcaagtatatgtacatttatttcccttcagatgaaaataaagacatcggcctcatttaaaagcaaacagggaaaacagttccaccggcgccctttgacactgtagcagcgagtgtaaagaacaacacccaaaagagaaacagatggactgatgacccaaagagccctatatttaggttgatttctcagacccaggggaaaggaaatgtatcggggagtgtacgagtgcttgggtgaggactgcacaaagcactggaaaggcgcctgggatgacagcatctcgcggggctacaccgccgactccaatgcccgcgaagccgagcctgctgaggtgccgccgacttcccgggctgctgcagggacgcagtgagcaaggaggcgtggatacgatacctaccgtatttggttctaatgtgcgagggtcgcgcggggggagactgggatttcactggggagaagcatcccacccatctccgatctctcatttctgcgttccgtaaacaacacaattagagagttttgttttcggcgagtgcgagtgtgggagagagaaccgcggcctgtccactcccgaggcagctccagccccgcctattgacacctcaaggaagagcgctcccagccgctccggggctcagtgtccctgagtccccttcaactcgaagtagaagcatttggacaaacgcagtcctgtcgtctacagtcctggcggagcatcacaccgtgtgggaaagtgtgggccccgccggcaaagccaggc

SEQ ID NO: 331941 - DNA, 950 bp, Homo sapiens
  chr3:169482182-169483132
  hyper
cggaagacgggagaacccacgcaggaacggctccaggcaaccccggctcactgcccattcattttggccgactttggaggtgccttcacgtctcctgccaatttgcagcacactggcccagtcagtcaggtttgggggttcacaagcccccattgccggcgaggggtgacggatgcgcacgatcggcgttccccccaccaacaggaaagcgaactgcatgtgtgagccgagtcctgggtgcacgtcccacagctcagggaatcgcgccgcgcgcggggactcgctccgttcctcttcctgcggcctgaaaggcctgaacctcgccctcgcccccgagagacccgcggctgacagagcccaactcttcgcggtggcagtgggtgcctccggagaagccccgggccgaccgcggcctccaggcggggttcgggggctgggcaggcgacccgccgcaggtccccgggaggggcgaacgggccagcagctgacattttttgtttgctctagaatgaacggtggaaggcggcaggccgaggcttttccgcccgctgaaagtcagcgagaaaaacagcgcgcggggagcaaaagcacggcgcctacgcccttctcagttagggttagacaaaaaatggccaccacccctcccaggcccaccctccgcaacccggtgcgctgccgggcgagtcggcttataaagggagcggccgccgaccgcacggattggccaagctgactctcgcggctctcgtgagagtcactctctcgggcgggctggttggggggaacgggaaattaaagttccatttccggccatgaggaaggacgttgcccttccgcacgtccgggaaaggctttgcgtctttacttccgaccttctttaaaggtgaaactaacttgaggtatcagagggccttttttctatcctctgcagaccagacgcggttcacctc

SEQ ID NO: 331942 - DNA, 1387 bp, Homo sapiens
  chr3:170625831-170627218
  hyper
cgcagaggagctcgctgagggtggggacacccgccctgggcgctcctccgtgctggaaacagcaggttgcggcccccatcgccccaccgcagaagccggcgaccttcccccgccgcccagccctcggccgccgccccgaaccctactgcgggggacccagcccaggccgcaggtccccgcgaaggatgcggggtaacagaacctggccagcagcacccggccctctgctagctggcgcgcaccccgccctccacccttcaacgtcgccgccgcggccgcacaggcgccccctgttctgccggcatccagggctcagctcggcccggcccggccccactagggcctgagccccggcgggtcccgcgctcgcctctgttcccccatccattctccttctttctctcggtcagcgctcagttctgggcgccttccccggccctgcctcactctggccccatccccaccagcttttccccaccagcttttccccaggtcttcacctttcagctggcaaagagcgcctttcgtctgcgcacccgcgctggtcccctacagcagcggcgccggcagcggcggtggcggccgcggcagttccaagagacggggcggggccgccacactttccacaccccagcctccccgcccttacccgcccccactcagccctatttccgggataggccccggagcgtcacaggcaccgccctctcgggctaccattggctaccagattcccgaggctccgcccagtcacgtgaagagcgccctggcaaccccacgtgctgcggattagtgcacttccggcgtggagcgcactttcagcagtctggttgccgagggtgagctcgctggcagaggaacttgcgccttccaactcttaggtttgttgcgttcgggtcgcagtcgactttaatgggaaccaagcaaagcacccaatggcccctgccatcaggtgcgtggcagttatcacatgacgatcgtcagaactcgcgaggcgcgcagattcagcgagtgccagtgtggctggctgtgaagcgaactttgggttcgagcttctggttcagcttgcagcctttcttggggttcgaacctcctcctggtccttaaagaagaattcaggtgcagtattttattacccagctcggcaccgcaggtcctgaggaccccccattcaccccttggtgagatttttggcagcgactgccgccggatgcccctgtagagtcagcactgctccctggggtgggaactcccgaagcgtccgccagctaacaagccagcagtgaaatgaattaacccacttctcacaccaaaggctgttgggaagttgtggaggcgaagggtgtctgactcctacggcattgtgggtccagagaggtgttctgcc

SEQ ID NO: 331943 - DNA, 981 bp, Homo sapiens
  chr3:171527569-171528550
  hyper
cgtattgtgaggaagaagaccttttacacactccctgctgctggcccccggccccctcgccccacctccgagtggtcacatcacacggcgggagccgcggtcagcagctgtgatcacacccccaggaccgtgctctgcgggctgggctcgaagccttgggacgcggcacttcctggttggtacgggatgccggtcccatcgcccccaccagcccagtcatgccaccgcgcacccgaaccaagggcgcccggatgacctggggacaccacacacactgcacccgaagccctgtggcggcgaggcggtgcatcctgcagaggacgcctgggcttcagcctgagcctgcgcggctctgcgctccaggcagccgcccgcgcggcaaaagtgcgtgccagagttgtcagctttcaccctgcaggaattccacccgaaggcgtgcgagggaggcccttggggatcgctagggagtccgccgccgactcactcgctgaaatcccgtccaagttgggcggggagcggccagctgcccaggttgggcggaggagggacggagggcgagggcagtggaaacccggctcccacgggcgcccggtgatccgggtctcggcgcggctcctacctgcagggcgaaggggccgctagcacctgcgcgttggcggcggactctcagggctcgggtgcctctggcacagctggagctcagcgggagggagggagagagggcgggccggagggggctctgcgctgcgcggccggcaggaactctccgcccggattcgccccggattcgcaggggtggagcgaggcggtgccaggtcccggggcgtcgcggtgccggctggaggccccagcggggcaggtctcgcgactgggcctctgatcgcccgcgttccttgttctcttttcccaaagtttcataactcgaccgcatcaccctagggaatgctcgctattaggaccattatcaggtcctctcgagcc

SEQ ID NO: 331944 - DNA, 554 bp, Homo sapiens; identical to SEQ ID NO: 229980
  chr3:172167332-172167886
  hyper

SEQ ID NO: 331945 - DNA, 726 bp, Homo sapiens
  chr3:173115048-173115774
  hyper
ttgccagagttgagcgagacgaagccgtgtctaaataagtacatgacactaaatttccttttaaatccaccttttacaccatggccagtcgcttgtttaactcccgttcaagggacacggttttcaaacgtgaccttttggggagatgtgggaacttcccctcatttcttcttctgtgccgctaacctctttcctcctccgcgcggcatctccagccccggcagtttgtaaattgcccgttttgcccaccctcctggtgggcgttctctcccccactccactcctgccccctctgtcctttcttcattggcgtcttcggagcagatgcatcttctttcttcttggcctcactctcccgttcccccgtcagtccccccacccgcggctccccacttgccccagctctcctcgccgctcctccccgcctccccgcggagggttgacccttcaattcggagtcccggcctgtgggcgggcgggggagcgccgcggctgtaagccgaggatcaggcggcggcgcggagagcgcgcccgggcggccagcgccgagcgcgcggagctggcgtggggagacacggcaggaaaggcgagtcggagtgggtgatgagaggccgggagagcccgtccgagccggagagaccggagagaagggagcgagcgactgtgcggcgctcacgctgccagagcccgggcggagtgcagtcgcctccaaagccttagagcggc

SEQ ID NO: 331946 - DNA, 75 bp, Homo sapiens
  chr3:176915778-176915853
  hyper
cgcgtgtccggggggcggcccggcggcgttgggggctgggcgcacacgcggcgggcatgtgggggagtgcggcgc

SEQ ID NO: 331947 - DNA, 1102 bp, Homo sapiens
  chr3:179168676-179169778
  hyper
cgtagaacttttatgagtcttccaagcactctccacccaacagccctgctgggcagtcccgaatacccgttattttgggggcacgcacgggctcgtgctctgagttcctggaaggaggcctcggggagtgacgagaaaccaggggggtctgcaggacttggaccgccgaccgttcctcgctccccggggcgagcggtctggaccgcccgggaagtgcctgcgccggcggtcgtggggccagttcccgcgtggcagctgggcgcgacacaggcgcgccctcctcgtccctcccgggcagcgtcggccgcccgagcccggggagacccgccccgccccgcgccgtcacccgggccccgttccgcaggggtggctcgcggcgccccacgtccctgcgagaagcccgggatcgcttcgcggggcgcaccgacgagccgccgctcgcgagctcgccgcctacctggagggagctcaggcccgcgtcgaccgcgcgctgccggtgtccgctgggcgctcagcagcccctggagcgcggagccggcgtggagagcgcagctcacagccgagaccagagccgccggccacacccagtcccgcacctcccagcagccaactccgcggcgcgccggagccggggcggggacgtggctggaggcgcgaggcgcgaggcacgaggcgcgcgggcccggcggggacgtgccggggacgcgcagaccctcggagcgcgcgcagcccgggcggggggcgaagggagcgggcgccgcgcgcagcttctgcttcctattttctctctcgtttcctgccagaaggagaagaaaaacattcattcccgggcagtttcgttttcttgttggtgtggcgccggggcacgctgctaagtagcgcccgtctaagtggcgtggccagtttcctttccggcgctgacaggcgccagtttgcttgttagcaggatcgaagggcagagctagaagaccccaaaggccccatttaggtttcccattctggaattctaaatgtcagaaagtaaactgaagcccagagttgcacaaccttgcgttgcagtccccgctcttccatcactagttgtaggaccgtgtaccgtctc

SEQ ID NO: 331948 - DNA, 1235 bp, Homo sapiens
  chr3:179754092-179755327
  hyper
cgattccttgatcctgtttaaagaaacaggctcagggaatgcacagaaaacaaacttccccaatcgaagttctgaggtcttccctccccttctcccaccttcggaaaccggtctagttttcccggcagcaccggacagaaatgtcacggtcatgttgcatcacttcacttgttgagctgtgcgaaggcagcacttgaccacagaaacttggtgaaccgccttgctcttaaattagcccccaagaattctctccagccctatagaaatgtcttacctgcatgtgtccctggtacattctgcttcggtttcttcagggctccctgaggccaccggatgcttttcccccgtgcttacttgcccaccaaaagaggggaaaaggtgggtgcacagcgggttctcagagggtgctcctgagccccctggagctccgggtactcggccggccggcggccactcggcagcgctgcgggctgccgggaactgttctccgctcggggtgctgaaagcggacgcgggagagcgcgcagagaaggcgaggagccgggtcggccaggctctcctgcaggcgcgggtcctgctcgcggggcgtctctagaactcactccttcttcgccgaactctttctcgcttcctgccaggttgcctcatgtctctctctctctgagctgcgaaccccctcctcccagccctgacgtgagcgcctacaccagccgccgccgcagctgccgagcggggcgcgcgccgttctcccagccgcgtgcctgccgagaggccgcgggaccgggcacgcgcgcgcgttcccaggggcctgggagcggcccgagggcggccccgggcggtgcgcgctccccgagcgcgtcctcggggctgcgcgcgcgcggcggcaaggcgaggtgccggcaggcggtggtcgcgctggtgtacaacgcccgcagcagcgcggcgttcaggtgcggcgtcggcgggcagggcgattctagcggagaggatggccggccggaagaaaggcgggaagacatgcatcgtctctccgggggccatccaccgcggctgagcctgttatcctacagacattataggctgagtgcaggggttgccgaagagtttacttcggttctgattcagctctcgaaagttacgtccgtatcacccgttaaataaagactccccgctcccctcatccccagttcatcgccgagcattctatttaaaacggcaaaccctagtccctgagg

SEQ ID NO: 331949 - DNA, 561 bp, Homo sapiens
  chr3:180319831-180320392
  hyper
cgtagtctcgctcggtttcgcgagatcgaggctgagctccgccgcgccgccgtgggggcgaccccagaacacttccgggtgtaactggttgtgctgtctgtgtacttccggcagcctccagacagtttcttccgcttcctgtaccacccggctcaagtagcggacacggaacagggaactatcagcccgtcggcctccgggccctgcattctctagccatggaccgggaccttttgcggcagtcgctaaattgccacgggtcgtctttgctctctctacttcggagcgaacagcaggacaatccacacttccgtagcctcctggggtcggccgccgagccagcccggggcccgccgccccagcacccgttgcagggcaggtaatgagacgttggtgccactgcgccacggaagaggggacgcagctctggcagccactaccgcagccccgggtttgcgtctagaggaagtggagccgcggccgtgagcacaggacgatcgcgcgctggtgtcttgggctgggtggacggggggcgctcctgggttgtgcaatgcgggatgc

SEQ ID NO: 331950 - DNA, 924 bp, Homo sapiens
  chr3:180397104-180398028
  hyper
cgttcgccaccgggatggcgaacccatcctcccagtgcagctcagccaggaattcgctactcatgactgcaaacggatagagaagatacagagcaaagatccgccttcttgtacagcgggtgagcagcacccgcgtcaagcccaggcacctgcacagtgccgcggcaattgccgggggagccctagcaaccttcccgcgtccttagttaccaaacaggaaacgctccagcccgaaggcgaaacttccggttgagaactccctgcctgcaggccgaagaatctttttcttaccttgagcactgagggatgagcagcaacttgcccctcccgacgttcccgggggttgccaggcggcagcgtaactttccacgaaaaggcggctctcggatcgctcccggagcgtgtgaaaactgtggcccccggagctggctggaggaccacggggcagctggctggaagtaaaccacacgatcctccgattgcctgggggaagacgggagccaacagggattataaactaagtttcttttcaaggtgtgtttgctgtgttgtgtagatttcagctactacagtaggtgaaagtagaccgaagtgaactggtgtttggaaacaactctctctctggcatcactgggatgttctgatcgtcgcctgtttcagtcggccagccttcctcaccgcactcaccggccccatcgcggatgtcccagtcgatcacagacgcggaccgcgcggaggccgcacacttgtggcgcggtgtggtggtccctccggcaccactcccatacttgcatttttctttgcatttttgtttgctaacatttaaagtgtggaatttcgcataaacgtctgtatttcctctgcttgaaaaagggtaggtgacacaatccccattatcaaaaggcaatgttccgctggagaggc

SEQ ID NO: 331951 - DNA, 951 bp, Homo sapiens
  chr3:181413014-181413965
  hyper
cgccgtttcgcccacggggtgcggggaacgaacccaactggacacactgtgcacccggaaaaacagacggttccaaattcatttccgcatttgagtctagagtcagcaagatcttggccgcccgcctgcgcctcggagcagcccacgagcccgtgaaggcgcgtggggaaggggggcctggaaagcccgggcttcgactcactcggccagtaccgctccgaggaggggcctcagcctccttcggagccagggccgcgcccgagccgcgctaggccagggggccggacgcgcacggaagggggctggcggacacggccgggtggtggcgcagttcctgggggcacagggcagcccagcccgccggcccgcgcctccgcttccccactccagcgaaactggacaaggccgacccacccagccgggcccgatccctcaagacactttcagcctcagcccccgtttctcctcgggtttccacagacccaggaaaggacagaggcggcgagcaggctgacaagtttattctagaggctttgaaaaatgaggtttccaggtctcttcgcacgcgcgcgcgcgcgttctcgggctaaaggttcgaagctagagtttgaatttaagccacgtcctgggacaggtcgcgttcagcgtgggcgtcggccccgccgcggccccaggcctcttcgaagtgcgcgtcaagtggggtgtcgggtcgttttgttttttctctaagtgaataattcaatcgtgttaggccagattacatgctcataatacccaggtgtatttaaaagcacccgcgtttctaaacctcccgcagaaagtgggaagcaatcgccccctcggacctggcgccgctgcgcctgctggagcctcgcttccccacagtcgggcggccagtggagggcgaggagcgcgcgcgtcacgagaggcggccccggcctcccagagccc

SEQ ID NO: 331952 - DNA, 596 bp, Homo sapiens
  chr3:181419943-181420539
  hyper
cgaagactaaagctctgtactcgaccccgcgagcggctctcgccttccggggctggaacccgactcagatgtgaagcggcactgagccgctgcgcaggttcgtgcccagcgccccctgttggacacagtaggagctgcgcagcgccagtcccagaaatcgctggaatcctgctctggggttagagaaaactcttttattgccctccaaaaaagaaacgggatgcgaaaacaaatttttatatccttgaaaaataatataatattaactcaataaaaaactaaagaggcgatactacaattttaattcaataaaaaataaagactgtcctcctcacatcccagccatcccccacccggtttggttttgtaactcttttgaaaggttctgcgatggtaaaacaggtaaagaaaagtgacgaaaaacaaagcatttttctgtagccgtggagaatcaagcaaagtatacttcctccgttttgtccacatttcaaaaaattaaacggaagatgctgctgcttgctgttttgacgttgtcagcagcgtcttgaatgccctcagaggtcctgcaagtatcgtaactgagccttcgagtaaac

SEQ ID NO: 331953 - DNA, 1086 bp, Homo sapiens
  chr3:181421152-181422238
  hyper
cggaaatcggcttaatttttcataaaagaatggctttttaaaatattgaatactatggctatgcaaggtttatgatacctttatgtttattcttcccacctcccaaaattagcgaattcgagataacatttcaaggggaattgctatttagtgcgatgagagatgacttctccatctggttccagaattagatctcggcttaggttttttagtaagtaggttcagatgcaatggaaggagagaagaatcaagccttttgataaaatctctaccccgaattctatggaaaagacaggcaagcgggattccagccacagcacccccaccttttgctctaccaaaaggcttgtccccattacagaaataatatagtcggtgctagttttgtgaacccgcgccaaccgataaggtaagaaacggtgcgctgacagccgaggtccgaaggctgctcagtggttcccgcagcccgtggggtagggaggccaaagccagcaaaatgttggaggcgacgccagaaagagagtatatgcctgctattcggaagtgatgtcgaacgtgcaatagcagagtcctggagatttccaccccgttccgcacccagggatcccagcctgtggggtagcaggttgttgggtgaaggcaggagggagaagccgcacctggctgagggcgggtgggcgtgccgggagcgagtgcccaactttctagggcccatggagaaagcataacccctagttgaggaaagagagctaaacaagtgggtggcccaggcctgggaatgccacccagctctcccgacgcagtgttatttctgtggtcccagggggccccagcacctgcccgaatcccactccccaaggccgccagcaggaaggcagcccctccatctttgagggctgaggagggggcagcgagtgacttgattccttagtagcagggaaaaccgcagcggctggcaacgggccgcgtttctccgcggcggcaaagcgccctttaggggcggggcgggcatttttggtctcctgtcccagcgtccaggcctgagcccgcgcgggttggctgggcgccctgctttgtaagtaacca

SEQ ID NO: 331954 - DNA, 454 bp, Homo sapiens; identical to SEQ ID NO: 230016
  chr3:181422662-181423116
  hyper

SEQ ID NO: 331955 - DNA, 1710 bp, Homo sapiens
  chr3:181429601-181431311
  hyper
cgccccctttcatgcaaaacccggcagcgaggctgggctcgagtggaggagccgccgcgcgctgattggtcgctagaaacccatttattccctgacagcccccgtcacatggatggttgtctattaacttgttcaaaaaagtatcaggagttgtcaaggcagagaagagagtgtttgcaaaagggggaaagtagtttgctgcctctttaagactaggactgagagaaagaagaggagagagaaagaaagggagagaagtttgagccccaggcttaagcctttccaaaaaataataataacaatcatcggcggcggcaggatcggccagaggaggagggaagcgctttttttgatcctgattccagtttgcctctctctttttttcccccaaattattcttcgcctgattttcctcgcggagccctgcgctcccgacacccccgcccgcctcccctcctcctctccccccgcccgcgggccccccaaagtcccggccgggccgagggtcggcggccgccggcgggccgggcccgcgcacagcgcccgcatgtacaacatgatggagacggagctgaagccgccgggcccgcagcaaacttcggggggcggcggcggcaactccaccgcggcggcggccggcggcaaccagaaaaacagcccggaccgcgtcaagcggcccatgaatgccttcatggtgtggtcccgcgggcagcggcgcaagatggcccaggagaaccccaagatgcacaactcggagatcagcaagcgcctgggcgccgagtggaaacttttgtcggagacggagaagcggccgttcatcgacgaggctaagcggctgcgagcgctgcacatgaaggagcacccggattataaataccggccccggcggaaaaccaagacgctcatgaagaaggataagtacacgctgcccggcgggctgctggcccccggcggcaatagcatggcgagcggggtcggggtgggcgccggcctgggcgcgggcgtgaaccagcgcatggacagttacgcgcacatgaacggctggagcaacggcagctacagcatgatgcaggaccagctgggctacccgcagcacccgggcctcaatgcgcacggcgcagcgcagatgcagcccatgcaccgctacgacgtgagcgccctgcagtacaactccatgaccagctcgcagacctacatgaacggctcgcccacctacagcatgtcctactcgcagcagggcacccctggcatggctcttggctccatgggttcggtggtcaagtccgaggccagctccagcccccctgtggttacctcttcctcccactccagggcgccctgccaggccggggacctccgggacatgatcagcatgtatctccccggcgccgaggtgccggaacccgccgcccccagcagacttcacatgtcccagcactaccagagcggcccggtgcccggcacggccattaacggcacactgcccctctcacacatgtgagggccggacagcgaactggaggggggagaaattttcaaagaaaaacgagggaaatgggaggggtgcaaaagaggagagtaagaaacagcatggagaaaacccggtacgctcaaaaagaaaaaggaaaaaaaaaaatcccatcacccacagcaaatgacagctgcaaaagagaacaccaatcccatccacactcacgcaaaaaccgcgat

SEQ ID NO: 331956 - DNA, 481 bp, Homo sapiens
  chr3:181437081-181437562
  hyper
cgttttattaccctagtctgcctgcgtgtacagaatgaagggtgcactgttttatatagagttcggcgctttgaactatcatttgcctagctctcccagcttccgcgcgggccacggctccgggctgtgagcgcgccggcctcccgccggctgccctggggagcgcgcagtgcccagtgctgagagccgacgcgcgggcaaattgaggccgagctgacgagctccggcgggtggacctgacgtcaccgcggcccgggtcacctcacccatggggctccccaagaaggtgctgtgtggggctcgagttctctctgcccgggctctgctcaaacggtcgcattccctctccctcaggcaccgacccgcgtcagacaagtctagaaagtctcccgaggcgttggggccctcaccactccagagtcctctgcctcctgcgccccagcccaagccctctccatgttgacctcgtgacacgggagac

SEQ ID NO: 331957 - DNA, 171 bp, Homo sapiens
  chr3:181438182-181438353
  hyper
cggtgaattcttcccaagggttcttatcgctggcggccaggccagaagcgggactgcgcccccacccccacctcgtgacgtcagggcctgcagggctccggggatgaaatgattcgtttgagtgttccagaaagggcaatccgaacgcttacagggcgaggccagtgcagc

SEQ ID NO: 331958 - DNA, 152 bp, Homo sapiens; identical to SEQ ID NO: 230023
  chr3:181440930-181441082
  hyper

SEQ ID NO: 331959 - DNA, 528 bp, Homo sapiens; identical to SEQ ID NO: 230024
  chr3:181441349-181441877
  hyper

SEQ ID NO: 331960 - DNA, 2064 bp, Homo sapiens; identical to SEQ ID NO: 230025
  chr3:181442081-181444145
  hyper

SEQ ID NO: 331961 - DNA, 1627 bp, Homo sapiens
  chr3:181444347-181445974
  hyper
gatcagcagaaggcctcagacggtcaccatattggtggaagcgtttgtctgatgttttaaaacgtataccaaacggggcgtcagggccacgtgctgtgccttcgaaacgccgccgcgggccctgcctttcagagctgcggcagccggggctggcgtggagggggcgctgaaacaccggcgggcgtcaggggccagcgctgagctgcagatctggccgcagcgctgagtgaagcgaattatctggagcgtgtttgatctgggactgcgtagtcagcttctgctttatttgtttgtttgtaatctcatatttagcaagccgggacggtggcagcaagggagaaaggacgggatggaggagggggcttcgcggtaaccacaccccttcctaatgagttaatttccatatttgcgcctcccgcatctagcgccctctttttttttttttttttttttttttttttgcctgacgccactgtgctgttgcgtcttgcgcagcgcagacacctccactctggattgaaacgaaaaagctcgcggtaagagcagaaaattggtctattgatacattcgctccgagtgttgatcttggcatcaccgatagccggttaattcccccaccccgcccccgccagtgggtcgcacgcggattgccgagggcttgcaggcactcaggcagacgcagacagaaacccacatcgaccccccccctttccccgcctccagctgtccgaccctcaagtctctttctttttcttttttacccaactccggattattttccccctcaaggtgagggcagtgagagcagcgagggcacagtccgcacaaaaagggggaaaataatcgcaaaccaaggaaccaaaagtgaaagtttcaaactagataccaaccctgatggaggttgggtgctgacccgactgtgggtacttaagagaaggaaggagggaaactgaggtggtgagattatgtccacagtatgggtcggttaaaagttgtagtaaagaagttttgggagggccctcactagaaactcaaggcgggtttcagctgatttaacctggtttcctacacatttttgcggtgattctgctctggaaattggcgaaagagacagacctttgcaattgctcacccctccctgcccccaaccaccctgcttactttcgcgaagcgcattaggatgtgggctctggcttgagctccaaaatagcttgcttgtcaattgcgagctgcagcaatatcaaagtgaactgtcccaagtaactcttgtctagaagctgggaagaagcttaagcagctcgctttaatgatgatttgtagctcggcgaggggcacggacagcaaacaccccgcaggtgtgtgccgtaacaccatcatccggacttgaatgtagattactctggcgatcgtttgatcggccctttgaaaccctttacaattgcctgtgacgaacggccagtctcagtttttctctgaataatccctgagggtaagtcctccgggcttttaaagagctctagtattttttttttaaagaataaaaagaaaaacgttcgattttagtttagacctcgtcaacttttagtcgctaacaggcatcactcaagccagtcaatacttaatgacc

SEQ ID NO: 331962 - DNA, 394 bp, Homo sapiens
  chr3:182833891-182834285
  hyper
cggcggccaatggggggctaaaggggcttgttgtcatgggagcgaggatgtgatctatatgctgcacctgcggctctcctgctcatgcgcactgactgcacccgctgttcccctgcccatgcgcactgactgcacccgctgttcccctgccggtgcagactggctgcacctgctgttcccctacccgtgcgcactggctgcacctgctgttcccctgcccgtgaggactggctgcacctgcttttcccctgcccgtgcggactggctgcgcctgctattcccctgcccttgcggactggctgcgcctgctgtttccctgcccgtgcgcactgactgcgcctgctgttcccctgcccgtgcggactggctgcacctactgttcccctgcccgtgc

SEQ ID NO: 331963 - DNA, 432 bp, Homo sapiens
  chr3:182880277-182880709
  hyper
cgcgccacacctccctacccgcagcccgtcctgtggcgcccgggactccagagtgcgtttagatgaaaggggaccgacacgtcagggccaccgcgggaagcgctgagggccactcaccggccagggacgcgaagagcgcggccgccgcgctgagctgccggggcatggtgggcgctgggcgaggttctgcagcgtgcggcgaagtccgggcaggccccgaatcggtgccagagaaacctacctgtgccggagaaacgaaaccacctgcttatgagaagcagccgaaaagcccgcccagggccgctgggcggggagggaaactccgccggccccctcctacccctacggagcagggaggggcggggactcggcgcagccgccggggcccgggcctctgggaccgtttaccgcacgcgcgtggtcccggcagcg

SEQ ID NO: 331964 - DNA, 224 bp, Homo sapiens; identical to SEQ ID NO: 230034
  chr3:182896564-182896788
  hyper

SEQ ID NO: 331965 - DNA, 629 bp, Homo sapiens
  chr3:182896848-182897477
  hyper
gtgggagcacagagaagcccacgcagcaaagaattgcccggctccgaatatcgaagtgcgcggtcgagaaggcgtgggctgcgggctctgctcgcctctgcaggcgccttagagcagctccgaggtcccccgtgcggagctaggcgcgcacccaggacacccctcgggctcctcggaggaggccctggttgtcccctttctgccgccgccgaggctccggctgctttctgcgtagctgggcagggcccgggcccccacaccgcctctcccgggaatgcgggcgctctggagccgaggagcgggggcgtccgcagggaggtcagctctcctgggcggaggtcctcgggcgcagcgccctcgcctggaaaccagccgtcgcccccgcaggagccagccggcccgtggacgccccagcgcgctcctcctcggtgctgcgggtcgccctgcaattccgagaagaaagtcagagacgccgtggcccaaagaggcgcttagtctttcctcgctcacactcacgtttcctcctcatcgcgttcttctttttctccctggctgctttctcccctctccaggaaagcagatttggaggaacaggtttcgtgactgtcgtccgactggaaaaggcccgc

SEQ ID NO: 331966 - DNA, 1312 bp, Homo sapiens
  chr3:182970902-182972214
  hyper
cggggcccatcaccttcacctacgcgccgggagggtggcggctggcgggcggggccgggctcgggccgtgacgccgagagtgcggggcgcgcggctgggagcctcgcgcccccgcccgggcccgcccccatcccgcccgcatacagcccgcatcccgccggggaagcgagcccagtccagcgctgcccgtccagtcctcgcccaagatttaaagcccgcaagttttgttcttgagaccagcgactttagctccgatgcgggaaggaaagccgacctccgatttggacatttaaagagctgggcttgaacttcgtgagtttcgctctaaactgcccttgaaatgaagctggacttggaggtaaagtcactgggaagctggcctggggcggggtttccccctcttctcgtattttagaaacggacagcggcagtgcagccctagtttgctgtaagtttccttactttgttactgaggcccccagagctccacgcataagtggtgtgaccagaaaccttttaacaagacccgcctgagcctgcgttagagctcccgctcggaaagtaaaagaccatcctaatccgcggcgctgcggaaccggtgtcccgtgtgggaggaaccgcggcgttccctgggcgtagggcccgcgaggccagcacagtccgcctcttggcggagcgccctgggccggtggttccgcgcggagttagtctgtggtcagttacgtggtgaaaacacggctgtgccgcggccgcatctttccgcggccgaggcctctctgggtgggagtgttggcttcctttccggatcgctaaatggggaaagttctggccgctcggcgggatacgtctccaggccacggatggttcgttctccgtgccgcggccccgagctgggctccctgggtctccagcgcgggctcccggcattgggggctgcgggccggcccctccgccccgcccccgccccgccgcgcctcctcggccgagcggctcgcggtctccggcgcgggaggctccgagtctgcccactccgggccgagcgaggtctctggaggagaagagtggcgaggaggtgagggcacgccggccctcgcccggcgggtggcgccaggacttcaggtgggaacgcgcgcttgggccgggggcgcgtggctggcgtggacaccggatcggggcccgccgccctggcccggaccgcgcacggcccagcgccgggaagtcgggaagccggggaggcctctcccaccgcgggccccggcagcccgccctctgaaagcgcggcggagaaggaggctcgtcccctccccggaac

SEQ ID NO: 331967 - DNA, 910 bp, Homo sapiens
  chr3:183145434-183146344
  hyper
gagctcaacggactcggcaaccacctggtgaaggcaccagcctcggccccccgacccccaccagcggcgcgccccagggatgccccccgctgggcaccgcaggcaggacccagagcagcgaggcccagatgccgggcaaccccccaggaagcgcgctgccccggggcagcgggtgaggccaggagccagatgaagcccagagaccatcctcacccgccattaataaaacgcaggaaaaattaaagcttcgtttaccgacatgagtgatcactgtggccagtcgccgggtgagctcctggggaggcatctcttcttttaagcaagacagcatttcactgaaaaaccattccgtataaataaagccaaacaaaactgtttctaccgctgcggtggatgattttttaaaggcatctccgcccaaggatgctctgccctcgccctcttcctggctctccaggcaagaaacgagagtccctcgcagcctaggccagctctccctcgccacgccccgcgggggctcccgtgacagaccaagtctggcgctttcccagcgtcgcagctggaccgagagaggagcggccgttctgcaaaaggaagcaagtcgccaatctcgccggaaccgcgccccggctcctccggccgggcgagctccggggcttccagaatcgcggtcccggccgccaggtttccggcgccgcctccagggactgtagagtgagggatgctccgccaggtgcaggggaggcggcaggtggccgtggcttctctgcgccgccggccccacgccccagcgcccacctcgtccagcccacgggtggcgcccggggctctcggggaggcacgcacgctcccaagcgccgctcgttttggggtcgggaacgctgcgcacctttccctgcggggagcccgc

SEQ ID NO: 331968 - DNA, 807 bp, Homo sapiens
  chr3:183165026-183165833
  hyper
acagtctcccgccccgtttcttcacctcagttctctaaagattgaaggtcaagaggagggtttcttgccctggagcctgcgatagggtgggcccttgcggttcttgggcggaaacggcgatagggacacccagggcctaaggaggctggggacagagcagatcctcccagcccccaacatcaccccggagtagatgcagacccccagggtcccggaggccgagaccacaccccgcgggcacgagcccgattggcagattgtagccgagtggtttcaacggtgacgccccccacccgaatgcctcgctgggattggctcatttcttggttcagacctggacggtggccagaggaggacaagaggcttttacaccgaacggaggtgatgtggacgacaacggagacgcagccgcacttcaccaagcggccggtccgaggggacatggcggcaacctctgcagcgtcagtgctgctggcgggtgcaagaaactggtggcgacactgcctgagcccgctgctgttgccaaggtgacgaggcataaagccgcggtggatcggtgcgtgggggcgcggggtgggtggtgaagggagaacgaagctcgagcggaaagacaggaccgcgaccgcttgtcaggggattcggcttccagtcccccttccagagggcgtccttctgcagccaggcctctgtcttcccccgcccccacacggtacgagctacagaatgcttttctgttttctctttttctatagtaaggaagcgctttcctttctcccccgtttattcatttgcttacttctggttccc

SEQ ID NO: 331969 - DNA, 727 bp, Homo sapiens
  chr3:183542795-183543522
  hyper
cgccggcagctccgaggtcgcgtgggatccgggctccaggcgcctccgctctgccgcccaccccatccctctggctccgggcctccgcgtcctcccaccacagggtggggactcgttgcggtccctacccagcccatacctgtacgacgtggtcactgctgcagccgcgtccgcgtcgccgatgggcagcacgtagaccccgcgggcgccgggcgcaggtggcgcggaggactgcgcggaggatttgcccctgcggccgcccgcccccggtccgcgccccggcggcggatccttgggcccggcgggcgtggtccacaagccgaagtcccgctggtactgagtgagcggcacgtcccggccggaatcccgggcgcccgcgggaggctggcccctgcgcgaggcggcgccgcccgtgcccggctcctcgctgtcgaggtccgagtagccgtgcagagtgagcggcaccgccacgtcggagcggtccagctggttccagcgccgcgccaggcagcacaggcggctgatacagggccacgccatgccagccccggcgcccgccgccccgctcccggcgcgcggcgctcccggccgcgcctcctgcgcccagcgtccccgcccccgcggcccgccccgcgccgccgcagcaccgccccccggcacgagggtgggcgtcccgggagggggcgcactcggcggcagccccacttggccggggccggctgcgcac

SEQ ID NO: 331970 - DNA, 939 bp, Homo sapiens
  chr3:184278877-184279816
  hyper
cggacactggccgtcgccctcacgtacgctcgaggaactcttcctcctctgcaataaagctccttacactctacagcgatgacttaatcccacgtcctccactgctaagctagtaacacaagcctctgtcttgtccattgcggtagcacccgcaggtactacagtctgacacattgtgggcgctcacaaagatgtgctgaatgaatgactaaatacgcagcccagtgaaagaatgaagaaacgatgaagtcccttgtcacaggatacatcgcggtgggggtccccccaagtagcactaagctacagccacatgagggcgtcgcagggcagacgcgggccacatgggggcgcccccggtccgtcttagctggttggcacctcctcggactcagtttaggttactaatcgccaatgggcgccaggaggcggggttctccctctgatggacagcatcgctccgcccaatctaattcatcttttccttagccccgcccactccggcccctgagaccccgagggtgggcctggcggagacaccgccaactgaactccagctgagtgctctcgaggccgaaccagcgggcctggcggtctgtgagtgggtggccagccgctaggggcggggcctcagcgttgacgggcaggcaggccgtcccacccctctcgcccagagcggccgcgccagcgctggggacagcagaagtgagtacgtgagcggcgcagcaagatcccagctcggaccccggacggcgcgcgcccccgaagccccggatcccagtcgggcccgcagctgaccgccagattactgtgcatcccgaatcacgaccacctgcaccctcctgccccggcccgccccccaagtcctcaggcacccagctccccggcgccccggatcctcctggaccggtccgtccagattcccgcgggaccgacctgtcc

SEQ ID NO: 331971 - DNA, 491 bp, Homo sapiens; identical to SEQ ID NO: 230058
  chr3:184301275-184301766
  hyper

SEQ ID NO: 331972 - DNA, 801 bp, Homo sapiens
  chr3:184321783-184322584
  hyper
cgttcagtagtcggacctgggccacggagggcacagcggccactctttctgagaggcagaggtcggtgggctccaccctcccactccgagccggcctgaccctcggtgcaggcggaaggggggccgcggggagcggaggacggtgccgaggcctcgctgctgctgcagcgcccccgccccgcgtcgcctcccagccctggctcccagtgctccgggcttgctgacggtacagggtggacagccccgagacattttcatcagatctcgtctcccgcagcccagcgctgctgccgggggtcggacagggccgatcccagcacccctcccccgagccctggctgggcgagaaaccgagatggtggctgcagaaaccggagcccccgcgccggggcgaccgcgaggggccgaggcctttgagagcgctgccgccccttgccaaggtcaatcaaaccctcccacgctccggaggcgcgcgctgcgtgctctaggcagcggggattggggccggaggggcgcgtcccggcggggccgggcgagggtgggtggggggtctggcctggggggcgcctcccgccccctcttggggaaggtgctcggagactcccgggccctgggcggagagtgtggggaggctgggctaaaggcagagacccaggccgagggctctgacccacccaagaggaaatagctactaattagggacgggacgtttttatgctaatatgcacctggctgggcttttctggaggctgagaaagtgtggagtggaagggaagaagttccggagagcgggaaacttcc

SEQ ID NO: 331973 - DNA, 842 bp, Homo sapiens
  chr3:184870185-184871027
  hyper
cgaggcgccccacgggatttcatctcgtcgtcaaggcagcgccaaccccagccgtccggcgcaaggaaagctccggcgggcccggagcccacggcggccccagcctccggcagagcagccccggcagagcccggagccccgcggccgcagagttccggcagcgaccccggacggcccggcgggcgtcccccggaccgcggcggaaggcgggaagacgcggctcgacttacagtgacaccatcctaggtgacagcaccagtgcagcttgaagcacttgccatggctgtgcgtggcacagatagacagcccgtcgcacggctggaagtcgggtctgcgggcggcgcaactccgcgccagggcctgagcctcatctagtttctcgctcttccaaccccgctccgacgccggcgaggccgccgcactcatttcctctccctccgcgcggagccgacaccgggagcccgggagaagcgacgtctgggtgggcaggaagccgagccggctgcggacgcgggagggcgcggcacgggccgggagtcacgccagcacgcggcggcggcgggagcgcggcggtcccaggctcgaggaggagccgccccgggcgctgcgaccgggtccgggctggcagcctccctccctccggcgcggcgcgcgccgcgccccacgcgcacacgcacgcgcacaggcgcgcgccggtcggccccgcgcgacgttcctcagcgagcccggccttctcacacacacgccgctggggagcttggccgtcggcgtccccgccggtcacagcgaggtcctcctcacatactcactccttcctcggagaaagaccccgacggagggcc

SEQ ID NO: 331974 - DNA, 43 bp, Homo sapiens
  chr3:185977478-185977521
  hyper
cgggcccggggccggccagtagagggctctcgagcaccggccc

SEQ ID NO: 331975 - DNA, 1571 bp, Homo sapiens
  chr3:186078710-186080281
  hyper
cgtatgctaatgaagtccgaggaggcagcggcgcagcgcgggagagcgcgcccacgggttcacagcgctcccgggcaccactgcggcgcagccacagatcgcttcgcgctgcagcagacgctcccgccgcggggggcgactgggggaggggtctcgaccgccaccctgagttccgcagctcatccctcccatctgggaggtggttctagctctagtcccaagctttccactgcagtgatggtggggatgggggcagcacgtcaaatcacctgtagggctttttagaactccacagccccctcccctaattctattccactagttcaaacgaagaaaatctcagactaggcaaggggaggtggaccggtggagtctgcgaaagcaccacaggtgactccgggtacgcactcctcaggacacaagcacacacacggacacatcttgtgactctgagactacacagatcaacctcagattcgacccttccctcctttattctctgaggtgtccgtgttcgcttcagcttccctttaagtcgccctgcgcaggggctttgtggagtgcccccaaagtcctagaaccccgcgggacggtcggaggctttggcggccagacattaggaaaagcatctcctgcttctcggactgcctggagcgcgaactggatatcaaggagccaaggttaagtccagaagaagaaggaaatccgaccagttgctttagcaaactgcctggagcaaggccgcctcccacccgcacagctttgaggcttgagggggcctctcagtcgcagagagagccgagccccaccctgtgcgttccccaagcctgcacccctcgagcggggcatcccttcctgcagggctttgtggcaggtggaactgtcggggtgggcgccgtggctttggctgcagccccttccctggccgcgggaccggctcccgctttgccctcctttaccaagttgctgcaccgggtgctccctgagccggggaccccctccgccgcgccggccgccgtcttacctcaccaggcaacacttggttgcgcggtggcccggggcgctccttcttcgcggtttattcccttacttgggaggaaagaggaaccgagagacagaagggggaccgaagctggcctctgggcgtcttcccgcctgcgcagccctctcgggggagggggatgcagccccagtgggtgccgcggagaccaggctgccaggctgtggttggtagcgccggggtcttcaccctgtgctcggagttcagcagctccaaagctgtctatctccgtggcccgctactacggcactgcggctctgtgccctgcccctcgcagcctggcaagtccagctgccactctcactgcggagccctgcccccgggcgcagagcccgcccccgccacacacaccggcgcgcgcgcgtacacacacggcacacacagacacgcgcttccacacatgcacacgcgtgcgcacacacgaatgtggatccgctcgatgggaacctgaccccctttggtgcaactagggcgcgggcatcattaggacgctttttactgacagggcttc

SEQ ID NO: 331976 - DNA, 301 bp, Homo sapiens
  chr3:186648488-186648789
  hyper
cgggctggggaagacgcctggggcactgcccggcgttaacaaagggagccgataccgaccggcgtgggcgcggagcgggcggccgccaccgagcgtgctgagcaaccgcagcctccgcggccgagagtgcagcgagtgagtagggggtgcggtgggcggcggcgcggcccgggctatcccgggaggagtgtgatgcaaaggggcgcgggaggatagcggaggcgcggggcccgcggcgcgcgtagggcgcagggaatctctctccagctccgcctcagctgccttggctccggggctggcc

SEQ ID NO: 331977 - DNA, 617 bp, Homo sapiens
  chr3:186857083-186857700
  hyper
gcccagctccctcaggtctgcgtgtcaccgacccgaacccgctccgtcgtcctgacgcccccggcctagctgcagccaccttgtcgcaggggccttggtgtctctgagactccgagacgcctcgcccccacctggcgttcggaggcggttgcctcgctgggcgcagcaattcaaccgccgcgcgccggatgctaagaccgcgatttccccggatgctagggcggtgatttcccccgtgacaggccccgccccggccccgcccaggcccgggcggtcccgccccactgagctgtggctcggggagccgtgggtccgactcctgcgtgtgatgtgtcaccaagttgactttggggtcccccattcttccttagttctctattttacctcagcgcgttgtctagctgctgcctggccacggtacttagcacacagcgtgacttaatactggataaacgaggaaaggattcgtacgccctggcggggccagaggctcacagcttgggttcccgcgagcacacgagccaggaaccgccaatgcctccagggggcgctctccctcccatcgagccaccgccgggccattggagaccaggaggacctctcagctccatccctgc

SEQ ID NO: 331978 - DNA, 2866 bp, Homo sapiens
  chr3:187455297-187458163
  hyper
cgctcacacataagagcacaaacaccagccctgcgcgccggggcaagcctaggcagacttcgctaccccaccccgaccactccgtacctgtcttccagggactgcccgcccctgggcgatccacctcgaagccccccgcaaggcgcgacggaggctttgtggtatgaccgtggcggcccttaatttagttacattcaaataaaacttttggtgcacctcggtagctaacattgtgtgtatgcctttttttttttttttttttttttcctgttacgccgtcaatgcagcaggcaatgaggggaatgacacagccctctcattcccggaacgtagtcaatctcggctctgcggatttcacagaacacactttgcctattgccggctccaacaagaagtaactttccaggaagctgccggccccggcagccgccaggatcgctgcctgcgctgcgctggccgccggggattcacccagggaggcggggccgctggggaaggctcgcggggaatacagcacactttcccctaaatccctcgtccgcgccgagtgcagggctctcagagttcacctagtcccacctctcacccacaacagtttataaatggggaaggtcagacaagttagtagcagagctgggtctagaacccaggagttcgaatacaatccgaggctcatatcgagactttaagttgtccgattccgaagtttatttgcttttttccctctttttgccttccattctccctcacccccgttcttttaggggaatgtttgagcgagacttcaaggtcaaaagatggagtccctaggggctgagggtctccatcataggcgccccaggcaaggttggagaaaaactaaacagaaagccccttccgcctacgttggcaagaacgggaacccagctccacttggtttccgcccaaagtctttagaacaggagctgccaagccgtaaggatttccgaatccgatttccccgaaaccgtagagacacagcttggactcggcaaaggccggggccccgacccctgcgcgcgcactggcactctccaaagttgcctcgccttcctgtggccctcccgggaattataacccccgggtgccatgtcctaattggtctcggtagcaggctccggggtgcgctttcgggggctaggggacagcgaaagactcagccacaaaggccgcagtctggtcctaaaactagccagtggcgtcacactgcgccgctcatcccttctgcggcaagcggaagggtcagagtcggtctgcaaagaacgagcctttggcctcaaaatcctacattgaggctttctcaccccttcgcccggtgggataaaggtgaaagagacggttgggatttaataaggggtagggatgagaatctgggaagttaaaatgaagtaagtgcatttattggaaattaggagtcccgtggttccgggagctcaaaccgaatggtgtttttaccgctgcctaacgctagagagagccctccatcaaggtttgaaaccgtcaacccctttctcgcccctcccctccttcccattgacctagtttggccagagcctcccgatttggagaatgccttccgcccttcccccctcctctccagccagagaggctacagaggctgttggattattggtaatctaataactccaataacccgctgaaaaatccaaagggaaatctgaaagtgtaaagcactgtttagggacaaggacaaggaattttaataaggctgcaactgccgtagtgaaccccgcatcaggggccctgccgtggggctcccggtctcagcagtgtttcagccaactagctgcacggctgcagacaccaccgtggtccggcggcagggggtgaggtcaaatcgcggagctgtttttattcttgggggaaaacactcttcgccctcttggctggggaacgggagggtgcaggagacgacagtaaataaaagcgaatttgataacgcgatggcctcgacagccgctttggataaccgaggtgttcggggacattgtgtcctgactttcatttctatcacgtttcctgccaacagtgctcttgcaagcctgcaagcttctaggaaatgcaataaaacagagggatgtgttttatcatcaagatctgaagaggagttgcagaagggacgttccccatacgctcagcgcgagacagccttccagaagggcccgaagacaatgccagcaaatcgcgtcccggagcagagatccctcggccgtcctggctggactgggctcagcctttgcaaaaaggctggcgggggaggggagaagcatgatctcctcaagcaaacaatgcctttaaaaatccgatctggaaagaagtcagccaaggtccttattcacgttaatgaagatggaaggcactaactgtccttggaaagcgatgagtcaaacttgaccgcgcttcaaactcgttcccagattcgtttccagtccgaacagaggcgcgtttctccgacgcggcctccgacggctcccgcagtgggaggggccgaactcgatccccgccgacccgggcgggggcgacggcgctgtctccccctgcagagcgcgcctgctgccgctaggggccgccagcatgcggacgcgcgtttgccatcttaagtcacgagctcggagaaagaaaactttacggaggaactgttgtggcacaaattctggcctatccacatgacccccaccccctcacacacacacacccggtttctcgccaggctactatgcagaggatgttaggaaggggaagagagcgatttcagaatcgaggctcgccctgcaagtctttggtccaggccttaacccccctcttaacacgcaaacccccgagctcc

SEQ ID NO: 331979 - DNA, 1066 bp, Homo sapiens
  chr3:187458583-187459649
  hyper
cgaagcgggttatttgtggtttttcttagtgcaaatagatgctcatcgctgagtgatgggcaagcagcgaggcctttctgattttcatccctcttgccaaaactttggaggttgtatgccatccccattggagggtgccctccttctgtcagtcctagcatctggtcagggtaccgccgcccgggaggtggaacggcgagcccaccgcccatggccgcgaactcgatctcagcccaccgctaggtggcaggccagcccgtccgagaatcgccgcgcggccgcagcttccacaccgatccctacccgcccctctttattttctgtctggtgggggcgagggttgggggtgtgattgcctctaaaagcaaagctagaaaacatttaatttagtgtatgtaattccgttcctcccgatgctcccgcctctagcaaccacaacgcggtatctggagctggtttcatgtatcataagttgatttctcccccagcctccgaaaagctttatgtactgggaagggaaagaaggtgcacttgtcttcaaaaggcagaatggcactcgacagtattggcagagattcttgccaaacactggtcatccagcaaagaaagtcgggaataaactcctgatcttctcggaggaaaggggcgctgggggccgagtgctggatcccactcaggctcactgcgcctggcaaagcgggggagtggggagtcgggtatggtcttttggtgaagttgtgggtctcggagtggacatcgggagggttgggaggggccgttcctggtttccactggggcaaagagaaaccagccagttctgccaccacgctgcaccctcgctgtgctcgcggcggcagcggcggtcccacttgttgcgcagtgctggaaaccggcacgcgccattcgatgttgattcacagagggctacagaccagcctaccattgctccacgccatccacaaacctcctcaacacaccccctacacatacgtcctgccaccgccggcaaaactacagcatttccagccactatggtgttttacaccaaaacatccctcactatctc

SEQ ID NO: 331980 - DNA, 59 bp, Homo sapiens
  chr3:190231330-190231389
  hyper
cggagatcgcatctacatcctgccgcgctctgtgccggcacagggtggttgcgaaaatc

SEQ ID NO: 331981 - DNA, 69 bp, Homo sapiens
  chr3:190529734-190529803
  hyper
tctttgtacacgtccgctattgattcctaattatcaccaggagatggcgctgtgcattagtaaacatcc

SEQ ID NO: 331982 - DNA, 448 bp, Homo sapiens; identical to SEQ ID NO: 230103
  chr3:190580490-190580938
  hyper

SEQ ID NO: 331983 - DNA, 1949 bp, Homo sapiens
  chr3:192126247-192128196
  hyper
cggggggcggggcggggcggtcccaggccctcttgcgaagtagacgtttgcaccccaaacttgcaccccaaggcgatcggcgtccaaggggcagtggggagtttagtcacactgcgttcggggtaccaagtggaaggggaagaacgatgcccaaaataacaagacgtgcctctgttggagaggcgcaagcgttgtaaggtgtccaaagtatacctacacatacatacatagaaaacccgtttacaaagcagagtctggacccaggcgggtagcgcgcccccggtagaaaatactaaaaagtgaataaaacgttcctttagaaaacaagccaccaaccgcacgagagaaggagaggaaggcagcaatttaactccctgcggcccgcggttctgaagattaggaggtccgtcccagcagggtgaggtctacagaatgcatcgcgccggctgcggctttccaggggccggccacccgagttctggaattccgagaggcgcgaagtgggagcggttacccggagtctgggtaggggcgcggggcgggggcagctgtttccagctgcggtgagagcaactcccggccagcagcactgcaaagagagcgggaggcgagggaggggggagggcgcgagggagggagggagatcctcgagggccaagcacccctcggggagaaaccagcgagaggcgatctgcggggtcccaagagtgggcgctctttctctttccgcttgctttccggcacgagacgggcacagttggtgattatttagggaatcctaaatctggaatgactcagtagtttaaataagccccctcaaaaggcagcgatgccgaaggtgtcctctccagctcggcgcccacacgcctttaactggagctccccgccatggtccacccggggccgccgcaccgagctggtctccgcacaggctcagagggagcgagggaagggagggaaggaaggggcgccctggcgggctcgggatcaggtcatcgccgcgctgctgcccgtgccccctaggctcgcgcgccccggcagtcagcagctcacaggcagcagatcagatggggattacccgccggacgcaaggccgatcactcagtcccgcgccgcccatcccggccgaggaaggaagtgacccgcgcgctgcgaatacccgcgcgtccgctcgggtggggcgggggctggctgcaggcgatgttggctcgcggcggctgaggctcctggccggagctgcccaccatggtctggcgccaggggcgcaggcggggcccctaggcctcctggggctacctcgcgaggcagccgagggcgcaacccgggcgcttggggccggaggcggaatcaggggccggggccaggaggcaggtgcaggcggctgccaactcgcccaacttgctgcgcgggtggccgctcagagccgcgggcttgcggggcgccccccgccgccgcgccgccgcctccccaggcccgggagggggcgctcagggtggagtcccattcatgggctgaggctctgggcgcgcggagccgccgccgcccctccggctggctcagctggagtgctagctccgcaggaaactcggggcccgggcgagagccaccgagatggcaggtgggacgcagagcccgcggcagccagagttcctcccgcacggcccgccgacccacggaagagcgaaagagcgcccaggtggggccgagctgggggccgggcccctggagcgctgggaagcacagcgcgctctagtcaggttccctttcctggagccctccgcttccagactcccttctttcctccctccctcccgccacccctctccctcctctctgtgtcttctgtctctccccttttctcctctctacgcaatcctacgtgattgaggtttggatgagaaattctcagaggcagagcgagggaactgcagcttgggtctgctccgtcc

SEQ ID NO: 331984 - DNA, 397 bp, Homo sapiens; identical to SEQ ID NO: 230107
  chr3:192231878-192232275
  hyper

SEQ ID NO: 331985 - DNA, 796 bp, Homo sapiens
  chr3:192232553-192233349
  hyper
cgcgtgtgtggggttggtcaactccccgcccacctgcgctagtagtccaaccaacaggcggcctgtcttcggaagccgggtcccgagtccatcgcgcgcgcccaggtggaggggagtttgcacatggagccggagggagcccgggcgccggcagggggcgggccgggacgcggaagtgccggtccgccgggggcagccctccgagagcccgaggcgctgccacccctcggtgggctcgagcacggccccttgagaccttccggaggcggtggctggtctgaggacgacgcggaggacgtcactgcgggtcggtgcttccttacaggtgccttctggaccggggtccttggcacctcccctgctcctgccctcggtgccggaccctgtgccctgggagcccgactacctcggtgtcccagccgtcccgggcttgaggcgctgagagggctgcgcggcttccagcccggaaggcagcggtcccgcgggctgcgcgcggccaagggcgactccggtgtgggaatccggcggaagggaagcacccgcagggagggctggaccccggaggctgcagagcgtcagaagcgactctagggaactagggggtggggtagggaggcggggacgtggaataaagaaagctcctgggtgccggctatgagaagtcaggtgtgcgtaggcgtggacagagtgccgatgtgggagtctggacacctggattttctggtcggggctctgtgtccttgggtaagtcacttaccaccctgggcgtctccccgtcaatctgggtggggaagag

SEQ ID NO: 331986 - DNA, 746 bp, Homo sapiens
  chr3:192634599-192635345
  hyper
gcccccgacgtctccgcggttggaaactctgggcacctctttcggccagcgctaagacaatacacaaagagcagggaaccggcgctcctctgcggccagagctccgcgcctagtcacggaagagctgggaattaagaattccgagctcagcgagagccctgaagaagcaccggaaatgcttccgatcgcttcataagagaagtcaatttgcaaatcaaagttgcaggaactccggacgcctagactacttcagcgggttactcgggaacacccaacaagtttggccaccgggggctcggcatgacagcgccgcgccgcgagacgacagaagcaacttgtcgctcgggcgccaagccagagccctgagccgtctccgctcccaagctcgggagagcacccaagagccggcgtcgggaaagcggaggtccctgcctccggcagccaaatccctcaactgaaggcacctcaggggctcacctggactgcactcgcttccaggggcttcccccaacagtgcaacgcttcaccgcgaacgcctcacctgcctgccagccccaggtggcggagaaattaacaaaagagcaagcgaacagggggaaagggagacccggcgtaaagtatagtaaggaggggagggcaggcagctcggctttcggcggagaaagaagagagaggcggaacagagatggcttatacccaaggcaccggctcgggaaggcaacccagaagggaagaggtcgagaagc

SEQ ID NO: 331987 - DNA, 522 bp, Homo sapiens
  chr3:192635635-192636157
  hyper
cgcgccgagtagcagctccgcggcagcgcggcacccacccccgccccccaccccgcccccctgggcctcctcccctcgcaggctcccaggctttggccccggctcgtgggcgggttggcgggcgggcgtctgggcgggcagtcccccgctccgtgcgctctgggcgtgcgagcttcgggaggagctggactgcagcgagggtgcgtgtgtggccccgacacccttttctccggccccacgcccgccccgatgctgcgcgtccctgccctgccctggccctctctggcagcggcaacggcggtcgtagagccaactggagcctcccccgggcgaggaaagtgaagtggaaacaatgtgaaattcaccagctctgaaatcaacaagctgccggctccggtgttacggagccagcaccagcgtctccatttaaagggacagcgcacccagtggaaaggaaaataaataaatgacagaggtctgcacgcatataccacttgccaatccgtacttgggaagacgcgc

SEQ ID NO: 331988 - DNA, 457 bp, Homo sapiens
  chr3:193775965-193776422
  hyper
cgctgaaggacccacccagggaggaggctgagccgcgctccctctagcctccccagaggtgcattcgttaggttcccgccccggccccagccccagccccagcatcagctccggttcctctgcagacgttcagccccttcggaaatgtaaaacccgggaagcgaaagctgcggcgacctcccagagcctctcaggcacgcggcatctctccccaccggcagcgccttgaaataccaaaggcctagccaaagatggaaccgttttgttgggagctcgggtttcccccgccgcgaggctgagccggtggcgcagctgctcaaaggtcacgcccgagacacgtccgcacaagcccgggtggcggggcgggcagcggggagagaagaggggagtggggagggggacgggggcaggggggaggggcgccaccttctccagggccctgcggggtgggctccca

SEQ ID NO: 331989 - DNA, 351 bp, Homo sapiens
  chr3:193852659-193853010
  hyper
cgcagcgcgcgccaatgagcccgggccaggcgcagggggcggggttttcccaggctcgagcacagcagctgctatttaccttcttggcttctcccggggaccaggaaccggcccccgctctccgccgcccgtcgccgccccccgcctccctgcccccggggcgcgcgcacacacactcactcacacacgcacgcacacacacatcctcccggcccggccgcagccgcggcggcaataaaacatcctggcacgtgctccggctccaggcgcgcccacgccggccggctgatgtcaaactgcagctcggctggtgtagctcttaaagggcccgcgggcgccgggggccgaggc

SEQ ID NO: 331990 - DNA, 620 bp, Homo sapiens
  chr3:193858590-193859210
  hyper
cggcctcgggcacaccagcagcccctctcgccggcccccagcagtgctgatcgctcggggagataaggcacgactccaaactgcgtccggatgcgggccgcgggccccggctgccgcgcgcattagcctctcaatggagcccttccggggccccggccccccgccgtctccagcagcatccggagcgggaaaggcgccgaactggaagggggtgggggtgctcttcggtcaacacgagagccctctccaagcgcagaagcgcgactccggaggctcgcccctcctcgcgccccgtcccaccccacgcgtttctggaatggggaccctggggtttcgttggaccccctcgtcgtcaccaccgtcccgggaaacctgtcattaaagtcaattaacttttcccacacccgttggccggtaacaacccgctcctagcttcctccccggctcctaagtgcaaccagatgggcggacgggctgcccccgccgcgcgcccgccggggcggcccgggggttccagggaggccgcccggggccctccgcccgggcgggagccggccagggcggccacgccgggccagccctggcggccctgcggccaaggtggttcgcttagcaggccc

SEQ ID NO: 331991 - DNA, 456 bp, Homo sapiens; identical to SEQ ID NO: 222314
  chr3:194208088-194208544
  hyper

SEQ ID NO: 331992 - DNA, 1816 bp, Homo sapiens
  chr3:194407289-194409105
  hyper
cgcgcgtgtctcccccgcaccaaccttttttgcacactcgaagctgaatattttcttttttagagaatttacccgcacctcctgcggggttcctaagcactctctctgctcccctccccccaactccctaccacagggccgctcccagtagttttattcttcgatcttgcccgggccgagcctggcaggggccggtggctcagcgggcctcgcacccggcgctccgccgccgccgccgcccagctgcgccggggcgccctccggagatgctgccgtggaagaagcacaagttcgagctgctggccgaggcgccgccgcggcaggcgtccaagcccaagggctacgctgtgagcctgcactactcggcgctcagctcgctggcgcgggcgtgccccgaaggcgcgcttagccgggtgggcagcatgttccgctccaagcgcaagaagctgcacatcactagcgaggacccaacttacaccgtgctctacctgggcaatgccaccaccatccaggcgcgcggcgacggctgcaccgaccttgctgtgggcaagatctggagcaagagcgaggcgggccgtcagggcaccaagatgaagctgacggtgagtgcgcagggtatccgcatggtgcacgccgaggagcgcgcgctgcgccgcccgggccacctctacctgctgcaccgcgtcacctactgcgtggccgacgcgcggctgcccaaggtcttcgcctgggtgtaccggcacgagctgaagcacaaggccgtgatgctgcgctgccacgccgtgctggtgtccaagcccgaaaaggcgcaggccatggccctgctgctctaccagacgtcggccaacgcgctggcggaatttaaacgcctcaagcggcgggacgacgcgcgtcaccagcagcaggagctggtgggcgcacacaccatcccgctagtgccgctgcgcaagctgctcctacacggaccctgctgctataaaccgccggtggagcgcagccgcagcgcgcccaagcttggctccatcaccgaggacctgctcggcgaacagctggagcaggagctgcaggaggaagaggaagaggagcaacccgagggctgcccggaggaggaggagaaccgtgcggcagagggagatccagcagaggaggaggccgaggcgcagcgtgcgctagtggtcgccatgcactttgagtgcggggacttgttggatactctggagaatggccgtggggaggcgctaggaggcggcgggggctccctgggcccgggggccgggccgccgcctctgctgctgggcagcgcctccgacatgaaggctgagctgtcgcaacttattagcgacctgggcgagctcagcttcggcaacgacgtgcgcaccctgcaggccgacttgcgggtgacgcgcctgctgtcaggcgacagcacgggcagcgagagctccatcgagggcgggggccctgacgccacctccgccaccgccggggactcgtcccgccaggccgacggcgccagtgcagacgagccccactcgggctgagctcctccgcgcgtcgccggcgctccaccgtggctacccatccgtggtcccgacaacctccctgtcccttgcccgcccccaggaagggggaaatggggcatttggggcccagacctacacttggagcccaggtccagcgttcccccgaccgctttcccctacctcccggcccccgctcccgccccagcacttttggctctgttgcgcgtggggatgcggggagatttgagaggggaaaaccccgccaggagggagagagaggcacccctctgggatgc

SEQ ID NO: 331993 - DNA, 2308 bp, Homo sapiens
  chr3:195599104-195601412
  hyper
cgagcggggccaggtcagcatccatccccgcccagtactcactcgtcaatcctgtccgggaagccccagcagtggcgggggtcactgtcgccatgccctgtgtggatgaagctgttctgcaggggctggctgatgtcctgggccgacaggccggccacggaggtcaccacgttgcgagggaagggccccacacacagcgtccgtgtgttctggccacgccaccagtagttctcggccctgcgcgacagagatggcacggtgaacgccaggcgtggcggggcagccccggcactgggaccctcctcacaccctggccactgtggcagaagggggatggagctcaggcctcaggaccaggctgtgtgccaccggccctcctccccaacagcccccgtgacccaccatgccccgtacaggcctgtttgcacacggccttacccacaactctctaggtgggtcaggcagctttccctatggtttgcaaataaggaggcacgctggaagctgctgcagcaggcaacatgacctgtccacggttaccagaaagatcccagcagacctgggacccaacgccagctttcaggtctgtggggccagcgccccgcccacacctcctcctcacccctcagttccctggcaaggccggggccccagtcctcttctggccacttgatttcactcctcggctgggttccaggagttctgagaggtgcgggggtgccgggggacacctagggccttgcactaggctgggggccaggcctccagctacaacctgcctcccgaatgcagacgcgggagagtctaggagcactcgggcaactcagtccctccctccaccgcttcacctgcttccggagctttccaccacctcccggaaggcctgcgggagcctccccgtctcctcaggaggggctctacctgtgtccaaaagggaactcagctctcccacagtgaccagacagtagggctgccagtccccctctgacctcagacacgaaacctctgctgatgtggcctaagccggggcctgggcaggggcaggggcaggggcaggggcaggcaggccaggaagcacagggctcccgcaagacactcctgactcccgaaggctctcacaggttgtgaggctcccgcgtctgctgctggacttgtcatacgtgatgccgtgagcagagtctgggcaggcgggggcggtgagagccccgtgggcagtgtctgggcaggcgggggcggtgagagccccgtgggcagtgtctgggcaggcgggggcggtgacagccccgtgggcagagtctgggcacgcgggggcggtgacagcccagagctgctagggtggacacgtgtggcaccacactgcacgccctccccaccaacccccacttctcctgtcccagggccaaagcgtgaagaagggctcctctgaaacccagccaggccggggagagaggacggaggaggtggcgacgcctgggcacccagacccacagccttgtaaggtgacgaggcctggctggagcggggtgactccggaacagcccatcccagagaccaaagtcaaacccgagagcaccacggtcggcggggaggcggggggcgcggggcgcggggagacggggctgtgctccccctgcccagcctcctcatacacagggccactggcctggccccaccacacacagccaccctgtgattcccaccctgcctgcagggagggaaggaaggagagaggacagtaccccgagacgagacgagtcccatctgaaaaatagcagggccactcgaaggagcagagccccggctccccagcacgcacacagcctcccacggcggcccgtagaggaggaaccccggcaccggctgggctgcggctctcccgctacacccacgggctccccggtggctgccgcgggccagacgccggactctgctctccacacctcttcagaggcgctcagtaactgggtgagaatgccgctgaggccgagaccttgctcagagcagcgtgactcgtgcccaaggcaggtcactccgtctggcctctcccttccgccaacactgcccagctccaggcacagaagcctcctttgggacccacttctgagagggaaaggagacatcaagcccacctcccttagtgcaggtatggccgaggcaagagcccccatggctgctgggagtcctgacaccactcgagaaaacatgcttgctcctgggggaaggagagtaagagtgcggaggacgtgtgcaagaagctcccctcgggatggcgcccacgcacactccgaggcacaagaaactccccctc

SEQ ID NO: 331994 - DNA, 1053 bp, Homo sapiens
  chr3:195621979-195623032
  hyper
cgctctctgtcccctggcccaggagcagacactctcactcctgaggccgccgcagggggcagggctgagcccggctcacagcagacgaaggggtctggggcccaggtatctggctatcccctagccttccccattacctgcggtccctcctcgcccccagccaggcgctggtaagcagatctctcccccatggagccccaaatcccagcggctgcggtcagggagagaagcagcgcccgcagcccccgccccgcagcggcaccggcagcgtcactgccctgcgtcctggggggccgggcctcgagcatcctccagaagtgcagggccgctactgcgtctcagcccccatagcctcatccgccatcggccggcggccgggtggtcgcgcccctcctcctgccggcctgcggccattccctcctgcagcccgtcccagctccgttcctcctctccggggcgcggctcccaccctctcccagtgagccagctgtgccagccccgggctgacccccaccgagagccggggctctgccttcgccggccgcggaaccgggctccactcagccctcagcccgcctccagggccccagagccaccaactggggccttggggattcacgagtcccccgtattcacggtaaggggccatccgagaagcccacagcagaggggcctccgtccgactccatctgagaccccctcctccgaggcatcccggggctgcagcccaccccgcccccagcctgccccggcggccactctgctcccagaacgccgggcgcccacctgccccgcagctcggccctgcgctcagccggctccgcgccgcctcccagcgcccgcctcccgcgcaggccacgcccccgccccgaggcccccgcggccggttccccgcgcgccactcccgcaacgccgcacgcgctgtgcgctgggcacgcactgacctccttgacttcagagcggtgacacgagggcccggactcctgctcaaaagccgcccaacacaggcccacgcgggggtgccgcgcccagcactggcgcgaggccatcgcc

SEQ ID NO: 331995 - DNA, 68 bp, Homo sapiens
  chr3:196366368-196366436
  hyper
cgcccccagccctgccaaggcaccaacgcaagaaagccgggggagcctcggtcgcattgctggaagat

SEQ ID NO: 331996 - DNA, 521 bp, Homo sapiens
  chr3:196755864-196756385
  hyper
cggggcgggggtggcggtggcttcatcgtttgcattgatgagtgcgtcgcctgcggccacagcggtgccacgaactccatcccctcggcggtcgccgcccgcgatccccgcgagccgctccccgaggtcccgcctcccgtcccaccatcccgggccctgactccccggggcgccgacgcgaggggacccggcctccgtctccacctccatccctgcatgtgccagaaacccccgggcggactcccgcgcctgccggtcagtccctctgaatcttctcccgcgggggctcgggagaaagagctgctccgagcccccaaagtcttcctgagttcctgcgcccgtcgggaggggccgccctccgggagctcctctccacaccccgaggcctccccaccacgcctcagcccgcgcttctccttggagcgtcggaagcctcgggtgttcgaggccgcctcctccaagaagccttccagacttccccgtctgcgcttcagtgctagttccctccgccgtcctcactc

SEQ ID NO: 331997 - DNA, 211 bp, Homo sapiens
  chr3:197023975-197024186
  hyper
cgattctaaaacggcaatcaaaaaactgacacacggaaaagcaagtgacatcgacaacagagttacggaataaactctcaccttgcttccggaccggcatttttctccagaatcaggaagagggcacacacctttaaaacacacaacggaaaggaaaaaggatagaatcatgttaaactagcattttcccctatcgaaatagaaaaccctc

SEQ ID NO: 331998 - DNA, 643 bp, Homo sapiens
  chr3:197025639-197026282
  hyper
cgtcccttagtaataggcttggggggaggggtttcattacagaaggacatatgaaatagagacactggttaacttggcaagagtttgagggttatagtacaagatttttaagcctaactgattaattccgagtatggtatacttaagggtgggcagagaaggtttgttcattcattcgctcattcattcattcattcatttccctcaagcctgcgtccccgcccggtcagcatcgcaggtgttacccaaactctgacggtccctttaagaactcacccggagtcgcgccctccgaagctgagccgccctcggccagcgctgcaggtttgtttcgtgcgcacctccgggcggaattaccggccggctgggaccccgctcccggtctgagccacccaggttatagaaggggaatctcgggaagctttccaagtcactgcccacgtcttcgaacttcctcggggtgacgaggacctccctattaggaggtccagagagaatttgcccaaagttaccccgagtgagtgacagaactggaaacccggagatcctgtctttcaaaaccggaaggctcttcccagtaaacctgacggcctctgactgaggccgtatccattggctaccaaagggaaggccgaggaacctc

SEQ ID NO: 331999 - DNA, 1171 bp, Homo sapiens
  chr3:197807082-197808253
  hyper
ctgagggtgcccagcgccctccaaggcccccgtcccaggggctgcggggctgcggggaagccgggcctggggaccccctcccaccccggctgagcccccgctacctgtcctgggcatccacgtcccggcacctgcgcgccaggcggcgctccacctccgcggcgtcgcccttgagggccgccctgtggatcttccgcagttccgcgtccctggtgtggtacgcgggacccgggtactcgtggtcgatggagcccaggaccgcccggcccgggcgtctcccgaagctgaagagcttcctcatggggcgacttctcctcagacgcccaccaccggctcctgagcccccgcggctcctcgtggcctttccactaaccctaaccccaaacccgagatgtagctcagaatccgcgacccggccgggtccaccacagccttcagcagcgacactcgcagcctctgacctctcagcccgcgaagccgttaggcgcgcgcctgcagctcagcgcccgcgcggactccggaagccgctcccaagcccgcgctgccggcagggggcggctgcggctcgggcgcaggcgccgctggcttgcgggttctcctgggctcgcccgggacgtcccgtagtcgcaggcgcgcaacccgcccggcctgagggcccgcctggccgtgacccccgccccgctcctcctccgaagagagatcggggccgctggcaggggccctccgcagccaccagggatggggctgtggggcagttcccgccccggtgcagccgccgccgggcagaccgcctggcttggctgcagccgcggcatctggctccggttctgcgaggctgggagctccagcgagcttgggagctgccaggcggctgctgcgagcaggcagagggcgcctggagcttgggccctcaggcggcggagcatggcctgggcggcctctggatcgcgagtgcacctggcctgagagcctgccaggccctgcccccgctcggctcctcctctgccggagctccggaccgctagccaggggccctctgcagccaccgggaatggggctgagggcgggttcccgcccctgtgcagccgccccagggccgactgcctggctcggccgcagccactggtacatctggctccggttctgagatgttgggagtgcgggcgggctc

SEQ ID NO: 332000 - DNA, 1901 bp, Homo sapiens; identical to SEQ ID NO: 230145
  chr4:330311-332212
  hyper

SEQ ID NO: 332001 - DNA, 1811 bp, Homo sapiens
  chr4:568266-570077
  hyper
cgtctctgtctgctcttcctccgtgggaagtcgccgtcctggggcgctcgctctgtccccctcgcctcggaccaccaggcagagcagccccagggtttggacttgccaagaaaagtgcagtcgggctagccaagcccaaacatttattgtaaacttgaaaatggaatccagatatgaacgacacaaataagaagagaaacctcccagatacagaaatggtcacatcaggggccccctcctgtggtcacggagcccgcagagggggccaggccggaggctgcaaagccacgtggaagaggcggcgcccctgaggcctggccctggaccccgccccgctgcccgtcctcccttgccgcgggggtcctgagcggggcggggtgggtggaacgcaagcgcggtccgcgggatgggggtccggcccgcgggatcagcaggcccgatgggtctcccagggccgcggcgtctcgcagggcggccggcagcagtaggggtaggaggcgttgaggtcggggtccgagggcgcgtaccccggcagctccaccgacgggtgccccccgcagcgcacctccgcgcccgcctcgtccagcgcgtggaggacgcctacgttgatgtaggagaccgcgtggtgcgccgcgaagcccgcgcagtccccgggggcggccaggtccgactcctccggggacaggatggaggcctcgctcggccgctgctgcagccgccgcccccgccggccccgccggccccggcgcgcccgagaggcgggcggctgcgcgcggagcccggagccgccgcggggccgcgccagggcccggcctcccctccgcctgccgcgccgaccgcgccgggcctgcgacgacttgtagttcttgacgagcaggaggctgagcaggcccagcaggcactcaagcgagttgaagacggtggagagcaccaggccgcgctggtagtccttcagctggcggcacttggcggacgtggcgctgtccagggtgctgcgagcgcgcggggcgccgggggccgagcccggcgccgagccgggggccgagcccggggccgagccgggggttgagcccggggccgagccggggctcgaacctggcgcccgcgggggcaggcagtagtgcgagtacttgcgctccaccagggacacggtgtcgccgtcgatcacggcgcccgcgaatgcgctgaggaccccgagcatgaagaccaggacgccgagcagaagcaggttctggctgctcaccggccccggggccccggccgcggcccccgactcgcccggcgtggcctcgggagcgcctgccggcgccgcggggacccccaaacccgggcccggttccgaccccgcgaggggcgcgtcccggggtccgcagcagagcagggcggcgccgagcagtgagaggccggcggccagcagcagcccggagtagaaggcgccggcggcggcccccaggcggaacggctccccgcgcagctccgagcccaacgagaagcacttgaggccgacggcggcggcgctgagcgcgcaggcgagcaggaggcaggaggagagcgcggcgcaggccccgcggacgctccacttcatcctccgcgcccgagccggcccgcaccccgcgcgcccgccgccgcccgccgccgcccccgccgcctgcgcctcctcccggcgccgcgcggccggaccgccggcctcctcctcatcctcccgcgtcctcccgggcccgcgccgccgccgccggagcccgcatcctccgcctcccgccgccgccgccgccgccgccgccgccgcgaccccgcgccgggaaccgatgcgg

SEQ ID NO: 332002 - DNA, 159 bp, Homo sapiens; identical to SEQ ID NO: 230151
  chr4:570311-570470
  hyper

SEQ ID NO: 332003 - DNA, 903 bp, Homo sapiens
  chr4:570851-571754
  hyper
cgatcagggtctctgggaagtgctgacgtgtgcgcgtgtgcggtgtgttgcttgtgggtgcgtgtgtggtgtgtgcatgtgtgtgcgcgcgcgtgtgtgcggggtgtgccgtgagcgtgtgcccgcggttcgggggatgagtaggggcgctgacttttaggaccagccatttgagtcaagctggagacgacgtcttagaacctaggatgagtctcgtttggttttagtctgcaaagctcgtctgcatcagacaggaattttccccagacgcgggtgcacgtgaattaattcatcagaaggcggttcacggcctgagtgagggggacgagggcggcgaattcctccgcctcattcctaccctgacgattcgaggtgggtgagaggaaggcgtggggcggctgggtgcgtggggtgggggaaggtcacctcttcggcctctctgggccctccagcctcttcctgagaggagctcgcctcggccccttggttggggggatgggagcgtctccggaaggccctcggccgagcagctgggcctgcacccctggtcccttccagttcgtttctgctgcggcggcaagaggctggggagccgatgactcaccctgccggctaattgcagcgttaaataactttgcgccggattcggtggctgcagcagggaacgcgctccgggcgccgggggaggtggagggacgccctgagaacgcacctccgtccctgtcaccagccttagcaagttctggcctgtggagccgtcatccagagcgcacagcttcatgcccttgaagggcgcagtgtgtcccgtggtgcccggtgggcccggacagagaccccagaggctctgtctgaaggaagctgcacccacagactccatccaggcagcgcgggcgcggtcctgtc

SEQ ID NO: 332004 - DNA, 501 bp, Homo sapiens
  chr4:657350-657851
  hyper
cgtcccaagccgacgatggagccgctggtggagagctgggcaccctgaggagggccctgagcagcaggcggattaggggtcccgcccaccgagggcccgagggcgggggcgtgagaggcacaggcagccgaggcggaaggggcggggtccccgggcaccctgagaggtggccgcagggcgcctgacgcgctgggcataacctccgcagaccctgaacatctaccagaacctgaaccggcggcagcacgagcacgtgatccacctgatggacatcgccatcatcgccacggacctggccctgtacttcaagtgcgcgccttccgggagggggcgcctcgcggggcgggcgggtagcctgggacccccggcagacacgggggcgcagcggcggcacagcccgggggacgcagccccggattccgtccctgcccgccggccccgcgcaccccggatggggcctcgctcgggctccgcgcctccctgcagacgggcgcttggggc

SEQ ID NO: 332005 - DNA, 289 bp, Homo sapiens
  chr4:819440-819729
  hyper
cgaggaggaggccgggcgcgggccgggaccgcgggggccgcttcagcaccgcggcagtggacagcgcccgccccggaccccgcgcgcgcggagcccgggagagaaacgggggctgcggggagaagccggggtcggggggagaaacgggggccggagggagaggccggagccggggggagaagccggagccggggaggagagacccggggagcggaggccggggggaggagctgggcgaagccggggccgcggggagaaggggggccgggaaggagaaaccggggccggc

SEQ ID NO: 332006 - DNA, 363 bp, Homo sapiens
  chr4:1036245-1036608
  hyper
cacccacacacacaccgacacacacaccgacacacacacctccacatacacccccgcacactgacacacccacacacacaccgacacacacacctccacaaacacaccccccgcacactgacacacacccacccccacacactgacacatccaccccccacaccgacacacacctacagtgacacccgcacactgacacacacccactcctgcacactgacacccactcctgcacactgacacacacccccgcacagacacacacccacccccgcacaccgatacacacacctacccacacacccaccccacacaccaacacacacccacccatccccgcacaccgacacacaacccaccccc

SEQ ID NO: 332007 - DNA, 1198 bp, Homo sapiens
  chr4:1165383-1166581
  hyper
gcccccagtcacgtcggaccgtgacaccctgtggctgcccctgccgcgacccacctgcgccctccccgtgagcgccccctgcccccaccgcatccccggaaccgcacaccgcaggcgctcggcaaacattctggtgttagagtctcccgacgtcagcacgccccagactgggaagcgccgccgtgcagctgtgcggggggctccggcgccgcagccctcctggtggagcaggaggcgaggagggggctgtacttacccagcagcgaagaccactgcgcaggggggcggaacagggggtactgcttggggaaggccgtctggctccacttgcccgtgaaggtgatgctgtatttggccagggctctggcggaacagatggactctcccccaagaggctggccggcggcgccgagagtggccaggaggagagcgcagagggccttgcccagggcggcggccgggctggggttttccatcacctgggagcacagaggggagcagccgcgcgctggcaccgtcgtggcagcctcggggtggaaagccgagagggctgcggcactttgggctctgaggacggccccgagcacccgcgaccccctccctgctccgcaaagctctcctgcggtgcttccgagacccccatcagcggaatggacggcgcggggttagatcgcccgtgcgcctgcgagcgaccaggggtaacgggcaggttttcagtccgagtccctgcagcttgccgggccggtctgggtgcggcctccgggatgccttcgccgtcgcagggacccggggccttggccgactggctgcccccgggactagacccttaaagctcggtcgcagccagtcctgggggtccctctggaggtgccacaaggttctgggccgcggggaaagtgcaggaggcccgggccctctctgggtgtcccgggggcacgcagtactcacccggcaggagcagcgggagcgcggccggcagcggtcgggtcccagccagagcccggagctcctatttaagcccgaggccggcgccccgggccggccaatgaggctccagttcctcctgtcttcgatgctgcacggcctggcctccagcgagaggcagataggacgtgggagaaaggaggagaaggggctgcgggggcggcgggggctgccgctttcccaactcgccctgcccagcgaccttccccgggtc

SEQ ID NO: 332008 - DNA, 2013 bp, Homo sapiens
  chr4:1331690-1333703
  hyper
cgcctatgaatgtctttcatgtgacctgcctcaggcccagagggcagtgagtgtttcgcgattgctgctggtacctggctgtgccggggtatgaatgagactcaggccccctcccttgtcccctctttgtggaactctgggcgagagggctggcgtgcttgcccactgcctgttcctaggtgccagcagaacgtccctgctgggtggctcttgtcctgcctggagaggttgcgtggccggggagagggcggcgggcgacggagccactctgtgcctgtggtcctggtgctggaggccggggtgagaaggcgcaggcttcttgtctccaccgaggcctcagtggggctgtttagctgtcgagtgcagcacttcctgtgcctcgaaagacagccccgtgtagtcagcatggcgcccacatagccagaagggcacgcagcccagggcagagtggccacagggggctgggctcaccccggctgccctgagtggcccccaacccttccttgacccgatgctcagacagtgctacaaggaggacggcagctccaagagccctgactgccctgtgtgcagccgctccctgaacaagctggcgcagcccctgcccatggcccactgtgccaactcccgcctggtctgcaagatttctggcgacgtgatgaacgagaacaatccgcccatgatgctgcccaacggctacgtctacggctacaatgtgaggggggcagggcaggggggccaggctggcacgcatcgccatcgggacagggctgtgtgggacgggcagggcaggggggccaggctggcacgcatcgccatcgggacagggctgtgtgggacgggcagggcggggggccaggctggcacgcgtcgccatcgggacagggctgtgtggggcgggcagggcagcggggccaggctggcacacgtcgccattgggacagggctgtcctctcgccccaccctgccttagcttcgttcgaaatggatgaaggggtgggaaggacaggcgaggtggccccgggatttctttggcaggtgtgccttcgggaaggaactttgcctgagaggatgagtcattccctggtggttcattgtggggattttccatggaaatccgtgtgtacgttgtagtcgcttgccttaatgcattcccggttttatttttcagtctctgctttctatccgtcaagatgataaagtcgtgtgcccgagaaccaaagaagtcttccacttctcacaagccgagaaggtgtacatcatgtaggccccacgtcgtgaagcgcacgcctcggggacgggctgcagtgggcggggaggccacgccttcctcctgtcccacgctccagcctgccgcggcgtttctgtttcttgcgaccaaagatccgtgagcaacgataaatactcttaggaagagagaaaataaggtttcataagtttgtacttgaaaacatttggattggtaggattttgtaacacgtcaaccatttgatgcttctgaaaagtactttcaacttgcgaaggaaactcttctttaaagactgacctaaacaccgagggaaacttaagaacgtttaaaatataggagtccgtgatttccctgtgttttcagtttctttccttctgtgaacgatgagacttggagaacgggctggtccttcaccacttcctgttggccctggcctggccggggaaggtggcagcggcaccggactgacctgcagtgacccgcgatgccgcgccacgagggacacttatggcttcattcgagagctgctgccaaaacgcctggcgccgccaccgtcgggggctggcttcgaggacgcccgcctgcctcgcgggtcgtgtccgcgggactgtgttcgtacgtgcatagtttcgatatcacatcgcggggctgtgttcgtagctgcgtcgtttcgatatcacaccctctgtgtgccgccttacttcctgcttcgagaatgtataacgtggaaatccacgggaccaaatttctgcagaggccttgcc

SEQ ID NO: 332009 - DNA, 905 bp, Homo sapiens
  chr4:1395992-1396897
  hyper
cggggaaaacaggcaggcgcttcttcctccaggcagtagccgaagctgacaccgcccccaagctgacacgcctagcccggtgctcccttgcggggctgtggggcaggggagtgggaccggagcaggctgcaggggtggggagcaggaggcggaaaatgccgcggccccaccagctccatggctaagaggagaggcgaagaggaagcagctggtcactttccgagacctgtgatcttttttgggacggggagggggcggtcagggaggtgacgctgggacctgagcctcagccagcttggcgggtgagcccctgcgctcagcccctgcgcccacgacgacgggcaggcaccagcagagtggcctgaattccggccgggggacgccaggccggtgggaaaacgggctggagtcccgctcaaggccaacacccgaggagccttggtccccaccggagaggattcacgggtgggcccggccgggcggagggcggcgcgggagcctgggagaagggggcgcggccgcctgcggtttattgattgagtgaagttccgcaaagtgcttcgcagcgggccgagcccgcgggagccacctgcccggccccgacgcgcatggtcatttataaatttaaaactcttccgtagcaaccggttatgtacagagtcaacgactggaatcgtagaaaacagccgggcccggcagcggcctcggaggcggagcggcacggggctcagaggtgcggcgcgtagaaggcgggcgccccgtaggtctgcgagcccagcacgaagggcgagagcaccgccgggctcgacaggaacggcagctgcgcggcgcacaccaggcctccggggccgtgcgccgggtacccggccgggccgtgcatgccgagcggggcgcccatgggcggc

SEQ ID NO: 332010 - DNA, 981 bp, Homo sapiens
  chr4:1396908-1397889
  hyper
cgggctgaggccgccgggcagccccgtgccaggcccggcccccggtcccggtccgcccccgccgccggtcggagcgctggtgtcggcgcccgggttctgcttcttccacttggttcggcggttctggaaccagatcttcacctgcgtctcggtgaggctgagcgacagcgccaggttgaggcgctcgcacaccgacaggtagcgcgtggccttgaacttgttctccagcgccacgagctgctcgtaggtgaaggcggtgcgcgctcgccgcggcttcccggacttggagtcggaccccgtgcgcttccgcttgggcttcgccgccgtcgccgtgccctgcggggtggtccccgcgccccccggcgccgctgcacctcccggtgggccctgggcaacgggcgagttctcgcggggtccgggggccgctgcctcgtcgacggtggctccgggggacgcgtcggtctcagccgcgccctggcaacccgacccgcgggccccgaggccgccgccgcctccccgcgcctcctccgcgcctcgcgccgcctccgtctcgggcgcttcgtcctcgtcgtcgtcctcgtcgtcgggaacctcgtccccgctgtccgcgctcgggctgtggccgccgccgccgctgctgtagccgttggtgtcgttggtctcggcctcccctgccttgaaggggtcgccggcgtctgcgggagggagggacaaggacagggcagggcagttaggaccggccggttcccagatcccgccctccgcgcgccccgcttcctcccccagggttccctcccgccccctgctcagcgcctcctgcttcgtcacccgcctcctctctctctccttcgctctgtcgtttccctcccctcggcctgtccttccctcccgccgcccgcgtctcctctcggtcccttgcttgtttctttctatggagagggtccccctcgccccgcgctgcccgttctcgcggcgccgggc

SEQ ID NO: 332011 - DNA, 983 bp, Homo sapiens
  chr4:1399981-1400964
  hyper
cgagaaggaggtggggcgcaggggcgctgcgggccgggccgctccagccccctcgggcgccgcaggcacagtgtcgctggccgcgagcggcggggctccagcgcggggaaaggccggcagctcggcgcgcccgtccatagcttcctgggcagcggcggcgggagcgggcggtgcgggccccgaacctggctggggaggcggcggtagcgcgggaatgtccccaggagcctcggggccgctagcgctcatgccggcctcccgccgctccggcggctcgggccccgccacctactgggctcccatccctggcggcccccgcacctccacacgaccccgcgcaggcggccgctgctccgctcgctctcggcgccgcgccctgcgcttggccggtgctgccttcgccgccgccttaggcgcccgcggcgcccggtccgcgcatttatggcagccccgccggaggcgcccacgcgcccacacgccgaacacacgtgcgcccgcaggcggccgcggggctccgccgccctcgttagcgcgcgcgcctaattggctgcgaacggtcccgggccgaggaggcggaccccgcacaggacacacggacggagccgccgggcgggacgaacagacacgcagcccggagcccagagcggtccgcaggcggctgtggtggtcagcggcgcgtcgctgcgcctccgctcgtccggaaacggcgcgccagcctccttggctaagggggaggagacagccccggcttttaaataattgcgggatcaatctgcggcggggccgcagcgaccccagggcgcgcgggccagcgagcgccaagagttggctgggacatcccggcgcaggatgcggtgactggcctggcctctcctccgggcccccagcgcgcagggccctgagctccgaaggctcccacagctctggcgcccctcggcagttggggtggggatggggggagaggttctcacgcgcgattctcc

SEQ ID NO: 332012 - DNA, 842 bp, Homo sapiens
  chr4:1796303-1797145
  hyper
cgagggcgcttccccgtgggtgcgcgccgagctccaggcaagcgaggggcgcgtgtcccagcgtcgcgggccctagactgggctggcggtccaggtcccgcgggacgtcgagggtctgaagggaggtcccaaggggcgaggggaggggaaggggcgcccggccggacctgcacacgcgccgcggttcctcgtgggccgggccgagagctccggtgccgccgccgcgtacacccgcagccggctccggacgggcgaggggggcgcgcacagctcagcccggcggccgcgcggagggaggccttggcccggtgagctcgcgccccacccgggccgaggcccgaacagccgcttctttgtacctcgacgcggccacagaccgcgcattgatggcggctcggcggctcgcggggaggtgtgagcgaccgcgggcgcggcgggccggggagggcgcctggagggccgaggcagatggcgtccgccccgcccgcgcccccgcgcccctttctccgtcggcggctgcagcctcccggaacaatgtcattttttttatgaatgaaagtggcccggcgcttgaatgtgcgtgtcattcagcggcgtgacaggggccgtcgggaggtcagcgcgcgcttttagcgtctgctcgggcggccccgcttccaggggtgccggaggggcggccgcggggggagcttggctttcgcattctcattcagataaagatattactccctacggcccgggaatgtcagccagccccggggaagggcggcggccaggctgcggagcctctcctggaccccctgcgggcgcgcggggcctcccccagtcgctcctggaacgcc

SEQ ID NO: 332013 - DNA, 849 bp, Homo sapiens
  chr4:2042167-2043016
  hyper
gcgagcgggcgcagcgtgggaccgaaggggagaaggacgcctgcggcccggcgcgtccccggaggcacgtcccccccagggctccgcggccccggcaacagcgcggggctacccctctacggctcccgccccactgggggaccgcgacggcctgctcccgggctcttggctccgagtggagaagagcgcggaagtgcgcactagcccgacactcgggagggccgctgcctccccaggcgcctgggacagcggcccgcagcccccacccggcccctcgggccccgcgtgcgtttcagcgcgctgaggatgcagcacacccccgaggtgcgaccgggtccccgaagcccggcgtcggcccaacccggaggaggcagcggcagtcacgggcacgcttccccaacccaccctcccacccactcttagggtcaggacacccgcgtccggccggggcaggggcggctctgaccacgcgagaagcaggtgcgtccgcagtcccagcttgtgccgggaagaccaccggccagaaccccgggggttgggggtagaggtcggctaggctggggaggggggcgcccgaggctccgggtcctgcacggcgagcggggcggcctccaggtaggggtgcggctccgcccaccaagaagagggtctggcgggaggtgtggttagtccctgagctcccggccacagcgcgggctgctgggtggggtggggggggagcgggggcgccagcacccacgtgcgcctggggcgccttctgaggaggccaccgcctgtgtcggtgtcggcgtgggggcctggctccgacggctgggaccatccctcccagggcgtccggggcccagattc

SEQ ID NO: 332014 - DNA, 1173 bp, Homo sapiens
  chr4:2060920-2062093
  hyper
tcccccacccccgcgatcacatggtgacccccggcagccaatgcagtggacgctaggaccctgcgggccgcgggcgccgcgactgcaccggcgccgccgcattataaatacttctccaaaatgcggcgcagctccctgcgcgcgccccggccgcccgccgcctccgccccgcgcccctgagctgccgccgccgccgccgccgctgccgccgccgccgccgccgccgcgggtccgagggcgccgcgcccttgccctgggcccggccgtgcccgccgccgcccggccgcgtccccgctgccgcgccgcccggccgggtgcatgcattgtgggcctcccgacatggtctgcgagacgaagatcgtggccgccgaggaccatgaggcgctgccgggggccaagaaggacgcgctgctcgccgccgccggcgccatgtggcccccgctgcccgccgcgcccgggccggccgccgcgccccccgcgcccccacctgccccggtggctcagcctcacggcggggcggggggcgcggggccgccgggggggcgcggcgtgtgcatccgcgagttccgtgcggccgagcaggaggcggcgcgccgcatcttctacgacggcatcatggagcgcatccctaacacggccttccgcggcctgcggcagcacccgcgcgcgcagctgctctacgccctgctggcgggtcagtgcgccgggcccccggctgccgcagtccctcgggccggcgcggagctcccccgccccggcgtccacgcggaccccgcgcccggctcccggggaccagcctgggaagccccccgctttctgccgcgccgggccccgcgcagggctggctatgggcgtggggatgggcgcagggccccgagcgggccggagccggggagggtccggggtccgcacctgcgtccccgccgcgcagccccccacccccaccgcctcccctgtcccctcccgggcatcctgggtgggggcgggtgccagggcaggtagcgcccgccgcggctgggccccggcgagtgcctaaatataatctgcgggcgggggaggccgcctcccgctcggtgctaatttatgaggggaagacagccggcgccgcggggggtgcgcgcgcctggcacagccggggcggtcgcagagggcggccccttcagcgtctttggg

SEQ ID NO: 332015 - DNA, 474 bp, Homo sapiens
  chr4:2765729-2766203
  hyper
cagcgggggtgcagcggggagagccagggcctgggcgcggaggaggggctggtatgggaccctccgggtgggcgcggccccgcggggccttgcggccacaccgccaccgtgcccagcggccccatcagcgcatattcaggatgaaccccggacacgcgcccagaaccgtctggtgacccagtgatgaaagctcgaatcttataggatccgtattcatttcccgtgggctcaagcccagcctccgcgggcggcgcgggccctcgcggcgagtgtccacgaggaggcggtgtggacccgcggccccagaccaggcctcaggcagaaggcgagcgcgagcgccccgcccagcccctccccgtcccgcaacccgcgccccgaccagcgcccccagcacctctccaccctcgctctcgagcagtctccacgtttgtctcagaggagacccactttgctccccagcgtgggcccctgagc

SEQ ID NO: 332016 - DNA, 1324 bp, Homo sapiens
  chr4:3767158-3768482
  hyper
cggggagcgccgatccaggatctggtccggaccctgagctcggcaggacctgtgcgcacgcaggtagcgtcgcgtcctcccccaggctgcgagaggttgctctgccatcaggccatggaccccgagccgcccgtgctgcgcgcgcgcgtgtgcgcgcccccgcctgcgcccatgcctgcgccgggggaggcgaaggaggctccagtcttagaaagagcagcttctggaactcaccacccaggccggccgccgctcggccccgtcccgcaggctgcaggcggccctggagggggcgccctcgccgagcgcgcgccccgcgccgccgccccggactcctccccggcgccgcgcgggcaggttcgaccaggcggccgcgggctccggttcccggccagctccccagggcccgcggcccgccccgccccgcgcgcccgccccgctgcgcaactcgacccaagttggaagccgatcgcaggcggccgcactcgcgcccagcgcagggcggcggcggcggcggcggcgcagctccggcgagcgaggcggcggccgcacggccaagcgtggaccgcggggggcgcccgcgcccgggagcagccggaggactcgcggcggcgccggcgccccgcccgggaaagtaaagttggagacggagggagcgcgcgggcgcgggggcccggaggagcggcggccggcgccccggcgcgccgagccctagccggccggatgggaggcggagcgcccgggccgccgccgcctgtcgcctgcgccccggctgggctccgggaccgcggggccgctcaggcacgcccgctcgggcgccgcgtcgccgtgggctcgacgccggggcgctccccgtgagccgggccgagggcggggccgcgcgaggaccccgggacctgcccccctccccccgcagccgcgtcgccgctcgctccgggcgcctcctgctctgcacttacacgctcggcagctgcggggagcccggcagccacgctctccggcgcgccgcccgcggagccaccacggccgagggccggctgctgggcgccgcggtccccggcgggcgcgcccgagcagcaggcggcgatgcgggcgccgaccccggctggggggcgcccgagctgccgcggctgcgccccggctccaggagggacggcgtagctcgcgggaggaccatggcgtccccggcgctggcggcggcgctggcggtggcggcagcggcgggccccaatgcgagcggcgcgggcgagaggggcagcggcggggttgccaatgcctcgggggcttcctgggggccgccgcgcggccagtactcggcgggcgc

SEQ ID NO: 332017 - DNA, 342 bp, Homo sapiens
  chr4:3882082-3882424
  hyper
cggactaagcgtctgctgcgctgccagggcgctgtcaggatggcgcccagaggacgggctgctgccctggggctgcctgaggagggtccgcagaagttccctctcgagcgggaggaggggatttgcatattcacttagaaggatgaagcgctgcggggaaccttcccacccccaaggagctgttctgcccagatgctgagctgggagccgtccctcccccggccacacgcctgcaggtgacccccctgccccgccccgccaccaggcctgggcaccccaacctccacccctgccagaggcgcctgcaccgggttcctcctgcagatctgcaaactcacgccc

SEQ ID NO: 332018 - DNA, 1160 bp, Homo sapiens
  chr4:4854484-4855644
  hyper
cgtgttctaggacggcagggatgaatcactataggctggctctctctagctcagcccggcctgctgcggcctggggccactgctcctgggtcctcaggactgcctgggggaaggtagtgcattgtgcagcgcgcggtccagaagtgaaaagggaggcgcggagataagctgccggcggaagttccctctcctgcctgggccgacccggcgctttactgcttctcacgaaggtgcgccggctgctccagaaatcgcagactgcctccaggaagaacttgctggagtcacagcagcttctcagcgacttgacagcagtgattcagacttcaacttgggcggaggggcgggggaggagaaagagatttccagagaaaacgactgagcggtagggaggggaagagagaccgagccacgcgcctcgagaagcagtgcagagagcggaagagacagaggctgcgagacctacccacagagaccaagagagacgctcggaggggagaccgccttaggcgcagagattcagaggcagacagacaggcagacagaaggatacaggaaaggaatgtcgccgaaaggcagggacaaacctgagtcccagaaaaataagagacaactcccacacaccaggctgtccgcgggccgccttgtcacagaaaggcagctccccagccccgcagagtcccgacagctgcccccgcgaaggtggggcgaggggcggcttttccgggggaaactctctccctggacgcccctcctttccagcctcagctctggcctttctcggcatccccagcttgccttcagtttcactccatatctgggtctctcagaggcctcgggaggtcttccgttctctctgtcgccgtgtccacggaaggagcctccccaaccctctgtggctccgcgcctcttgggccggagcatctctgtcttccggagtctcttgatcattgctcctgcccgtcctcgcccatttcaaagacgaccaacagaggcttagaaaaattggccctccaccctcggctggttacctggctcgtagccctgggtctgttttcttctcagagagacctgagatcctcgacatttcctaaattcatggaaaacctcgacagtgttcaggactcccaaagaaggtggtgggcgggagggggaggagc

SEQ ID NO: 332019 - DNA, 1255 bp, Homo sapiens
  chr4:4868273-4869528
  hyper
cgcaaaggactgcagctcagagaggtgacatggttttcccaaggttacacagttaatgaaggacatagcaggaattccaacacggattccactcgaggatccggtttttcccgcattgcccatctccatctggttgagggtcacctggtgcctgagcagctctcctgcgaagtgcgcgtcgcgctggaaaacggagcgcagaatccgggaactagttctgaatttaactccttgcgctctaaccacgaacaggcactgtcccttgaggaatgataggggcgtctcaccggccctgcacgctgtgaaagcgttttcgttttgttggggaggagacggaagcctcattttgcaaattcagcttctgaccacgcagtcaagaccaaagcagtccgtggcgtggaagcggggcagaaatgaggttacctggcggcaagggacctggggcgcctcgagctttgagcataggtccgcagggccggggcggttggggaccgggaggctggggtggggctgaagacctcgcgctaagagcgccttactttaaggttagtttctcggatcgctgaacccggggctgaaggaccagattgagcaggaggcccagtgaggacagttactggtgaggcaggggccccgagtgcgaatcctaccgctgcgccctccttagtgacccaaggccgggaggtgagcccagccgggtccaggcctgcgccccgcctagagccctcgggggcgcaataggaagcggcgaggagaggccgcggccgcctttcaactctgcggctggcgccggcctggccgggcccccgaggccgcgcggcctccaaggttccgtcccgccctcccagacgctcagctcgcatcgccccacagtggaacagtcccccggccccgacgccggactccctgggaagcccccgacccccaagtgccaccaccaagtgcccactctccagagcactcccaggcccccactccagacttgcggaatttgttccgctccactcaacagctcccacgcctgccgcgcactccgcccccttcccaggcccagggggaccctgcctccaccccgcctgcctcccccacagcgccctcccgcggccctcagctcacagccagctctcccagcgcctgctcactgtagttccggtgctggacgctggccttggctccctgcgttacaagtagatcctcaagtgcgcacacgcacacgaccaacacacgtcatccacacgacataccaacacacacc

SEQ ID NO: 332020 - DNA, 1622 bp, Homo sapiens
  chr4:4870855-4872477
  hyper
cgcaccagcggggtgcaataaagatcggcctttgtgtgtgtgtggtgggggggaggagtggggggtaggtagttaaaagcgaattcaaaagcccgccctcaatttggggcctgattaggggcagatggaaggaagggtccccgaccctacgtggcagcctttgttgcacattttacaggcgaggagacagtggtgggatccaagcccgctgctgtgggacctcaggagttgctttctccttcaccagctgggtgcagattttgatgatgcacagggcgcggcctgacagtgcgtgtgtgcgcccaccgggcgctgctgccagagtttgcggggttcagggagcgggaggagggtctgagagaccccaaagcctcccctttgcgagaccactccttgcttcccccgcctggcgctttccataaccctctgcggcgccctgcctctttgttgccccttagatgagctgccccaagggcgggctggactctagtgctttgagtcgctgtttctctgacgatgctgcttttaaaaagaaaaccccgttccctctctgatgactctcgtggcacccgggtggcagcaggggcttctccaccggagaaacagccacatcgactaaaagggaatgtgtgaggcaggctgagaccttgggtggggccccccacctctcgagttttccaagactcaggttccatctctgttaaatggacacaatcctgacccctggcaggtcctgaaagagtagaagggaaggggttctccacgggctgtaccatcacttgcgtccccagttcggtgatggtggtgaggtcatcacagttgttccgcctgcggtgactgcagctgacatgtatgcgcgcttgcctatggatcacaacccttagaatctaagttttccacgcgggttatcccaacgaatcctcactaccaggtgggcacgtgccattgtgacccgtgtcatagactgaagcatagagagttgaatgactcagacaagatcacacagctagtgagagtgaaacagagcttccaactcagacagccggtgccaccatctggcgcccctaaatctcagttccctggtccgcggaatgggaacactttcgggctggtgcagaggaaactatgggtgactccaaaggcagcgcgcggtaagaactccgggtgagaaggggagcgcgcgaggagagcgccaagcgtagcgcggagcatagaggcaggatggtgacctgagcgctctttgctggccggctctgctctccgcagcgccattggaattccttactctccagtcccccgagggtgtgtgtgggtgaggggaggtccctgaggcggaagggatgagcggagtggaagcggaggagagtgttcttgctcttggaaagtgtcagaaagtgcctgtgcgccactctggacccggaattaagacaccttcacctcttttaatcttctccctatgacgcaggcactcttattaatctgtttcaagtgagaaaaccgaggcacagagagcgtatgtgacttgccaaatgtcacataggtgtctaagacccggcctgtatttcccaccaacctctgccgctgcttctggcatgaatgcagaaagcagccaacagccgacc

SEQ ID NO: 332021 - DNA, 1460 bp, Homo sapiens
  chr4:4873214-4874674
  hyper
cgtgcctcgtctttggtgattcccctacccccaaatcagagagggttccggaagaaacttcgcagccttgcagagtgaagcatcgccgggacccaaggatgtttctcttccctacggagctcacccggattccttggcgcccagctgcggccccggagtccccgaactcggctgtgccagcccggggcggggccagctgaacctcagttgtggggcggagtccgttgcggacaccctcaccccccgggcaaccgcagctcccaactccgctggctttcccctccctctgacaccctgcgcggctcctgcgacccaggtgcgtgccagctgtaggagcctgctccgcctgccctcctggaacgcagtcatcctccaggccctgcccgcgcccatttcgcggcccaggaaactgaggtgtggaagcctgtgaagggagggactgctacctatcgattcgtaccggatccagaccctgtgctaaacgctcggcgtgcatggtgccccttaatcctcacaaaagtcgagcgacttagggaggaatattatcccattgcacacacgagcacactgctgcgcagaggcacgaaggtacctgcccagggtctcagctagtcccatttccaacccaggaaggcaagggagcaacccgggaagcaaaatgtaaggagacactttcagggttgtgcaagtgtggggtgggcacccggggagaagggaggagggatgaactatccagagaggaaggcacgcccggccccgacttatcggaataattgtctccattccgcttcggcggtgtctgttgtgtccattgaacagaagcagaacgtgagtccgtatctgcccctcgccaccgccaccagcacctgggatttgactcacacttcaattcctgccctaggaattgatgccagcgcccagtatggccccgcgtggggaatcgagcgccccatccctcggtgagggcttactctgagcctgagtctgtggcaggcccccccatagctactgtctgccttaatccacgccaaggcctctaaaggaaaacattgccttggttctttttcacagacgtgtcaactgtggaccagagatgtcaagccacgtgcccaaggtcaccaagcagtttctgggtgagccctcagggaatcctaaatcccgacccaaacccgggatttcccctcgccctcggggcctccaaggggagctgcgagaggcggggacgcaaggaggcgctgggaccagtttgctctgagtgctcctgctccggactgctccttggagaggcggggccttgggcagcagaatcccaagctcctcccggtgggaaatccggcagctcccgtctgagggtagggccagcagaccacctggcccagtaaactccaccggcttcgggggtggggagttggggcaggtgcgccccaggggctcggtatacaaagccatgcctgagccac

SEQ ID NO: 332022 - DNA, 856 bp, Homo sapiens
  chr4:5052378-5053234
  hyper
cggagagctgggcccgcaggactgcaaggcagggggacctgcctgtccctcagggagcgtcctgggaacccgcgctcgccccacacgtcttggggcgcatctgccgcaccccttacttaggcacccgcaactgtggcgcgtatctcccgatccaggctcccgccgcaggagcccagggaccctcatgctagcctcgcccctaaatcggacgccgatgccgcccaattttgggggaatcccgagactcatgcccagccattcccagggagaatggtttggggcaaactatggctgtctggggcctcagtttccccatgtacaatgaaggggtcagattagtatctaatcttaaggggtcagaaagtaaacagatactttcattcattaaacactgagaaaaaccttaagaggaacagcgtcggttggagagccagcagacactccactgcccatcccaatatgaatgggcaaatacaggctagcggggagtcctgggactcccttcgcagccggggccgactaaccacagacctaagagcccctctacctctagacctccgtctactgcgctctaaaatatgaacgatgctttcttactgctgggttgtcggaggcggatgtgggatggtgctaacaaagcgcgtagccgaggcctggccatagtgggtgctgacaaaccgcttactgcctgcagggaccgagctcccggccgagggaggagggccgagcagggattcagattcttccgggccgatccctttctcagctccttccgccctgccgccgcccactgcgtgctgccttcgtccgtcccctcctcccccgctccttcccctccttcccctgctcccgcgcc

SEQ ID NO: 332023 - DNA, 774 bp, Homo sapiens
  chr4:5709740-5710514
  hyper
cgaagctcgtaaaatggagagcaggattcgaaccagggtcgctggtgaagtccaagccggcagctgccacaccccgaggaaggtctccagtttccctcgaagctttctggccgtgagcgggatacacctaagggccgcgaagcaccctattcagatcctgccctcccttcctcattctttgcgaaatactaagggtcctccctgccaccgccggtgtagacaaagtcaaaccactacagtcagaccggagcctggggtcgggccctccttacctgcgtgctgctctcgggccccgccccgctccgccccggagggatcctcaggccgggcccagacctaggagccacctggggatcccggggtggctgcgcgccgagggggcgccagcggggacgtgagctggcgccgagacagcctcggccccccagcgccagggccactgccaggagacccccggccagcacccacgtggggcgcccccgggagcccgaggggtccatcgcctgtcgggacccgctacctcaaagcggcgggtgccgccgagtcgctggagcttccggaccccaggcccgccccgccgccgagcatgctcagtgcgagccgccgccgaaagttttctggaacaaacacccgcatctggggcttggcgggccaggaggtgccggacgggcgtgggagggggagagcgagttggcgcggcccaggcgcccggcggccaggcctgggtttgcttgcgcccaaaccgaatcagagcgggtcactcccctgctcccc

SEQ ID NO: 332024 - DNA, 646 bp, Homo sapiens
  chr4:5712804-5713450
  hyper
cgggcccccctccggaagggtccggggctgggaggcgcgtctgtctctgggcatgctcagtgcaggggcagggctggggcgggggtggctgaaagttttgagcggtgatccaggctcctccctccggctcggcgaagcagggaaggggagagaagcaggagtcgggagactgcacaggccagaaagtctgcggagcgggccgcgcccctggcccgcccgggctccaagtcccgcgtcgccgccctggcggggacggtgcagcaggcggcgggatgcggcggggcggcagcctgagcgccccggatggcccgcggcggggcggcctgcaagagcgacgcgcggctgctgctggggcgggacgcgctgcggccggcgcccgccctgctggcccccgccgtgctgctgggcgccgcgctcggcctcggcctcggcctttggcttggctgccgcgcgggccgccagcgcacgcgacaccaggtgggtcggccgagcagacagcggcggggcggggagcgcggggcgcgtggcttctgggtcctgcgggcccggagccccggctctgcgactccttgagcctggttgggaacttcgcacgcaaccgcttaggcgtcgggttccccttctgctccaggagggaggtggcggc

SEQ ID NO: 332025 - DNA, 400 bp, Homo sapiens; identical to SEQ ID NO: 222358
  chr4:5889213-5889613
  hyper

SEQ ID NO: 332026 - DNA, 898 bp, Homo sapiens
  chr4:5889853-5890751
  hyper
gggggcgcccctgccggcgccccgtggatctggaccctgccgggcgcccactcccagcccacaaaggccagcgcggggcggcgggggcgggggccgcttaccgtgatgtgcgggatgctcttcttgccctggtacgacatggccccctctggcgccctcggcccggccgctgacctgcggggctgtctgactggaaccggcgctctcggccccgctcccagcgggcgcgctgacaaaggcccgggagggatagagacacggacggaggctcggcgcccgtggatgcccacgcgcggctgccccggctgctcggcccgcccgccgccgctccggctgccagcaccgcccggatcggcgaggagggcgggagaaggaggagggagaggcgagggcgggaggagggggctgcagacagctcctcccggcggcgcggagcgaagccggattcgcccctctcggctcgaaccaggaagcgcttcccttccgatctcccaccccgccccccgccccccacccgcccagccccgccgacccccgccctgcgcacacgcccttggcgggccctggcctcgctctcgcgatccagagagtatggttttcagggctcctttaaaagaaaaagacggcgcggtcagggcccgcgggcggcgccacaggtgtgtggccgcgcgtctggaggcctccccggaacatctgcgggggtgtggggggagggagtgtgggacgggggccaaggatcggcccaagctgctgggaacgttcttgtccctccaggatcgcgcccaaggaccgctcccctcttgcctctccttccatagcctccgtttatccttcccgagtgcctctccctgaatgcaccaagcactttttccatctcggaccccaagcctttattcac

SEQ ID NO: 332027 - DNA, 1435 bp, Homo sapiens
  chr4:6201288-6202723
  hyper
cgcgccggcccggcaggagggtgggtgccagcctttcttcccatctctcgagcctcctccccggcgcccacgtgggcggagcagcgcgagggtgtgcgtggcaggggccgcggcggcgtgtgccgtgcgtggggtggggtgcgggctgggcggcctcgccttcgggccccgcgccgccggggcgcggcccccagctccatcttctttgccacctgggcggagatctgggggactgtgacctaccctgcggaagacacggaggggacgggccggccacaccccccgcgccactccggcaggcaccgggtgggtccccctcccgctccttggcttgagggcggaatccggagaagagtggaaataggggtggcgtgaaggagagctgggggctgggggcgggaccgggagggggtgttgggggaagcgacgcagcggctgggagattttgcaagggggtctgaagaggagtgggggatgggtatggaagggtgggggaccactgaggtgggatgcgagagtggaagggggacccagagggggcgcgatggccggaggagggggagatggacgatggggcggggcggcaccggtcgccgcgtcccttgccgccaggtccgcccctcggtcgccgggtccacgggttccctctggccagcgctcgcctcccgccccccggcgcacctgtacccacctgctcggcgctcaggcccgagccgggcagcagcagcggacgtagcgagcgcagccccgcgccgcatcctccggccgccccctccccgctgcgagcttacgccgctgtcgccgccgccaccgccttaaaaaggacaaaacggaacagaaaatgaatgcatgcacaaaaaaaatcgtaaaaagcaattgaggaggatggcagtcgcgcgcgcggctcggcggggcgggagtcgagaggccgcggcactggtggccgcgatccgggcaggcggccggcgcgtgccgcacgcgggtggctgcagctccctcggtcgcccgcgcccggctcaggcacggcaccgcccctccccccggggagcccctccgattggtctgtcttcctgccagtcaggcaggagggcgcggcgcccgccccgccccgcccccgcccccgccccgggcagatgccgggagctctcctgccgccgtgggagggggagctgagctgccggagcgtgcgcactgggccagcgggcggccggggcagggctggggtcccggcgctgagcgcccccagccgcgccgggcagcctggcgcctcgctgagtcggagcaacccccggcaggagctttcaggctctggtcaagcctcgggacccgggaagctatccctgccctcgggggctcgagcctggagtggggcttgcaggtaaagcggggctggggccgtcctggccgtcagtggtcaggaagacgcagcgacccc

SEQ ID NO: 332028 - DNA, 38 bp, Homo sapiens; identical to SEQ ID NO: 230223
  chr4:6223661-6223699
  hyper

SEQ ID NO: 332029 - DNA, 821 bp, Homo sapiens
  chr4:6271360-6272181
  hyper
cgctgtgggcgagccggacccgccttctggcccctcgggcccaaccacgcagggggagtgccgggccgcagctaggcgaggcgcaccgtgattggcggagatgtggagtgattggcggctacaccggccactcagcaggccgagctggcgccgcatccggggggccgcgtctggagtggagggaggccgaaggccccgcccctgccccgccccctcgtgcagaaggccgcgctagccggctcttcagcagcgagtgcagattgctcccccgcggccgcagatctcccgtttgcgccgcgttcagctgctcccgaacaacttttctgccggcccagaggccccagggcgtcgcagcgccgcgtgcggcccactcacgggccggtgagtacttcggcgctggggcagtggcgcggtggctgtgggcagcgcgcaggaggcgggcaagagccctgaggcactgtcctcttcgggcctcagtttccccttccgagctgatgggtggctggccccaaagtcccgacaaggtccccgaagttggagggccgggggtcccgcccgctctgcaacgcgcaaggcgacccctgttccgggcccgaacgggtcacccggggggcgcgccccggtcccccgcgcgctgtcgcctggagccccgccgcgggcgggacagcaggcccgagaggcggagcggccggcgggcaggccccctccccgcgccccgcgccatcccccccgagttgccccgtcatgcccctcccccgcggtcccgggacccacggccgccctcggtgcccgcccggccgttggaacgcgcctgggccccc

SEQ ID NO: 332030 - DNA, 364 bp, Homo sapiens
  chr4:6339386-6339750
  hyper
cggtgctgggtgtcacagggcagaacgagtggccaagtatcctaccagcctccagcaggaaaaaccgcaaagatcaaaggctgagagaacaattgaatcgatagtggaaacaaagccaaacggcgctggcccttgtcgccccactgctggctgtactcgggcatttctgagggtttttaaggacacaaggaacaggaatgcaaacgatagatcggaagggatattaataagcctgaaaaaccattcctaaaagttcctctttttctttttagacgtttctatgaaatttttgatacaatagatttttttccaaaagatagtggaatctactattccatatcaatcgctgcccccgagtacgcac

SEQ ID NO: 332031 - DNA, 348 bp, Homo sapiens; identical to SEQ ID NO: 230226
  chr4:6472724-6473072
  hyper

SEQ ID NO: 332032 - DNA, 903 bp, Homo sapiens
  chr4:6473630-6474533
  hyper
cggagggcggcgcggaggagggcgctgccctgtgccggcgctgggcagcggaggccggtaccctcgggctccctccctcctgggccccgggcagggtgggatgggatggggtggggtggggtgggatggggtggggtggggtggggcggggggacacgacacacatcgcgcggtccaaaccttcggagggcattcggtgcgacggcatccccacgccgcggccggccggaggggtctcagacaacacgtacgttaccttcagtcacatagctgtggtcccgcaggaagctgtggttaattttccgcgtgtccgtgtcctcgcccattgaaggccgtgcccggtgctctgggcatgccccgccgccacacaccgatgcaatccgcagaggtcgcgccgggcgcgcgggccatgccgccgcagcctagcaggggcgcgggccgccggggccccgaagggagggcatcgcggcagggggacgggcgggggcggccgggggcgggcgccgcggtcaagcgagcgcgcggtgggcgggcggcggccgcgggttcgggcgggccggggcccaggcgcgcatcccggccggcccgtgcgcgctgcgtccgtgcgcccggcggcggggcctggtgccggtgcgcctggctgcggcgacggcggcgaggggacgcgcgcggcgctgcgctgcgccgaccaagccggggccgagccgggctgcgcgggctggggccgccgccgccgccgctgtcgcaggcccctccctcgcgccgcccgctctccgcccccgcggccctgcaggtggagccggcgcccaagccgaggctgcaccgccgtgctcgggccctcgcggtgggcaccttggtgctgggtgcgccacgggggagggaggaaggagaccgccagcttgc

SEQ ID NO: 332033 - DNA, 122 bp, Homo sapiens; identical to SEQ ID NO: 222362
  chr4:6717792-6717914
  hyper

SEQ ID NO: 332034 - DNA, 1004 bp, Homo sapiens
  chr4:7194127-7195131
  hyper
cgcgctcgggtacgccgggcttcccacgagcgcctgggcggcgggccggccggcaggtggcggtgcgcgctcggcgtcgcgggtggcgccggggccgccgagtcccctcctcccgccgctccctcccctcgccggctcctttctctgcgctctcgctcgcgctccccagcgccctcctgctctcccggccgcggtcccctcgtccgcgccgccccgccgccggctccgctgccgcccctggcgaccatggcgcaccgggggccctcgcgcgcctcgaagggccccggccccaccgcccgagccccgagccccggggctccgccgccgccgcgctcgccgcgctcgcggccgctcctgctgctgctgctgctgctgggcgcctgcggggcggcggggcgctcccctgagcccgggcgcctgggtcctcacgcccaactgacccgggtgccgcggagccctcccgcggggcgcgcggagcccggtggcggcgaggaccggcaggcgcgcggcacggagccaggcgccccgggtccgagtcccggtcccgctcctggtcccggcgaggacggcgcccccgccgcgggctaccggcgctgggagcgggcggcgccgctggccggagtggcttcgcgggcgcaggtctcgctcatcagcacgtcgttcgtgctcaagggggacgcgacgcacaaccaggcgatggtgcactggacgggcgagaacagcagcgtaagtgacctccacgcgctcgccgcggcccctacccgggacaccgcgggacacccgggcgggaccgccacggcccccaccccagatccccactatggtcatcaggggcgggttcttggcgacttgggcacttgggtcacctcggccgcgcccctactggcctctggtcactggttacttggggagaggtcctcagattcgtacgcttgtctcaccgcaggggacattcccgcagatttcgggatcctgggccacctccgatactcccccactggcct

SEQ ID NO: 332035 - DNA, 156 bp, Homo sapiens; identical to SEQ ID NO: 230234
  chr4:7195161-7195317
  hyper

SEQ ID NO: 332036 - DNA, 1354 bp, Homo sapiens
  chr4:7940425-7941779
  hyper
cgctgagagctacaaagttcaatctggctttccagattttttttttcttcccattactaacggaagaaatcaagaagctccgggcagtagggccctgctccctccaatcagagcccagcccggggccagagcaggaagcgcggcggtgggacgcgcggtgacagccccgcgccccccggggcccgccggccaggggagaggacggtgcggccgctgcgcgacagctccgggcccgcgcctctcgcttccacccgccgggcaggtgagaggataaatcacggggcggggcagtgcgcccccaccaaccgcgccccccgcgcacggacccccattacactcgcgtcccaggcggggtcgacccagacgagccacggggcggcgcagagccccactcgcagggcggccgggacccacgcgcgtgggtccacgcaacaacctataggtgacaaaacactcaggaagccgtcatgcggggccaagaaagagcccccatccagagtcacggaccccctcgtccgagggtccgcgcagtcccctcggtaagtcggacgaagcagtctcgctacgggggagggcggcggagcctcccactcttggtgacccggaccccgccccacgagtgggtcttcgcagggccccctctgacgcacacggggaccagccacgccgcgggggcaccgggcaggagccagcgcccgggtccacgcagtcccctccgggcagacgcggggagctggggagcagtggggaccggcccccacccgcaggacgaccgggacccccgcgcgggcccacgcggcgtcgcagcaggcgcggagcccccggtaccacccgaggccgagacaaagcccaggcgcacggaccccggaccctgcggagccccgctcggagcttccacgcccggggcagagacccccgccgggtccggagaccctgccgccagtcgcgccgtctcacctcaggccgccacctcgcagcgctcgctcctcgccgcggcgcctgggccgactggagcgcagctgaacagccgacagagccgcagccgccttaacaatggagccccggggcggggccgccgccgccgcctcagcccgtgtaccccgctcgagatccggctcggctcgcggagctgcagccggcgtggggctgcggccgggacagacaccacgcaggcgcacacggccccgcccgccgcccgccgtcccgcccccagcggagccgggcgcccagggcccgccccccggccaatgggaagcgagctgcgcggagtgggcggggcctgagggaacaaagggaggttgggcggggcggtgctgggactgggcttgcggggtcccgcgggaggacccgcctc

SEQ ID NO: 332037 - DNA, 841 bp, Homo sapiens
  chr4:8159729-8160570
  hyper
gcggctgggctccagcgctgtgggatttttccagccccgcacagaggctgtcagatcccggagggtgggtgcggcgggaaaggcaggggtgcgacgcgcaggggcgaggggctggagacgcgcagagatcgggtcggggccgggtctgacacatgcgggctccgggtccccagatctgctgcggagagtcctgggcgccgagggtcggcctgacgcccccaacccaggcgctgccagagcggcgcaagggcggcgcccccagctgcaaagccccgcctatcatctcacctctgcgtgcctaggtctgctggggccccggcccttcgcccggaccccaggcccccgcgcggaccctgaccgctttctgcagcctggaacaacccggacccccgtgagaagcaaagaaggggcgccttccagacatcctggcgcagccacgccggccggcgcgctgggaaaggatccccggcccgcgccactgagctacgcgctccgggcgcagggcagagggctgcgctctggcccctcggggctgcaaaatcctggagcaaaagttgggtggagccgctgggtgattttccccggcgttgcaggtgcagcctccgaatgccacccagcccttgcggcgccgcgagccagcgcggggacccgttggtccctcggtccccagcacccacctgcactcatctcagcagccgctcggagtcggggcggcccggcgctgcgacagccagaccctcgggcccgcaggtgccgcgcccgcgctatcctccgcccgcccgccggctccgcgcccgctccttgcgcacacgccaggcagcgccgccgcagccccacggcg

SEQ ID NO: 332038 - DNA, 883 bp, Homo sapiens
  chr4:8200632-8201515
  hyper
cgtgtgtgtgtgcatgcatgtatgtgtgcaggcatgcgtgtgtgtgtgtgtgcagtaaatggaagaggaacagagatcagagctgaggctggcagggctgaggcagccggtggctggtggacttccccaatcccagcctggcgggggactgggtgcccctagcctctactacagagcctgggggctgggcagcgggcaggcaggacagggcctggacctcgtccaggaaagagctaatgatcaaccggctgcggtgtctgtgcagccgccctgggcctgcctctccgtcaccggccctcaggcgcagggaggaagtagggcaggaagcagggggcggaggccgctgtgcagtcagcctggctgtgggcggcccctgcctgctccgtccagctggagacagccccgtggggccagccagcgctgggccaggagcggccacctggttcctgcgtgctacggccctgtgggcctgggagctgcctctgaggaacacgccgcaggtatggggggctccggggcaggcggggcgtggactggccgagcaggctgctgtctgccagtcttgccatggttggatctttacactttcttgaggacttttctgacctgtttgggatgggggtggagcgaaactgcgagctgggggcctcggggaggtcgtcggcaccctcagcagaccccactcagagctcacaggtgctggcagtgccaatccgcagtgattgagggcaatgatttcagctttgaccaagcacccttgcttctgggacctggcctgaccccgtgctggcccttggcatgagcggccctgggggtctgggagcagagccagcctgtcgctggattccaagtccagcggatctcaggtgtgaccccagcgccc

SEQ ID NO: 332039 - DNA, 765 bp, Homo sapiens
  chr4:8271299-8272064
  hyper
cgggttttctcgaccaggccgaccagagtcccaaggcctgccgggtgggtccaggcccggaaggccaggcggggccctgtcggggcctgggcggggctggcggaggggccgggccgccccttccagcgagggcgggctgggcggtcgcctttaaaggcgcgggacccgccgcccgcggaccgtcaggctggagggagctggtccctgcgctccctgcgccctggggatgcccctgccgccctgacgcccgccagcctgagccaccggcgcatgtgaccgcgcgtccgccccagtcccatccgtaggcgcccggcgcccggccccgcagcggcctcgttgtccccgccggcccccgcccggtctcccgcgctgccacccgccgccggccctgccgccatgcaggcgcgagcgctgctcctggccgcgttggccgcgctggcgctggcccgggagccccctgcggcgccgtgtcccgcgcgctgcgacgtgtcgcggtgtcccagcccccgctgccccggcggctacgtgcccgacctctgcaactgctgcctggtgtgcgccgccagcgagggcgagccctgtggcggccctctggactcgccttgcggcgagagcctggagtgcgtgcgcggcctatgccgctgccgctggtcgcacgccgtgtgtggcaccgacgggcacacctatgccaacgtgtgcgcgctgcaggcggccagccgccgcgcgctgcagctctccgggacgcccgtgcgccagctgcagaag

SEQ ID NO: 332040 - DNA, 115 bp, Homo sapiens
  chr4:8609457-8609572
  hyper
cgccccgcgcctggcggggtccccagtgcttcccaccgcagaggggtgcgtttccgggaggcgccggcagagggcagtgctgcagcgcgcatgctgcccgcccgtcctgcttccc

SEQ ID NO: 332041 - DNA, 960 bp, Homo sapiens
  chr4:8861937-8862897
  hyper
cgccccctggcctttcctatacccggggccaaaaccgctgggaccgatatactgcaggagtccgggcacaggctgaggggaccggcccgtgcgttgagcgcctcggaggtgctccgggtcatggtgggtgctgagcgggaacacggaaggctgtgtacacagcagcaagcaatgcacccgcgctcccgtcattacatcgcgccgccttcacccccgctacgatgaccactccgcagatgggcaagacgggctcagagagatgaagtgactttcccaaagccacacagcgggccagtgaaggcaccgcgcacggtccaggaatctaacccttcctggggagtggggagggaagggctcgacccgaaggggccaggcggcagagagccccgcgtcccccgccacgggctaagacgcaaggcggcccgccgtgtctccacctgcgcgcctcgagcttcgctccgctctagccttcgggttaacaccgcttccttccagaagcctaaggaggcccgggcggatcagacgcctcccttctccgcagccccatgccctgcccgcagcttgagctcaccgcccttctcggggtggcggtgcggagaccggacggctccactgtgcagaccccgaggggtaaggggccgggtaggggaggggagcgagaagtggcgaggtgagaactgaggggcgaggctgaaggctgagccagacttccagacgccagagagacgccaggtgagccgggcgggggcgggggcgagggcgggggagggggcggggccggaaccgcggggagggggcggggcgcccgggagggccgcgagctgggaaggtcccgggcggccggagacggtgaagaggcggggccgagtcgcgtccgcggggtcccggacacagcggagctggcgccactgtcggggttccgttccatctaggtcgggcagccccgcgggtccgggcgcc

SEQ ID NO: 332042 - DNA, 855 bp, Homo sapiens
  chr4:8868832-8869687
  hyper
caacccggaggctgcgacgtctgcagagagccccagcctgcctgctcctggaacggacgatgggacccacaggtccagggtcctttctccaccagcacccgcgagaggggtagcacagccctccgggccggcctgctgtctgggtcccaggaaagggacgtttagtgttgggggcagtctgtggggacagtcaccgctcagccttggacagccggttcgtagttttcctttgttgcgctgggcttggcctgagggcagctgccccgggtggccatggccgaccgctcctcgctgaggccggggggtggccgtggcgccgggggctgcgcagcccagagtctctgcatggccccctgttcgagtggggatccagcctggcaaatgggtggggcgtcccattacattctagaggcgctccccacagaagctgaggcccgcccggccgcggcctgcgctcccgaggtatctaggaggccgcaggagcgaccatcccttccctaacgccccctgagccctgcgcctgccgctgaatcgcgcgtccacacaggtccacagggtcgtggggagagggcccggcaggcggggctcacaccaggccaggcatctgcgcccgcagaaagggcacggaggcggcggccgggaaggcggccagcgggtaggcgagggccccggagaagccgagcagcggtgggggcggcgcgggcgcggcgggcgccagcgggaagggcagggtggccgggggcccagcggcggctgcggccggggggctttcgtggtagagcaccggcacgcggaccaggcgctgcgctcccggcggggacaggctggccgcctccagctcggctgccagctgcc

SEQ ID NO: 332043 - DNA, 1100 bp, Homo sapiens
  chr4:8872917-8874017
  hyper
tgacccaccctccccgcgccctcactcactgtcaggactgaggccgcctccatagccaccgtgcgcccgtgggtaccagcgcgctgcgcctccgcagcccagagcgaagggcggcccgggaccggggggcggccgaggaccgaggcccagcgcgcccggcccgagcagcgcacgggcccgcgcctccccgccgggcccggtgcccgcgagcaactgtcgccgccgctgtagccgtcgccgccgcgcctgctcggcgtcctcgtcttcggggtcgtcgtcgtcctcctcctcgtcctcccggctgccgtcgccctgggtcgcgcgccctgcgcccttggcctcggccgccagcaggttctcgatgaggaaggaggaggcgcgggccggcgtggcgcgcccgggctccgtcagctcgtcaggcatcgcggccgcgggcttctcgggctcggccgggctcctcggtccccgctggggatggtggcgcgcggctcccgggcgcacgcgcgggccggccctggagctgctacccggaccgctggcgtcgggccccgcagggcaggcggcggcctccgcgccgggctgggctgggccgggccgggagcgagtgcgcgccgacagctgatcgggcagccgcctggctcgcctttcaggtcgccgttctggtcgccgccggggcggcctcactgggggcggggagggggaggggccagcaggggcggggggtcgcgggctgggccgggagggcggcccgctgagccccgaggacgctgcgccggccccgagcgcggccgctgccgggagacgctgcccagacctgagcgcgcgggcagcggcgcagccgagggcgggcggccccgggcgcaggcggggggtcgcgccgggtccgatcccgcgtgatcagttcccccgtcccgcgccacccgctccgtgggggcggggcctgggctgagcggccacccattggctgtggggccccgatgaggaacgggctggccaatcaccgtccggccagagccgtaattaccccgctgcgaggagggtgttggaccgaccgtgagtaactgtgtgtgtgcgcgcgcgtggtgtgtgcacgagtgtgc

SEQ ID NO: 332044 - DNA, 757 bp, Homo sapiens
  chr4:8894331-8895088
  hyper
cgggttcccgagagcggcggggggtccaaaggcgcgggcaccgatggcgggcggggccctcctgggtcctctgcccgccgccacccctcggcccaccccgcccgcagcatctgcgcgttttaagccggataagacgcttccttccctgtttgtctgggtttctttctcggttgctcaaggctctgatgtgacctctccaagaaaggacaccaatggccgcgcccccgccccacgacgctgcggacagcaagccgactccccccacccggccgcctgccccctccccgcgtcggtgcgcgccttggctccgggaaacgcctgcctccggtcggtctagcgcggcgtgtgcgagtgcagcccccgcggggacgtgggcaccaacagcaggcgagtgactaccgcggcgcagttcccgaggacccagcgcctctcccgaggccaccctcccgggcaggaattactgtctgccggcccgaagccgccaccccacccgccgccctgtttcaaagttggggagagtccatgccgcgacggagcgagcagacttggacatggtcgagtgcctggtgcgcacgattggtcttaagagtttagggaaaaaagcacgcggggaaaccacgcggggcccggcgcgctctcgtttcccaccactgcccccttcccgggcaccgtgggccgccgctgttgcccgtcccgctttcttctcgcctcggagcaccgggtcccccggagtgacctactgcagccgagccccggc

SEQ ID NO: 332045 - DNA, 208 bp, Homo sapiens
  chr4:9499999-9500207
  hyper
gtcttcttgcgacccggccccgctccagatccccccagctctcggcctcggacccgggccgcgtgtgagcgcgctttgcacctcctatccccagggtccgccgagagccacgattttttacagaaaatgagcaataaagagattttgtaccgtcctgactggggagtcccaggccgcgtgggacggagtgcccctcggatgcaagccc

SEQ ID NO: 332046 - DNA, 207 bp, Homo sapiens
  chr4:10090148-10090355
  hyper
cgacgagtctgcagatgtggggagggcgatgtctaagttctgcatgtcaggactagcattaggcagcctgcggctctgagcagtcacgggagcaggcagacaagccattccccaccccaaaacccatcccagttcttacctggccgtcagcactggctgtggcaaatctgttcccatcaggagagaatcgcacacagttgacaaagc

SEQ ID NO: 332047 - DNA, 1021 bp, Homo sapiens
  chr4:10458331-10459352
  hyper
cgtcccgctcgccgcgagggaaggccggggttcttccaaccgaagaaaaccaaaaccgtcaacgctcagctccgaggcccgcaggaggctttaaaaatggcctcctgacgacacttcctgctcggcgcggacggtaggagccctcggaggaggcatccttcataacgctgggggcggggagcgcaggccgggccagcggcgccacacgaacggccccgcgggacgctgccacccccgcctcggtcgccccggcgcgtcggccgagtccgcggggtcgcggcgcacaaaggcgagctgggggcgccgggccggaccccgaccctaggccaggcccgcgtacctgctcaacgcgcgccaagccgcggcccgggcccccaccccagccggtgccccacgcccaccagccggagcccgcgttcggcctacccggtgccacttgccacgacgccagccctcagcgcgggcacgcggggccgcggccgctcgacccgccccggcctggccccgtcaggcccccgccccgcgcgcccccacgacccggccgcagctggcgcttcggtcacgtacacgcggatccgggggccctcgccctcccgctcagctacttacccggcaggccggattcgggtgccaggtcccggcgaaggggcgtctacaccgccggccgcagaccgccggcgccgcgcccgctgtaggtccctacccggggggcggagcccgcgccagccccgcgcgtgcgcaatgtgaagcggcggcgcggctccagcgaggccggcgcctgaggtctctaaggctgcgcccgcccccgccgggcttctaagctgtccagagcggggagcctcagacccagccgagccccacttctgggcttagagcttgacccaacacgttcgcaccgtagcgagcgaggtccacatttagccatgccgcaggcaaaagaaggattcggcttcggtcctggcccagtctgccatcccggggcgcctgccttgtaccgggtcccgcggagggcggccttggc

SEQ ID NO: 332048 - DNA, 613 bp, Homo sapiens; identical to SEQ ID NO: 230259
  chr4:10462856-10463469
  hyper

SEQ ID NO: 332049 - DNA, 597 bp, Homo sapiens
  chr4:11429092-11429689
  hyper
cggagcgcagcgcaaagacagtggatttggagtggcctccctagaatccccccaaaagcatcttggcacaagttgtagataaaaatagctcatgataacattgtgggaaagggaggagcgagactcgcgcaaggcgaggcaagggtaccactggatctgcaaaggaggaggaagagggaggatgcaacccttggcccaagagagcgccctgagtgtgcgaggaatcgctggctcccaggggagggaaagagatggaagacctatagcgcctataactgcagagttatagacctataactgcagagcccagcacaccccatcccgcgccggcacccggctttggctccagcttcttcttcccatcatccgcctacgttctgggtctgtcctccgcttcctgggacaggctggggctagaaggaggagcagcgcgccgtccgccccctggctggtagagcgcacctggagaggtcaagctccgcgaataagacccttcctgggagctggggtctaggcgttccaaccgcgggttcgcaccccgccatccctcacctccatccgctgccactacccaagggcccggaaatagaaaaccac

SEQ ID NO: 332050 - DNA, 875 bp, Homo sapiens
  chr4:13543524-13544399
  hyper
cggggcgccccgtgcaggctacagcctacagctgtcagcgccggtccggagccggagcgcgggaatcactcgctgcctcagcccaagcgggttcactgggtgcctgcggcagctgcgcaggtggagagcgcccagcctgggaggcagtagtacgggtaatagtaggagggctgcagtggcagaagcgagggtggccgcagcacttcgccgggcaggtattgtctctggtcgtcgcgcaccagcacctttacggccaccttcttggcggcgggcgccgaggccagcaggtcggctgccatctgccggcgctttgtcttgtagcgacggttctggaaccagattttcacctgcgtctcggtgagcttcagcgacgcggccaggtctgcgcgctcgggcccggacaggtagcgctggtggttaaagcggcgctccagctcgaagacctgcgcgtgggagaaagcggcccgcgagcgcttcttgcgtggcttgggcgccgccggctcctcctcctcctccgcgacgcctgccggcccgctgccgcccccgccgccggccccgctgcacagcgcggacacgtgtgcacctctggggccaacaccgtcgtcctcggtccttgggctgcggtcgcctgcggaccccggtgggaacagaaacaagagactgtcagcgccacagacgaggtgaggccgggcctcaactgcaggggtcacgggagtggggcggaaatacactttgatcccactcaagcggagcggaggtctgggaggccctgggcccgggagaccagtcttagactcttgccccactgggtatcccatctaggcctcttctggggagggcggcagactcagccgctgtgtcaacgctgtgttgtc

SEQ ID NO: 332051 - DNA, 1310 bp, Homo sapiens
  chr4:13545599-13546909
  hyper
cgctccggcccgcggcttcctcctctaggtctttggaagcggccagctcacagaccggctggccgaggctcaaggatccccccgcaaggccggccccgctggccccccgcgcgtccgcgcagcgccgcctgctctcgttctcctcgctgagcgcggagtccgagtcccagccttccgggctctccgcagtccgccccgcagctgttctggtaccggcaggagacgccagcagagagtcctcggcgccccccaacgcgcccgcgtccctctccccaaagagccgccaacagcagacagcgggagccgcggccaccgatgccgctgtgcccccgggcgccgggcgcccctctggcgcggccagcccgccgcgctcctctttcttgttgaggatcgcctggatggagaaggacgtcaaggtgttggcgccgcgcacagccatctgcgccgcgggcaggagcggccggcggggcgggcagctggggcgccgagcagctccgagcgggacagagagcgccggcggccgcagcgcgagtgagctgggtgtgcgaggccgccgccgcccactgctgcgcggcccagcagctcccgccccactccgtcccaggatcagcgccgaccctcgcccccaccttagaggcccaccccgcccggagaccccctccccccgaatccagagccagacgctctcctttcgcagctcagctggattatctcatcgcttctcgcccttaggggcgggctggggtctgccccctcgggggacgtgaaggaggattggcgggggcccctccgtggcagcagtcccctcccgagcgccgccggggcgcacagcccgagtcactttttctttgcgcgtctgtcccttcctcgcctgcaggatttcgctcctggcccgtcctccccttccctgctgggcaggctcttccggagcccacccccggcggcggcggcggtagccgcggccgcggccgctggattccgagaggcgcggggaacttttttaccccctgccctggttttatctgtttcttttctctttccttcccttgcgttccactgtaccacccccctcccgcccgggtgtcattcctcactgctgagtgacagcctgaggccacacccctccactgggctgtcccgggcgctcccggccgtccattggctggctccagttgggcgacgttgactttaacagacaaaactgggcacgttgcgccgctaaagacagggtctgacttaaccccttctctcctaagcctggtcctcgaagcaccctccagcaacaaggaggctcatccgacccaaaccac

SEQ ID NO: 332052 - DNA, 1320 bp, Homo sapiens; identical to SEQ ID NO: 230271
  chr4:13548570-13549890
  hyper

SEQ ID NO: 332053 - DNA, 1025 bp, Homo sapiens
  chr4:15780070-15781095
  hyper
gacaaaccctgctgccggctctctaggagagcccaactctgtcttggcgtcagtatcctggtcctgatcctcgtcgtggtgctcgcggtggtcgtcccgaggtggcgccagcagtggagcggtccgggcaccaccaagcgctttcccgagaccgtcctggcgcgatgcgtcaagtacactgaaattcatcctgagatgaggtgggttggcgactaaggcgcaccggtgggcactgcggggacagcagggccccgcgcgcagggaagccgcccggatcgcccggaaccgggcatcttccgtggcgggtcagccgagagcccgccgggtggtgctgagtagggagtcccgggctcggggctccgcgggccgctttcaggagcagctggccttggcaccgagcgtgcccgcgggaggcgggggggggcgctgctcggtggctctgctgcgtagccggtgaacacttggcaccgatgcccgccttctgggcaaggtgccctgagcccagcccctcgccgggctgcagcccaccctcggcgcgctcagcccgcttcaccgcttcagggacggaatagaactcgcagatgcagggtgtcgctgacattttcaactttttctgcggtttccgcccgctgtctctgacccgaaagtgcccccggacggttacagaggacacttaagtggtttgcaaagcctgtggtaggggaggagggtgtagaagggccaaaccacggaacttagttttattcatttatataaagcagcactccgattctttttgcgcggcctgaaatgcatgtgaccagagaagtaattaacaaaacaatgtcaacttctaaaaccgagacattacttagatgataaggcgcagcaactcggtgaatctgtacaaaccttggaaaaaaaacacattagtctatgggaccttccagttttctcatgctcctttccagctactaacctctcctaaagggaacaaccactttttggatttgattcccaggcctcgctttcaccgggaaattatc

SEQ ID NO: 332054 - DNA, 1408 bp, Homo sapiens
  chr4:16084274-16085682
  hyper
cgcagccgcgcaggggagggggttgccggagtaacttggctgctctgagcgcgtcggcgccagttccccgccgcggcccctgttgggcaccgatcgggggcgatcttgccagagagaaggggttctggagctagttcctccctccgatccgactccctgcccctccagacacgggctttcggggaaactgatcccgagcctctgactttctacagccgtgaagctcctggtctgtccacgctcctctttgttgtccggtcggcgtgttctggcagggtgcgccttgagcaccccagttctccatctagcgatagccgcgggtccccgcgcatgcaagcagaagggccgtggagcgagaggctgggaaggtgcttcaagccaggggtgcatgctttctcccacggacgcggggagatggcctcgctttgtacccccatatccctactcccgctgtggtcggctgcacagtgttggcccatttccgcactcagccagggaagctcagcgcctcacgtccccggggccatccctagagtttcctttaccgcagactcgttcccaagaccctggcgagtctcacctcggtcaccgttctccccgagagcgagtccgaagtctctggggccccggtccagttcgcacactcacctccgactcccgctccggaaccacggccgccggctacccccacccccgcccccatccccagtggatggaaagaagacccaagcggggcgtcgcgggccaccactcagactaaaaagtttgggttggacgggcaccggcaccaccacgctctccccgcagttcctctggcccccagccgctgtccgggcccgcaccacctgctgaggggccagggaggcggcgcagatggctagggtaaggggggcgcagagcgaacccgtccactcctcactgtacacccccagtacagtggaaggagtgcgctcagccccgcgcctggtcagcagatgcctctctcgctccgggatgaggacccagctactcaccgtgcacccggctcccgctcctgctcccgccctagtcaccgctgccgccgcccttcccttagctcgccagaccctggctcgtgaattatttatgacccggcttctgggaccaccgcgacggctttcggagagcccgcctcccactgccggccgcggaggggctcaggcggcgctgcggccggaccctcggacgtggcgggaggcaggagaaaggcccgggtgcccggggggacccgttgcggcttcctctgtcccggacggggacctaggtatggggccgccgtaatggaaaggattccttaaacatactcaccgcggcgggagagctgagagcatggccaggtgccgcgtggggatctgcctcagtcacttaaagatcgcgaaacccgagccct

SEQ ID NO: 332055 - DNA, 499 bp, Homo sapiens
  chr4:16228976-16229475
  hyper
gtgtgaccccgcaacgagcgtggtgtcgagaccaccaccagctggggcggtgggagcgaaggtgccccaggctcggggaaggtggaaaccttttccccgctccccaagtgattgttgcgcgctccggtgaggggacagtggtacctcgatttcccgtgtgccagcttcgggactcagctgtgcttttgtgtctctttgattagcaaaagcaaaacgaattcctccccgaacactaagcttcctggaaacttccctagacctaaacttgagaaccgcatataaatgggccttgagggttctgtcgtcagtagcgggttacgtgattgcaaacgagcaagtttaaaacggagtgggctttgggctgcagagccgcctggcattctgacagctgagcaggaggcagaggtgagagtccaagatggactaaaaatgtcccagcagctgggagcccaacctcggcccaacctcgttgaaaggaggaacattcggtgcagccgtc

SEQ ID NO: 332056 - DNA, 1390 bp, Homo sapiens
  chr4:20253129-20254519
  hyper
cgcgtggcaaaagctgcaggagaggcactggcagggctgtttatttatgagccgcgttcaaagccgacctcttcccattctcccactgcaaacgactatctccgagcccaggtcacctctggggccaaggagttgggggctggggctcgggtggctccttcttcgggccaagtttgcccgcgcgtgggagcgagggggcgagccagggcgcacgggaacgcgcgccgccagccgccgcctccgcccagcgctggcagccccggcctcacctctcccctctccccagcgaggtgcgggctcccagagcggagccagggggcgggcctgggcctcgaggggcggggtcagggggcggaggctcgggcggctatataaggcccgcgccggctcaacttcggacttggtgttatttatttgggaagcgcccggacggcggagcttggcggcggcggtggtggtggctgccgcagactgtggttaaaaaaaagaaggcggcggcggcggcggcggcggaggcggaggcagctgcgaggcatgggagcgccgaagcgcccaggcgcaggccgaagctgccgcgctttctgggcacggcgggagtgctgagcagaaaggggagcgccgggggcccgcagccggctccggaggcgcgggccgggtttttgtttggctacgctgagcgccagtcagccccagcgaacaactccagttacgacaacaacccaccttccttccagacaagcgagacttgggctgctgcgtccgtcctattgtttagacacttgccaggggctccggagtcggcagagccaccgagtccccgctctgagtcgtcgccctccctctccccgacctcgctccctggagcgggaggccaggaaagcagcgggagaggggaaggggctagaaggagaaggactacccgggactgcggccgccgcgtcaggtgcagcgccaggagccgggcggcgtcgccacgccggcaggggtaccgccactgtggccttgggggacggaattcaaagcctgggaaaagttgctgcactttgagaaggacgaaccactagtgggagaccgccgggggccggccgtggctctgcgccctccggaacccggctcttgtttcttctacctttgccatcaggtgtctgccgcggagctgcggcttatctgggagacgagcggggttgacacgcgcgcacacactactgccattcagctgccgcctggctctgcctggagtagtggatcccacccgcccacctgccaccgagccattctccagtacgccccagcaggacgctgacacctccaaccttggcctttgcctttccactccttccggtctgcctggtttttaagtccgcccccagtcagtccccactcagtcttc

SEQ ID NO: 332057 - DNA, 1393 bp, Homo sapiens
  chr4:20255523-20256916
  hyper
cggcgcagtgctcttgctcgggcagcacagtggactgtcacgggctggcgctgcgcagcgtgcccaggaatatcccccgcaacaccgagagactgtgagtatgcgctcttcgtcttcccctctccccatccgggccgcgcacccctgcctccactggaggaacctgtcagctcagggtcctgtgcctggggcagccctcgctagctctcccccatgcacatcctggggttgagctctccgggagggcactggccagggaagggcctctgtccaaggaggggcgggtccgctggcagctgcgctagttctccctcccctgctctcgtcccgccactcgcagctccttgctggctagttctctggggctggggagcgggtagataggggacaagtactggaggatgcccggggcaagtgagacgccactttgttctccagagtccataaacggagtcaccttgcgattgccagcatccaggtcggtttcagagcccagtcctcgctcttgtcgcaggctggcgcggaggggatagcagggagactcaaaagagagaaacttgccttccccgattttttgtcaccctcctgggggcgaaggttaggaagaaggggtcatggagtgcctgggggtgcttctcacaggtcgcggggagaagggtgccccaggacggcgacacctcgcatagtagcctcgcgcagccccccgccccccacttctccggggaggggaagacggcgtcaggcccctagggacttgtctcagcgggcgactgcgagggaggaccgtgtcccatccgttaagcgaagttagcactggttctccagcgcaaaccagcccaaccaggtcttaccactgcggcgacccggcggtgcccggctgccccctccggcccttcctgctgaacccctgcgtccccatccacctttctggcagtttctgcgccccttcacgtggcagcagttcccctgccttcccctcttcgcgctccgttgctcgcagacgtccccgcctccctgtctttgcgagtctctaatgaagaagtaaatgcagacccggtgttgacggcccacgcgctcctgatgaggcgcttccagagttcagcgaagtggagcatggaggccgttctctttgtgaacgccgaggccgccgccccgcgccagtccggccgccctaggcacgttccgctctcgcggttgcgtgtgggccgggagtaagcgaagggcgcggggctaggccggcaggggccagcgcgtctggattcgtcccgcggcctctttgcccccggggtgtaagggtttcgggccgtggagaggaggcgctctgacccgcacgtctccacccgcgcagcccattgcacttcaagtcgcccttcttatccaacccatttctctc

SEQ ID NO: 332058 - DNA, 717 bp, Homo sapiens
  chr4:21950108-21950825
  hyper
cgaggaagggaaggggcagccgtcttggctcgcgagggaaggagggcggaagcgggcgcccgctcgcaagcttattgcatcctaccgcctgtagagctggcctcctccagctgagccgaaatgctttccaccctcctcacattcatgtctagggacgcagggtgcagaagcgagactcgagagtccaccggccaggggcgtctgtccacgggtctgcacgggagcgcaccgccgctcggcccgggggcgtccgtggcgctgggagcgagagcttcggcggcggctgcgggcagggcgcgcggagcgggctgcaggtgcgggcggaggccggcggggggcgccgggggcgctgcgcggcccttggcggcgggggcgcgcggggtggcgggggaggccgaggcgccggcagcttcgcgccggcggctggaagcgggcgggctgcacgggcggctcgagtgcggggaccccagcccctcgccctcgtgagcgccgcccctgccacctgctgccaagtcaccggactggggatgcggggggcggggtgcggggagaggaaagcgccgcgggtggcacggtgcctctggcgacagagtagatggacccgaaagagacccgaggtgacttcgggctgggcaggacacccccgggagttgccagcggctctcagcgggcgcctctaggaccccttgtcactgcgagcagcgcctgctctgggga

SEQ ID NO: 332059 - DNA, 389 bp, Homo sapiens
  chr4:24801473-24801862
  hyper
cgcgccatccacgtgcaccagttcggggacctgagccagggctgcgagtccaccgggccccactacaacccgctggccgtgccgcacccgcagcacccgggcgacttcggcaacttcgcggtccgcgacggcagcctctggaggtaccgcgccggcctggccgcctcgctcgcgggcccgcactccatcgtgggccgggccgtggtcgtccacgctggcgaggacgacctgggccgcggcggcaaccaggccagcgtggagaacgggaacgcgggccggcggctggcctgctgcgtggtgggcgtgtgcgggcccgggctctgggagcgccaggcgcgggagcactcagagcgcaagaagcggcggcgcgagagcgagtgcaaggccgc

SEQ ID NO: 332060 - DNA, 609 bp, Homo sapiens
  chr4:24914265-24914874
  hyper
aagtgcaggaggagcggcgcacctggcggggtcgcgcgggtgcggcagccgcggccacttggagtgcgcgcccccctctcgtccctcccagctcggcctctctgggggcgcgggcccggggctggcggccgctcggcccggcccatcccgcctggccggcgccgcggcctcacctcgctcaccagcccctgccagtcgctctcagtccggtcgccgttcatggcctcctcctccatgcgctggccggcctcctggacccccgccgcctcctcctcctcgcgacgtcgcgtcgccgccgccgcccgggccccgcgcggccccgagagggcccggcgcctccgagccgctgcgccgccgcctctcgcggccgccagcgctgttgactccacgtcagcctccgccggagggaaagggaggaggggcgcggccgccggggccgcagacacagcccgggccgcagccgagccccgccgggcccgccccgcgccctcagccccgcgacctcgggctccgcgcctcctgcccggcctctaggcaaggggaagccagggtctcagcctacaggtcactccggacccctcagcgctctccgcgcgggaggcgggcccc

SEQ ID NO: 332061 - DNA, 613 bp, Homo sapiens
  chr4:25031950-25032563
  hyper
cgtcctccccgggggccaacactccacccacgtcccccacacaaaggcaaagaaggggcctggggagtgggtcagggtcgcgctggcccggcgccagaggcaactccctcgcggcggcggacgcagggtggggcgggacgggatgggggctggaggggtcccactcacagggagctgatgtcgcccggcacgatcctgggcacccaggaagagcccacgcagatgatagactccttggtacagctgcaagtggcggggcagcgcgccagccgcctcacctgcgcgctccgcggtatcaggcacgcggcgcccagcagcagcagcagcagcccgagcgctccgcagccgcctctccgcagcgccatgcccggtccccgctccccgcccgggccccgacccccaccgccgcgccgcgcgctcggacccggcgccgctgcagacgcgggcgccgctcgctgctctgccgccgccgctgctggcgaggactagggagccgcgggtgtgggaggccgagccgcagccgagcagcatgctggccgccacccccactcggcgcccccccacccgagcccgggctgctgggcggccgccgccgctgcgcccgccgcactcg

SEQ ID NO: 332062 - DNA, 112 bp, Homo sapiens
  chr4:25235368-25235480
  hyper
cgcttttggttgcaggagggcacctctttgaaaattactcaccttcccgccctccactgggagtaaagcgagctgtgcccagcttctccccgcgctcacggaagcaggtggc

SEQ ID NO: 332063 - DNA, 757 bp, Homo sapiens
  chr4:25656789-25657546
  hyper
acacgcaggtgacacgaggcagagcaggatgtgaaacgagcgcagtggtttgccaaacccgcagcaggcttaggacggagtggtgagaacagcccccttccttttcctcagcttgacggtcccagcctttcccattgcggacctagagcccagactcccagggcagaaagcgccccacagactgataaaggtgaacaatccaggctttgtttccaagggctttatccctgactttccaactggcttttatctgtgtcttcacgtctctgacctcttgagcctcacaggagctagactagaaggttcaagttcttgaggagaaggcaggggcgggagagccccacttgcgggaatctcgtgcggaccgagtcggggcgggagagggcgcgcaccagccaggctagggcgcgcggggcgccgaggggcgcggggccgtttggggccgttcgggccagttcgcgcggcggggcccgtcggagcttttctctcggcagcctggctggccgcgcgtcttctccgcgcagcgggcgaagtcgcgatgggttcattaaggcggcaggtaggcagtgccccggcggcggctgcggcaggcggtcctggaatgtgcgaggggcgtgatgacagcggccagcctctttgcgcaacaccttcgccatatatacccggggcgctgcgctccacctggccgccgcctccagcccagcacctgcggagggagcgctggtgagtaccgccgccggggcaggggcgcttcctc

SEQ ID NO: 332064 - DNA, 609 bp, Homo sapiens
  chr4:25863681-25864290
  hyper
cggtaagcgtgttacagagaactagatttctttccggcatccgcaacttggctggagtgaccaaggaggagttgaagagcgctggagatgcgaggtgcgttggcagaaaactgtccgggccgggaggacccggtggaaactaaaaggagggtcgacgcgggtggcgggcgccgagagtaagaggcgaagttgggcacgggaaggaaaggagctgcgagaagattgagagggaagcccaggaggggtggggggttggggggtgctggagactgcgcgcggcggggcggggagcgaactccgggcggcgaggctcccgggtggagtcgaggacaagaaggggtctcgagggtaacccgacccgggtctagagagagtccaggagggaaaggaatgagcacgagcgagagagcagcttggcaagtccggtccaagcgcccctctccacgcccggggtacctatcccaggtgccgggaacgcccggggcgcagcgacgaggaagagagaaaactagcagcggcgtccccgccccgcgtggcgggtgtccccggccgcccccacccgcgtccccggggccccgcgcggaggggaagacccgggcagggtccggc

SEQ ID NO: 332065 - DNA, 209 bp, Homo sapiens
  chr4:26030420-26030629
  hyper
cgtgcggatgcagaggaggggcagcgtcggggcggcggagtccgacctcgggggattcaccctgagggttacaggcaaggccgctccaggcacgcagcacctgccgggcgccacccaggagggggcagcagcgccattcgcaaagccggcccgctccgctccgctctcaggctcagggctgcggagacaggaatcgcagcttcccctgg

SEQ ID NO: 332066 - DNA, 598 bp, Homo sapiens
  chr4:27086319-27086917
  hyper
cgtttctttctctccttacgcttatcggttttaacacatgccatttaccacctcccacccgctgattagggggctggaaacgggcttacatcactgtcagggcaggagaggaaaaattgcaaagtaaacggcaagatgttgccgcgatagcgagcaggaaaatctgcagtgcttaggagaatgcgggacccaaatgaaattccgcgtctccccgcggcgggtgccgcagagccaccggcgaggggcgggcgccaccacgtgactgattattcaaatggaccgatgattaactcggtttatattgatgcaaataatcctgccggagcctgcaacggctaatgcattttggaactgtggtttttccattgatagcacaaaatattgtagaggaaagccattttcataatattaataatggaattacagaatcaggtcacttaaaggaacggcgctgactcagcgacagcagcgtggaggttgaatgtggggattagcactgagcaaaacgaatacaaaccttttgcagcgatctcattgcataaaacgcacatccccttccctttttctttttaaaagaaaaagagcttcagaaatgacc

SEQ ID NO: 332067 - DNA, 810 bp, Homo sapiens
  chr4:30720964-30721774
  hyper
cgtcgtctgagagggagggagaaggagaaacctatcctgacaccagctccgaaagctctcacgcgtgaactgggcattagtcaagggaggaggaaatttaccagcccgagggagggaaaacaagtcccccagagaagacggcggtactcgctagggagggggactgggctttggcttaaagaggactggctgggattgggcacactttgagcggcccctggagctgaggctgggctttcccgagcgcggcggctggctgacgctccctcccgcctccttatcccgggccctcctccctcgctctctcctagtgtgtagtttcggcggctcggctgctactgccgccgccgctgcagcagcagcgtcagggacaagcctgatccgtgagcgagcgagcacccagcagcaaccaccactttgggcaacttgcgggtttcctgctcgcgggtagcgaacgggagattcccactagcggttcagtgtctccgagccgctgcagcccgaggggcggcgggagcgcccgcaccagactctcccagacgcgaaaagggacgagacaactgcggaattcaccagccgtgccagggcacttccgaggccacaaccgactgacactttttctccccttggcaaactggatttttttttttaagctacttggcagctgtctctgactccacctccccctccacccccgcccgaaagcctttggcttttcttcggaaatccagacagaattgggcatctttgttaattgccgttggggacgcccggccgtgcgctttcgccggctaacgtcgcctgtgctcc

SEQ ID NO: 332068 - DNA, 798 bp, Homo sapiens
  chr4:30722023-30722821
  hyper
cgacatgcgggccgaatgcaggtgagaaaaggcacggactctgcggctgcgaacccaaacttgggcaccgcacggtgcgcactgctcagccttcgcccccgtgggcgaaaggctgctgcggtttcaggcggctgcttcgtgactaatgaccttgcgcagagttgttaagaaaaaagagaaacccgcgctctccggggtgagaagggactgactctgggcgtctctgaagatggctcgggcttctctttggcgcgccggggggaccctgacactgaccgctctgtgacgcgagtagtctcccctgcaccgtgcccgaagcgacgtgccgggggatttttcattctcgatctgttgactggctcccccgctgcatgagcagagtcggagttgagactggcttgttgctggccccagcgcctggtgcaggaagcgactcacgtttgtctgggtggccggagccggagcagagcctgggtttggagtgagtgcctggaacgtgaattggactcaactcgagtagcagcaaagaccagcgggctggcaggcgggggaggctgcaggctcattccccacctcttcccagccccactgcccgtctgccggagcggttctggccccttccgacagagcggggactagagccggggattctccgcccgctgaggggatgactctgggttgggggagcgccgaacccgcggcgcgcagtgtcccgtgaactgtgagtactgcgactgaacggcggcaggcgagcgggcgattagcacccattgcatgaattatgaaacaataactttc

SEQ ID NO: 332069 - DNA, 593 bp, Homo sapiens
  chr4:30723837-30724430
  hyper
cgctggaccgcgagcagcgcgactcctacgagctgaccctgcgagtgcgcgacggcggcgacccgcctcgctcctcgcaggccatcctacgggtcctcatcaccgacgtgaacgacaacagcccccgcttcgagaagagcgtgtacgaggccgacttggctgagaacagcgccccggggacccccatcctgcaactgcgcgcagccgacttggacgtgggggtcaacgggcagatcgaatacgtgttcggggcggccaccgagtcggtgaggcggctgctgcgccttgacgagacgtccggctggctcagcgtcctgcaccggatcgaccgcgaggaggtgaaccagctgcgcttcacggtcatggcccgcgaccgcgggcagccccccaagaccgacaaggccaccgtggtccttaacatcaaagacgagaacgacaacgtgccgtccattgaaatccgcaagattgggcgcatccccctcaaggacggggtggccaacgtggccgaggacgttctggtcgacacccccatcgctctggtgcaggtgtccgaccgagaccaaggcgagaacggggtggtcacctgcaccgtg

SEQ ID NO: 332070 - DNA, 965 bp, Homo sapiens
  chr4:36245423-36246388
  hyper
cggggcagcacagacacccgggcaaattcatgatctctaccgagtaaataacttggtgcctgaaactcactacagcttcttcttatttaaaggtaggggagaggaatggagggagtgtccagctgtctatccggatcctcaccctcccgggtcaaatcccagaagtggagttcttggatcacttaccggcttctggtttcctttcagacgcccacacgcgggagcgaaatccaaggggcggacaccagagccgagcactttgcgctgaggaaatttacccggtgaagtgtcgaaaagccccagcccctccagacagggtcctcccacccccgcgtgggccatcccggcccagccttcccgaggccccgggtactcgccttgcgctcgggtcgcggagttcgaaaagcgaggtgaggcggcgctgggaagctcagcgccggcgtctctcccagccttgggcgctcggtcctcgcccctctgccggaggcgccaggcctcctctttcccggtccccgccggctgtccgcagtcgcctctgctgcctggcggcggccgcgcgggcggcgctgttagtggggccggcgtgtcgcggccgccgcacctggaggcggggagcgcgggccgcggacccgcgctcagctccggaaacgccgagcccggcgcccgcgccttgctcaggtgctcccgcgcctcgcctcggccgccgcttcctctccgcccgcgggggcggggagcaggcgccccgcgcgggggaagccggagctcaacggcgggggcggcccagccggcctccctggttccgcagcatagttgggtgactgactcagaccgccgcgacttggccgcgcctggcaccctcgccacctggcgcacctcggcccggaggcgtcagaccccgctggggaagctgcgggggcgcgccctggagcccagagcgacaggggcattacccaccttcccgggac

SEQ ID NO: 332071 - DNA, 969 bp, Homo sapiens
  chr4:37245693-37246662
  hyper
cggaggaactacccgcggagatccgctcccagaaaggttccgggaccacgcggcgaggagcacgtgaacggcgcagcttggctataaaaaccccgctcaagcgcgcgtggggagcaaccggagcggcaggacgctgccacctgcgccaggagagatagggatgaagcgatcgtccctccaggacgccagagacaatctggagacttgatgctttaaactctccgggtctggcttggggttgtgtgcgtcgaactttgaggctggattccctgcacttgggcagagacgcacagacgcccgagcgtgtggattcccgaaaattctcagggcttgtgtgacctttaggagagttggagggggcgtagtagaaatctcaggctaattgatttcttgtcctccaccacggaggcagacaggagccctcggctgtccacagaggagtccaggaggctcctgcgcacccccgaggcccccgcgcccaagccccggccgtcctctaagccgcaagttatttctgcgcccgagagaggcgggctcggataaagtcgggacgccttctggtacataaagtttcatctgctctcctcgctcgcacggtccctgccgcctggcggccccctcctcccacggcgggcgcgggcggggagatggccgccggcgcttcccggcgcaaacgggcgctgcgcgcgtagccgccgccacgctgacctcccgctccagctggctgctgctcggagccctagcagcgggcgaaggcggaggcccagaagggcaggagaccgccgcgacaggagcccgagggtccgtatggcttctcctcgccggcgggtgctgtgcgccacggagctcgccaaaggcgcttcgggctcggagcggctctgagccgcgccgcctgctgagatcgaccgcctgctgagccgttccgtggagctgcgggcaggaacccgaggagcaggaggtggcggcggc

SEQ ID NO: 332072 - DNA, 657 bp, Homo sapiens
  chr4:37246687-37247344
  hyper
cgatgtggccggccggcgcgggcaccaagctgccctgtccccgagactctgcgctccggcgggcggctttctctgggaacctcacggccctgccctctcacctcgtgcccgccggccgcagcgtccgggtcttcatcagcgccaaccctgaaggtacgtccctcgctcgggtttgcccgtccgtccttctgtccgtcagcgctgcgggagctggagagtgtgtgtccgccccacagcccggtgcgccctgcgctcccttcctccagctaaagccgtggccgccctgagcgcgtgggaatttaatttgaatcactttttttctcccctcgctggccggttttgcctgcacacttctattaggacacccattctccaccccgggttattcccctgggtcaatccaagaaacatccaaggcattagccggcccttctggaagctccattctgccgccgccgccaccaccacctcctgtcccccgcccttttttttttttttaaagcggtttcttctccgagatgaccgcaaacacaaacagtagctctcctccccgaggcgggttcctgagtgcggggctacctccttggccactttttccagctgaggcgaggtgagttccttgagactctcctcctgcaggtgcgatggtgccctttg

SEQ ID NO: 332073 - DNA, 779 bp, Homo sapiens
  chr4:37455036-37455815
  hyper
ggtggtggcgcccccgctgtttctaggtccatgtagctcatacagggctggccatggaactcacagcaggtctaggcggcgaatgccagaaataaggaggaaactgaaaaatgccaagttctcggggtttgggagtacacaactatttgccagcgggtgcatttgttttgtgtatccccgtactccagtcccttgatcataggaagctcccttctctccagcgcaacattggagtaagcaccccggagtttcccgtgatggcaggcggttggcgcggtcgtttgtgctcagaggccaacaagcgcgtggattttctgcttcagtgcgcccgggactgccaccccggccccggggatgtcggacatcgtactccagggtttcgagccctagccccgccgcatcctcggggcgtgcaggtaaagggttacgcgtgtcgggaaggctcacccgcagcccgggccacgtgacgcgcgggcccaatgacagcgctggggcggccgctgcgagctcggcgggctcagggcagcgcggagccgctagcgtctcccggcgcggctgcccgaggccggcgaagccatgggcgccgggaccccgccgccgccgccgccgccgccgtctggccccaggtagggacaatcccccgccccgcgcgcgcaaagagggctttagtcctgcggaacttggctttggggcgagctttcccccacttctctccgagtcgcctacttttaagtttaatttcttgatttgcttttgccctgaaaaaaaaaattagagac

SEQ ID NO: 332074 - DNA, 184 bp, Homo sapiens
  chr4:37978665-37978849
  hyper
cggagagggaggaattcttagatttctgaaagttgtgcgaaacggaccccagaggcctggaaaggcgcgtccccagcctccagggtttcctgcgcagccctgggcatctcggaagggggcgaccccagcatgtcccaacttcccgccagcagcggagcgcgggggtgggcggggtcggctgcgc

SEQ ID NO: 332075 - DNA, 284 bp, Homo sapiens
  chr4:39047105-39047389
  hyper
cggattttttttttcctctccttattacttgcaggcaattttgacctaagtttttaagcttttcttttaaataataccctcgcccccggagtgtggagaataagacggggacttcattttcccgagacccggcgtgcctggtgaaacttttgcatttaggcatttatttcagtgcatgctctgggatcagaagctggcggtaaaagtttgctatgtcagagagtaaagcgttactgtcgttttttatcgcttcatttcattttcaaaaatattcttcagtagtc

SEQ ID NO: 332076 - DNA, 339 bp, Homo sapiens
  chr4:40632148-40632487
  hyper
cggccttgatggcagagattgggggacttgaccagacggacttctctccccgccccaaaagtcacatgcctttcagacacccagaagtggcacctgctccacctgggggcatctgtccgagtcagacgctcggcccccttcgggctgctccgagaaacccagccagaaccacgttggagaaattaggaacctgctgctgaatttcaagccgatcggaaccgccccgctccccttcttccccccataaacaagtcgctggacgaggtgggatctctgcgacccccgcgtgcccggggagagctcccggggcgagctcccggggcgtccttacctggggcc

SEQ ID NO: 332077 - DNA, 305 bp, Homo sapiens
  chr4:41218387-41218692
  hyper
cggtctcttcccgacggagaggaaaacccgcggtggagtccgcggcggcgggggggggggggggggggggggcggggcggcgcgcgcaggcgcagaggccgccaggttgggccgaggaggcgccctgctccacacctgatgcaatcagccttccggaaacgggtcccgctgccgcgctcacccaggaaacacttccgcgccctcctctggccgctgagctcccggggacgggttcccaaactcccccggcccgacttcgccacgggcggtgttctgcgccccgtcggggatacgccggagaagtc

SEQ ID NO: 332078 - DNA, 1135 bp, Homo sapiens
  chr4:41258731-41259866
  hyper
cgtctccacaaccaccagattatctcaccggcgagtgagactgcaaggtttgggggcccggccgtaccactccgcgctgcgcacggggggttcgtacccatctggccgcgaccgtccgtttccccctcgcttggttctgcccctgctccccctgcacaggcctcacagtgcgtctggccggcgctttatagctgcagcctgggcggctccgctagctgtttttcgtcttccctaggctatttctgccgggcgctccgcgaagatgcagctcaagccgatggagatcaaccccgaggtgagcgccaggtgcaccgctacccggagagcgcgaggccgagggagggggagccgagtcgctgatcggttcggttttgcctttttctttgcatttgcctttcagatgctgaacaaagtgagtggcgtctcgcgccgtctctggccccctcccccgcgagcgccgaggcgggggcgcccaccggttccggctgctggcagggaccaagccgcccgctgcgagcaccggagacggccgggctggggcgtgggctgggcgcctttcctgggcccctgcatttagcgggtgactctacgaaaccggtcacggggagacggagggggctgcgccccgtggcgagcgagcgccaggcggagctcccgagggcgtggcgcgggcagcacagactcggctgcacgggcttcgcgggcgccacgtgtgggccgcgctttgtgctgtgtcattgcgccggcccgggtgggggtggcagggcgggactggggctcctcccaggctcgggtgcgggcgcggagggcgcgcgcctcctggccccgccccctggcaggtgcccgcgacccgcgtgtccccgtgcgcctggccgccttgtctcctctccgcaggtgctgtcccggctgggggtcgccggccagtggcgcttcgtggacgtgctggggctggaagaggagtctctgggctcggtgccagcgcctgcctgcgcgctgctgctgctgtttcccctcacggcccaggtagggcgtggggcccaggatgcgccggccgccggcagtgcacgccgctccccagcttgagtcctcgggggctccccgccccgccccctcccctgtaggtgatgcggggcgc

SEQ ID NO: 332079 - DNA, 1565 bp, Homo sapiens
  chr4:41362252-41363817
  hyper
cggcgccgggccaggggctgccccgccttgcccctacctctgcggccaggaaggactgcaggtgctgcgcggccagtgcccgcgcgtcctactgctccggtgccgcagcgcccgctcccccgggcccgggtgcgccccactgggcgcgcgtctcccatatgatgccagacccatccgcccgcccctcagcagccggcggggcgcagggacgtgcggggcggccagcggattccctctatcgggccgggtgtgaacgggagggagacacgcagcgctcgctccgggttatttttagtccgtagctgtgctccccctccccgggggcggagcggccctcgaaggtggggaggagaagaagctcccggcgcctccgcgctcgctcccgcgggtcactcacggcgcgttggagcccgggcggcgccgggaacagctgccgcggcgtcctctagcagcgcgcggctctcccgggacctgcgccggccgggggcggggagaggcggggaggggaggccggcgggcgggaaggggcggggagcgcgctcctgcggcggcgacggcggcggccgtcctcatcccggcgcttgagaggacgcggggctgcgcaaatggcttgtcccgctctcggtctggaagctcttcagcccctgcagcccgagccgccccccgagcccgccttctccgaggcgcagaagtggattgaggtaggtgcgggtggctggcgggcggccttgcactggcgccctgagccacggacccgcgcacgctccgaccgcaggtccagccttgcctccccccaaccgcccccactttcttttgccagctgctccaggtcacccccccgggcctcggcgagccgcgaaaccttagcgctttggcattggaatcccgggcgagggtgggcgtgaaaggggacactgcagtctagctgcgcgcgtgagggcaggaagggatcccctgcgcgtccatccttcctgcccgctggcctcgcaaatctcagctagcgccgcttccaggcgctgccaagggaagcgcagtgctagcaaagcgttgcaaaggcgcaggaagcgcgagcccccagagacttcaccggtgctcgcatttcggggtatcttgcttctggtcccacatttcgccccttgtccccctaccccgcacccttccggagcagagttggcagtgtcttcacggaggcgcatacccaccggagcctcttgctgtattcctggcaccgggtcaggtgtgaggctggcacagtgcgcagggcgggggtagcttgcaagacccacctgcgagcacgcatccgcatagacgctgcccagcctttggcaacccccgcccctctccatcccaaggactgcagggtcggttccgaagtacgggctacccggtctggttggcatatttcacttcttaaataactcgttggcaggccagggaaatcactggagctctcggctctcagtcccggaagcgctcactgggtgatcctgattcacgatgtctatcagtagatgcagcttggtagccccgagctcccgaaatgaactgtctgcggggttcaggac

SEQ ID NO: 332080 - DNA, 370 bp, Homo sapiens
  chr4:41746763-41747133
  hyper
cgtggactgcaattgaccccaatccaaagcagtgccaaaaagttcagtaaaagctggtggaagaagaaaatgccgacggggtaggcgggagcgagggggaaaaaaagagttgcgaaacatgagacacattttgcagagtttgcagatgaaaaggcatctcatggatagggcatctttcagggccgaacggctgcaaagattcggggttgggagttgcaactgtgtggggttccgatgcgctaatggcgggatggtgttcagcgaggtgggacaggcaagggggtgcgagaaagtcactccggccgccgggacagtctgagcaagtcgtcgccgcagtgacccgaacccaaggacacgataggaagggggg

SEQ ID NO: 332081 - DNA, 414 bp, Homo sapiens
  chr4:41747894-41748308
  hyper
cgaagggacccccaagcgaatccgggatggaggtgatggggccggggccgggagcccagccttgtccagggcccccagccgcagccaggcctccagctgccgccgctgccgctgccgccgccgccgctgccgcggccgccgccgctgctgctgcgccgcccttgccgggttcgcctcccgggcccccgggccccgccgcccccggagctccagccgggctgggcccgccgccgccgcctccattcgccccgcagctgggggtggggttgggattgggacctgggcccccagtgctgtccgggtcagtgctcttggcctctttgctctcgtcgtccctggaagagtcagactttttgcccgaggagccgttcttggccgcggccgctgcggctgccgctgcgcgctcctgcttgc

SEQ ID NO: 332082 - DNA, 387 bp, Homo sapiens
  chr4:41750117-41750504
  hyper
cgtctcatcgcaaagtaaataaattatgcctatcattttggcagcttaagataattttgttggcggttcgggtgtgactaggatagtgtaaccctgtaagtgaattacccctccctgcaatcgcttctaacgtgataaattctttcatttgtgtaagcaaatttcgtttggtaaatactaaacacatttccattttcaaatgcaatcaaggcttcctatatacgggcggaaaggcggcttcctccgctgagaaagctgaaggtccttacctgcggcgtacggactgctctggtggtccctgagggtgcccaggctgcaggatcccggcgtgagggaagggcagccggacgtggccccaaaagtggtccttatcgggttatactggaa

SEQ ID NO: 332083 - DNA, 1859 bp, Homo sapiens
  chr4:41752247-41754106
  hyper
cgttcagtgtttgccaaactaagtggtttaattcgatgctagtgccggggagtggatgggctcccgctctcccctgccaccgtgttttattgcgcactaaactgccgcggacgcagtaatggattaaacggggacagcggtcccccagccttgtgcttctttgcagggtgagtttcaggctcgtttcaggtggttgcaaatcctcggggcgtgaggaagcgctaaagtcgggagtgcagggagccggacctaccgaggatcctggtgatagttttatggggagggctgatagttttattgcagttgtatgttgtacaatgcgtatttgataaagaagggcccttggtgaccagtgtgcacttttttgtgcacgggggtgaaatgaaaataaatgtatacaaggttttactgcggcgggaaacaaattgcaacgctctaaatggtttttctttatggtcaccagacaagaggagaaaagggatgcaaacatctgtcttcagtcccctaaacctaaaggccagcaaagacggatgcgaatccaagtgctattacagcggagatttgtctttatttatcccgctctcatgaatatgaatttgcatttgggccgggaggtggctgtatccctttggactccacacatggaatttcccccacgctcatccccctccccaaccacttaagggaggtgggggataggttgtcaagcacaaggctgagatcgtccaagtttcttcgttccctcggatttcgggttgggggatgtgcttgctggttttctgaacgcaactctgccgccgaggcctgcactcaggagatgtggatgtagggagcacaggccggggtgtccaccgccagcccgctcctctgctgtagggtttaagcgcgtttccctgcagaagagagtgaccaggggtggtcaggaggtgatgaatttcggctccaaggcctatttttgacagtaaccaggttcacaccccgcttggcactagagccttactgcacctggggtgtgtctccgcgtggtgcagagcgcgcgctctactccggaagctacggccgggtgccgcgccaccgctgtgcgccctgggcctgatccctacgccctagtcgagtgcagggcagggcaatttcgccgtgggtcctagtttgctgacagttcccaggcccctttagcttttggggaggaggcgagactaggacctaaaaagtgctgggagctcggagtagaggggttcatgttgccagtttctgaggattgctcttaggtgaagatgtggaacttggaaatttaggtggtgcacagaggcacttcctgagcgaaagggagtgttggggtggggagttcagtgggcacctcaggggacctggatgctgacggggcatcagagggtgtcaaaaggagaagctaagggatctgggcgaggtctcagccgaagggcgctggcaagggaagtgcttggccggggagggtgcccggggggcggtcaaggggcaggcccggggctctgtccctcccggtcctggggtcccttcccgtcccgcggttccggaacgcctcgccagccctctctgggcgccccctgctgccgggcgccccctgctgccggccgccccgggtcggggtgccgtgagccttctcgcctttgtaccaggagacctttcagcgccgggcccacacggtcggatgagcaaatgcgcttgacttcattttcccctttgtagaccttgtaggtttattttgttcagtgtcaccatccctcccccaccacccctggcctatcgtccctctgcccgtcttttgtggcccggggtcctgcttctgcttggagatgaaaggcgtgcggggctgggccagg

SEQ ID NO: 332084 - DNA, 300 bp, Homo sapiens
  chr4:41869059-41869359
  hyper
cgaattgaaatggatatttccctcctcggcccagctgaacgaggctcaatgcctcaaagatgcagagctgcctcggtggacatgctctgtggctgatattataattttcataatgcgcttttatgtcgcgccagactcctccggtgaggagcccgcagagctgctgaaaggggctttgagaggcccgggcgcgcggctgctgcgagctgcgcgccccccgccggcctgagtggcaccgcgtgcccctgccggggcgcggctcctgcactgcgggcgcgcaggcggcggcgggctctgccg

SEQ ID NO: 332085 - DNA, 332 bp, Homo sapiens; identical to SEQ ID NO: 230342
  chr4:41875455-41875787
  hyper

SEQ ID NO: 332086 - DNA, 82 bp, Homo sapiens; identical to SEQ ID NO: 230344
  chr4:41882156-41882238
  hyper

SEQ ID NO: 332087 - DNA, 2245 bp, Homo sapiens
  chr4:42152842-42155087
  hyper
tgtaaggctcgggccgagatgctcgggaggggcaggaccccgcggcgcggcagcgtgccacggacggggacgaggggatggcggggacgacgacgtgggcggtgggagcagagtgcctgcgactcccggggcaggaaggaggggcgggatggttccccgcgcccgaaatccacggcgtggcggacgcggaggagccccgagtctcacaaccaaggggtgggaaggaaaagggacagagcgagacagagcgcccccgagaaacacaggcgcacaaaaaaagacagaaggaaaaacggaactgagagccagccagcatggactgcgacagcgtgagagtgcatcaaagaggtggcgaagaaagcactagaaggcaaaggagaagtggagagaagaagaaacaaatggaggaagaaggagaaagggaaaaagcagacggaaaaagtgaagtagtacgagggcgtcccagcggggcggcccgagaagctccagcttcttcccgagcggccgccgctatcccccgggggggcgtctggccccactccggaccacgcccgagcgatcctggtcgccgactgccacagccgtgcttcccggcgcgggatccaagccgcggagccacctgttaggcgcgcgccgtcggaagcccaggcgcggcggcgctggagaatcctctcgaagtttccgggtgcgcggggaggccccaggtgcgccccgacatcccgacacggcccagcacgggtaagtgtcggcggccccccgcttctccttcctgggtcccctcccgctgcccccggccgtggcgggaaggaaagttgtgcggagagttggtacctgcgctgagctccaggctggcgctgtcgctacccgtgccgccggtgccggcggccgccgccgcgcctgggccatacctgacgacagcggcgaacgaagacgacgaggaggcggcgggggacgcgggcggcggctgcgccggagtcctcaagtggccctgggatgtggcgggcgtgcaggacggcgacgacgacgaagcggcggcggcggcccggccgggcccgggggggtaggagctctgcgcctggaactgctgcggcggcggctcgctgctgctgatggagacggcggcgtgcggcgcgaagggcggcgggggcggcgggggcgcccgcacgtgcggcagctccaccagggtgggtcgctcgtagcgcttggccagcgccggtctcttgctggggaacgtcttgaggacgctgtaggggctgcgctgcttgtagattttggggacgctgggcccctcctctgccggctgcatctcttcctccatccggcgcctcggggccggtccctcggagcacgtcccctccccgccgggcgccgggctccgagggtgcctccgccgcctgcccgccgggtctgccctggtgcgcgcgtgtgggagggtgtgtgtctgtgccgtggccgccgccgccgccgcctgtcgctgaggctggcatcgccgagcccccgcgcggggggctgccgcccgagctcctgattgacaggctgcctcgccaatgcctggagggagaaaggaggtaaagagcaagtgtttagggtaatatctgctaatgataatgggggcggggcggggcctggcgccgcagccgcccgcggggtctgcctggcggctccgcgcctccgacggggagcgggggaagggggaaagcgaggacctggaggacgcccgggaactggtgaagaaggtggggatccgggatctggctacggcgagactttagagacccagatgtggactcgaggcttctgcggctgcgggcggggtccggcttccgaaacgagctcgtggcgccccctgcatgaccccaaactctcggggttgcacagaggaggggctagtcgttggggcggggtcgtcagagtacgtgtgtattacagcaagttcttctaccaatcgggaattgctctccgatccttctgaaaagaacctcttgaagatcttggcccgggtggtcgcgcggtgtttacggggctttggggtcctgctttccccgagcatcgcggcctctgagctcatgcggaacataaaagctcgcaaggcgtagaactttttcacgttttcatttgtttcccgtaggggccccgagaacgtgcatgacaccatgatttcccccccattataaagatgagaaaaccgaggctctgagaggttgaagggaattgcccaaagtcagacactcgggagtgtgcggct

SEQ ID NO: 332088 - DNA, 2263 bp, Homo sapiens
  chr4:42398819-42401082
  hyper
cgggcgtgaacggagaagtcgtgctctttgaggttttgcgagctggccttggctggcagaggtgaccggcaatccttcagccggcggaaaaagtgcgagtgtgtgtgtgtgtgtgcttgtgaaaatgtgccgttcctcccagaaaaagtggaaacgtaggtggaaagctcagcacatgttggcgacacctaaaaaccatgttctcggtcctgaacctttagaagcggtatcccaggaacgagtctgagtctgtgcaacagggcacagatgattcgacaaacttcaatgactgcaccgcattcatgcattatatccattgaaaagtaaatccagcgtctccactcgcgcgcccacgtgcgtggataaacgcgggaattcggcagccctcaacgtcactctgcagagatttccgggctgtgagagagttggggtgtgcggcgggggaggggagggtctgatatcttcaggttgagagtcaagtcctgggggagcggcatgggcgggggtggccggggggaggcggaggatggagcgcgaaccagaaagcgcagaggaccctcggcccgcgccgcacccgctgtgattagctccagaggcgcgatccgggagggcggactctttcttaaccctcattgtctcctcctccctcttcctttttaaaagacgccttgcgggcagagctgtcagcaaccccgcggccgtttgtacttggccgcggcggagctgactcctgctcctgtgacagataggggctggggctgagcggccgcctgtctggggtactcgcacgtggggaacaaattcttttcctccggctcctctcgggacccggcgatcgccacaggttgggactctgtgcggcgctggagttggcagccccgggcgctatggctcccttgaggagtggggagggaggtggccggggggttggcgcgcccctcgcgcggggagcgctatgagccgggcgaagggcggcagcgacagccccagcaactgcctctgccggcgcctcccgcaggccctcgccaactcgccccgcgcaccatgctgactcccggcctgcggaactcgtagtgcagcccctgtcgcctccccggcccctgctatcccacgcaggactggcttcggccgccggggccagcagcttgcgacgtgtccctggggaggcggaatcgctgtgcgccctgagcccgggctcagcccttcgctttccagctgcgtcctgctcccggccgcccagggagcccagtggcgatgagggcactgctggcgctttgccttctccttggctggctgcgctggggcccggcgggcgcccagcagtccggagagtactgccacggctgggtggacgtgcagggcaactaccacgagggcttccagtgcccagaggacttcgacacgctggacgctaccatctgctgcggctcctgcgcgctccgctactgttgcgccgcggccgacgccaggctggagcagggcggctgcaccaacgaccgccgcgaactggagcacccaggcatcactgcgcgtaagtgcggggccctcggggacatatccccgcccgcctaacggcggcggctgcatgtgtgcgcgggaggatgcacagacccaggcaggtctatgcgccttcctgggtctgtgcgccagggggacgcggccgggtgggggaatcaagggatgagtgggtggtcgcgtttcagatcatggtcctctattcatttgcagtcccgcttcccgccacttgcggtctctgcgggtcggcccgcagggaaagtttgccagggacagtgaggagcgcggggcttgtgcctggtagccggggggaagacagctggagctcccgggagaagggtagtgcgggtaaagccagggtagacttgggttttggtggaggggccgagggtgtcccattgctcgcccttgtcacttcgggagcttcgggaagtgccgaatgcagggaatcgcgactcttgtcgcgcgctcatttgcagcccttcagggctaagaaaccccagtcactttttttttctgtcttaatgatagcgtttctaagccacggccccgttctgcagacttcctttcaattctctgcatcgaattaccctctccggcccaccccctattgtcacgcctttcagaaatgcccaggtcttcgaggtggagatttagaaacaagggtcgaaggggcttccccgccccctattctcacttcggaaaacacgggtcaaatttccgctgacttcagagcggaataaatcac

SEQ ID NO: 332089 - DNA, 1065 bp, Homo sapiens
  chr4:42657902-42658967
  hyper
cgatgatggcaagatagatttctgaaaaacatgttattccaccctctgcaggattcaagtacaggtttatgggagaggacaaacaaaccttgggatatttacagtcttggctttgacgcgagcaaaatcaaataatatttacagagtgcctgccacatggcaggcaggatgttgagggctcctcggagacgatgaagagtctgggccctcggaaagcttacttgcttctaccccggagcatctgttgctcagtgttgacaaccatggccattcaagagctggccccaggtggagcaaagaaaacagcttccacctggctgaaaagtcagctcagctggccgaagtgagggtttcgggcaaaagggaaacacaaaaacgaaacctcagacgcgagccggtgggactccgctgcaggaggcagaattgcagaagctgtaatgcagggaacccactcggcacccgaccccgatgaaggctccccgcgcttcgagagccaagggactacggatcaaaggatcctgcagccggggaaaagcaaactcgcttcgctgggagctcagatagggggttgcaaaacggtgggcgccggaggcaggggcggcgggctggggatctgctgagtggaaatcgaactggtggggagggaggtgggcagggcgagtgagctcagtgactgggacctaatggtcacactgcggtgcaaagcacgcctcggggctcccgcggagaacacccattcgagggtactggagcctggaaagggtctgcgagtacactgggggcagcgcggggggaagggtcccctaggggccgggcgcgacagtcggactgccgccggggaagaggtaggatgcggtctcttccaggataaacacacacgctcacacacacactcgcttcccgaccccgggctagccccgagcctcggcggccccttaccttcggcgcgcgagcggatctccgacacggtcctccgcatggtgggcatcgcggcggcggctgcaggtgggtcctcagcccggactctgcacctgtcacggcgtggtacacgcgggagacccggct

SEQ ID NO: 332090 - DNA, 1355 bp, Homo sapiens
  chr4:44449386-44450741
  hyper
cggaaatatccgaatcggtgaaatgtaaatcgtgtctactgcataagggaatcgtgcagggagagccgctctctataaggagttaaccagcgcctgccccggacacccccgcggggcctccagcggggctcaaactggcggcggctcagcagggggcgaggggtgctgggaaacgccggggctgcgaacttacggaagaaaatgtactcggtgtagctgctccagatcttgtcgtcgcggtactggttgacgaaggcggcggtgcccgaggagttacacgccaccatgtggaagccggcctcggacaggcgatcaaaggcctgctccaagtaggtgaacttgaggtagaagcgggacgtgtacttctccggctgccggtcggggtcgcggctctcgttgagcgtgtccccgaagacctccttggccagcgcgatgcgcccgcacaccatgatgcgcgccacacgccggaatttggcgtcggcctggttgtcgcgcacggtggtgtaggagccccggtagcccagcgtgaggaagcccgagcgcttgtcctgcgcgccgccgccgccgccaccaccgtgcgctcccgggcccgagggcacggcggccgccgccccgcgcagcagcagcgcgtcgctgctaccctgcgagacgttgtcctccaggtcgctctggcagccctcgtcgttgagagagttctgcttggtgaccttgggcgacagcagcttgaccaagtcggtgagctggaaatactcggcctcgcgcagcagccgctccttctcggggaagtgctccggcagcgcgagttgcttgtcccgcagataatccagcacgtacctgaaaaggaagccgtcccggtcgatgaagaagcgcgcccggctgtccctgggcagctcgccccggcgccgggcgccgccacggggactagagggcgagaacatgctggccaaagtactgtccgggacgctgagcagcgtcgagtgcttggtcacataaacctggccgcctacgttcagctccactacttcagggaagggcgagggtgcgcagggccccggggcggcggcggccgacgcgccgggcgagctggacgaggaaaccatctcgctaatgggcaggatggtgctgccgccgctgcccgtgtccttcagagccatagtccccccgccgccggcccagtgacccgagagagctgcactttctcgttcccggagcccgcgccccagccctccgcgtgctcctggcgctctgcgccctcggactgggcggcgcgttcctccgaccggggcggccccgctcagggttcggggcagcggcggcgtcggcggcgcccgagctccatcggaggagagacgcgc

SEQ ID NO: 332091 - DNA, 1499 bp, Homo sapiens
  chr4:46391158-46392657
  hyper
cgccacaaccccctcaaccaagaccacctccgcaaccacagcgggaaaagctaggggcaggcagcccacttttgcaattactctacattacagtgaactgcggtcctcacgtcttcttttcttcactccccttaacaaaataaaataaataatttcccttcctgcccacccacggttgcccaagaccaagtcttagaggcagccgggttccgatcaagtgctgcgaaacgacgcgtttgacagctgctctggagccgaggatcacaataagagaaggcgcgtgaggctccggcagcaaacaccagccaggcaggcagcggtaatcacagtgagcaaagttgaagactataaaagagccaggctaacgtgctgccgagcaggtgtcctggattttattgtagttgcaaatatgcttctggtgataagtatcgaaattattttttaagtgcgctggggaggagggaggtgcgggaattgagcctcctccgtttccagggagcctctgaaagtggggtggggggagatgaggcatgcacgcgaggcaaagacaaacaggaaagtgtctctatcgggaccaacgtgtgcgaccctacctgaaacggcaagcagaattcggtgttttcttccttttgccctgatcttgacgagataggaaacttgggagagagagagagagagagagagagagagagagagagagagagagagagagagagagagaccgagactgcagcagccaagagagcgtggagcgatgggctggtggaagccggagaggagcgctaggagccgcggcggcggcgcgaggtgtagaaggaggcgaaggcgttcgtagtggcggtgatgggcggaggaggaggaagaggaggaggaggaagaggaggagggggaaaacgatgacaggagctggggccggggggggaaattggggggacgcgggcggaggcgcggtgcgcgccggcggtggcgggcacgagccccgcgcctggaggaggaggagtcaggccgggtaggagggctaaggaggttcccgggaaggcagggccccccctcccccccctcccccccccccacacacacacactcccctgcctcgatccctcgatccctggtaactgaccgtcgcccgcctggcactagcagcggcgcagacccgggcggcgtcgggcgcctgggtgcgctcggagcgccgctcccctcgcccacacctcgccggaggagcggagcccacgcgcagcctcgggctgctccccgaggccgcttgctggggctcccgagaggccccaaggttcctgacagagctgctgttgggtgttggtgtaaagccgggaatgtagtgtggcggtgatgccctagatccctggggccgcgccctgccgcccgtcccccaacatcaccctactgtggagcgacgtggctgctaagaggtaaagaggttccgctcctgctggagggcaaggggactaatcacgcctttacttagtcatcaacgcatccac

SEQ ID NO: 332092 - DNA, 685 bp, Homo sapiens
  chr4:46995372-46996057
  hyper
gaagcgcaggagggcgaaactgaccccggcggacagagcgatcgcgggtaccttcttggcagaaaccatctttgcaacatgccatacttcaagcctgttcacgtttccaggctcttcagatgccctgagcagggtgcgaggagagggcagagaggctcccgcggcgtgcgcacactcgcgctcacactcgcccgcgctcagccagcccgagccgcggtgggcgtgtgtgtgcacggggccaggggaggcggaacctgccttcctcgccccctcctttctcgctcagcgctcaatgtgtatgtagagctatgtataccgctccacaccctttcgtgcccgcgcgctgaaggttctggggttcgtatccgcgcgcttgcgctgcaagactcggcaagtttgttccgactgtaactccggggatgaggaacggggtctctcgcccctcctccggcttcgcagcccccgaccccaagtgggctccccgcccacagcagtgttcgtcctcctacctcctggccccctcccttccgctgggatttggatctaaccaatgaagctcctctgtcatcaggttgtgcgaggacctgtttgtacccagagtcaaggttggaggtggagaaagggcgggtgacggggactgctgggcgtcgggtggtagcggtggtgaggagaggggatcaagtcc

SEQ ID NO: 332093 - DNA, 1055 bp, Homo sapiens
  chr4:47033907-47034962
  hyper
cggtccctacttcttccccttagcaccaatgaacccagcaacatgtcatacgtgaaagagacagtggacagattgctcaaaggatatgacattcgcttgcggccggacttcggaggtaacgcttcatcttttttcaacctgtaacccatccttagttctccttttctgtcaaagataaatgtcaaaaaaaaaaaaagaaaaggcatgtcattttcgtaagcgtgcactataccctgggcacacacacacacacacacacacacacacacaccccgggtccccagtctcaggtggatgaatcctcaggcggaggcgaccttctcccgggccgacacaccctctgcatagtcactgcatcacgcgtgtgcccacacctgttttcccaggcagtcccctgaaaggggtggtggggggagcagggagggagcccgttaagaatggagtaagggctgggaagcccccagaccctccccagcctgctgtcactgagagaatctgttcctaatgtggcccacctccccggcagggccccccgtcgacgttgggatgcggatcgatgtcgccagcatagacatggtctccgaagtgaatatggtgagtggcctcccgaggggcccggcggttcggcttacgcagatgggaaatggacaggtccctttgccctctgcgtttcattggcggtcacctcgcccctggcccctgaggtcccactccgcacccgctccccgctccggcacacacacccggtcgcccctggtttgtaatttcgacacacacgggctactgcggtgttccaggggaaacgtgctcggcactattttgggaaggacgagtgactgttgcgccgtggatctgctggggcggagtctgagcgttactttagctgggtttccctgcgtgtttggatgaggagggcaccatctgctggcagccgggcggcctgcactagggtccccggaccggtggtcggcagccatcacctccccaggcgcggtgctggcaatccccatggccctcgcagtccgcgagcccggatgcaccaaggccctgccacc

SEQ ID NO: 332094 - DNA, 768 bp, Homo sapiens
  chr4:47839282-47840050
  hyper
cgggcgagtgatccccaggcaccaactgggggccggggaaccaagcgcgagcccgggctgtggagggaccgacacccaggcgctcgcagctggggaagggggcttacgtctggggcaggcaagactgctgcacagtccctccagccacccggcgcccgagacgccggcgcagacaggaagctgtagatccccgaggggctggctccgacagctccacctgcagcctcccctgccgccagtgtgcagccaagtccactagatgcttggagggcaccgtgcggaggagggactctgcaggaaaggtggcatcacccccggcatggagaccggggtctccggatcgagccgactcgaacactgaaggaaaccctgcccatgaccctgggagggtctcggacgccgggcgaccggggtggtggtcgggaccagggccgtgcgcctgggaactgggtgcagggcgctgagcgcggaactgtcagagcgggagctcaccggcggctggggaaggaggtggcatcgggcggaggagaggacgggggcgggaggggctgaccctgaattcaccgggactaagaggccatcacacctggctgcggtaggacagcgaatcatcgatcttaccggctttggggacccggctctgcggcagcgctcttccggagcgagggcaggagactgtttcatggataaaaagtctcgcttattcttctgtccacttttatcttggtcgcttttctctcctctacgtgtcccccggggaggcactac

SEQ ID NO: 332095 - DNA, 451 bp, Homo sapiens
  chr4:48271822-48272273
  hyper
cgccgcggagtccggagcctagcgccccagagtccagagcaaagcgccccgccccgccctctgatctccccgtcccgcccccaatcaccccgccccgccccgattgctggccccgtggacgccctaccccgcctctgatcctgcaggcccgcccagtcctcgatcgccccgccccggtcgcttgggccctgggtggcaggtttgcgcagccctgcggcgatttcaaggcaagtgaccggaatgggtcggaagcgcgtcccggtgagtttcagggagcgtcccttaggtttccgggggcggcgttgaacctccctagccccagtcttcccatcccaggagacccgcccctagtggctcgaacgcccctagccaggagagccccgagtagtgccacttgtggaagactacgtgcctgtcggaattaggaaccgcacctccccttccgctaagc

SEQ ID NO: 332096 - DNA, 891 bp, Homo sapiens
  chr4:48485179-48486070
  hyper
cggcagccaggaacggttttttcctgctctggtcctttgtcaggtctttgttccgcccctggctacactcgataacagaaccacttactggcgattcacaggaggggaccgggcggcagggcggggcggggcctgcggggcgcggggccgcggcgcggagccggcgcagcgattgggttcacccggggggccgcgctgcgcggagtgccaggctgcgggcggctgcagacctgggagcggagaccggcccgccgcccccgacgccgccgagcacgtcagcggcgcgcagccggggctcggagaccgacgggcagaacgacgggcggcgactgcggcgaccgcgggacggcgagaggcacgcggcgggaggggaccggaatccgcagctccggccgcgccatggacggcaacgacaacgtgaccctgctcttcgcccctctgctgcgggacaactacaccctggcgcccaatgccagcagcctgggccccggcacggacctcgccctcgcccctgcctccagcgccggccccggccctgggctcagcctcgggccgggtccgagcttcggcttcagccccggccccactccgaccccggagcccacgaccagcggcctcgcgggcggcgcggcgagccacggcccttccccgttccctcggccctgggcgccccacgcgctcccgttctgggacacgccgctgaaccacgggctgaacgtgttcgtgggcgccgccctgtgcatcaccatgctgggcctgggctgcacggtggacgtgaaccacttcggggcgcacgtccgtcggcccgtgggcgcgctgctggcagcgctctgccagttcggcctcctgccgctgctggccttcctgctggccctcgccttcaagctggac

SEQ ID NO: 332097 - DNA, 491 bp, Homo sapiens
  chr4:48492454-48492945
  hyper
cgcctcctccccctgctcggcgggcgcggcctcgttgtccttcccgggctgcgggcggctgacggccgccgagtacttcgacagctaccagcgggagcggctcatggctctcctggcgcaggtggggccgggtctcgggccgcgcgcccgcagggccggcagctgcgacgtggcggtgcaggtgagcccgcgcatcgacgccgcggtacagtgctcgctggggaggcgcacgctgcagcgccgggcccgcgaccccgagtccccggccggccccggggccgagggcaccacgggtggcggctctttctcccagcagccatcccgtcgaggcctggagcagggcagcccccagaacggcgccccgcggcccatgcgcttcccgcgcaccgtcgccgtgtactcgcccctggccttgcgccgtctcaccgccttcctggaggggcccgggcccgcggcgggcgagcagaggtccggggcgtcggacggagaga

SEQ ID NO: 332098 - DNA, 731 bp, Homo sapiens
  chr4:53617162-53617893
  hyper
cggccggggttgggttcctgtcgccgcacgcgtggcccgcccgaaacccgctacaaagtagcggcgtgtctgccctagggaggcaaagcgcaaacttgttaccgcgccgggacctgccccgggattctcccagcggctccgcaggacgcagcgcctgtgcctcgcgcggccctgggacgggcacggccgtccgccccctgggccgccgagggctgctttacccctccgttctggccgcgggcagcagaggagctcggggcgggcaaagctcgaggggacacggggcgagcccagaccctgcctgggagccctccccgccggagaccaaagggcagaaacgcactcacagtgcaactccgagggataaactggccgacgatcgccgccaggccagaagaccaagaagaaggctcgcggcgggaactgaagtgagcggggacacacgagggctgggaagatcctgggttggggcggagcggggctgggaagatcctgggttggggcggggcggggcaccgcagagcggacagccggattcaggcaccaggaacccaccggtcccactggccaggtgctccgagctgggtgattttctcccgctcaagactaggaacatacctgcgctttcggcgcagggaagactctgggcgagggcggggctgggaggagggccgcggggcaggcagccaatcccaggaaacttcgggacgagggcaggacgggggctggac

SEQ ID NO: 332099 - DNA, 889 bp, Homo sapiens
  chr4:53728037-53728926
  hyper
cgctccaaatcagggcgggcggcactaagccggggagcaaacaccgctcccggcccgcccagagcagacgccctaggttggggctgcagcgagtgcgcgcgtgggctgtggagccggcggaggcagcggtccggaatggctctgtggaggctgcgctctcttcctggccccgcagccacagcagctgccccatgctcgcgcggcaggacctaccaggcgcccaccctgggctgcgccgcctcggaccacccgctgctcccctccgcccgctgcctcttctccccgcgcctcacggggctccgcactgactccaggcgcctccgggggcgtcgcgcgcgcggagcggcgccgggggcggggcctcgtgtagggcgccccgggattggctgtggggagagggggcggggccggccgcggagaaaacagccggcgcgccgcgcgagtgcagtctgggtctggagcctgagccctgcggaacctcggcgctcggccccaccccgcccgtacctgcacttatttattgttgttatttcttaccgcggagccccgcagtcgggtcctcccgcccgctcccgcgcagcgctagcattctccagtccctcagtcccttcccgcgcggtgcgccgcagccgaggcgatgcgcctcattcagaacatgtgcaccatcgccgagtaccccgcgccgggcaacgccgcggcctccgactgctgtgtgggcgccgccggccgccgcctggtcaagatcgccgtggtgggcgccagcggcgtgggcaagaccggtgagtcgtcgcgcttagccctgggtctggtcttggacgacccctgacgggagttgaggctgaacaaggcgtggggagcggtgggagctgcagcccgaccgctctccgtc

SEQ ID NO: 332100 - DNA, 1626 bp, Homo sapiens
  chr4:54965627-54967253
  hyper
cgttggtctgagtggccccaggagggccccaagtacaaagacacttcagaccttgtcgaacatcagcatgaaaagcttgacggtttcttagctgggaggcctcacagttctgcgccggacagtcctgaactaaccacctgaatgacctctgccaagtccaaaagctgtggacaggggtaggtgtaaccgtggccagagctgcgctcagggactggacgactgccagtccgtcgcccgcacaatcctgctccaaaccgcaggcctcacacttcaccgcgccgcagccacccctaccacagaggagctggaaacactgagcattcctattaaataagcctccaagtccccacctggtacgctttgcggtggggcgtggggaagagttgggctgcggccagggtagcgagagggggtgggatggaggatgcagcgctgtgatttctcagtaaagcgtggagaaagagggggaggaggccggcctccccgggaaattaacaaaacctacactttgcaaagtctcccccatccccctcccccgagttcttccccgccgcgcgcccgcccctcctcgcggcttctgttgtgactcgggcagcctatcccgagggtgcggagctgccgaggagcctgagccgagcggtactccgcagcatcacgtgccagggtggggggctataaaatacccgagccggggcgccgggcgggggacgtgaggaccagccctctccggggacccctttgttcccagcccagacgccaacacctctgcgtccccaagggcttgactgcccgtgtctgcgcggctcccagggcagagcttagaacactagaggagaggggtcgccgcgaactgccggggcttccagccacccacccctctcgacatgtcgcgctccttctatgtcgactcgctcatcatcaaggacacctcacggcctgcgccctcgctgcctgaaccgcaccccgggccggatttcttcatcccgcttggcatgccgcccccattggtgatgtccgtgtccggccccggctgcccgtcccgcaagagcggcgcgttctgcgtgtgccctctctgcgtcacttcgcacctgcactcctctcgggggtctgtgggcgccggcagcgggggcgcaggggccggggttaccggggccggaggcagtggggtggcaggggccgcaggggcactgcctctgcttaagggccagttctcttcggctcctggggacgcgcagttttgcccgcgggtgaaccatgcgcatcatcaccaccacccgccgcagcaccaccatcaccatcatcagccccagcagcctggctcggccgcggcggcggcagcagcagcagcggcggcggcggccgcggcggccttggggcacccgcagcaccacgcacctgtctgcaccgccaccacctacaacgtggcggacccgcggagattccactgcctcaccatgggtagggcggggtcttggggcacctgcgctccgcgcctttcgcgctcctggagcaaactttccacctccagtggaggaagtgggagcccggggacagggtgaagagagaggacgggcttttagtgtaaccgtagagtcagccacagaagttccacgaaagtggaagtta

SEQ ID NO: 332101 - DNA, 412 bp, Homo sapiens
  chr4:54967453-54967865
  hyper
tttggctaagcctgcgcgcttctccgcttggctcaaagggaggcgatcagatagtgcaagcccccatccctctttaatcctgtgacttcgcatcctgcgcatcgaagacctttatttgctttgcacgtctcttttcttccccgctaagcaaccacgtgccttgaaatgggaaagggatacagatgttcggctgggcttccccgggtgggtccctgaaatgcgtcctggttagcacatggggtgggagcaccttgcccgagccttacctctctaccctctcttcgccggtccgcaggaggctctgacgccagccaggtacccaatggcaagaggatgaggacggcgttcactagcacgcaactcctggagctggagagagaattctcttccaacatgtacctgtctcgactcc

SEQ ID NO: 332102 - DNA, 295 bp, Homo sapiens; identical to SEQ ID NO: 230391
  chr4:54975876-54976171
  hyper

SEQ ID NO: 332103 - DNA, 433 bp, Homo sapiens
  chr4:55094321-55094754
  hyper
cgatgaaggtgaacgcgctcccctcccccgctgtcgctgggaagccccactctgcccaggtctggttcctggagcatcagcgccccctttccctcgccggcaggatcgtttcctcccgacactggcctctcgccttgggcgcagggtttggggctcagctgtcaattccaaggaattcgtagggttcgacccacgcggcgggagggaacggagggagaatcaaaaggcatcctcccccacgacgcggaggcggtggtacgattcctcaaacgcccaagcttgagctttttttgtatgcgagatagaagccagggcaacctcgcccagataaccccgaaaacaaaggcacgaccagataagtgacttcaagggagtaaaggtcgttctatcggagaacgttccaaacctacacagaccctcttttctttgtacc

SEQ ID NO: 332104 - DNA, 164 bp, Homo sapiens
  chr4:56413701-56413865
  hyper
ccagaggagggaagcgaaaggaggtcgggatttatttgctcatttggagatttttcccttgcccttttattaaaaatcaagtgacagtgtaatggaagatggagaatgaagcatcagaaataaaccaggaccctaatttgcatggatttcctcgttggaacaac

SEQ ID NO: 332105 - DNA, 68 bp, Homo sapiens
  chr4:56503489-56503557
  hyper
cgcaccgcccctccccgccccctctcccccgcgccataggccccagtgtgtgaaaaccggcgaaaacc

SEQ ID NO: 332106 - DNA, 958 bp, Homo sapiens
  chr4:56914942-56915900
  hyper
cgccacacgcaggatgagcctcgctgtgagcccaccactgtaacctcagaccccacgagttcagcactccctcgagtcaggctttgcagaagccgggagggcactggtcaaccccacgcccctccttggggcccgctcctggtttctgggcacccctggggaggggagccatctggtgtgcgccactcccggagggcgcgagaaggaagccggcgcctcacgctcagctgtccctgggcgaagccgggcggggcggcggcgcgggtccgagcgcccgaggcgccggcggagcatgtgaccacgccgcgcggggccgggcgcgcagtgccgcgcggtggcggcagtggggagagcaatggaggccacggccgactgagaggcgggtgcgctgctggtgctgctgccgcggcggctgctgatgcggaggctgccgcgcgcagtgccgccgagtccgccgcccgcccgggaccgccggtcgccggccagccgctctgccagccggagcgccaggcggggacctcaggtgagcgcctgctcggcccgcggccggagccagacaatggggacaggggcgggcttctctcctccactcgcgcccctccgggccgggcccccgcagcgccccgggactccaggggacctggccccgggggcgtgggctcggcgcggcgggcggtgggcttcggggcggtgtccccatgtgggaggcgcggaccctcccggaggaacctgcgcgcggcttgcgcgctttggatccccgcaggggaacctgccgccgggctgcaccccgggaacttgcggagaatatgggacctcgcctgccttctcctcttcccgcgcctcgccatcctgtccccaggtccctggctcggtcccgaccgcggcaagggccagaaccagacctcaccgtccgggatcgcggacgccgtccgggctcagccctctccccaccgccccc

SEQ ID NO: 332107 - DNA, 824 bp, Homo sapiens
  chr4:57396531-57397355
  hyper
ttagtccccagatgcgcccagaaggtcctggagagtggtgcgtccccttggcaaccgtacaacgcgcaggaaggcggagtgagatgaggctgagtccggccggggcggggctgtgtgggactagggcggggctcgggggctagaccggggcggggctgtgtagggctggggcggggctcggggcggggctcggggcggggctgggcgcggggggccccggcagcccttatcgtatcgcgcagagagcaaactgcgcctgggcaaccagtcgggagggtgagtcccgcgcgcgacagaagcttctggcgcgaatggagaaccaagagtttctaagttcatctgcgccgtccgaggtgaccgatgggcaggtctcaacagaaatatccacttgctccgaagtcttccagaagcccattgtgctcaggattctcgacactcacagagagcttgaggagtccgaggatcccgagaaacacgagaatcccgaggaacccgaggaggtcagggagcaagaccagagagacgagtccgaggaatgtgatgagcctcatgagtcctatgagccccacgctccctatgcgccccacaagccccgggactcctatgcaccttacgaactccatgggccccatgcagcccccaaactcctcaaggcccgtgaaccccgccagctccgccacacccgtgagccccgcaagtcccgcgaggccaaggaaaccgagttgcttcccagcgccgcagtaatgatctccccctctctgatcaccagagccccgccacggcctcagctgtctttcctgggtggtaggtgttccccttccctc

SEQ ID NO: 332108 - DNA, 1425 bp, Homo sapiens
  chr4:57521376-57522801
  hyper
cggggaattttttaaaaaatcggaaccaaatctccgtggcttcgtgcagcgtgagttctgcagctcgggggacgctgcagtgtgatgtggtggagagagcatgcttcaccgctcctgccatcctgacagcgccctccctcccggcctcagcctcctggttcgccaaaccggaggactgaatttatggctagctggtctctggggcgccttccagctctgacattcccgcctagaatagatcttcccgaaggtttcgcagacagaccagaggggaccgagccgggaaggcgagacagggacaggcgagagacgctgctcccaactcgcagagggagaaagcgtgtatcccgggctgccggggagagtggaaaagaaaggactggtgaccgaggggtttctgcgcagctcccggggaaccacggctggatgggggtggcggggagaccgggcgcccatgggagcggggaagcggggaggcggcggcgggagccatgcagggtctgggcccctgggatgcgggcagaagcgatgggagatcatggggagggcagcccggcgggaggcgcggacgaacaggaccgcccagccgcgagaaggctcagcccaggcaggggtcggggcgcgctgggcgcgtgtggggacgcacctgggtctcctcctcggaaaggcctgcctcggccgcgatgaggcacagcgtggtggaatccgggtgcttgtcgaccttgttgaagttgtactccaggatttccacctggtcctctgtggggccgctcgcggtctccgccgacatggtccctgcgcgctgcggggcagggagaagcggcggcggtgagcgaggcgtggagcgggcgggacgcagcgaaggaaggcggtcgcggcgccgccgggcagccccagccccaggccgccccctccagcggtgccacggccgcgcaagtccccggtggctgcacgctgagcgggggcttacggctgccccccacccgggcctccctccctggactgagcgctgttgcgggctgacggcagagcctagcgtcctgcgcctcccgcgccccccgggaccccttgcaggaactgtatccctgcctgcgacgggggcgagatagatgattccgcgggccctcaccgacctccggctctaaggaaggagtgaaggaagcgcgggggtgattttgagaaatccccttaaaaacttcctcccgaaagggggacctcccctggggacagacttgacagatcgcgagggtgggttcgcccgagtccgcgactagccggcctccggcctccccggtaggcggccttctgtctccgcagtgggttggcgctttggggccctctccaggcagggctgcacaccccacccttcctccaaaaaagttccccgcaagacaagttacttctcaaagttggggagacggaggc

SEQ ID NO: 332109 - DNA, 547 bp, Homo sapiens
  chr4:57687545-57688092
  hyper
cgaagcccaagcaagaactaaagagggtggctgactccacaaagccacccccacaacccccagttcgcgttcctccacctggcaggtcctctggggaaccgccagtaacgggcgcgcgggtaccgtcgccgaggccgcccggagcagggcagggtccgccgccggtctgactcccaaacccgcttttctccggaggtccccgctcgccaggaccgctccgagcgctacctgcgaaggtaactgccaggagcagcagcgccaagcgcagcaccgacagcgccatcctcctcccgcgccggctgtcttgcccctgcggtctgttacctgcgccactcgcagggagcgctcgtgcgacggggcgcggggagggcgggggaaggggcggggcgagaatgggaggaaaagcagcggtaggtggcgagggaagaggggcggcgggaagaggagcggcgggaagaggagccgtgaagggtcgggggagaaccggaaagggctgggaaggagaaaggtagaaggacgggggagggggccatggggaaggaggggc

SEQ ID NO: 332110 - DNA, 979 bp, Homo sapiens
  chr4:57976114-57977093
  hyper
cgcgcagctggcagccgctcgggtaggtggtgccgtcgctgccgcacaccgggtagcggctcttgcacacgcacacgccgcttacacccggaccgccggctgctgccccggctttacccttccgcctcttgcggctcttcacgcactccatgcccggcgcgcagtaccccctgccggcgccgccacccccgcacggctcgccctcgccgcgggcgcacatagggcagcagccgcacgcgtcgcgggtctcgcccagcaggcagcccagcgggggcaggggcgggcaggaggccggctcgcaggggccgcaggtgtccgaagaggaggaagaggagaggggcaggagcaggagcagcagcccagcggcgccgaggagcagggcgcgcagcgacggccgctccatggcggggtgcggtggcagcggcaagggcgcgagtgagccgtgtcgggccggccggcgccttaaacccgccgccccgcccggcctgtccgcgggaaccacaccccggggcggtgagagcacgggggccccgcccgtgccgccctcccggccccgcggggcctgcgcgcgcgctcctgctggcgtcggggggtgagcgggcacccggcgtgaccggcccatgggcgctcggtctcacgcccgcttcgcagagctcaccccgccagctcctgctcggtccccagtcccctgccccgagccctcagggatcgcaccgcagtgcgagcggctcttccaccctctggtttctccccgtttccggtcaatatatttaaacttcttaacaaccacggcttcgagacgatccagggtttcatctattaaatcctccgtgggcctgagacacctgagtgctcattactctgtggtttgggaagctctcttaagaacaagctgttaaaaacccccacttgtggactgtgtccccgctggccacaggcctgctgtggtcttgggtgtcaagcactaaaaggacaaacc

SEQ ID NO: 332111 - DNA, 760 bp, Homo sapiens
  chr4:58029764-58030524
  hyper
cgtgagtcagtgattcccagtgttgctgtgcctgaaaacccaccactaatgtcagcgccttgtgctgttgagttgcacgcggcgcccctgcagtccagggctggggctagcccggcgagcgcgcggcaggcagagcattcccggacgagtccggtagatggtagcattgtgcagccgatgcgtcctctcccagcttgcgtctcatttttccctctccccctttcctgggctcagcggtgaggctcaggtaccggcgccgccctgatgcctactatgccgcgccatctccagatggtccgcacctggcgggtcacgacgagtctcaatccacagcatggggctgactcggactcaggagtttttgtggctccaggcgtaaccgttgctttggataaaattggtccagttcacttgaccaaggagaagtgcagaggaggataaacgtccccatcccagtggtgtcctctcccgactcctttcgtgtagtgagctttatttttagagactcccgcgcctgccagccgctcatgctcgggttccccaagcggaggggctccgcgtgcagtgtgatgcccactgtcgccggcagagggcaccgtcgtcacacactgcgcaggagccggcgcgggaaggcggcggggctgtccttcccggtcagcgtcctacgcgtgaccttgggacccgcaaatgtctgcgccggaggcattgcctcttcccgactatgggggatactgcacggggctcccgatggcctcttcca

SEQ ID NO: 332112 - DNA, 840 bp, Homo sapiens
  chr4:62068155-62068995
  hyper
cggttttggctggagaaagctgccactttcgtgggtggcccgggctgcgctgtgctggtagtgggcactgggcggggggcggcggtgttgcacgaatccgggcggccgcggcgccggggcggggtgggcagagcattggtggtcgcggttggcgggttacaggtaggagagaaggcacctcggcgcttctctgaggagaagggaaggctccaggctgcagcgcagcgtctgagctgccgcgacccagcctccggtcccacgtcggagctcagaagcttagggtgccaggcccccagcactataggtgggtgtgtgtgtgtctgtgcgtgtgtgtgtggtgtgtaggggtgggggcgacctcctctaccagccttacttggcggcggagtcagcgtttgagtgtgtgcgcatttttgcgccccagggacggcagagagatatttgcggggatgccggagctgatgctgctggagctgagcttgcttattgaaatcgcctgggatcctcttaactggaaaatctggtttgaggaggccacgggggcccccgcagggtggcgaggaaaccttgccgtgtccccttcccctggagaggcgcagctcggcgacatgcgtgcggcgcgtgagagtcgctggtgcagcgctcgatgcaccccagaatggccctgatgagaacctcatagggtagtcatctctccagcaggttgaagtaatcgagtccagccagcgtaactcctggtccctggaattctctggccactttcctacctctgatagaaacatgcgctgcttttatttatggccagagatatcatagcagttgggagaactcgaggcttgc

SEQ ID NO: 332113 - DNA, 838 bp, Homo sapiens
  chr4:66534909-66535747
  hyper
cgaaatgtcacttccccacgcgccttaagtgaggcccagccgcacccatccccctggaacgggcctccattccccaaaggaggcctcgacctcctttcccccaaggttttccaccttcccagccccccaaccagcctctgtccacacgcatgttccttgcccagcactccgcagctaacgtcaaacaatgcaaccaaaaaccgcagaggggagcgaaaaggccagtggaaggggacgacaaataccaatttgagatgagactgcgatttagtctgcagcagcagcgtccagcgcgctgagacctgaactcccaggccccgcctagcccctccgccccaggtcgccacggtccccacccccatctccctaccttcgttgctggggctggccaggagggtccggagtgcggcgcacaggagaaggcacgtccagaggggagcccgtcgaggtgcagagtagcagccggccagggacgctggggtgatgggggtgtcgccgccgccgcttgggggccgccggcgtcccgcaccccggggccccgagccccgcatcttctccgagcctcctccggtgccgctgtcccgagcggctcagtccaccgcttcggcctcgcagagcggcgaagggagactcgggagtcctccttgtccccccttggggtcctacgccttctggcacgcggctcctccaaatgtaggaaccacggatccggctgagacagctgaagtttgcttctggctcctctcgcctccccctttggtggggttaaatgaaatattagttctggttgctagtgcagatctggactcggatcaagggtgtcgagagggtcctgggt

SEQ ID NO: 332114 - DNA, 618 bp, Homo sapiens
  chr4:73433670-73434288
  hyper
cgggcttcaccttgagcctccaaagggttgggggcagggccgaaaagaaacagagctgcactcaacttagctttaaaaagaggaggagttgtgcagagggggaggggagaaggcggccggcgcctgcagcctctgcccaggaaaacggagggcaggaaacgtctccagcccccctccccaactgtcaaatcctagcccggccgtggtactcccaggacacgtgtctactggatctctccctgtccggcccaaggacttcctgaaacccccgcctccggctgcccgaaaaaaccgtgagtcagttcggaggagagaaagctccaggaacccgactctggcggcagcagccagagcgctgggatcccggacccagcgtccagaacttcattcaagcgcccagaccgccctccagaaaggggaagcccagatggcccggcgaggatgggaactggctgcggtttgtcactaggaattgttacgaatgtcgcagactggtgaagccctaggtgtgacaagactgggctcccggagtgggagtcgtaacctcccgtgcaactcaaccctctacccccaaaagcccgcacgctgcgcccagccctcaaaacaccgtttctgaac

SEQ ID NO: 332115 - DNA, 828 bp, Homo sapiens
  chr4:74903962-74904790
  hyper
cggggaccccagcggtggcagcggaagcgcggggcgggacttacatgacttcggtttgggcgcagtggggtccgggggaccttacattcacactttggatgttcttgaggtgaattccctgcagtgtctgcaagcactggcagcgcagttcagtgaccacggacgctcctagggaagaatagactcgctgattgagcggggctgtcggcgcggggcgcccaccccagccgcgtccggcccggggaccccagggcgccgggacccacctgctgcgcgccggctggcggccaccaggagcaggagcagcagcgccacccgcaggagccggggattgctgggggcggcggagagcgtggcgtgggccatggggctcagcagacgcgtcgggaagctgtgcgagaagcgggagagctggcggggaggtgcctgcgacccgggctgtgtggctccccaagatcggcgaaccctttttatgcatggttgagactggaaagcccggagcggccgggccagggaaattcccggagctccagatcgatccggagtcccgaaggaaggcgacggccccgcccccggggtggagtcggatacgggtagggggagcccactggtgacgcctacgcctcgccctccagagtaacccccgtgcactctgggactttgggatattcattttctgccccaaattcctggagaggcagtgagtccacctcgctgaagatacagcctgtgaggggggaccttaggtccccgatgaccccccgcgtacggggtagggttggaggaaagagctggggggacccgtgagaaccaggacaggaaaggcac

SEQ ID NO: 332116 - DNA, 382 bp, Homo sapiens
  chr4:75230472-75230854
  hyper
cgcacagctctccaaaggcatgtatggggaacgccagccttggctaaaagactgattcaagttatgtccgtcaccctgagcaaccaaaaccacccactacagggcaggtgaccccacaaagcaaaccaagccatctggtccacgctccccacctcccggagggagatggaaaagtttcgggagtagtccccggccaatcggaaagacattttttcattcctcaaccactactctcaggtgctccagggagggaggatgacttcctgacggtcctcctgccgctcctccctcgggccaattatgaaactctgggcactcttgacctcaccccgttagggcccgggaggggctccctagtataaagttcgcagcaccagacagt

SEQ ID NO: 332117 - DNA, 1344 bp, Homo sapiens
  chr4:75858228-75859572
  hyper
cgccgcggggcccgggtgggaggggtttggcagcggcaggcgcggcggcggcggcggaggcggaggcggccccgggctcgggcggctgggatggagcagaagagcgcggagcaccggagggcacgcagctgacggagctgcgctgcgttcgcctcgtttgcctcgcgccctccactggagctgttcgcgcctcccggctcccaccgcagcccacccggcagaggagtcgctaccagcgcccagtgcgctctgtcagtccgcaaactccttgccgcccgccccgggctgggcaccaaataccaggctaccatggtctacaagactctcttcgctctttgcatcttaactgcaggtaattggcgccatcctcccggaagggcaggtcgcggggtgggccccagtagctagcgcgtggtcggggctgaagctaggagatccggcagtgagtcgccgcgcgcctccgggtgagtgcgcaggtgtgtgcgcacttagatttggggtgacgtgcacctttggcggtcccgaaccgtactgagggaggggacgatggggtccttcctgccgcagcccgcgcccgcacaaactccagctttgtagaacaggtggctgtcttagctgcgtgttcgaacccagagtgggcaacacggactgcgcctcaaggcttctctttcttcaccagggtttcggagcgcactctgccaaagtacgggaccagacttcttgttgccgttgggccctggaagggatgaaaaagccggggaagtgggggtgggaggttcgcatctgggaaggcttcagcagcggctgcgcgcctggcggggctggtttgctttctcgagtcttggcggtctctgatctccggcgtcccttcctagttatgcttaggatgatgtggcactaacagcagcggcccggccttggtcaggctcgcaatcgtcactgggggtagcaaggctaccttctgccccagaactccccaaaaacgtatcccatagaagaaactattaacttggctaaactagcatcctctcccctccccctgcaccacctctgaaaggcttcgtaggagccactctcgggtttcgggaccacagacggcgacgacctctggcagcggggatggggaagaggggagccagatgactgagctcggcttggcggggaccggggagagattcagaaagacgctttgaatctagagttcaggtacctattttttccagaaaacgtctcccgaaaagggacaactggctgtggatatggtgctgctgggaaaagtagcccgactgcgcggccactggcattttcagtttaaatgtgacccaaagtcacatagcgcaaacc

SEQ ID NO: 332118 - DNA, 692 bp, Homo sapiens
  chr4:76555346-76556038
  hyper
cgctgttgtgatttcttctgcggacgcagtcacgagtccagggcgaagcaggcagggaggcaggtgggcctcggtccgccgcaagctcacacttaggaggaccacgggccgcatgctgtcgtcgtcaaggcaacgacctcactctgtccccaaccataggcacaaagtcttgggagacagatacggcccaggtcagaatgcgttcacggcaggcaccaacacctgtgaaggccaagggctagagagcaattagctgggtgagaggcaccacctcccagctcgtaaggcgcccagtacctggagcctgggaacctgcaccgctccaactacccctgggcgaaggcgttggccgcggagctgcaagggggggcggtttctcacccgccccgagagcgccaggcctcccttcttctgattggccgagccgagtcgtcacgagccatgattggctcagggccaaccaccccgccccttcacctagggctcggcccaggttctgctccctgacacgcagaggccctgcgtccccacacgccttggttctcgtcaggaggcgcctttctgccttccccagcgggaggaggcgattgtgatgcccacgcgaagggtaaaggtggcggttatgtaggactgcgaagactatgcaaaatgcgatacggtttccctcatagcatcgccgctggggcaggggc

SEQ ID NO: 332119 - DNA, 592 bp, Homo sapiens
  chr4:77172549-77173141
  hyper
cgctcctcctgccttcttcctttctttccttcagtaaacgttttttgaaacgatgatgagcaaaaaacgcctgatccagtctatggcgcgtttcggtgggaagatgaacacgccttcccagcagagtaaaacgtgattacaccaaggaccggtaccctctcccttccctcggccaggtccacgtccccaggcgtcggagaaggggttggaccgcgcagcggggcgtcagagttgccaggcgcccggggcaaataccggcagcggtggttgtgcggtgtcctagcaacggggcggcagcagggcacacacaccgcccaagcccggacggtggccgcgaagctagggccaccatggcggaccgcaggcggcggctccggccggggacgttggccccggtgcgcgagggcgtgaactgcaggtccaggtaaacactcagcgcccgggccgagggcgcatcccacgcgggccgcgcgggggcgcctggagacccgcgcttgctggggcgggggcgaggggagaggtccagcctgccttccctcctcaatgcttcctgtacgtacaacataatacgctgagataaccaacgcttggc

SEQ ID NO: 332120 - DNA, 862 bp, Homo sapiens
  chr4:77227668-77228530
  hyper
cgggaacagaaagtgtagggacagaagagcgctggagtcttccccgggagggagcccggggctgcagcccaggggcggggagcggggcggggctgggaaagttgagtactggtcgctcagggccgggctccgccggagtgcccggcgcagaaaccgtaaaaggctggagcgggcggggtaggtgtggctctgtgtgcgtgacctgagccccggtcccagtccctgtagtctcctgcggccgcggcctctcagccatgggcgccgtctggtccgccctgctggttggagggggtctggccggagcacttttcgtttggctgctgcggggcggccctggcgacaccgggaaggacggggatgcggagcaggagaaagacgcccctcttgggggagctgcgattccgggaggccatcagagtggcagcagcggactgagccctggaccttccgggcaggagctggtcaccaaaccaggtattcttccccccgtgactccagggcacatctgccagagctttgaggttcatcgaggaagggagcaaagagacaaacccacctggagctttcctaggggcccattcctgcggacgggctctcctaaggggactgggccatccccacgcccctcggtttcccaggctggttggtacgcgcaggcaggtttcttgtctggtcctccaagggccgcgcccttgccgagtccctcagcgcccgcgcctgaggacttggtcctgcccctccggcggggatgagctcctccacttggcggcgcttggtgcagtgcgggcggctgcagtggcggcgccccttcccggcctttggaaaggggggcttaggtttaggggatcctacaagcctcttc

SEQ ID NO: 332121 - DNA, 448 bp, Homo sapiens
  chr4:77610260-77610708
  hyper
cggggggaggttaattaaggcacctttctgattgaatgggcagagggactgagggtgtgtgcttcggtccggtccccttaataccgtaaggacccaaggaccgcggaggggcgagtggagcgcgacgcttccaccccagaatccgttttcaaaccttagggagccttctttgccattgaaatgcaaatccggtcctgagctcccgggccaatccgggaggcttcctgtgggattacctggtggcgagcgagcgccgagccagcgccgagccagcgcggcccctcgggtgcggcgggcgcggggtggactgagcgggcccgggcgggacgagaggtgggcgagcgccccgcaccctcggcgcgccgcgcgggatcagcgtcctccagccgcgctgccccggcccaccgtgcagctgtagccgcggcgcggtggcgcggtggcgcagggc

SEQ ID NO: 332122 - DNA, 830 bp, Homo sapiens
  chr4:77818885-77819715
  hyper
cgcgtcggggtctcggagaaagctcttgaagtggctcagcaaggcagcgttggtcacgcggcccccagcctggcacagaaagtccagtagtgcctcctggctcagctctcgggccatcgctgccttgtcctccgccccagaggtgtctgagtctcgccctcccggggctctccccagccagaggaaaccctggccgggcgagtgtcacctgcgcccggggcggcactagccgcccccatcagccgcggaggccagcgctgcccgcagcccgtgagcgcgccaggagggccgtgggtcccctccgggtggccccaaggctgagtccccgcggcagtctgcgtgagagagggcggctccgaggccgcccctgcgcgactctagcctctcgcaacgagtcctcacagcgaaagttcccgggatagggccgagtcggtttcacctgcgccctggcggcacctcctccctgcctctgggggaagggtcaggcccgcctcctcgtgtccctccgccccctgaggtctcccccaccccctgccacccatcccagaagagtcaggccggagagccagccggtaggtgaggttggcggcgaaccgagccggcagcgaactgctctgcggccggggaagtggaaggcaggtaggcgaccggccgttcctctaagtctccgccacgcaggaaacaaaagcgatagaaggtccgttcctgtcctccggtgctttgatgagttcaggctgaagccgatgggggaggaggagaagctgcaagttaacaggcaatctgagttatctttctttattaacgctgtagaggagtacttcagatttctc

SEQ ID NO: 332123 - DNA, 780 bp, Homo sapiens
  chr4:80993254-80994034
  hyper
cgatggagcgtggcccgcaagaggccacactcccatttcccaagaggccaaaagactggcaaacagtgaataccccaactccccaaagagccaagtagcccggggctccaatcactacccccgacccggctgatctccgcccacacagatccgaacgcgcttgccctttgaaagaagacagcaacagggcacccctccgcgggtttccaacaccactccccggggtgcgcacacgcatctcagcctcagccccagctgatccagtgccgccctcaccaggagaccctggacctccctcgcacactcacttgtccaggacgaagtagagatcaaaggctcttctgcaggagggctgctcctgggcgcgcagcagccccccgggaccgctgagcaccaacagccacagcccggggaacagccagctcccggggctgcgggccggggaccgctccgccaccatcctgcggccgggggcctgagactccctcccgctcgcagtcccctaagctcaggagggtcgcaaaggtggcgggagtcacccggcacgcactctggggtggggggcggcgagcagctgagacgccggcgcctgcggcagcgggacccaccagctgacagggagggagagagggaggtcctgagaggacaaagggagtctccgccaccgccgcagctgccgccggaactcttgacgaatcccagtggaagcgcgatccagtcctccccctcccgattccggagagttcctgcagacaatgcgggcccacggcgacagctcgc

SEQ ID NO: 332124 - DNA, 1870 bp, Homo sapiens
  chr4:81123012-81124882
  hyper
cgtgtgtgtgtgtgtgtgcgtgcgtgcgtgtgtgtggtgtttgctcactaagcagggtcgtccccttacacatgcctggaatgcagccaacgtttccagtttgagttcccctatgtggcgcatctgcgtttccgctgccccaagagacttcacagcgctgatataagtccccaagacgaacaaggcggcggcgtgggcaccaaggaccacgggggcggcggcggcggtggcaaagaccagcagcagcagcagcaggaggcacctttaggcccgggtcccaagttttgcaaagccggccccctccaccactacccatccccctccccggaaagcagcaacccatccgctgccgccggcggcagcagcgcgaagccatccacagacttccacaacctggccagggagctggaaaactcccggggaggcagcagctgctccccagcccagagcctcagcagcggtagcggcagcggcggcggcggcggccaccaggaggcggagctgagtcccgacggcatcgccacgggcggcggcaaaggaaagaggaaattcccggaggaggcggcggagggcggcggtggcgctggtctggtagggggccggggccgcttcgtagagcggcccctcccggcctccaaggaggatctggtgtgcacaccgcagcagtaccgagcctcgggcagctacttcggcctggaagagaacggccgcctcttcgcgccgccaagtcccgagacgggcgaggcgaagcgcagcgccttcgtggaggtgaagaaggctgcccgcgcggccagcctgcaggaggaggggacagccgacggcgcgggagtcgcctccgaggaccaggacgctggcggcggcggcggctcctccacgcccgcggccgcgtcaccggtgggcgccgagaagctgctggccccgcggcctgggggcccgctgcccagccggctcgagggcggcagtcctgcgaggggcagcgccttcacttcggtgccgcagctgggcagcgcgggcagcaccagcggtgggggcggaacgggcgccggggccgcaggcggcgcgggcgggggccagggcgccgcgtcggacgagcgcaaaagcgccttctcgcagccagcacgctctttctcgcagctgtccccgctggtgctgggccagaagctgggcgcgctcgagccatgccaccccgccgacggcgtgggccccaccagactctatcccgccgccgcggaccctctagcggtgaagctccagggggccgcggacctgaacggaggttgcgggtccctgccgagcggcggcggcggcctgcctaagcagagccccttcctgtacgccaccgccttctggcccaagagctccgctgccgctgcagccgcggctgcggcggcggccgcggggcccttgcagctgcagctgccctcggcgctcacgctgctgccgccctccttcacctcgctgtgtctgcccgcgcagaactggtgcgccaagtgcaatgcctccttccgcatgacctccgacctggtgtaccatatgaggtcgcaccacaaaaaggagtatgcgatggagcccttggtgaagcggcggcgagaggagaaactcaagtgccccatctgcaatgagtccttcagggagcgccaccacctctccaggcacatgacctcgcataattgactcggaaaggaccccagctttccacgcgcgcgcaagcacagttaagccacctgcaggaataaacacgcgagaacatccaccgcttccttgcaccccgaaaccctgcacaaagacacatacattcaccgcccccccgcccccccaacgcgcacacacacgtcctctcctcccaggaacctcattcaaatatttaccc

SEQ ID NO: 332125 - DNA, 1357 bp, Homo sapiens
  chr4:81187160-81188517
  hyper
cgctaataacagcaaaaacagccttctccccgaaccgcgccacaccaaaggcttcccaagttgggctgcgaatccctgtttggttttccaacgccgaaagacgtagaagcagtgggatctcctggtgggacgcatttctccaagggctcccagagagaggacgagatagcagggtttacagggcaaagagaggagaacctggaaatcgtgtcctggggggcaagagtgcgttgcccagtcacaagtgtgctgtagaggtgggagaggacaaggacccatttccacatttcaaccctccgtttctatcgctgcccctggaggactcagctgctaacgccgagctcgtttccacgcggctctggtcctagtcggggaatccgggtggccgcgcgacgcgagagaactgctgggatgcgtggccctggtatgggcgcacccagcgtccggggcgcaggttctctcagcccagcttctcctcccactcactcgctcggatctcctccctccttcacatcccccgcccccgggaccgcgaggctccctccccgcaccggccagtgagtacacaaagccgcgggtgaggggaagcttcgcaggcgtgcacggagcagtgagatcactggcgttataaatatcccggtgccagcgcggagatccgctcgggtggcctctctcttcccctctccccttctcttccccgaggctatgtccacccggtgcggcgaggcgggcagagccagaggcacgcagccgcacaggggctacagagcccagaatcagccctacaagatgcacttaggacccccgcggctggaagaatgagcttgtccttcctcctcctcctcttcttcagccacctgatcctcagcgcctgggctcacggggagaagcgtctcgcccccaaagggcaacccggacccgctgccactgataggaaccctagaggctccagcagcagacagagcagcagtagcgctatgtcttcctcttctgcctcctcctcccccgcagcttctctgggcagccaaggaagtggcttggagcagagcagtttccagtggagcccctcggggcgccggaccggcagcctctactgcagagtgggcatcggtttccatctgcagatctacccggatggcaaagtcaatggatcccacgaagccaatatgttaagtaagttactcgctctcctacaaaacccgtcctaggcggccgcggaagattcgggagggacagcaggtattcgccgggacacaggctcaccttcctgagcccaggccactgggaccaagctgatactcagaaacagccgggcgggttgggtggagatgcatctatatggcgtgcgcacacgcac

SEQ ID NO: 332126 - DNA, 188 bp, Homo sapiens; identical to SEQ ID NO: 230480
  chr4:81189699-81189887
  hyper

SEQ ID NO: 332127 - DNA, 478 bp, Homo sapiens
  chr4:81256791-81257269
  hyper
cgccggggggtgggattaacgtccaaagctcacaccggcttcaactgattggcaggaacgaagtgggtggagcctcctgaccctgccctcctgcttccgttgctagggacgcttcggccgaggataccgcaatggatcaggaagaggggctgaaggccttggacaatattgtcactcaattcaacgcctatgaagatttcctggactcgcagatcactactgtggacttgtactacctggaggtaagggcggagcgcggcagagtagccgccgccgcgcgtccctcggtccctcctcgagttcccgcttcgtgggctggtcgccccctggcgctggacagctcagctgtcaggcgccgcggtttcgggaccgcgacactaaagccgctggcgaggtgaattgccgcgtccttaccgccccgcgctccccggtccggacagaacttgggcccctagagtcacccagcgcagaaacgcgc

SEQ ID NO: 332128 - DNA, 86 bp, Homo sapiens; identical to SEQ ID NO: 230482
  chr4:81951401-81951487
  hyper

SEQ ID NO: 332129 - DNA, 993 bp, Homo sapiens
  chr4:81951929-81952922
  hyper
cactaaaaaactcggaccagccgcgccgcagctgctccaatccctggaaaaggcaatcgagcgccctccggaccgctgcgcacagccccggctccgacctggcgcccaaaacagagctagtcctagtccctcgcgcggccagtttggccgggtgttcccaaaaataaagcgaggagggaaggtacagacagatcttgaaaacacccgggccacacacgccgcgacctacagctctttctcagcgttggagtggagacggcgcccgcagcgccctgcgcgggtgaggtccgcgcagctgctggggaagagcccacctgtcaggctgcgctgggtcagcgcagcaagtggggctggccgctatctcgctgcacccggccgcgtcccgggctccgtgcgccctcgccccagctggtttggagttcaaccctcggctccgccgccggctccttgcgccttcggagtgtcccgcagcgacgccgggagccgacgcgccgcgcgggtacctagccatggctggggcgagcaggctgctctttctgtggctgggctgcttctgcgtgagcctggcgcagggagagagaccgaagccacctttcccggagctccgcaaagctgtgccaggtgaccgcacggcaggtggtggcccggactccgagctgcagccgcaagacaaggtctctgaacacatgctgcggctctatgacaggtacagcacggtccaggcggcccggacaccgggctccctggagggaggctcgcagccctggcgccctcggctcctgcgcgaaggcaacacggttcgcagctttcgggcggcagcagcaggtgagtgcgcgaggtgagactcccttcccgcggtcccgccccagctttctcccgggaccccccacagcttccttgtctgccccttgcttggtggcgctgcctagggacctttctccgccctcctcagctgccctctggattcctccgtccagtcacaccccgcgtgtc

SEQ ID NO: 332130 - DNA, 1262 bp, Homo sapiens
  chr4:82135701-82136963
  hyper
cgacgaagcaaagccgggagcgcaagccctgacagcaccgccaagcccctagctcggagcaacagcctccaccgcttctcctcgctaaacctagagaaccctgaggactccccactggggctgagcccctcccgccctcaacagaacctctaaacacaagtagcctttccctgcctccaggagctcacgaaacgctgccacaccgagcgaatgcaacgcgtacacacgtccacactcgaacagcacaagcaagagaccggctgggtgtggaatagaggcgcacatcgcgcaacgcattcacagcatgcacacgcgcgcaccccgaccccgtccctccccgcgcgccctcacaccccggcgcccaagacccccggcccacgaacctcaccagacagccgggtaactttccaggtgcgcagcttgtcacctcggcgcggccgcccctgcgtctcagcgtcctctcccacgccgccctccccagccgcctgcggcgccggagcccagcgcaggtcagctcagccagccccgccgtgcacacggtgcgcagcgtgggcccggggctgccggctcagtcgctccggctacgtgtgagccgggggcgcgggttagcgcgatgcgggcaggagctgcggcggcgtcggtgctgccgcctggctccgcggcgggggccggtgcagaggagacacgcagggagggagggaagagaggagggaaggaggagggagggggtcagccggggctactgcctggatagttgggcgccggcttccctaaaggtggggtcacccgcgcccgcacgcacactagcccgaacctttactcccgacacagccgcagtctgcactttataccccataccctccatagtgaggcaacttaagtagggcgataacatcgtggttgtaagcatttttgttcatgttattatttctatttcaagtgtgtgggacgaggggagaggaaagttcagggaggtgttcattttttccttcccctccctttcctccatccttccagtctgttttcactgcaggctctctccacttcgccttccctcccagagctcaaacaggcgcacgtaccctggacatgccctcctctgtcacaccaatgcctttctacgaagacatgtgaccccgaagcagctcgtcgacgcgcccctcccggactctggggccataacttacatctagtttgccagttcacgtgatgctgggggcaggggttgaatcgagtttcgagggacagagattataccttcc

SEQ ID NO: 332131 - DNA, 642 bp, Homo sapiens
  chr4:82391851-82392493
  hyper
cgaattcatcagggaggatggacacatctacattccgaagagaaaatcgccgtctagacaatctccttgtgttatctgccacacttgtgccaccctcggcagtgtcagaggattaagctacgttgcttttgcctgaactgcgccgatttggttggggcaagacagcaagcagtattgaaatggtacgtccatacacacacacaaaggcgcgcgcaccccagcccccgtctcgcccttttccctggtgcagcacttaagttgttttcacagctcccttagaaagaacctcccttaagctgactgcccgcgaggctcctagatacctctagctcatctgagattccccaggcaggtgacccgaggcgactcaactgagctctggcaaaagcaaggcgactcagtgtctcccaagtttgccaggtgaacaccgaaggatgacagcacatcaccttgtcggtggcgagtatgtgacttctgttcccttgtcccttcctacgagtcagactttagattacatggcactgacaacaaaaataaacagctccccctacacacacacgcacacaaaactggtcaagaagtggaagaatcaacctaggtatgcacacgaaggaaagaagggatgaaaaaaatgatggacgc

SEQ ID NO: 332132 - DNA, 793 bp, Homo sapiens
  chr4:82965102-82965895
  hyper
aagacccccaggcccgccaggggtccctgaggggacacaccctccacctacctcaaacatgggagaggcgcccttgctcggcaacgtgcagcccaggagctcggcgagaaactttgccatatacaagcggtgaggcagggtccctcccgatgcgccgtttctgtcctttccccttgccagagcccgagcgccaggatcctgcccgcagcccgcccgccagccggggccgtggctcggggctgccccgcggctgcggcggaggggctgggccgggcggggagagctcggcggccgcccgccccgcggcgtccagcggtgcgagtgcgcgcagccccgtccgcagcccgagcctccgctctgcgggagccggggcgccgtcgccgcgctagccttttcctctgaatgtcactattaccatagtaaagggaagggccccgccgagggggtggcgggagggccaacggcgcctcaggatgggcgccaagcgtgagcaagggcagccggcgggcgcagcgccttggcgcagacaccggcccgacccacgcctgggcagggccactcttgcaacactgccgggcgggagcagacgccttaagctccgagggagagcgggcggccggggcgggggagggtctgtggatggaagccgccgggctgacccacttccccagttttcccctcggcagcactcacggaggtggaaaggcgggcgcctcgctctgctgactgacccgggagagtcgctgctgccagatgccagtggcccgcaggagctcctgcactggccggcgcc

SEQ ID NO: 332133 - DNA, 855 bp, Homo sapiens
  chr4:83482632-83483487
  hyper
cgcttctcacccgagtccacccgataacgagatgatggggcggcgggtggggacacctgtcaaaggacggggccggggccggggccggggccgcagcgggcgggctggctggcggcactgcggcggcggggaccgaggcgcgccggctcgggcgttcgcaggtcgcggggcagagccggcaccgactcctggacttgccggggagcgtgcgcccgcggagggctcgggcgggcggccccgcgcccgggacgctatgggagggggccgcagccgagcagggccccgcagccgggcggacccagccgccccagccgcgctgcagcccccgccgtccccggtctccgcctgcgggctgcgcacggggccgggccggacgccccctggctgcgcgacgggcccaggcaggggagggggcgccgcgcctacctgctctggtgcggcggggccgctgtcgcctcgaggggctgtgacctgctgcggtggcggcggcggcagcagtagcggcgggtagggcgcttccttcaggaaggggtgggatctgctcacccgcccgcccggccccctcctgccgcgccggggcccgcccccgacttattctggggtccccgctgctaggccttcggggagagttgatcccctgggtctcgggcttctgccacccccccggggcccctaatagtcacccggggcaggagccgggtgtgggcgggcgagccgcttccttccgaagcctttgtggacgcgtttgcctggcgctcctcatccaacaaaaggaaggacagaatcttggatcctccgcctggtggttatttattcctgacctgttgtaaccttctgcctggctctctttcgtcc

SEQ ID NO: 332134 - DNA, 656 bp, Homo sapiens
  chr4:83718793-83719449
  hyper
tctcgccatgggatcggtttgctcaccgagaaacttcaccgagaactgcaaatgggcatagaagattgcggagggggcagggacaggggccttggagaggcaagaggggaaccggtatcttccatctggtgcgcgtaaaccaagactctatcctgtgccgggtctctcctccccggtccaactcccttacttgtcctcatctctgtccccaaggtccgtgacccgcggaggtgatgggggggataggagagccccagggaccgcagaggtgacacaatcgcccgcccgtcctccctcgctgggagccgattcagcctgtgccgagcctctcccttcgcgcgcctctgcgcacagcggtggcaccgcaggactccgggtcccccccggctctccatcgggaagccggcaaatgcgcttcctcaggcagaccgcggcggggtgggggcggggggggggcggaagttgaaatactgggacagaaacacctgcccgtcccaagggacggaaaactggatgccaagggggccgcggcgcgcagcgggaggcgaggggagaccgggggtcgctgcgcaccgcccgcagccgaggggcgagcggcgacctcgcgcgccccagcgcggcctggccacggaggccggggcgcagggggcgccggc

SEQ ID NO: 332135 - DNA, 305 bp, Homo sapiens; identical to SEQ ID NO: 230496
  chr4:84030840-84031145
  hyper

SEQ ID NO: 332136 - DNA, 213 bp, Homo sapiens
  chr4:84457821-84458034
  hyper
cgctggttctcggcttcatccttttaccttcggtcttcggagtgtctctgggcatctccgagatctacatgaagatcctagtgaaaactttagaggtgagtgccgggagggatgcagccagccccacaccgctgcgggctgagaacccgggggtccagttctcaaggtcagtggtcgcgagtcaggggtgtgtgtgcgcgcgtgtgcatgcgt

SEQ ID NO: 332137 - DNA, 688 bp, Homo sapiens; identical to SEQ ID NO: 230503
  chr4:85402785-85403473
  hyper

SEQ ID NO: 332138 - DNA, 789 bp, Homo sapiens
  chr4:85403791-85404580
  hyper
cggtttcaaagtaataaccaagcaaggaagagagaagaccgaaaactaccccgcggaaactagcacagtgtgcctggatgtctgtgtcccgggacctcggggaagagggcccgcaccggtctgcgaattgcaaggcccggccttccccagcgacgctctggtatccgctgtcccctccctgtacctccgcgacccaggggacgcccagtgcaccaggcccttccccggggtcagcggaggcgcagggcgttagccacatcagaggtgcaaatttaccccgggcccaggggaaaatggcgacagcgttcgcggctccacccggggcgcgtgtcagcgttggagagcctgcccggcctgcagagggcgtaacaggcaccgctggggagagccaagcacccctgcgtccaggatccgtagcgccgagctgcaggcccgacctgcagggggcgtgcccggcatgggaagctcaggctacgtctccgaagcttgcgctgaaaacaccagaggtagggaaaacggggagagcgtactgtgctgggctctaccctggacaccccagtttcattctctgcgaagccacgcgctggcagggctctcgggacggcgatacccagggatgatggtacccctggtctcggcgggacctcccgggaacttgtcctgggggagggagcccaactggccacgtactggtagcagcagtgggtggagcgcacaaactccgaggcccgcgtatgcccagcaccccaggctgaggctgcagggccccggacccgggtcccagggacg

SEQ ID NO: 332139 - DNA, 268 bp, Homo sapiens
  chr4:85404934-85405202
  hyper
cggccacggctgccttttcctgccctgaagtggtggagcttctgggaagatccggggcctgtagcgccctttccactgcgagtaggcgcagccgctttacaggttgtgcgatggatacaggtatcgtgtggcagacgtggtgccgtctgggcttaaagccatcgataagcaaactacacaagccagccaatcccgagcgttctaattgccttagtcctgggatcacccacgcagcaagtccagccatgaagcccgcccccacagacac

SEQ ID NO: 332140 - DNA, 2426 bp, Homo sapiens
  chr4:85418198-85420624
  hyper
cgggcggtggagggctcaccgctgccgggcctcactgcttcgaagagaggcagcgggttaggctggcgaaggcggaatggggcgctggacgacagggaggagccgggaaagcagagatgcagtggcctctcctcccctctcctccccatctttctaatccaggccaggcctgcggtcctggccaggccgtttcaggaacagccagggcctcggacgagacacacgtccctcaccgcgttgtggtccacacgaacacacacacaccggctcagcccaggcgtactcaagacttagagagagggaggcgcttggatacagccacgcgagctcagaaaagcgagaatccctttctggaagccctggcccaacctaactggtgtgattccggcgctgtcaaactactggggcgggccacaggatggactgagcggcatgcacaccaggggccgcgacccgggagtgggcagaacaggcacggcaggcaggcatcggggcgcgggtggtagtactcacgaggggtacaggccaggcgtgcgtccctccagggcgggctctgcatcactccgggccagaagatgggcgtccggccaggcagctcagccagcggcttggggtaccggcccacggcggccacggccgcggcgctggggctgaagtagagcccgggcggcggcggcggcgggctcaggctgctaaagcgtggcagtccggccagcagccccgccggggatgaggcggcggctgcggccgcggcagcagccgcggcggcggcagaggcggaggaggcagaggcggacgaggaagaggaggaggaggaaccggagggcgaggcggagggcagggcggcccccgaggccacgggcatggagggccggctcaggatatcgttgatgccgtgtggggtggcggccgagagctgctgcggggggctgccgagggatgagagcccccccgtggccgggggcttcaggccgcctgggttgtgggtgcccagaggcggggagggcgacgaggaggacgacgacgaggacgaggaggagggggggccggcaggcagcgggggatacgcggcagggtacagcggggtcttcatctcggccatgctgtgcagggcggccaggggagggctgctgagcaggaatgcgctctgccgggtgccctccattgcccccaccgctaacatcccacggccacgccggagaccgtagccttgcagcgagggcgctggctggtgccccccgcggggctcagaggagccggaagcgccgagggcgcgagcggagaggcactcggcgcgcccggaggcgagctgccaactgaaccaaaaatgccgctgccgggagttgctcgcctagctgcgcagcagagatgtccaaaccctccacgcgggaggcggcagctcgccgagaaaagcaggcgtcccggcgggctaggcagtcctttcgttccgcgagtcctagattcgatccctggctattctctcttcctcacttttcctagctgttcaaagtgcgctacttctcatcttctgcccccgggaaataagcaaaacaaaacccaggctggctccggagagtttgtagcaaagttagttgccgaatctccactttgaagttggagggtgggggtggcttgctttctttggggaggttcaaaggacgccttgtgcagcccgtggcgctcctctgatcttactgggatgctctgctctttcggtcgcgcggctgattcgcattcgacgctcactgtgcccggggagaaagcgcatccagcccgcgggagatctagcctctgtgcgggcttcctccgcccacgctgccccgggctgctgcgccagaaagggcagtgccacggatccccgcggctcccaggtcctcacctccacccgccttgccctctggcccacggggcactggagttgcaatattgaaaagaaaaagggggaggaaaaacacagaaaaacaaaagactaagtgtgaaaagtctgacggctgggtttcggcgccgctcgtcagtccacttctgcaaacgggcccggcgacccccgccccacccccgctccctctctccctctcactctcagcctttgactctcctctctggcattttcttcgcggcttcccaggcttcggtcttctaagtcctgtcctctggccaaactgaccctctccgcggctcctccgctctttctctcctttcctctctccctccgggcctgacagttcagatgaagctctcaaaggtaataaaacatttgcatcactccctacccctctttagctgggggacgaaagggagggggaagtgggggaccaaaatgagaactttgagggacgtcactccgaggctgcgggggccggcgagccgggcgcaggccgggggcgtaaccaccgtgtccaatagctcgccgcctcgatccttgcgtc

SEQ ID NO: 332141 - DNA, 136 bp, Homo sapiens; identical to SEQ ID NO: 230510
  chr4:85424273-85424409
  hyper

SEQ ID NO: 332142 - DNA, 1544 bp, Homo sapiens
  chr4:85503546-85505090
  hyper
cggcgctgcggttgtgatcggaattgttggccgacgcacctctggacgcccagtgaggcaaaagcatctcctgttttcaaggtgatgacactgggctggaatgccgcggggccaaccagtccgtcctgccagacaagtttctggtccagtgagcctccgacccgccgcgcgtgtcaagctgacaaggccggggaggcgtttgaagcagcagtgttgagcgctgttaacatttagcgggcgtctttgagtagctcctccagccctcgcagcggcccagggactagcctgcaagttctcaacgctcacttccagcccgcgctggccccgcctccgcctcccagctcctcagcctcctcccgccccaccgctcccaccttttctcaggcccccacctgccagcacgcagaggcgggggcggggtcgcgggccgggctcctgacgtcacctcacggggaggcggggctgtgggaaccgcagtgcagcgcagaggggcggggcctgcggcgcgagacctggtgcgggaggcccgggcagggagaagtgtgcggggccgggacaagccggctccgagtccggctccggggggcggggcgggaggggcctgcgcggcggcgggagcccagagccgcgctaaagcgggtcaagcgtcctccttttctccccgccccttctcctcctcctacctgggcctctgcgtggagacgcgcacctggcaaccggaggccgcgtctccgccttctctgctcgcgcctggcgcccggagcctgcccgggacctccgccggagccgcgctcgctgcaggcggcctcgagcgctctctcgttgatgccgttttggaggtgaccggcgcggcggccgctctatggtggggccgcgttagtggctgcggctccgcgggactccagggcgcggctgcgaggtggcggggcgccccgcctgcagaaccctgcttgcagctcaggtttcggggtgcttgaggaggccgccacggcagcgcgggagcggaagatgttggagctgaggcaccggggaagctgccccggccccagggaagcggtgtcgccgccacaccgcgagggagaggcggccggcggcgaccacgaaaccgagagcaccagcgacaaagtaagtggagccgagagaggcggacgccgcgccctggctgggtcctggttggaagcgggacacttgagagcaagggtggggcccgtccagcgtcaggtgaggctgcacgctgccggtgcaccttcctccctgcctggcactgcttcctccttctccagagggggtcgggacccgggatcccagtggcggtgaggttcccaggatgaccgcggccgctgcccgggagaaatgggccactcaacccggcttacagtttagcttcatcctcttccggtcccttcttcaggatctggggccgacgctggaatcaggagggaacctgtcctcctaggggctgcagtgcagttagtagctgccacctcacctctcttttcagtagagggaacaaagttagtaaggactagagacgtgccaccgtc

SEQ ID NO: 332143 - DNA, 1640 bp, Homo sapiens
  chr4:85886808-85888448
  hyper
cgaagggcttccagcgtagggcgtagggggagaggcccgaagccctggagacagcgcccgagggatggaggccgcgctcggctgcgctcaggtccgggtggctccgggagctgagaccccgcaggatgcagcgggggggggccagggcctgatcccctacccctgcgagccagggccgcctacgcccccactgcttcccacaggtaacgtccagccctctcctcccctatcccccgaaatatcccggttccgctccgctccgctcgccgcccgtgaccccgaccccgacccgtccgcgacggcgccctccccaggaggcagcggaggactagggccaggccgcccaccctggcggcggcggcggctcccggccaaggcggaccctggggaggacagcagctgggccgcggcctgtccctagggggagcgggcgcagggccgcgagtgggcagcgcctccgccccgcacgaacaaagcggccaggcgcgccgggccgaggcagcaccgcctctccgggagcgcggggggcggggaggatggcgggggtactcacctgagggccggcggagggcgcgggcgggacaggcccaggagacgggaccgcggcgggccggggctccgcgccgagggcgcacgggctacggggaaggggcgaccggcgcgacgtccgcggcggggcccgggagccccgcgccgcgggccgggggccggggcccgagctcgattctgcggccgcgaggtatgggaaccggtccgccgggccaggcagcggtgctaggcagcaggggcagcgacgccgccgcctttcccttctcctgcccccgtccctgctccgccgcgtcctcgtcctcgctgggtccccgccgccgccgcctcagcctcggcgctcctcgggtttcttctctccatcaaggccgggccgacccgcagggaccatcccggaaagtgaggggttgttgccgtttcccgcagctgttggtggccatctttaatcctcctcctcctcctgctttctccacctcccgctggctgtctgactgactgactggatcctcctctttcccctcctgctcctcctactgagccggccgcagaaattgcagccgctcagcttctaccccctcctgcctttccttcctctttccttacttccttcccttccctcggcttcccgctcttgcctcactctcagcggctgccttcgcccctgtctgcagacagcgccgctggatgctcccagctggacttcaaccccactcctctcagtccctctccccactgccttccagacgcgcctcttccccgccccgcgcccctctctcctctcccacccctgcccctctccgcggcgctcaccctcctcagtcccagtttctgaaaggactcagctgagaaaggacaactgggttccgctttccttaaccctacaccctttagctggatgctgtcagaggcgatggagaaacgcaaaggtgcgttaattttactctagccagagtataaaagaactgcccacgccagctattgtactacgcagcttcgaaactcctgcacgctctcctgtgtggctcccgtccgtgatgggactgtagttgaggagctcggtctcaaatggtgccttccgtcagtgaccttgagtc

SEQ ID NO: 332144 - DNA, 451 bp, Homo sapiens
  chr4:87281209-87281660
  hyper
acctaccagaggagacggacagagggcttggggaatggggttgctatggcaaccgaaaggagcacacatgacgtcaaagcccagagaggtctagggagggggatgagggggaaacagaaagaggaagcgtctatgtgcagctacagctactgtgttttccggtgaaatgaggaccaggcaaatgtaaaggaataaggttcgtcggcagccaacatcagcaactacgacatcaaggcagccagcctgcacaacctgaagaaaagatccattcgatgcagttctggccctttgcacagcagcacggaggagcaaataccagcagagcaaaacaccactggaaatgcaacctctgcttttcaactatctcttgtagtatctctaaacgtcaaacaagtaagagatggtaataacctcagaggagaagcaggcatttgagtgtcgcctgaacccc

SEQ ID NO: 332145 - DNA, 993 bp, Homo sapiens
  chr4:87515033-87516026
  hyper
cgaagagtaagggaggagccagcacttacgcatttttcactctcctcctcactccctagggtcatagttttgattctgaagttagaagtgtgggggtcgtcggctgcattttcaacttggcctaaaagttggagttcaccacactgcaggcgctaggaactctgccgctcggtcaccaacctgagcctctggctagtccgaagaacgcgaaaagccaggcccaaggcactggttgtcatggcaaccggggcgctggtctccctggcgacctcgtccctagggaggaggtggagctggatgccaggcgggccaatgaggtcgaggggagctcggggtgggagatctgcggtcctcccagtgccggggaatggttgagtgacaggaccgggggggcggagccggcgcggctgcccgaggtggagccccagtggtgcgagtagctccagcggccacgctgaggcgagggtgacacaccatgctcacggcccctggagaccgtcgtgctggcgagccgtgctccgtagctccccggtccgcctcggcagcggtcagagtcgcctacaggagttgagccgcccgcgccagaaggttttggcgaagctcttggagaggcgtcgagcacagtagggcggcgggggtgcgttgagcgctcgggggtcaggcagtcggccgggatcgccgctggggagcgtttccgaggcgaggaggaggaggaggagatgctgctcctcttctccccctccccaggctccttctacagctccttcagcccacgcccgcagccgcttgtgggagaagtggtggtggctctcggcgcccgcggcggctgccggcggcccgccccgacgccgcgtccctgcagccctcgcccggcgctccagtagcaggacccggtctcgggaccagccggtaaggacgagagccgccctgggctctgcgctgcatgtgcagaagtgcaaaacaaagtacattgcgctcgttctcttcctcctc

SEQ ID NO: 332146 - DNA, 798 bp, Homo sapiens
  chr4:87813027-87813825
  hyper
cgctgcgccaaaatgtgtctgatcgtggcagtgctgagcgaccaaaggctctgcctgcacaggaaccacccgccccggcccgggcactttgagcagagcaatccttcccaggttttccctcattcaaaacactcagcaccactcccgcgtccccgcccttgcacgccgattcggggcgagtcccctacccttccccggacggacgcgcagggcccgggaggaactggttcccgggacgggtgggggcctcggccgcccacagagcccgcggagaagggaacggcctcagcctcggctccttcccacacctgggccccaccctgcctccgactcgccaggaatgcgctgtgtgcgcggggcttccagggtggcgggtccccgcgagccggcgccggcggcctggttacccgggctccaggggctcggagggtcgcggccggggtactgaggtaagagcgcgctgcgctaagcgcacatggccgcgcacacgcctcggggccgcgccgcaggcacacgcctccttcccgctcgccgcgggcgccgagtctggggctcctcgcgtcacacgggagcctcaacaaagggctttgtggggccctccccacccgccagggaggggacgccgggcccgggagacgcgccccgcggggtccgctctctggtaaccgggccggggcaggccgcgctctcggaatccagccaaccagccagagagggctgtaagccagacctttcctgggaaggacgctttccaatgtagggggctgcatccaagcgatctggacttcgtttgcgggc

SEQ ID NO: 332147 - DNA, 749 bp, Homo sapiens
  chr4:89378198-89378947
  hyper
cgttttccactggagctgcaggccccgcccccaaacagcacgtggggggcgtggcgtcccggcaggggctcagtagctgaggctgcggttccccgacgccacgcagctgcgcgcagctggttcccgctctgcagcgcaacgcctgaggcagtgggcgcgctcagtcccgggaccaggcgttctctcctctcgcctctgggcctgggaccccgcaaagcggcgatggagcggaggtcgcggaggaagtcgcggcgcaacgggcgctcgaccgcgggcaaggccgccgcgacccagcccgcgaagtctccgggcgcacagctctggctctttcccagcgccgcgggcctccaccgcgcgctgctccggagggtggaggtgacgcgccaactctgctgctcgccggggcgcctcgcggtcttggaacgcggcggggcgggcgtccaggttcaccagctgctcgccgggagcggcggcgcccggacgccgagtgagtggggctggtgtgtgagggctgtgagggctgtgaggggtgagggctgagggctgtgaggggcgggcagccgggggtccgcgcctgagggaggagagcccagaaggccgcagacgcgcgcctggctcggatagtttcgccgacggcgcacctgagctgtcttttatcccggtcagtgtcaggcgcggggtgagcgggatactggcgaccagcggatcctccgctcagcaaagtggccggtgcggggcatgcgggcacc

SEQ ID NO: 332148 - DNA, 616 bp, Homo sapiens
  chr4:90228673-90229289
  hyper
cgaatcccttccgcatccctacagagcacaccaccaggctccggtcccccgcgctggccgccaggcggaggtgcgcagggggcgtctcctacctgctctgcccggctccgcggcgcggcggggccactgcctgcgctgtggcgggggcttcccgtcgcatatcccaagcaccgtctctcggcgccacaccgatggctccggcgggcccgcgagctgaggtccttctcagcccggtcccggagcgagctccgtgcgttcaggaactgaaattactatgccaagagcagaggcggcgcgcagcagtcgggcgtagaccgagggggctgcccccaccgcggggctgcagacgccgccgccgcccccgccgggcgcagagccagtttggaggtgagagttcacttgcccgactgttcatccgtcaggcccggggtgtacccatctgtccagcgctgcccagcctgagcatccgagagaggggcgacagctttgcaggcggcggcggcggcagcagcagcggcggcagcaggaggccgagctccgccccctccaaaccccctcccccgccttcccggtcctgggggaaagtgttgcagcccaggctgctgagcgccgggcc

SEQ ID NO: 332149 - DNA, 318 bp, Homo sapiens
  chr4:94748540-94748858
  hyper
cgcactcccgcgccccaggggcggtgcaggagagcgcccggagccagagccagggcgcgctgggcgcaagctggggcgcgcccagggccaatgagcttctgattggctctttgctgtgaatagactaggccgaggctaataggaccggagggggcgttcacctgggaattggcctcccccccttgccaaggacctccctgattgtatggggcggagtggggtgggggtgggggctggaaaggggaagcccaccctaactaaacggaggggcgggaggaggttaaactgaggaagccacgagcccgcagtaaagagagg

SEQ ID NO: 332150 - DNA, 768 bp, Homo sapiens
  chr4:94749495-94750263
  hyper
cgcctggcgggtccagaatcgcccagagccgcccgcggtcgtgcacatctgacccgagtcagcttgggcaccagccgagagccggctccgcaccgctcccgcaccccagccgccggggtggtgacacacaccggagtcgaattacagccctgcaattaacatatgaatctgacgaatttaaaagaaggaaaaaaaaaaaaaaacctgagcaggcttgggagtcctctgcacacaagaacttttctcggggtgtaaaaactctttgattggctgctcgcacgcgcctgcccgcgccctccattggctgagaagacacgcgaccggcgcgaggagggggttgggagaggagcggggggagactgagtggcgcgtgccgctttttaaaggggcgcagcgccttcagcaaccggagaagcatagttgcacgcgacctggtgtgtgatctccgagtgggtgggggagggtcgaggagggaaaaaaaaataagacgttgcagaagagacccggaaagggccttttttttggttgagctggtgtcccagtgctgcctccgatcctgagcctccgagcctttgcagtgcaatgtcccgcctgctgcatgcagaagagtgggctgaagtgaaggagttgggagaccaccatcgccagccccagccgcatcatctcccgcaaccgccgccgccgccgcagccacctgcaactttgcaggcgagagagcatcccgtctacccgcctgagctgtccctcctggacagcaccgacccacgc

SEQ ID NO: 332151 - DNA, 348 bp, Homo sapiens
  chr4:94753232-94753580
  hyper
cgccaaaaagaaaaggaaagcgccacaaactgggtttgcagaaagagtaatgcactagggagcgcaggttctggtctccttaagtaagaaactgcagaaccagctttttactgaccacctgggtatctgtggctttcagcggaagccgaccaagagatgcagagaacgtccgccagctctctgggagaagcgagcaggcggctggtgacactttccagggcagaaataatgcacctgtcccttagataaccttttgcacccatcgagtttgccgtgctcacgataaacatcaggaatcttcgggctgctgaataaatcaagcgattgcttctaacacatttccatttc

SEQ ID NO: 332152 - DNA, 978 bp, Homo sapiens
  chr4:95678830-95679808
  hyper
cgggctgcctccggcccgcaccccgccgctccccaagtcggctccgcactccgcacacaggcggcggcgctggggccgctccaagtgcgttgagaagtgtaatccctccgctaagtacttggctctcagtctccaatcactagtgggagctggagagggcaagtgaaaaaaaaaaattccagaggcagccgaggagcgagagggaaaaaaaaaaaaaaaaaaaaaaaaagtcccgcggtggcggcggcggcggcggcggagcggccgcggcggccagaagttgacggcgcagccgggcgcggggcgcggagtcggcggggcctcgcgggacgccgggcagtgcggagaccgcggcgctgaggacgcgggagccgggagcgcagccgcgggtaaggcgcgcgcggcggggccccgtcccctgcgggtggccgagttcccgagcgcgcgggaggcggccgagccggcgagagccgggcagagcgaggggcggcgcgggacgggtagcggctgggtgcggagctgggcggcggtcgccctaggcaggacggagcgcgcgagggagagggcgagagcgagggcgggctgcgcggccgtggggcggtggcggcggcggggagggggtcaggcggtggccgcctcggctttgtgcgcgggcggctctgccgggaccccgaggcctcgtgcctgcgcaggcgaggagtcggggcagcggcggcggcgggcgggacacgtgcttcgggctgtagggacgccccaaggcagggagtcggacctgcgagcggagggatggggcgggagggcgagctgagggcagtcgcggaatccgggaaatgggagggagcccggcggggcgggggcccagggccagcccaggcgggacccgcaggcacccacctgccccggacgcctcccgagacccagccttgccgtgggggaaagtgcgcagcgggctggtcccggcgccttggactgggctcc

SEQ ID NO: 332153 - DNA, 840 bp, Homo sapiens
  chr4:96470377-96471217
  hyper
cgcctgtgaggaacacacacagacaccgggggtgggggtgggggtgggggttgaagtggggggagttggaggaggagggaacggagggaggaagcttgggcaccgtcaggcgctctggtctccaatctcagtgttctcacgccggcggagagatgtcccggctgtcgctgctgggtggccaaggaggttcacatcctagagtagggcgcacgggtgcgcgaaggcgctcgccaaggaggcgtagagggcgcagcacaactcctctggggggtaaccgggggcgggagcacgcccgcccgccttatgtaagcaaggattgcagggagatcagcgcccaggagaccagctgtgggtttgcccgctgaagccgaggcgagacagaccaggggacgaagcggctgcggagagtggcagcgcgcctgcctcccgcggtgcgccagacctggacgccgggagtgcagcgggcgcgccccgggccactaggctgtgtccagtggagctcagcctgccgcctgccaccttcttcgccgcgccggcaaagcctcagccgaattccctaggactggactcggtctacgacttcgggtctcgcggttgacgaagccggtgcgggctcgaactgaagtccttcttggttggggaagaaggcatgaagcttttgcactgccccagccggctgctgtcctggggttgtcagcgccagtcagactgctttatgttctgagcgcgtatgacccctttgcagtggaacagaaactaaaagctcgacggaaactcattctgcaacagtgctttctttgcgtgcatgttggtggctgacaagggtggtgatgcgatacc

SEQ ID NO: 332154 - DNA, 198 bp, Homo sapiens
  chr4:100729543-100729741
  hyper
cgatggatctaatcttgacttcaggtaaaacagctcccccgcgcccaccaacgcggtattactgccacctagtgatagcatatcctcatcacagaggtcctgcctgtggaagtggaggggaagaggtgtagtaagcacagccagtagggcgaatccacaaattaaatacacccgggggttgggggtggcgaggggagc

SEQ ID NO: 332155 - DNA, 279 bp, Homo sapiens
  chr4:100867923-100868202
  hyper
cgccccccgcgggcccctagggcgcgatccgcatccgtcccggcccaggaccaacctcctgggccggggcgtccgagctgactcggtggtccgcgcacggcgccagcaggctcgaagcggacctgcccgggaggcggacgatagcagccgggctgcccatcgcggggaggggttccgcccgggacccgattgccggcattggtagcgccgtgccctgtgacctccaggcgaggccctcgcagctcaggccaggaggacagggtccgggaaggggacact

SEQ ID NO: 332156 - DNA, 423 bp, Homo sapiens
  chr4:102711772-102712195
  hyper
cggccttttgagaagggatgtaagagcaggcccctgagcagtttcacttcctctgggcgcccagcagagcggagccctggccttgcgggcatgagccccggggctgcgtttcctgagacctggccgcagcctccgcgggtggcaagcgggctggggagagccgagggccaaaggaagagaaaatcgcggggagtctctggccgggagagtccaggtagcgctcggcgggcagcagtgcgcaggcccctcggcttcaaccgccacaatgctgccagcagcgccaggcaaggggcttgggagcccggaccccgccccctgcggcccagcgcccccaggtgggtagtcgcgcattcggaggggcttgacgccgaggccgggctacggggctctgcggagaccacgggccatcgttagacaactgca

SEQ ID NO: 332157 - DNA, 959 bp, Homo sapiens
  chr4:103997179-103998138
  hyper
cgccaacaccttacaacagtaaacagacacgcgcccgtcaccgggtgtacaaacagaaaaggctgggcccctcgctcgcgtctccggtccagcaggcctacagggtacccgccgctggcgctgggtttatttttacccttagtgtctctggggcctctcacctggcagtctccggcgaagtcgaccaggctccgtctgaacgattaggaaaggggctgtgggggaggcggcggagcccggtctagccaccgcgctctggggttcccgattcgcgcatcttcccaggctgagccgggaggctgcgttgactgcagataaacggtctcagggcgcggcaccgcgtgtagtcggccccgcctttcgcacgaacccgctgggcgacaccgcgcagggaggtccgacccgtcggcgccggtacaggctccggagtaagcatgggttggtccggggcccgcagcggcagccccgtgtgccctccgccgggtttcaggtccggcggcgcgggtgcagagccgcgtgcgatgcctggtgcgcgtggcttcccccggaaaggtggcgccaggccgaccatgggcccacgtcccggggcctcggagcggcaccgcgcggtctttcagctgcttatcctccctgggcgggtccgcaggcttctggggccaggaccagcgagctcccgggaaagcttcccggaaagcttacccagagagcgcggacccaggcgccgagtcttcccggagatgacgagacaccgcgagaggagcacagcgcaggctcctcgggactccgcggcgcaggccgggcagcccgttacttgttttatcgttcccgaaaccaacctctaagttgtctatcagtcctccaccttttagctgtacctcttagaagtgtcttctcagctgcggtgggaagataggattctttcttaaggtgaccaattaaatggccggataaaagacttg

SEQ ID NO: 332158 - DNA, 443 bp, Homo sapiens
  chr4:106067046-106067489
  hyper
cggggcggggagaaacagaactcggtcaatttcccagtttgtcgggtctttaaaaatacaggcccctaaagcactaagggcatgccctcggtgaaacaggggagcgcttctgctgaatgagattaaagcgacagaaaagggaaaggagagcgcgggcaacgggatctaaagggagatagagacgcgggcctctgagggtaaggtgggcgcaagcggaggtgtggtgcggggagaggtgccagtgggtggaggcgggggccagagcgagggcacgtgcgggtacactccggaggaggtgggtgcgcgcgggggcgtgtgcgcgggacctcgaagtggtggtggagtgcagaccagcaaaaagtttcaaagggaaatcttagatgtcacgtctttgtccaggcacccgtgccatcccaacctcccacctcgcccccaaccttcgc

SEQ ID NO: 332159 - DNA, 1352 bp, Homo sapiens
  chr4:106156138-106157490
  hyper
cgtctggtgaagaattctgttcaggttccagcagcaatttgcaagctcctggtggcagctctgaacggtatttaaaacaaaatgaaatgaatggtgcttacttcaagcaaagctcagtgttcactaaggattccttttctgccactaccacaccaccaccaccatcacaattgcttctttctccccctcctcctcttccacaggttcctcagcttccttcagaaggaaaaagcactctgaatggtggagttttagaagaacaccaccactaccccaaccaaagtaacacaacacttttaagggaagtgaaaatagagggtaaacctgaggcaccaccttcccagagtcctaatccatctacacatgtatgcagcccttctccgatgctttctgaaaggcctcagaataattgtgtgaacaggaatgacatacagactgcagggacaatgactgttccattgtgttctgagaaaacaagaccaatgtcagaacacctcaagcataacccaccaatttttggtagcagtggagagctacaggacaactgccagcagttgatgagaaacaaagagcaagagattctgaagggtcgagacaaggagcaaacacgagatcttgtgcccccaacacagcactatctgaaaccaggatggattgaattgaaggcccctcgttttcaccaagcggaatcccatctaaaacgtaatgaggcatcactgccatcaattcttcagtatcaacccaatctctccaatcaaatgacctccaaacaatacactggaaattccaacatgcctggggggctcccaaggcaagcttacacccagaaaacaacacagctggagcacaagtcacaaatgtaccaagttgaaatgaatcaagggcagtcccaaggtacagtggaccaacatctccagttccaaaaaccctcacaccaggtgcacttctccaaaacagaccatttaccaaaagctcatgtgcagtcactgtgtggcactagatttcattttcaacaaagagcagattcccaaactgaaaaacttatgtccccagtgttgaaacagcacttgaatcaacaggcttcagagactgagccattttcaaactcacaccttttgcaacataagcctcataaacaggcagcacaaacacaaccatcccagagttcacatctccctcaaaaccagcaacagcagcaaaaattacaaataaagaataaagaggaaatactccagacttttcctcacccccaaagcaacaatgatcagcaaagagaaggatcattctttggccagactaaagtggaagaatgttttcatggtgaaaatcagtattcaaaatcaagcgagttc

SEQ ID NO: 332160 - DNA, 1180 bp, Homo sapiens
  chr4:107956429-107957609
  hyper
cgctccgaatgttgcaagatgcaatggcaaaccgctagcccaagagagctggcccctgcctcttctgtctgaagaatgtgtttgggggttttcctacctgccccaggtttttgcccttcttactgccgccgaatgccagtccttggtacatgcccgcagatcgattggcggcctgaccaggcgtctccccgcccagagaggacttgatggagttgagtttggcccgcgaactgccgatctgtgagctctccaccatcagcaccgcggccagtaggagcaggcagcaggacgaatccttgctccgcatcaacgcggccatctcccggcgagggggtccccaggaagacgcaaagcccggaggggtgggaatgcaaagggagggaggaccccaacacggggcccctcacttgggtcgcgggggcttgcagattgtgttccctcaacccttcctggttcggggacccaggaccctatgaactcagtctcacgcctcaggacagaaattagcggaacccaagcgagacccgcttctccaccaggacaggaagttctgcaataactggaagcaatcaaatgcgaggcgctttctcgccaaggaggcgtgacccaaggtgcaagaaaacccagccctgtggatcgcaccgcttccgttccttcttgccccgcacctccttggtcccgccgggatctcggcggtttaactctcctcttaattgatcaggaggcccgcatcagctccttctccttcaactcagttgcttttctctcctctcttttcctatcctttatgtgtcaaactttgcaggacacagtgctccttttcaaagttagcaggcgctttagtaggggatcaggagacgtccccggaccgaatcctcgagatctgaagagaatcgaggtcccccacacgcgcactcacagttgccccgaagcgttgtcccctgactcacaagagacagcgaatcgctgccagcgcagcgatgcctagggagcggacttgcgctacgctcgccgcgggctcccgctttctctctctctgctctctccccagtcctctttgctttttatagcttcccacagtgaggactttttttttttttttacctccgcccccaattcaagagtgacaaagagtgaaaatttttctctcactccccaccgcttccgcccccctcctctc

SEQ ID NO: 332161 - DNA, 218 bp, Homo sapiens
  chr4:107958408-107958626
  hyper
cgggtctctccaggtccaattcccttcggccgaaggtcgaaggctgctccgggaacgactgggacgcgctggcgcttgggggcgccagtggcagccgttcagcgagccacggaattgctgcaggagacaagcgctgagttcggtgatgtctggtggccaagtgcgagactttccaagcaaagcaagggattgttcgaaagttattgcatttctgcttc

SEQ ID NO: 332162 - DNA, 1742 bp, Homo sapiens
  chr4:109088015-109089757
  hyper
agggtgtacccttgcggtgggtcggctcggcgcacccacagctcccagctgctagcccaggcgctggggccgcagggactgaaccccgcaccgcccccgcagcccgggtgcgcgccccatcggccggcctgctccccgcggcccggctcaccggtggtagggacggccccgcctgccccagcccacgcccgcctccccttcctcccgcctgtggctctgctcgtctccacctaagcctttggtggtttaacgcacttttgcagagacatctaccaagagatagcgtgtgcactttgttttccgtcccacggaagaatttatcagtagcgttattcagccctactcgctttaaagcacggcacccctcagcccaacaaaaagaccgaaggcgaaacattgtgggttcctgcccgcgaaccaaccgttcagccaccgaaccccctaaactgatccatttggaataagttaccctgcccctctacctcccatcctacacacacacacacacacacacacacacacacacacacacacactgcggaccgggggcccagctacgcacacaccccaaaacaaacgagggatctactcgggaccctcagccgggcggccgggcgccttcgttcccttcctccctctctgagtttcccagggacccgccacgcctctcggaactggggcagcggcccgctcacctcgtgtccgttgctggccgggatgatttcagactcgttcaccaaggaagacttgatgtcagctaaatcgccttcctcttcgggatgactgatctcggcgaagatcttttccttctgaggatcgccctcgtccttgaaggggatcatctcgtccgtggcgcagagttccgggtcccccccgccgccgccacctcctccggagagttggggcatcccggcggctctgtaatctccgctccgctgtgggagcacccgcgcaacagcaggaaagacagaggggtaactcaagggtgggggaggaaaggagagttggaagggttcgtgcagcaggacagcgggcggaagcggggcgggcgagcgcggggccgccggccggcagccggagcagctgccgcggcgcccgaatcccggcggccgccgcgctttcccgcttcgcggagaccgacgcaggcgcccgcccccgaggccgaagggcactgggcggcgagggctgcggtagctggcgactccgggggcgtctgcgcggcgcgcgctagacgaggctgccccggcggccaccccgcgaccccgcgtcgccgggatttgcgcgcggagaacgccggttctggagggagcacgcctccccaaagtgcagaggagggtccggcggcgcgtctccgcggaaaccctctccactgtagttaccccggatgccgacttagtagtttgttttccgagaaaagagaggggatctgggcagaagggccccgtttgccccaaaagaaggtgcaaggatcagaagataacgaaacgtccacttcctgaagggtgggaaaaaaagaaaaagaaaaaggagccacccacgctggagatgtccgttttagatcttcttattttcttccctttcgcttcggtttttcttctcgaggctcatttaatctgctagagaaggaggaggagcagaagatgggggccgaggaggaggggaagagaaagagaagtttgccaagaataaagtttttgccggcaagcgcggggactccgcagtggagggcactgcggagtctc

SEQ ID NO: 332163 - DNA, 972 bp, Homo sapiens
  chr4:110223448-110224420
  hyper
cgaaacccacccagacagctcttccgactcccagaggaccgacacctctttcgagggccccaacagtggccgctcagggtccgagggcaacggccgaggcgccacgcggggccgcggctcgccctggccacggaggaccggacctgttgcgcctctgtgagtttgccttatttctacctactcggtgtctttcggcacgccgacctgtttcccacctgcattcagttcaaggcaaaaaggctgtgagagcacgctacagcgcagcgcgaaaggggcgactaaggtggagaagagagaggaaaacgaaataaacccaaggaaccaatgctactcgcgaagccgaagtcgcggctgcccgaaggatctccgcagccccgcgtgcgcgatccttaaatacccttcgcgatgctcgcgtgagtgtgtgtgtgagtgtgtgagtgcgcgcgcgctccgagcacgacgtccctcccccgaccccctcccggcgcccggcgtccggcctgccgctcccgctgctgcgcgccccccttccgaaggcaaagcaggagcccgccttattatcataatgtattcaccttggcccagcccgcgggccggcccggggaacccccaagggaggcgggaagcttgggtgggagcggggcaggaggtctgttattagcataatgtatgcaaatagctggagcggccaccgtgattggagaggagcctggcgacccctccccctgcgcggagtaacttcagcatctccgagggccacctctctggcctgggccggggccgaagcggggtcggctgcgcaagaggcggcaactttggcttatactgactcagcccagcgccccctttttatcccacataaaaatggagaaatggcctccgggaggaagatgtgaagcggcacgctctatctctactgatcttcactcaaaagcagccgcaggagctgttgctatctcgctgtggtgcagc

SEQ ID NO: 332164 - DNA, 71 bp, Homo sapiens
  chr4:110343729-110343800
  hyper
cgtccaccagatggcggtggaagcccaccgacattgtagactacgtaggaagagcgtccagatggaaaagc

SEQ ID NO: 332165 - DNA, 501 bp, Homo sapiens
  chr4:110481822-110482323
  hyper
cgctgcggctgggggtgcctcacccgggccgagatagggtgcggggaccaccagacttcggcctgggagcagcagaataacctgggaggcagtttctgggctgcagctctcggtcaggagcaagtttccaaagccgctgcgccgcggggccggttccctcttggtgatcagtgcccgagcccctaaggagcccggaaacgatgaacggggcagtgaccgtcccgggtgtggacggtcgcaggagagtgaaatttccatcctgaaatctgcgagcacctccctttcccagaaggaagaaaaactcgcgttttgttcagacacccgagagacgggtgaatcatgagtgtgctggtgagtaacagttggcctgacaccgttgtattgtggtctgtggagaaccgtggcttggaggagtagagagtggatgtgcaccaaaaaagactagaagaaggggaaagcgctgagtttaaggaggattgcgatggagcctgacaggagccc

SEQ ID NO: 332166 - DNA, 988 bp, Homo sapiens; identical to SEQ ID NO: 230591
  chr4:111532396-111533384
  hyper

SEQ ID NO: 332167 - DNA, 894 bp, Homo sapiens
  chr4:111536188-111537082
  hyper
aagcccccagacggcggatcgtctgcgcggggttcctgccccaggcctggcgaacctctgagcgctcaaggagcacggcggcagtgcgctgaggccagtgaggcctgggcgcctccgggcccaacctcgagctcgccatttttgaacccaagcggggaaggttggtgctcatgctatagattatgttaaaggttcctttaagcactttaatacacaactagctcagaaatcattaagagacctagagaaggagaaaaaataccctcacactcaccggtaataagtgttgacatgcagcaaaaatcggttgagtggaaccgaggtggtggttgcagcgacggctagagggggacccgtgcaggggcgggaggggcgaggggactgactgcaccggctctgggagctaggtttctctcgctggatgggaaaaggaggtgcggaaaggggcaggcggcctgcgggctagcggggatgagagttgtggggagaacggaggagagagtaaaattattccttttggaagtccaagggaagggagctgaggtgagagaaatggcctctcttaggtcccaagtctccgcccccagcctgcaccactcaagtcggggaagtgacaactcttcctaaacctcgacttccattttttgtttcctgcagattgattgatgtcctcgcgttgttctagttcagcaaccaaactaggccgaggtacacctcttttacccagagctcccaaatcactcaccaacctgcaggagacctaaatcctccgggcaggtctcgttagcgcttccagcccccatccccaaatcccctcttctagctccttccttcccctccgccctttggccctccccgccccctaccaggctgagaggcggagaggccgggacc

SEQ ID NO: 332168 - DNA, 1703 bp, Homo sapiens
  chr4:111542887-111544590
  hyper
cgcagaaagctcagatttccatgcggtttgggaaggctaggaaaagatgtggggattcggttgggcaccgaagttcgccggccctttcccaaaaaaaaaaaaaaaatgcctcttcgcgaagggcatttctgagtggtttcaggcaatttcctaacgagtggagctcctcgggagctgaaagccgagaggaaaacagggacagaggtcggcggcctctgaaggtcctcgaatcaagatgctgggatttttgtgacccaggaaacagaagggaggccagggtacgaatagagagggcggcagaattgctcgcgcccttagcgccccaggagccgggccggtcgagggagaactaaagggatgcggggtagtcaaaattccggctcccggaagttctgcggggagccaggcgaacgaccactcccaccacgcctccccccggaggggctgacttccttggggcgagagggagcgggtggcgcagagcagctgagcgggaatgtctgcagggcggcgcggcgccttacctgcggcctccgggctggaggtgtcggagatggtgtgcacctccagcctgtgcttggaggagtccagcgaccggggctgaccgggagccagaaccgaagccatggctaacggctggggatggtgacaggaagatgaggagacggccgacagcttggtccccgctgctcggtgctccaagtgaagcgggcctttcatgcagttcatggacgagggagcgcgacgctctactagtccttggctactgccccgccgagcccccgtagccgccgctgcccgctccgggtcgcgctctaggcgcggagtttccccgctgcggggagagccaggggacgcaacccccgccgagttctcaagccaagctgcccccgtctcctccggaaggctcaagcgaaaaagtccggagacggaaagtcagcgggcaaacgaagacatgggatgtgggcagaagggcaccactcagagcgtctttagggagcaggcttccaagctccaaagcgaaacaagagtgggcaaagacccccttcttctctccctccctcccccaagaacccctccaataaggaaagctaacgccgaccgcgctctgcccgccccccccccacgcggcagccctgacagagaagtgtcaagagtgacagggacaggtaggtgatattagatcccctgcggcggcagcagccgctgcagccacgacgcggccctctgagcgcaccctccgcaacgcgcacacgcacacccctcgggcggtcgaacaggagccgggccttgccgcagctcagctccaggcacccaggcgagcgacggaccagatctgcggctccgcgcttccctgttggcctaacatcttaaaaccagaggcgggcttcctggtgccgagacgtcactccgccgcggccctccccagccctctccgcctccgcctcctcccagacccttctccgggtgcgactgacgtggctccgcaccaatcaggacgccccgagccgcggtggagggactgtcctgcctgcacctatcagcagtgcggggccgggctactgcctcgccgtgcgcactgggtctacacaggcaagctcccgggaattcagctcctgcccagcccaaggcgatccggcttttagtacgaacccaaaggtgaagagatgaggctaggagtcgaaggcttgggagaagagagt

SEQ ID NO: 332169 - DNA, 142 bp, Homo sapiens
  chr4:111550070-111550212
  hyper
cggacaactggtacaatttcccctgggggtgaaaaaccacaacgcggcggggcacctttcaagtgagctgcagatttgattggcgcggggggtgggggaggggaggggagaatgggatggcggaggtcgggcggaggaaaga

SEQ ID NO: 332170 - DNA, 352 bp, Homo sapiens
  chr4:111550495-111550847
  hyper
acattaggagtccacgtagtatatgctccgcaaacattcgctgattgaatgagaggcgcgggggcggggcggcggagaggggtctgcggccgccaaggccgccagggttaacccaggtccttcgaagaaggttgggaccgagctgctgccgcgtgtgaaggtgtgtgtcgcggctgggggtgccacaacgggccatggagcccacctcccagagggaggaagtctgtgcacaccagcgacttgggtcgaacactttcagcccatccactgggccaaagctatttaacaattaatgcgttcctgggggaggccgggggaagtacccgccccttgtcgggacgcaaagccaggc

SEQ ID NO: 332171 - DNA, 910 bp, Homo sapiens
  chr4:111552989-111553899
  hyper
cagctcttcagggatgttgtcggccccccgcccctcccccaaccagccaaagcaaaccttcgccaactcaagtttcccttgcttgcctcccgcgatgaaccgcgcacccacaagtctgggtggggcgtggctgagagcctgagtgactgagtgggccctggtggtgctgcgcgcagcgggatataacgagcgacagaggtcgctgttggaccacttttccacgccagcctagacgccgaggtttgctggagcgtgcgcaggggatcagaccacagggagcgagcgagagggagagagaggtgttgggtctcaggagtgcagtataatttggggaaaggaattaacgtccctgggacggctgcttcccgtcccacccagaggcggagtgtctaagttcaagcagcaggcgcgtcaggtctggcggcctcgccttcttgcgcttcgcccgaggcccagagtcccggaggcgggtgcccagcgcgcggcctgcgcttccctcccggccttaccattggcgccaggatgctgccgcgggaagaacttgctgctggctgcctcttttcggctctcaggagagtccgtgaactcgacctttttgatttcggagtctttggagaagagacattcaacggccgccggctgcacgcctgggccacgcgcgcgcccgccccacgtgcggagagaggcgtcccggaccgcggccgaaaggagccggggacgggaggagggggaggggcgaggcaggccggaggagaaagagggacaaagagcaaagacccagttagaggaaagagctgacggcatccccgtcccccggaccctctggcaacccggggcaggatggcgtactctttctgcgcctccccggttgccggcggttccagccgggaggagtaggctggggggcttc

SEQ ID NO: 332172 - DNA, 1476 bp, Homo sapiens
  chr4:111557643-111559119
  hyper
cgaggatttgttcctgcagtgttggcaccgagatttaagggaagatacctcgttttaaatgccagccacggtctggcttccctctcgacttcagcaccctgtagattgttagtgtctgtggcgggggacgaaaggaacagggctttgcaaggtctgtttgccgactgcgttaccttgggcgaaacttagccccaaaagccacaaatcacctacggtgaagattctccgaagtggaacaaatttccagactcgcattatctcacatccctgcgggatagatggcctccacttaccggctaccgggagagagctgctgtctccgcgtcccactgcttcccggggcgatttccagcgagccgagcctccggctgcacggcaagcgcccgaaagccgggcctgagaggactgcagggctcctgagggtgccaagttccgaaggagtccacgggtgcactggggcctccgaaatctagccgccactggcagtttctttctgctcctctccagctttctcgctcggtctcgcactctctctcctctccctccctctcatccctctctcttccctctgctcctactccgtgtggggagtgacgtgacgtcagcagagattccaccaaactccactgcacagtggcgcgcgggcggccggccgagcccggctgcgcggctggcgatccaggagcgagcacagcgcccgggcgagcgccggggggagcgagcaggggcgacgagaaacgaggcaggggagggaagcagatgccagcgggccgaagagtcgggagccggagccgggagagcgaaaggagaggggacctggcggggcacttaggagccaaccgaggagcaggagcacggactcccactgtggaaaggaggaccagaagggaggatgggatggaagagaagaaaaagcaatctgcgccaacccggcagccctaataaatcaaagggggagcgccagggcagcggggagacagaaacgtacttttggggagcaaatcaggacgggctgggaggaagcgacagggaaagtggcccaagagacggaacaaaggacaatgttcatggggttgtttgggacgaggcgtgtggagtgtgggtgtgagcgtgcgtgtgtgaccttctttcaggcctgcagagttgaggaaagaggtcacagcaaagagggactgcggagggaggaaagtgagagaccggtagagggcgggagtggaggtgggcgcggtggggatgggagaggatgagtgaagagaaatctagaagaatggagtgagctagtgggagagggtgggagggccacagccgggagcgaacgagctaggcttgtcagctggggaaggccgggacgctgggcccagcttagctgggacaccgcgcccgaggtcaaggcgggtggaccaggcatgctgagagtgtcggcgcacaggtgggcacggccacgcactgacccagtgttcacgaagggtttgcact

SEQ ID NO: 332173 - DNA, 989 bp, Homo sapiens
  chr4:113430521-113431510
  hyper
cggtgagatgcggggccgaggaggagaaggagtgggaccgtgggcgtgcaggtgtttcaaggatcctcctcctttcccccttccatctctgattccatctccaatttggatcccgggaggccgagcatctctcacgcggttgacacctctccaggctggagcgcgaagccggcgcctgcccgggtaatcagggaggcctggcctttcacgcggtgttctcagtcagtaatccaagttggcatttcccccttcgcgctctgagcagctggagaagcagagaatgctagcgaaagcagacagaaccacccctgtctcccctcccccgaccctggcaccgagagggggaaaaaagtcgtttgttgtaacgcacacaccatcaggattcttccccattccatcctcccgactcacgccaccttgcagggaaataataggtccggccacactggctttcgcgttctgctttccggatgactgaatttctttgctcgcctctcctgtcggggaccatctgaaactgcctccaagctgcgttcccagggaaccccccaacccccactcattccactcggggactaaagagcgactcacttcaacgtcctccataagatgaaccccatcccggctggaaaaatcaaactggggaaggaaaaacgcgttgggggcaaggagaaccgctcctgcagacctggcccctccttggccctaggggacccctgccgatgcccactcggtgccacgtggggcggccccaagggagatgcaccatcccccaaaccaagcgctttggaaaagaaactgcagagaataataagaagcatgggggggggggcggggggcggggtgtgtccgtggagtgatgagaaagctggtctttcatccctccttttttggacattccttaagtttaatcattaaagtggtccttaaaaaagaaggcagcagcttaacgctgctatttctgacaatctgccccacacactgtcagc

SEQ ID NO: 332174 - DNA, 851 bp, Homo sapiens
  chr4:113431805-113432656
  hyper
acacatttcttttgcagattcggaggccgggactttcacgctcccgggagcgcactgcattggcgcgattcaagagctgcccgctttatttaattaatacattcaaagctcgcttgggagcccgagggggctcggggaagaccgaggctggcggtgaggaggaggcgcttttaaccggttccaggtgtcggtgcccagaagtcacaaccagctcaagggtgtgcaatgcaggggggtgtacccagcgggtgggggcgccgcagctcccagcctcgccctcaagcccggccctttagcagcctgtgacccagactggcgggtgggcagctgaagccggccttgggtctaaacgcccttcctgggccatcggactaggctttgggaagtgccgaatgggtccttcctccctcctggccaaagccgcccagggccttcgcctcagctgggacaccaggagcgcccatccggctctggtccaggtgctgcgggcccgggaagcctcagcccctcctcctgcctccggctgagcctaggtccggctcccgtggcgggcccagcggttggcagtccgcctctctactttttttttcctccttcttggcactcagatggatgtatttaaaatctagtgaaggaaaaatgagccgtaacaaggcctgagcactttagaacaaataaatacagccagtcccggaacgccggccgcgctaaagcgacgctccaatgagaacaggacccaccttcgcgcctctccgcacttaggaaaacgcgccgcagcgcgctagctggcgttggaaagatctagcaacactgagagtctgtgtctgtcaccggaagaaaatctccacagc

SEQ ID NO: 332175 - DNA, 1902 bp, Homo sapiens
  chr4:113435438-113437340
  hyper
cgaactgcaccaagtccttcggcgttaaagagaaaggggaggagcgtcagtccgctctgcaaactctttagatatgccaccatcatctcttcccagggtctttttcgtctcaagaagcgcccccaaaacgccacccttggctttgacaataagctccatcacaccttcagtaaatcagagcccgtctgaatgaaggatacccaaagccaagaaatgcaagaaacaaccgaggaatcagaaaggctacacctgccctgtgaagtgagatggtttccagggcgtggaaaggaggggcaggggaagggaggagggctcgactggggacaggaaagggaacccactaaggcctggcgtgggtagcagaaatggcagctctagatacaatccctggctatggggaggtgaggtgcatagcggtgcttgtcgggaggtgggggctgccaatagtccatgtctgacccggccgggctggcgggcgataaagtgcagctgtagggggaggtggaattggaggacacggaggaggacggcgcggggctgttggtgcaactccacgtggaggcgggcgaggggctgtctccgctgctgctcagggcggcgctggctcctcccgggctcagcaacactgcctcggagaagagcgcccccggcaggcccccgccgccgcccccgcagtgatccgccaggcgcagggtctcggtgagtgcccagatgtagttgtgggcgaagcgcagggtctcgatcttggtgagcttggcgtcctcggggaacgtggggagcacctcgcgcagcgcgtccagtgccgcgttgaggttgtgcatgcggtttcgctcgcggttgttggccttcagtctacgggtcttcttgatgcgctgcaccgtctcggccgtcttggcgcctcgggagacggcccgcgcccgggaagggcgccgtttgcaatcgtgtaccagacccagcagccgtgcgggccggcagccctccgcacccgcagccacgccgccccgcgccccctgcccggcctcagccccgcgctgccgacgcgccccgcctgacgcgcccggctcctcctcctcttcttcgtcggcgctggatgacagcggggtcagggccgccaaggcgggggaggccgatccgagcagcactaacacgtcctcttcctccttcaactccaaggtctcggatttgacgaacatcctaccgaagagagaaaggggaaaaaggcagtgaggtgtaaggaaagaaacagaggcgcgatcttcgtgtcacaggggcgtgctccggcgcgcacccgagaagaccagctccgaatggcgcggagcaggaaggcgaaggaagaaacccaggcagtgctaaccaaggtcaggagcgccgctagcgctcgctgtgaccctgctgccagtcagccgggtcctgccctccgcgggcggtcctgcgttccctccccgagaagggactgcggcctccgcgacaaagattctgcgcggagcagagggcgtgcgggtgtggttggactgagtgcggggaaaccacctgcgtagttggaagcggtggctcgaatacttacttagttggctctaactgtgcctcagcgttgctgtgactttggcctgtgccgggaatctccgcgcagctgcgagcgcagcgccgggtccttcgcccggcgtgaaagctgcaagcccggcgctactgtggcgcagctccgcgggggacctctgcgaccggcgagtttgccaagagccccggcggcggcggcggcggcccgcccgggtctcgtgtgttgtggtggtggtgcgtgtctgtctgtcagtcagtccctggccgtgcggctcctggcacgcgactcccaggcactccagttaacgcgaagctgcttgtggttcagtggctgcgtgtctggcacac

SEQ ID NO: 332176 - DNA, 1053 bp, Homo sapiens
  chr4:113437637-113438690
  hyper
cgggctgcggccggagctggcgaagccgcagcggccgcagaggctcaagctgcggctgttgtcgccgccgctgtccattgtgattggtggctcgcgctcggctggagcgtgccgctaatttattaatgaatggaggtcgcgaggcgcagctggccaatcagggcgccctggactccgggaggcctgcgagccacgcgcaccggagcccgctccctttcagcagctcattaggggcccgagcgctgggggcggatggggggacccgtgctaccgcccccgccttcgtcctcgctgccgccgaggctccccccgcccggcgcgcgcgcaggcaccgcacccggcgctgccggccctcctaactcccgggtgatgggaactaggaattagttaatgggggtcagaatcccggggaaagcagttagccctgtggtgctgccgggcgtctcttggcaaagcctcttaggggttgtatcaaatagtaaacgattttaaaatggattcatttggttaggggaggagaatggcgtggatggagagatgtggacacctcgtgaacaagtgtgtttggggtccgtcgaaactggcgtgggagagtgaagggagaggacactggggattcaaacaggcgtctcttgggaggggaggtcggataggggagcagttgatgagcttttagaggatgtgagaatgaaatcactcacatgttagagctgaaaggatccccctcattttacatacaggaaactgaggctccgggcactgatgcaggttttgctggggttaacccagtttatagcctggagggacagcaaggaggcttcctgcgtgggtggcagcgaaccgagcgggaggagcggcagagctgctgctcctgcaagcaaatgcgctgcgctgacatttctgtgacctctgctccgcgctggggggcgttgtagggacaaggggcccatcttcccaattctgcttttcaatgagaaaaaagagctgaagggctactggacctcgggggaaacttgttctcaattgctcgttagccctccccactttccccac

SEQ ID NO: 332177 - DNA, 1148 bp, Homo sapiens
  chr4:113441561-113442709
  hyper
ggacaaatggtcgccgcgctagtcccttgctgttgcaggtgactgtcgggggcgcgaaagagggcgcccttccctgagaggacaaaagccaaggtttggctatccagcgagcctgtcccccaattcacagtaaaccaccgtcggccaaaggagatggcgtgtctactctctgctaaaataacaagatgaagtacctgacaagggggctttgtaacccaaatcctaatcctccgagtgagttctcagaaagatggaaagatggcgggaaaaagttggtaaatcctaaacatcttttacatcaacggtctctagttcttcgctgcaggctagaaacgcagcttccagagcaggagagcctggtatggaaacaattagctttctccgcagagcaccccttgcaacgctaggattcgttattgatagtggtgagcgctgggaatgagtgtgaattcggagtttctgacggtcccctatccgggagccaaggaagccaaggagaaaacaatgtaaattcgccccgatccccagttactgcatcccacatggtattctcggtctcccccacgttttccccttgaatcctgtccggggaggattcggcttgaacctagccctggagaggtcccggccaggtcactgaactgcgcttcactgcgccagcccctccccttcagtattttcatcgcgtccgaggaatcggcatccaccacagcagacagaaggcagggaagatcatcccccaggccccaagccccactctagagaccctggccccaagcccgcacgacgtgctctggtgcctccaagccaaacattccgggattcggcttgacacacaaggtcagtcagcttgctagcgcggaatcggccccgcaggtgctaggaggctcacttccttcttcgcagacgctataccctatccccacctgctctggggaaggcaaagctccgcagacttcttatccctgaggcaacccgctacccaaatgtccctcttctttcccacgaaggaaagaaattaccgtaggagattttgccaatccatgccagctttctgattgttttcttcaggtaaggggaaaagaacagccagcgcgtgaatggagagctgagggcccactagggagagaacctcttccccacccttc

SEQ ID NO: 332178 - DNA, 440 bp, Homo sapiens
  chr4:113443994-113444434
  hyper
tgtctacagaaaaaaattgttttatatatcagaaaaggatacgtgtatgtaacaataaaactgtgtaatgcaatagtgttgggagacgggggtatggtttattttcagggatctaaagatatactttagaatctaaaacattgggggttgacacttattgctgatttatccattctttctttccccccgaagtatttctcgagcgcctaccgagtgccaggcgcctagcgaggcgcagcgttagcaccaggcgcgaaccagacagctgtggcctgcctggtagaaacgaccctgcgataacgcagttgctagtacagctctcggcggaggagccagggccgggtctccaggccgggagggggcggccgcggtgcgcccgggcagcgctccctgcgcaagtagttcttctatgtctttacacgcacttccaaaaaaacttc

SEQ ID NO: 332179 - DNA, 695 bp, Homo sapiens
  chr4:113444864-113445559
  hyper
cgaggtgtcagcagtaatttaaagaaggtattcagtccgccagcgtctcttttctccgtttcccccttccacccctcccacccctccctcatttacgccttcaagcagtatgggggcggagaagacttttaaaacaaaacacaaaacaagatcttttgcgagagcggtgtccgagggagccggagcgctgacaggtgtgcaggaggcgccccctacagcctgctgcccctctcggggttacactcccttcctgccgcacctgagcgttttcaggacgcgctctggtcctggagggccgggcccgcccgagggcagccgattcacggcgggcgcgctgcgaagtcggggcgccccctggtggggcacggaggtcgagggggtatcctgagagcaccgcggggcttcggggccgcgggggagctcccaagacagccggccaccgggggacagtggatttggggtctcctcgaggtcggtccggggacgccctctgggaagcttcacctgcggctcaggttacaaacgcacagtgcccagccacgtcctcacctgcagtttcaaaagccgaaagaaacaaacacaaaacacctcccctagggttctgatagttgccaagtttaagaacaaccggatttaagccccacgggtttcgttttcttttgttttgaggatttagcaaatcagctagaagtgac

SEQ ID NO: 332180 - DNA, 271 bp, Homo sapiens
  chr4:113627389-113627660
  hyper
cgggaggggcgccggcaccccattgtcctcgcgtcccccaagggcggggacctcaaccccaatgcggcggctcccctaggagcggggccgacacgagccaacttggctacatcgcccggcccaggaccattctctaaacctcttttctcagtctcacttcacacacagacacacatacagacacacacgcagatagccctagaaaaatacacgtcttccaaaaccagacgtgtaacttctgaacgcacgcacactcacacacacgcacccc

SEQ ID NO: 332181 - DNA, 879 bp, Homo sapiens
  chr4:114682555-114683434
  hyper
cgggaaatggaaaaacagccaggcacgggacgagtggcaagcagttgcgaaacgatccgcactggagcaggaggagtagaagcagaggggagggagtccgagggggcggaggtggagtgcagcggggccgaggccgcggagcccagagcggacagcctgagcccagcggccgctgtcagcaggctcaggcgcggggcgcgccggggctccgacgagcgtgcgcgcccgaggccggcttccctccggcgggcggcagcggctccggcgaagcgaggcaccttggcggcctcgcgctgctcacgagcccgcgcggcttcaagacggcgcggcgagagaaagagcgctcggctcaggcgaagcctcttctgccgtccccaggcctccgtctcctcctccggcgcctcctcccgccgctccctccgcctgccagcaccccctccctggcgaagccccctcctcgctggtcccacacctccctctagcgactccaagcctgtcccttcgtggatctctcgcactccctcctttggttgcacacacgagcacaccagtctagggagaaaccaggtgggtggaggaggatgtgcgggggagaagactggaggtttgggtgaatgaggcgagaagtcacagttacccatttaaacccgcacagagaaggctgcctcaatctggggctgactgagcgggaagatgcagggcaactcgaggatggcccggggcagccgccctgggtcgcggaagcccacgcccctgttttgggcgccgggcagcagggacttctccaggccggttcccgggccacgacacccggtgggccgagcaagggagagcaaccacttcatctccacgccgctcagagttgacacagcaggggcc

SEQ ID NO: 332182 - DNA, 706 bp, Homo sapiens
  chr4:115520454-115521160
  hyper
gagggagggtataacggggaggcgattcggccgaggaccttgtacttgacccctgaagggatgggcaccgcggagcccagaggccagagccagctgccagggcagggatggaggtgggggaccaggaggagcttcgggacctcttcaactcccctttactccgtcttccccctaaggaggaacaagagcgggatgtgttgggggtggggaatgtcttggggctgtacaagctcgctgagacttttcggggcccgccgtttccgcgtgcccgcgcgactctcgacaatggacagtgtacagtggtggcagggtttcacgggtccccgcgccgatttgggaatggtacggggtgcccttgcattagagaagcctgtgcgggcccccgggattagagaagaggtgagcgcctgcgggcggggagagaaggacgcgctgctggcaaaaagaagggcgccttccatggactggaggagcggcgagggagcctggtatgtgtgttttggatttgaaggaggcaaaccgcatcggagagtgcaagtagatgcagtgcgtcggggcaaaaggacaatctgaggaggtgggcggggtacccaatctctatatacaagctttctggtttaattgagggtttataaaattgagtacggtaaacctgccattgtgcagcacttccttaggaaaggaatagcctctgtacctgtaccgc

SEQ ID NO: 332183 - DNA, 821 bp, Homo sapiens
  chr4:118954385-118955206
  hyper
cgaacagaggaaactcttgcagcctcgcagccgccctggtccagtgccaacggcaggagcaccacaggaagggaccgcgcgggtgcgccccacccttccagcgtcgcctcggggactcgcacccctttccctggccgcacaagacgtttcatccttggcggccgccgccaacccgccgggaggggcggtcggaactggcaggccggggcggaacccccggggtctccttgtcgaggcccgggcagccagatcctcagggccggtccgggcgggagcccggtcgatggaggcggctcccgtcctcagctcccgctccctccccttccccggggcgggcgcgcgcgggccgggagctgggaggcggcggctcccgcccgggaggcggtggcgagggcggcggaggcgcggccgggcgggtcccagggccgtggttctccagcgcaggagtccccggcgcacccgctgcgctcgccccgcagccgcagcctgagcggccgaagtcgccaccagctgtgtccgcgcagatcccgggcgcggaggggagaggtcgcccgcttgtcgcccccgccggaccccgggcaccgcgtagcacccaagcgccacccggacgaggggccctggggagcggctgaggccgaagacccgagggaaggaggagcccgcggacggctgcagccccaggtaatctccatggaggacggggccggtctcctcgcccagaaacccgatccgggcgccttggaatgcggactccagaggcggcatctcgaccagacaagtttctcgcggcttggaatgagggagtcctgaaaccgacactc

SEQ ID NO: 332184 - DNA, 1121 bp, Homo sapiens
  chr4:119273336-119274457
  hyper
cgtccggagtttccgcggccgccccgaggccactaaccgtgtctgcagtcgcagtagccccagtccaccttgccacgggcgtctccgtagaaacaccagggtctgcccgcgccgtcggggctccgacaaaagttgtggcgctgtcctcgcagctgagcccagctcgctgggggcgaccgctccaggaagggtggcacctccgcccaccgcagacacggggcgccgaagtccgtcacgctgacccatggctcgccggcggggcagccccaggggtgcggccggggcgtgtgcccggcctggagggcgtgcgggcgctgggcagggagcgcccgcggggggcgcgggaagcgcgggagaggcggcggcggacgcgtcctcgggggccgctgctgggtgggaaggtaataggggtagtgcggacccgcagggggcgaatggcggtggctgtggtggagggaatcattgaggacagaatcaaagccgaccacttcggggagcgcccctaacatcagggctagcacgaagcgggcgagcgtcatggtgccagcgctgcggggtctggtccatgctccccagcttctcgggcttggagcggagaagaggagggggcgggggcggggctgccgcgtccctcgaatcccccagccccctcccgcccccgcacgcggaccgccctcgcctccccaaccttgcctcccgccgctggtgccctgccgcgcctcggctcctgtcccctggcggcggccgcgggtggggaaatctggagctcagccgagccccggccggcggagaggaccggaaaagagaaggcgcggacgcagcggggagcggttgggcctgagccccaggtagcggcgcaggcacgagcccgggaactctgccccctgggggcgggcgccggccgcgcaagctgctccggacctacgctcggcccctgccaggcccaccgcagtccgcccgcacggcactgccagctgctgggaccgagcccgagggtgcccgcgcggagcacggtcttggctgccccttgccagcatgcagcaccagcacagcccggcgttggcggctcccaaatctggcaccggcccctgccgtcatctctcctccaacctcgtcgcccc

SEQ ID NO: 332185 - DNA, 152 bp, Homo sapiens
  chr4:119809913-119810065
  hyper
cgaaggtgggccgagcaaaggagagtgacgcaagagtgggctgtgtcctggatgctgcgagcgcctctgcctccttgagaatgagcccattagccgcacaaattcgcagcaggcggctggggcggcggctggggcagcggctgcagcagcgg

SEQ ID NO: 332186 - DNA, 305 bp, Homo sapiens
  chr4:120549993-120550298
  hyper
cgccccgccccgcgcggttctacgggcgcccaggtgtggtgggcggggccaggcgcagctgctgcgccccccccacccggggtccggcagtgttccgctctcgcaggctcttcagtcccctggttcccaggaggcggcggcggcggcggcagcggcagcgcccggcgagctctccggaagccaagtggcggcggctggaaggaggccgcgcggccgctggggtgcgctgtgtgccaagccgacttctggggagcgcgctaggtgactgggtgtgttctcagagtgccccagggagggaaggtcgc

SEQ ID NO: 332187 - DNA, 1246 bp, Homo sapiens
  chr4:121843130-121844376
  hyper
cgtatgaatgagattctacggcctgcgtggagcggcgctctgggctgctcctcccatccccgcatggaaagttaggcgtttctagccacattaattcatcctaaaggaaaagaggcgacagcggagcagcgtgcgcgcgggggaaaacacccgcccacgcgtgccttcgccaacgcaaagacgcagctcacacccgtaaccgaggaagagggaggctcccgccgcgctcacttcctgcgggagagaggaaagacatcttgcggcagggaggccggtggcagttccgcccctggaccggccggcagcggagcgcaccccgccgccacctacgtggcgctgcctgctcgggtggcgcagcgagtaaaggccacccccgccgtgccccgcggtccccggccttcccacggacgcctggcccggcccgggcgaggggcgaccggggtgaagcccgccgcgccccgggccctgcggcagggcgactccgggaggcacagggcgcgcgaggtgcaggggcgcgcaggccgccgccgggtcacccacctttcgcactctgcgggccgtgtagagccccatgccgtcctgaacccgggaggacttcagggagaacctgtccggcacgtacatgcccagcattttcccgggcgcggcggccgccgcctctctcaacaccggcgcttagcgcccggcaggcggcacatcgaaatttggggtgccagggtagaggggagaaaccggcagggaaggaggaaatggagttttcctcccagaatccccacctccctgccgattccaggatcccccgcggctcagcccctcctcgtcccgggtcgggctcggcccggatccgttcctgccattcctgctgcgggggcgcggggggcgcgggcctgggcgctgcgggcgccgggacgccgctcgctgattggcccgaagttggcggctctgacccgcgcccgggcgcgaagcccggagcagggctgaccccagggcctcaaacccggaggcccgcgagctgcgcgggccgtcagcacccctagccccggcgcggcggcgtgcgttcccgcctttgtccagctctgggttttcaaaccttgccccgctgaaccattactccctgtaggggagtctcgcttgcttctcttcagatgcaaaacgaaatggaccttcacacagctggggcatcctccaaaacaactttatcaagttcctgactctgaaagccagcttattgccgactactgagaac

SEQ ID NO: 332188 - DNA, 1412 bp, Homo sapiens
  chr4:121992978-121994390
  hyper
cggatagggcgcccttgagaagcttcttgggccttgaagatttgggggcgcgtgcctcgagcccccatctcggatgacccttcgggcgtgaacgctccttgtgctaggtctcagggtggcgggctaaggcgtcgggtctctggggcattgctttcctctccccacttaccttaaaaagatctgtttttcgtagggaaaatagaaaaaaatccctccccgtggtgtggtgtgcgaaatagtccacgtccccggaccctgccaagatgctaagcaccaatatccaggaacgagaagcctggagggcggggacggaggcagataaaagagaaaaattcaatccgctgaagtgtcccaactttgcggtcggcacagcaaacttcaaaggcgggcgagggcgggcggcgcgcggtcgccgaagttgctgcgaagtggagtagggagccgcgcggggctggggaatcccggggcagcgccgagaagcggcgggaggtccttttaaactgcagggagcgtgcgggggctgggcggcgggaggatgccgcagcgacccgcggggctggcgcgggcttcgccggccgccgctagtcgcacaggcgcctggctggagcgccgcgcggggtgctgggagagccgggcgcacggggcggcagcggccgtggcgggtgcgctgctcagttagctccactctctcgcggctggaagtggggagtgtgtgttcgctcccgagtgtcactgctgaagcccggagtctcttcccctcccagccctaacccctcccgcctcaccgctgcccgcccgccccctccctcctctgcccgttgcctccccctccgtccctccttctctccctcccgctgcgcgccagcgcgcacgcacacacacacacacacacacacactcatacacatacacacactcacacacagacaccctctccctccttttctctctccctgtagccctccctccctctctttctctcacacacacaccaccctgctcagcgacccagcgctccccaaacaggaccctcgcgggcggcatcgcgagggacacgctgctgtcctaaccttagcgccactcggggagaatgaaggaggcccaccgagcccccgacaaagctgcaaaacccaggagacgcgcacgcgggaccatcacactgtcaagcagaccggggtgcacaatagagggaaactctggggttgatctgggggcagggagggggacgtgttaaatccagaaggttggtggttggaggcggaaagcagagtgtgcaaactgtgcattcatgtcccacttttcacccgaacgcctgcctatcacagccttcactcagggagcgcttccccctcggcgcagaccgagcctcctccgatttgaaactcagcagctgttttaacaattgaaaaagc

SEQ ID NO: 332189 - DNA, 1886 bp, Homo sapiens
  chr4:122871295-122873181
  hyper
taactgaaccacatcgggatgcgtcgctcatttaaaatcagaactcttccctatgggatctactcccagccactgattgtgttcctgtgttctaccggcaggtccagcctgaccaggcgcagactctgcgcgcgcggagcagcgcgcgatcctggggatgcaggggtcatcccggaggtctcggcctcgggcggtgggcctctcgccggcagcagggggcgctgcagaacctcggtccccatcctggagaaccacctccccggctcagccggtctgcgccgcccgccaccatccgaccccaagttctctacctagttctgagcgttcttcctaaaaaagacagtaaaccctgcggcactcccagtgttacgtgacagaaaaaatacagagcatctcaccctgtgaaaccgatcaccctctttttatcttctctgcgtctcgcactgattaaaagctgtctccaagattggaaattaagaaaagttgctctttctcatgcattagcgcgccgaccgctccttcgtttagaaagagagagagggaaagaaagaaagagaaaaagagagcccgcgcgccggggcgcgagccgctgaccctgcaccgcctgggaaccgcagtcaaagttatcactaaagcggttccccggctgcccgatgcccactctctccctcaggggaccctatagggcttcggttccagttttaccccaaatgtgactgaaccacagagagacgaggcgcctgggcaaaccttcaacccacaccctgtatcgcactgtcccctccctactccccacttctctgcccccgcccccgacgtcccagagcgtcggaggggacccaagtccacgctgggacgcccgggaggagttcagggttcaagtgcgcgcctgggtctgtgcacatcttccccttcctcggcctccctgggtaagctcgggaccccggggtccgtcttccaaggggtgcccagccctggcagcagtcgtgcgagctcctcggctctaatacagggagtggctgctcgccaggatgcttgtctgaagtcagtgtgcccgcctgcgggctgttccgtgtgcttgagcctggacagagcccctgccacgcactcggcagcccctgtgtccctccaccgcgcgggaccgagggggcgagcctccggccgaggtctgtcccctccaaatcactccaaatcgaactgcctggccgtaccatgtgggtctcggaggtcccgggctcgacgtggagccgcccggcgcgcgccttcccgccccccgcccggcaccgccctccgaggcgcgggccgcggccgggcccggtactcacaggtccggcccgtgggagaagggcggcgggcagtagccgtgcggctcccgctgcgagggcgccgagcgcggctccagccccccgttgacgcccctccagccccggcggcggcgctgcggctccgcgccctcgtcctcgccctcgtcttcctcctcctccggcgccgggaaggtcacccttgcttgttctttgcacttcctgaccttggtggacatcgcgccggctgcggtccgagtgtgggggtgccggctgccggcctcctccgccttcgcggcagtgcagtcttcccgcggcgccccttcaccacctcccgcggcttccggggccccgggcggcccagggcgggaaggcaggagcggagagcgtcgcggcccgcgatccagcagttagaggctagcgccgaagccgagctgccgccgcccaccatcaaaccgtgggagcagctgccgcggccgtggctgcgacgaggaagcccggggccgagcggggctctggtgctgggagaggctctccagccccgcggcggcggcgatgcctcctcggcgcccgtctcctgtctcc

SEQ ID NO: 332190 - DNA, 1562 bp, Homo sapiens
  chr4:123747656-123749218
  hyper
gtggtttgggtggtgcgggggttgggcgggggtgacttttgggggataaggggcggtggagcccagggaatgccaaagccctgccgcggcctccgacgcgcgccccccgcccctcgcctctcccccgcccccgactgaggccgggctccccgccggactgatgtcgcgcgcttgcgtgttgtggccgaaccgccgaactcagaggccggccccagaaaacccgagcgagtagggggcggcgcgcaggagggaggagaactgggggcgcgggaggctggtgggtgtggggggtggagatgtagaagatgtgacgccgcggcccggcgggtgccagattagcggacgcggtgcccgcggttgcaacgggatcccgggcgctgcagcttgggaggcggctctccccaggcggcgtccgcggagacacccatccgtgaaccccaggtcccgggccgccggctcgccgcgcaccaggggccggcggacagaagagcggccgagcggctcgaggctgggggaccgcgggcgcggccgcgcgctgccgggcgggaggctggggggccggggccggggccgtgccccggagcgggtcggaggccggggccggggccgggggacggcggctccccgcgcggctccagcggctcggggatcccggccgggccccgcagggaccatggcagccgggagcatcaccacgctgcccgccttgcccgaggatggcggcagcggcgccttcccgcccggccacttcaaggaccccaagcggctgtactgcaaaaacgggggcttcttcctgcgcatccaccccgacggccgagttgacggggtccgggagaagagcgaccctcacagtgagtgccgacccgctctctccgcctcatttccatttcgtgggttctcgcccgctctctcccctccagcctgcaccctcctcccggatcttcactgcgaccctagcgctccgtgtggtttctggccgcgcggccctcggcggtttcgggttcaccactcaccccctcctttccgggctgcggcgtaggcccgggtgtcccctgggctttggggtgtgccaatttgccctgtaaaccagtacccccggcccggagccgcggcgcgccggggcctcgcggactggctgtcttcccgcggacaacctgtcgcgtcggggatgcccgcggccccgccatgcagctctggccgcttctatctgctgcgtgctgtcccggggacaaagacaggaaggaccgcagcagaacgaaacggtctttactggaaaaacacctttctagagtcctgcccttaaattccgactcgggacgacccgaggcatatggcacactactctcacccactctgttttatatttttccgaattgacgaaagctgaaagagcaaaaacaaaaaccaaccagccaaccagcaaaaaatccagatgttgttaataaagtgccatagctttgtttcagtagtgaaaagaagtgcaaacactttaatcttccacctgcagtgactagctttgagaccttgagccgacgcttaaccccagagccggtttcctcatc

SEQ ID NO: 332191 - DNA, 1537 bp, Homo sapiens
  chr4:124317751-124319288
  hyper
cgaagttttaagaggatgtttattacacgagtctgtagggcaacatttccaagttggtacacataaacgaaagaggaaacgatagttaaggaaatcctgttccaggttttcgggcagcccgagtgattgacacatgatatcaccggaggcgtgtcctggagtggaggtggaggtggaggcaaggagctgaaattctgcgtagccggagtgagaccgctctgcaaaccactgcgtgctttgcagagtgattatcagcacagttccctgccctggataaggaacagctacagtcgctgttaaatgtgcctgaaaagcaatttgcaatctttgcattaggtaagtaccgtttccttccgtagacattttaggaaagataaggtgagaaatgttgacttttgcaaggaactgaacatttatttatttgaacttgctttccagctaaggttactggttgcatttcaaaacaccggtagcattcccactgctaaaactaatgctcttaaagtaaatgctaccgctaaaagaaaaagcagggtccctttcacctttccttaaccgaacagtagacgtttaaagtctgaaacgatcgaatttgtgaaacacagagccgttaatgcctttatgcgaagaggggctagcactcggtgtgtggaccaaatgcgtgtttgtttaggcattgttggcgaccgaatcccgagtgaagcattggtttaaaacctgaatttcccgtctctgtgtattgattcctaacgcgcagaggcgttgcttgaacgttgtttgaactcctaggcattccagggggcaaaagcacctcggcaaaaacgtgcaggactgcatgttactttggttcgcggctgacacgccgactgtgcgccggcctgtcaatcaccgggagcagcaacagggagcacatggcaacgggctgcgggcgagctggccagcggcccgcccggggtcccagcccttcgaagaaagggacattcacgagcttctatctctaattctctgtcgcaggcatttcggccgtggaaccccaggctcggaggactgggtgtgagcgctgcccgggagaggctgacctgccgggaccggagtgcccggggacgctgtgcccccacttgcccaacgtgcggaatcggctaagcgcgtcggcctgcgcggggcacaagggacgacgcccgcctttctctctccgagaaggatccccaaacctcactctcttcactcctccccgctaaaaaaaaaaaaaaaaagaaaagggtaaaaaaatccccctccccctcccggccgcggcagcctctgcctggcaggcgcgtgctccgaggtttcgccggggtactgcgcggctccgtgacccacccgccgacggcggttcgggccccgacccgggcgctgcggagtctcgaacgcccgtgacgtggatttttcgctcgtcaggaagccgccatcccttccttcgttccttgcgaggagcgactagaacccgagttctctgagcacaccgtgccgtcagctggcccgtcacgcactcgactcc

SEQ ID NO: 332192 - DNA, 824 bp, Homo sapiens
  chr4:128544031-128544855
  hyper
cggcgcctggacgcgggtgtccctggccaaggcggcctcgctgtcctggaagggagggtgaagagctgcatcccgcactaggcggcgaaagagggcagcgccaagcggcggggtccggaggcgctcgacggctcgcgcccagcgccggagacgggctgtgtgttgggccagtggaagacaccggagaaacccagacgtggaagaccgggcagcctggacttcgcgagccctggtggggctggcggcccacagagcccccacctgccccgagctcccacagcgaggagtggccgcgccgcccgccagtgcgccgggctccgagaccggcaggggagcacgcgggcgaaggaggggccgccgtcgctgacaccaccgccttcagcccttggcttccgcgcgtcggaggctggcacctccaggttcaccgcggcggccggagctgtgcgggggccagacggttcggcgggagccggggctgggacctgggtgacctgtcgtccgcccctgtagcgagtctccagtgggcatgtttcaggtgggcaggtccagcatccccaaacctgccccccgcagcctggaggacctggactcagtgcagcgtgtcctgttacacaggtcagtgcagggccccgggacgcggggcgagaccgtcctcttgccccggaaatgttggcgagggaggggccgcttttctttctggggtctttctggaagcatctgacttgggattcgccttagtgcggcgctggccgcgaagggccgttgggacctgcaccccaccctttccagaatcgggtgccagcgatccaccctgtcccgctgcc

SEQ ID NO: 332193 - DNA, 145 bp, Homo sapiens
  chr4:129210004-129210149
  hyper
ctcaactcgtttgacgaactcgtttgacgtgttctctcttgccctttgttgtctgttgtcttgagtctcatagaataggtttgaacctttcactgtcggttttgtaggagtcactgaggatattgacgaggcaagtgacagggtc

SEQ ID NO: 332194 - DNA, 1156 bp, Homo sapiens; identical to SEQ ID NO: 230686
  chr4:140655984-140657140
  hyper

SEQ ID NO: 332195 - DNA, 378 bp, Homo sapiens
  chr4:140970253-140970631
  hyper
cgcatctgctgctctgtgattgcacaagagaagctaccactccttttcttcacaaagaaaaaaaaatggcatttatcgcaagtacagcaaggcatattaggattcacctcccccattctttcttccctcttcctcctaccatctccctcgccgcctccctttcctgttggaaaagaaaaggtgggagggagaggaggacccaccggtcacagacaacgctgtgggattctctttcttcagcttttaccagcctatgggggtcaggatgctattggttcagctttatgtgtgatatggtgcctctcacttagcaacagcgagcaggagaggcaggaagcaacgccacctggctcagcaagtgtgcggatggtttaaaac

SEQ ID NO: 332196 - DNA, 1363 bp, Homo sapiens
  chr4:141293964-141295327
  hyper
cgaatattaaagcaggatgccgctttgtgtcaagtactagattacgatgaacggtgtcacgaagaacactccactcttgataccgtatatgtgaccttgagcaagaaatgtgttcacgctcaggcttcagttcctttctgtgggttgctgtgaggctccacaggggtaaggtaagcacaagtgctatgcctcagtaccactagggtattttctcaattctaaaatattaaatggccacgcactacagatttaataatagtttcggaggaggggcgtgaggagaggaacattccactagctcaactataagctttccgatttcggaaataagaaaaatatgaaaaagtctgcttttagaattaaggaacgacggtgtcgcgttgactttctctgcttggttcgcaaacgctcttttctcgaacttgaatgacttctctgtcgctcataccaacctctttcctgaatgacttctctgtcgctcataccagcctctttcctgattttccacactgggattctcactccaattctcaggtttcctgatagacctgatgagccgcttcaccagcgccgcttagcttcgcttctttactgtcattggctgtcgctgttccaggtcccgcccacagcgacctcaatcctgattggatgtcagtgtccttttgttatggcaaaggtggatcccggtgctttgagattggacgactggggtgaggcgggcagctaatgcgcaggcgtgtattctcgagtcaggattggcgggcgagcggctgggacgggatgggattcttctcacggcgcacgttctgtgggcggagtgggcggagctgccggggtcagttggtccaagtgtcccggcctgaggtgtcggccggatccctccttctcccggcgcctcaagcggaaggtgagggccgtcccgggcagcggagggcctggccccaggcgactagagctgcatcctcagtacctccgagggcctggagggcggggcgggctggacgcggccctgcgcaccgggggcccgggaggagcggtctcgggcctgggcatttggtgggcggcggaggcctggctcccggcagaacccttgcgcgacctctttttctcctgttttcgttgtcaggcccaggcgttctttgggagagggacctctcgcggtccctgacgcagacatcgtgtagctttctccccgcagctcctgggtcgggagccgctttgcagctctcggctctggaattggactgcgggaggggcgtttgggtggaatgggacctggcacgcctggaccttcccgtggctgctctgcgagagcctgagagatgggaggggaggctgaggtggggagggagcctagagagcc

SEQ ID NO: 332197 - DNA, 351 bp, Homo sapiens
  chr4:141488865-141489216
  hyper
ttacactttttggaacagagcggagcccaaggcttttctgcccctcccaggaacgctcacggcttactttctttccctgcggtgaggaactcctggaccgtgtcgtagaggccgatcctgagagaggcggagctgatttgccgctgaagccccgcaggcagcccgctgtagagtttcatccgcccttctgtttttaccacagcggtgattgttcccaggacacctttatacctaataacactggacgtcgggcattcaccttggacctggaaataagaaaggtgcagaacagaagggagcgaaattgagttcactcttaagccaagatttccccctgtgttcctattttcc

SEQ ID NO: 332198 - DNA, 837 bp, Homo sapiens
  chr4:142053208-142054045
  hyper
cggaaaagttagcccgccacgttgaacccctgtccaagcggcgctatgccaagctctccggcagcctctcccctacccaatacagttaatcttctcctctttgtaaaccccccaagtgacgcggagcaaaacttaatcggtccagggaacccagacacgtcttccgcgccgcacggacttcccagaaggagcctggaggcaggcgctggatccctctaggcacctccgtccccgccggctcccctcccccgcgcccgctgggccactcacccgcgtggggcatggtgatggtctcgttggtgttggagcccacgttgaagatgaccacggctgaggcgttctgcaggaacgcgttccggatcttatccctgtacgtgcagttgcccttggggatgagggctatccagttcttgccgcgggtcggggcggcgaacttggtgttggggtcgcaggccaggcggtcgtgggccgagctggccatgaccacctccccgcgggcgtcctgcttgggcgagtgctctccgtagcgcccgcactccgtcttctccgtgtgcagctccgcgccgccgccgcccgccgccccggccccggggtccggcgcgggctcggcgtaggtgatgttcacgaaggcggtgtaccattcctccttctcggccacggtaaagtccaggcagagcagatgcacgaaacaaaaggaaagcagccatgttgagagagccagactgcagcacgcttggatgagagacattgccatctttatccgccggggccccctccccgcccccgcgccctccctccgtcccgtccctcctccccagccccggccaaccccgggcc

SEQ ID NO: 332199 - DNA, 837 bp, Homo sapiens
  chr4:142054075-142054912
  hyper
cgggccggaggggccgcggccgggacgcgcagccgccgcggggaccggattccgggcgagcggatggcgctggccccttcccctctcagctgtagcgcggtggttgcattttgcttcttgggcgcccggggggcgcgggaacagagggcccgcggggcttgcggaggagtcctgctgccgagcgtcctgctccttcgcccggcttcgccttctctcataagggtggccgggggcccacgaacttgcagggtggcggccctgcgccctccagccccggcggggacgggcacgattgctcgtagtctggggtgctgcggtgcggggtgctgcccagggtgtcccggccgccgccactgagcgctggggcgcgcgaatccagctgcagccgctgctgccctgcgccggttccctcaggctgcgggcgctgcgctcctgatctcgccggtggctgcgcctgggcacgcacttgccgcgggcggggcgggcttggggacagtgggagcgagcaggcagagcggagtaagcggtccgtgtgtgtgtgtctgtatgtttgtgtgtgtgtgtgtgtgtgtgtataatgtgtgcgtgcaaggaggagcttagtgtgatgtcaaagcccctgggattctcttgccatgttcccttggtctctctttatgggcagcagcgacccctgtcgggtctcaaattcaacctcaatcggcgacttaatctaggtggaggtaaagaggaagcgacccctcgacctttgagtacgggaataacttcctgagcgttacatttagcaaatgtatgtgcctctcgtaaacgaccctcccgtttgctggaagtactgcc

SEQ ID NO: 332200 - DNA, 824 bp, Homo sapiens
  chr4:142557243-142558067
  hyper
cgggtgtcttcttccaacatttcccctagttggacttcaaagtttccttcttgcagcctgtgcggggaccaagaggccggtctagagtagccgcccagcatccagatccgacatccttttccctttcctcaggaagacttggatgcgcgccagcccagcccgggtctccaggttcagctgcggaagcttcccacatggtgcccgtcgcttgggatgcggctatccttgtgccttctctgcaggtgtcccggcaggtagaggaggagaccggtggctggtgttcctgcagggcggggctggggctcctcgatgtccttgcgcttgccctgcaagttctgcgccccaggccccggcagggacggaaacaggccgggaagcagtgacacctggggcagtcagtcatccaggagccgccgccacccgccccacccccagtctccgcgggaggtgtttgtcttcgcctatgctcccggctctttctctttcacttttcttttcgccaggggttgggactccgggtggcaggcgcccgggggaatcccagctgactcgctcactgccttcgaagtccggcgccccccgggagggaactgggtggccgcaccctcccggctgcggtggctgtcgccccccaccctgcagccaggactcgatggaggtacagagctcggcttctttgccttgggaggggagtggtggtggttgaaagggcgatggaattttccccgaaagcctacgcccagggcccctcccagctccagcgttaccctccggtctatcctactggccgagctgccccgccttctcatggggaaaacttagcc

SEQ ID NO: 332201 - DNA, 885 bp, Homo sapiens
  chr4:143766811-143767696
  hyper
cgggaccaccaacatcagtcaccctcactccccaccactgcctctattccttaaggacttcttcccaggccggcggcggcggcggcggcggcggcggcagcttgcgatcatcaggattggaagtgagagcgagtgcccgggccaacctcagcgtctctcagggacagcgcaggtgggcgcagccttggaaggtcagcgaggccagagctcagagttccacgggggcccggagagtgtgcgtgtgtgagtgagaatgcgaaaacgcgcgcgcgccgggcagaggggcgctcggcgagagggtaggcgcggtgacaggggtaccccagcagccgaggagagacagcccaccccaccctttaagctaaagagctggaggggtgatggaggctgcaagacggagaaacttgatgcaaaacagacaggctcccccctccaagacgtgccgccacgctctcagacacgctccctcgcctcccggattacccaccatcaaccaccccaccctgcaaaattcccccaccgagccctaggatcccaggcgggtaattacctctcccggaggcggagtggggggcggcagcagcagcagacacttttagcctgactttcctgcgttcgcttgcgagcgtgtgagcgtgtgcgcgcccaggaggagctgtaacctgctatttatagaccgaagcctcagtacccggggctgagaacccggaggaaactagcaggcggcggcgacggcgcagggcgccggccgcggcttcgcgaggctccagcagctcccccagcctctggcttcggccgcgctccctgctcgctcctcgcctaccagccccgcgcgcgccccagagaagttgtcaccagcgcggctggctctccggctgctcacac

SEQ ID NO: 332202 - DNA, 865 bp, Homo sapiens
  chr4:143767745-143768610
  hyper
cgctcctcttcctcctcctctgctctctccaagcggtctcctcccaatgtcaccagcgaccgagtagaggcggccgtggcagcgacagtcgcgcaactggcgctgctcgcttcccgctactgatagagcggagatggtggcccggctgcccaccccgaaattaccacgctggctccgtgtgctcacaccccgtaccccgacccctttctgcggcccctctgcccgctgggtcgcccacccagactgggctgtgggatcaccgctaccgcgacgaggggggacccgaggccgccacgctgctgcgggggcaggagaaaccacagagaaagaacccgcgggaggaagaaagcgccccagaccccggcctatggcagcgcagtccctagaccgagggtttttggaaggggcttgggatccctgctgtcactgcctgcgtctaggcatccattcacgcctgctggaccccagtctgcagccgcgctgggacccctgtctcttgcccctcctcccccttgccccgggcagaggtcgggctgaggagaccagcttagagcagccctcggccacccaccgccagttcccacgtcgcggcgggtgactgaggccgagatgctcccaactagcgtatgacatgcctttgatatcccgggtgcgtggggacaaatccgccctgaatgtgttggggtatcaggaaaacggggtatgtaagcaagcagtctggacggagactaaaactcccccacttcctagcccctaacaagcccacaggggaaagcacgcaccctggttattccgggctgtgtagggtgtggggcaaatgactctccccatctgcgctttacaggtgccacctggcggctctctc

SEQ ID NO: 332203 - DNA, 1217 bp, Homo sapiens
  chr4:144621096-144622313
  hyper
agcctcacagtctacgcccttgcccctggggagaggggcccccaccgcgtccaccaagcgcccgtacttgggcagggggccgtcctcgtgaggaagtggggtaagccggcacctgcgggtggccgtggctccagacttcagggaggcgaagtccagcactctcctgtctatggcgcggctccagcttcgcagcttctccactaccaaaggcctgttacgcgtcaccagctccagctgggagaagaccaagtccaccgccagcgtgaagggcagcaccagagtgtgagtcggggcgtcgtagcgcagctgcagcagcacccgggcgcgtccggggctgtgggagccgaagtgagtgtactggacttggcggggcccgaaggtgcaggggaagcggcgcggggagagcgcgcccttgagccgcggcagggcgtccagtaccgtgacttcgcaccggtcccccggctgcactccaatcaccagatcccggagcgggtcgagccaaagggaacgacccaggggcacccggagtccagggttggcaatcagcacgctggggccgtcggggcgagtgccgtcaagcgcaccccgggcgggcaggtaaagcgccgggtcgggctcggtcccaagtgaggatgcccgtccctgcagcgcggggcgactcaagagcaggcaggcgagcgccacaaggagctgccggggcgtcccagtcgggtgccgagaagcccccgccatggccacggatggctcctggcgttgggattcccggggtggggtgccctgtgcaaagagggatctgctgagcggcaggtgcaggcagtggaagcagtagctgctgtccagtcggtagccgacttgcggatccagcaagagccagcggctgcgcttcggctgctgcaggtaacggcagcgggggaaggggctctgcccacttcctgctcagccccggtcgcaagtctctctctgctggcttctggggaccccagatacgcgcccagcgcggcgagacttagcgagggtgcagcgctgtcccctccgctcctgggcgcttcacccagcctaccttacacaccttctcgccgggagccgtggccgccgcactgctgcccgcgctgccagactccgaccagctgtctggatactctcttccccaggtgccacaaagggattgtccctcagggttgggagagagacggtgactgtactcgggtcagtcctgc

SEQ ID NO: 332204 - DNA, 194 bp, Homo sapiens
  chr4:146098925-146099119
  hyper
cgagtctcctccccgtctttaaaaactgccacttagattatttactttgattccttcttagaaatgatgagtatttgtgattttataggagaaattgttggcaaaaaatataaattattggtacacattttaaaagggaagcctgacgctggtattacttcctttttcccacacacacacactttgcctttggc

SEQ ID NO: 332205 - DNA, 993 bp, Homo sapiens
  chr4:146857461-146858454
  hyper
ccttctccttcctcgcacaaaatttccctacacacgcagccgcctgcgagtgattttatgtgcatatatattacatatgtgatattatcctcagaacctctagcgggcaggcgaagaaaggactgcacaggggcattttttttttttaaaggaaggggaaaaaagcacaacccaagccctttgcgtcgactcctgcgtaccgggaaggggaaagaaagaggaatgtttgcggagcggactgcttgcaagtgcccttgctcgccacttcggctgcggcccgggtgacacggaggcgcgggggcgcctggcccgagcagcccgcgcccccctcccggtcccctgggcaggcaccgccgcggttatttcgcgagggggagatcgatcgccctgcctgtctgcagcggaaaagcacaagctcacacacagcccgagcccgagacaccataaccttaacccttcccccaccctccgtgaacttcaggtgaccgaccacgtcggcctgacacccgggcgggcgggcgctccggctccactcccgcccccagcccgggttttgcaggatcgggctccgagcagcgccaaaccgccgggagaggggagtagtgtggggggagagaagagaaattgaccctccgtctcccccgacccctccctccggcgcctcccgcgtcccctcctccccgtcaccccgccccacgccttctcccctgccccctcttccctgcattcaaggagccgggcggccccgggggatatttttagttgcttctttctccttcacttttagctttagcagcatctcgaaacactcaaagcggagaaagactggggggttggggggagctggagagggagtgggggaaaagttaagagtcgcgcaaagaaaagccggagggagggcggagagggaccgggggcgcgggtggaggaggggaaggggaccgggccgtgccggcgggtgtgtgtctccagttggcgtgtgtggctgccgcc

SEQ ID NO: 332206 - DNA, 564 bp, Homo sapiens
  chr4:147558074-147558638
  hyper
ccatgtccaggtttcgctgagctcacacccggcaacactgctgctaggagttcccttcggctactatttattattttcctccacacaggggaagagaaagggaagcccgagaggatccagggaaagcagaagggggttaaggaccatggacagagcccgtcgcgcgctcgttgctgccgccttccccagcactctggcggctcctgaggacagcggtcccatcttgaaaccgctattccgcccggctgaggtcaggggtggacaggcggtcccctactctccaccgccgcttccgggagctgaccacccgagggttccccttttccactctccttcccactctgtttttgtcccagcgcgcgccagcgcctctcaggcctgccgcctgctctcgcacctgctcgccttccccaggcgcccagtgcctgcacctgctcccggtcaacccccgtccggattgggccacccgcgggttcctgcgtcggggtcccggggccttctcaccctcgcctgcaccctgctccttccgctctctagggaggtgacagcagcccccaacaccgc

SEQ ID NO: 332207 - DNA, 1910 bp, Homo sapiens
  chr4:147559191-147561101
  hyper
ggagggggaggagtcgcatgcgcacagacgacccgagcctgctccgcggctgtccaatccgctgagagctgcgagaaatcgagtgagagaaagccctgcagcccctccgaccccatgtctctttggcaccaggcacccgccgggccgtggggggctcgtagccgaacgccgacctccgctcgtattgggctgggagttcagagccgcgcgcagaacccgggttggccgcaacgtctgtgttctcagcggtggccgggaacctgggatcagggtcacctgagctgacggggtgggggcgggccgagtggggttggaagcctggaacttagtggtaagcaggaggcgtaggaggtggcagccaggtaagaggcactcttacctacccaacgctggcttgggccgcaactttatttgggagtttctttttccggtgagacagagacccggcagaagaagcgggaggggctggaggctggtccttaggtaggcactgcccggcgactggagcgcggacctggccatttgggtggggttgagtgggggcgcgattgtgagtagcagccgcgggacgctgcgaaggggcggcggcaacagagcacgggcgggggcagaaaagaggcggcggagggcgcggtgggggagcgcgaggcgagtgctgagagagcagaaaggactcaagcctgaggggagtagagaggaagaaggggcaacgcgagaaaccgaacaggagccggcgtttcctggcaagggagggcggaggcgcgcgggagagagggagagagggagggcggggggcgcgggggtaggcgcggggagaggggagtataactcgccggccgcgaggagcgggggcagtttcgggtgccgaggtctgcagctagcggcaagcggagtcaggcatccgttcagactgacagcagaggcggcgaaggagcgcgtagccgagatcaggcgtacagagtccggaggcggcggcgggtgagctcaacttcgcacagcccttcccagctccagccccggctggcccggcacttctcggagggtcccggcagccgggaccagtgagtgcctctacggaccagcgccccggcgggcgggaagatgatgatgatgtccctgaacagcaagcaggcgtttagcatgccgcacggcggcagcctgcacgtggagcccaagtactcggcactgcacagcacctcgccgggctcctcggctcccatcgcgccctcggccagctcccccagcagctcgagcaacgctggtggtggcggcggcggcggcggcggcggcggcggcggcggaggccgaagcagcagctccagcagcagtggcagcagcggcggcgggggctcggaggctatgcggagagcctgtcttccaaccccaccggtgcgtatttctgcataatcaccgcttaaaggcacattttgacagccccctttatctgcttgatgtttttttcatgtctgcacagcaaatcaccccacacctccaaccaattttcccctctctctctcttaagtattcagcaggtcttgcctttcatattaatttttatgacctgggatgttgcctgtgcgcgtgttgtgttgtgtttcgttgtgtctacaggctcactttcctcctcctcctgcactctcggcttctttctgtggcttccctctttttctcttcacctctgttttcaggattattattattattattttaacgatctgggaatgttgtaggcgcggcgacggtgtcgagccctgggccggggcttccggagagagggcgtacaattccctgctgagcgtaatgtgtgccttctacttacaattgcagagcaatatattcggcgggctggatgagagtctgctggcccgcgccgaggctctggcagccgtggacatcgtctcccagagcaa

SEQ ID NO: 332208 - DNA, 745 bp, Homo sapiens
  chr4:147561362-147562107
  hyper
tgtggtgtccacgccggctcacgcgccgcacatggccaccatgaaccccatgcaccaagcagcgctcagcatggcccacgcgcacgggctgccgtcgcacatgggctgcatgagcgacgtggacgccgacccgcgggacctggaggcattcgccgagcgcttcaagcagcgacgcatcaagctgggggtgacccaggcagatgtgggctccgcgctggccaacctcaagatccccggcgtgggctcgcttagccagagcaccatctgcaggttcgagtccctcacactgtcccacaataatatgatcgcgctcaaacccatcctgcaggcatggctcgaggaggccgagaagtcccaccgcgagaagctcaccaagcctgaactcttcaatggcgcggagaagaagcgcaagcgcacgtccatcgctgcgccagagaagcgctcgctcgaagcctactttgccattcagcctcggccctcctctgaaaagatcgccgccatcgcggagaagctggacctgaagaaaaacgtggtgcgcgtctggttctgcaaccagaggcagaaacagaaaagaatgaaatattccgccggcatttagaagactcttggcctctccagagacgcccctttcctcgtccgctcttttctctcctctcttctgcctcttttcacttttggcgactagaaacaattccagtaaatgtgaatctcgacaaatcgaggactgaagagggagcgaacgagc

SEQ ID NO: 332209 - DNA, 260 bp, Homo sapiens
  chr4:149362760-149363020
  hyper
cgtccccttctcccttgcccttaaaattccaactgatgccataggaagcgtagcctgtctcaagagtttcgcgaatgctagcgaacgggaaatgcacgaatttccagagccccttttatacaggatctattaggatctatatctccttcaactgcccttatgcgctacacctccggctgagatttgggagcgtccgcaattgataaaggaaagaaatattattcaaacgtcctttaaaaattgtacagggaaaatgatcc

SEQ ID NO: 332210 - DNA, 1595 bp, Homo sapiens
  chr4:149364662-149366257
  hyper
ggtttccctccaaccgccccctcctcgattctcctcccgcccacccaaatgctgcagttactaagcaaaaggatggggttcctaactttgatttctaaggacttttaggcttctcatgtaaggccccgttttaggctccccgctggcccggagtcagcatcagtgacgtatacacctaaatctggtcccccggccctcggcgacccgcagcccggcggcggcagctgtgcggcctcccgcctcaccctcgcttcgcgcccgccaaagcccgaggcgggggaccgggggacaccctgtgcccaaaggcccctcctctccttaacagttagttaagctccgggattccggacccctaacccagggctgagacttgaactctcagccgctccagtcaggaactccctggagataggggcgacagcggcagcgccgcgagctggtcctgaccccagactctaatgcccctcggtccccagcttggagctgcccccggcgtccccgcagccaggagtccccgccgagcgtcccaactttcccgcggggcccaccgtcacgcgcactctcccggcccagcgaactgggcatcgatctcacgtcggcagagcgcgggcggcgggcgggagcaaggggagtcccggacctagagcctgggcacgcgaggcggcggcggctccgcaagcgttgccgaattattcattattaaaggaatggacgtgtctcttttactaagtttttatctcctttgaggagggccggtcttgccctggatctcagcttcttgcaaaatctaggttagaaccgtgcaggggcagccgccgcgatcactcgcccgccacccagcacccttgccccagggccgccagcgggcaactcgtctcctgcccgcatcccacctccgctcgccaacccgcgccctctgccctgggcgcgcaacctgccttgcccggggccgcccctgcgctctccggaccccctctcgccgctgtcagcgcaaagtgactgtcgctgcactcaccttttctaggacatggtggggaggctggggcgggggaaggggaacggctagactcccgccgccgctgctgccgccgccaccagcaagtccaatattggctgatcggcggtgaggatggagaggatgataatcccggcagtggcagtcgccctgctgacggtgggtagagcaatagtgctgttaccctacaagaggcggcgaggcagcggcgccaaatcgcgcagagggggacgcgggcacccgcccgcccccagcggcggcggccgggcctctggcgggcccctctcccggggctgcgcgtccgctcggcgttgacagcggcgtccctgggagccgggaagtccggcaggaggatcccgcgcccgccgctccgcagcgccactctccgcgccccctccccgggccctgggtggccggtgacagctccggcggccgagcgcgtgtgtgagggggcggtcgcagggggagcctgcgcccccctccccgggtcacgccctcacgagcgggaggaggcggcaccgcgtccggccacccgcgggtgggaaacgggcaggggcgccggcagccgccctcccactac

SEQ ID NO: 332211 - DNA, 1455 bp, Homo sapiens
  chr4:150999250-151000705
  hyper
cgcggttacgtttcccaggcggaggagcgcgcgtcgcggctgcgcccattaacgcgcggcgccgggcaggagccgtcaggcgggcggggctgcccgggacccgcaggagctgctcctcccgcgccggcgctcggccccctcctccgccccctcctccgccccctcctccccttctccgcggtttggcatccccggggccgggaagcctcctccagcgctgacagcctgtcggcggcggagggaggccagagcgcggatgcttgccagtgggccgggcctgaccgctgcgtgggaggcgggctgcattatttcccgctagggccgcgctccagggaaggaaggggccagacacggccctctcagccccgaacggcgcgcgctgcccggcgggcgggatccgggcgcggccgaggcggcggcgctgcaccccgggcctgggcccgcgcgactcccccgggggcctctcccacgctccgcgccccgccccacccttccttccttcctcccctcggcgctcccgggagcgctcggcagacgcccgagctttgtgggcgcccgcgggcccagcgcgagcctcgggcggcccaactttgcctctcccggtcggctcccgagcgggacttgtgaggcgtggccgggtggaggaggcgcttgcgggggcgtggggctccccggcaggcgggaggcacggagcaagtcgcactggacaatgacctgggcagctcggcgctgcggacacttttagctgagggcgcgggcgggtcggctcctccgcggctcctcggccccacctgcgcggagagggcgggatgccagagccaggtgtcccggcgcgttaagggccctcgcagtcagacgtccctgcaccggcgctcgcacccttagtcggcccggaacgtctttttgcggacgccctcggagcagccgcgatggccagcaccaggagtatcgagctggagcactttgaggaacgggacaaaaggccgcggccggggtcgcggagaggggcccccagctcctccgggggcagcagcagctcgggccccaaggggaacgggctcatccccagtccggcgcacagtgcccactgcagcttctaccgcacgcggaccctgcaggccctcagctcggagaagaaggccaagaaggcgcgcttctaccggaacggggaccgctacttcaagggcctggtgtttgccatctccagcgaccgcttccggtccttcgatgcgctcctcatagagctcacccgctccctgtcggacaacgtgaacctgccccagggtgtccgcactatctacaccatcgacggcagccggaaggtcaccagcctggacgagctgctggaaggtaggaggggagggcgccgcacggcaggtgcggcggagcgccggcaggtgcagtgggcgtgagccggcgcagcggggagcccgcggggtgctttccaagccgcac

SEQ ID NO: 332212 - DNA, 988 bp, Homo sapiens
  chr4:152246023-152247011
  hyper
gcaggcaaacccctcggaaggtgtcgttgtccaccgagacggccattgacctctgactcatccagagataagtcatcaaccaggccacaagtcccaagccagcagctcctggatttagtgtgcacggaaaatttgagtttcagctgtacgaccactagcagttaaagacgggtctgaatttcctcgggctcggccggaaagtgaggatggcgatggaaatgccaccctccccgagtctggcctctgagagttaaagaagccggtcccatcccggcgcgtgaaggagctgccgctgtgtggggcaggacccgagcggccccagagcgcgcagctctgggtccccgccgccccgtcccccgcgcctctcacctgcggccgagtggcccgagagcgcacggccccgggcgcggcgctggccaccaagttcgcggcgctcgcgtagctcttcctcctcgtcctcccgccgccggccctcagccatgggcgaggcgcggggcgcagccgcgggatggccagcgagctgcggccccggcgccccagaacgcctgcacccggcgccccacgccaccgccctcgggccggggggaaggcggctcccggagaggaggcgtcggcggcggctgtggaaatggccacctccgcgaactccacctgcagccggccgggcagcggcagggcgcgggccgagccgattccccgcctccttgcggcgtcccggcggcctcttaatccctggcctttcccactcccactcccgctctcttcccccttcctctttgccttccccgccccgtagagctccaccgcggatcgggcgggttcggggctggcctcgcctcctcagggaggggttatcggcccctaaggccgccccacagccacacacgctggaaacaccagctcgacccaaacaaacgtgtgcaaaataaataaacgggataggaagaggggaaagaggaggtggcctggcctcttcctgccttttcac

SEQ ID NO: 332213 - DNA, 1048 bp, Homo sapiens
  chr4:152329824-152330872
  hyper
cggggcgccggtggccgccgtcaaacctttgggaagcaagaaatccgaaacgcccgtgacgtgcggcgttgtccgactccttccactaggcagaacccgagagacgagcctttggcgggacggtgaacgattgtgctgtgtacggcggtgtgcgtgcgtgagtaaagagtgtgtagctccggccaaacgctagcccccaagggcgcgagtgctacactgcgcccagctcaagtttctgtggaaactttccctcagaggctcctcctccttcaccttggaaaccggcgcgggccgtgcggcgcggcactgcctaagtccccggcgcacctggcggcggcgtgtcccagcggcagaggcggggccggcggcggcgggggcggggccggggcgcgctccccgaggcctccaggcaggttgggccccacccccgcccctgccccgccccggcccccgcccccgcccccgccccccccgcgctcactagggagaggctggggggaggcagtgacccacgcgcctcagcccgcggctgacgcaccttcgaaaagttgcgctccgaccttctcacgacctacattcttcccgggcactcctgagtttgagccgggcctggaggacctgggccaagactttcgagcggcggccgcccgaggtgcgaggagccagcccggctttcctcactgggtcccgcgcaggcgtccccgggaccgcagagcaaactttctggactatctgaggacacttgtccagcgagccccactgctcggggaggaggagccacggccggggacaggtaggtgctgtgctggccggagatttgcgcttgagggattcttttattttagagggttgaaggaggagggagagtcgaaatgtcccttctctgcatccgccaactgggcagggggtgcgggcattgggctgagggagcaggcattgggctgggggccggctggggatgttccaaacgaggtcgctgcgtcgggcgggggcgcaggggggaggaggtgacttctagggtttcgggctccgggacggggcgtaacgc

SEQ ID NO: 332214 - DNA, 481 bp, Homo sapiens
  chr4:153600941-153601422
  hyper
cggcagagttctgtagcctcgggcaccctaccagcttttgcgatcctccttcccaggagtaggaagtggaggcggcttaccccggccgacgggaacgagcgcgatcaccagggcgaagactagggctgcgcggggagcctgcatgtccgctcgcctcggcagaggcgcgctcaggatgctgcgccgggctgcagcctctctgaaacgtgaacatttcctgtttcctgcttgtttgggtcggtgctgacttgaaggagaggtgtgtgcctgttttttaggaagtgatgtaattctgcaggagcctgtcagaccagcaaggattgcaaaagagaagttgctgttgaagcactggttctattatcacgcctctccagccctttggagtcccggcctccagcttttgaaaccgtccccggggcaacagagtcccttgctcagatgtcgttcggtatctgggactgggaggggtcctggaccacac

SEQ ID NO: 332215 - DNA, 177 bp, Homo sapiens
  chr4:153856957-153857134
  hyper
cgcgtgcgtcggggggcgtgtgcgggtgtgtgtgtgtgtgtgcgcgcgtgtatataagagtgtgtgcgcgcccgtgtgcacaagagagggtgcctgggaggctgtcgcaaaggctcctttgtgaaaggcacttgcaggttcagaagccagcttggcgcctcctctcgcccgttcccc

SEQ ID NO: 332216 - DNA, 692 bp, Homo sapiens
  chr4:154143770-154144462
  hyper
cgcggttgatggaaaacagatgtcttactgctctgggcctgagcacagaatggaaatgaccgaccagagagccatttggagccgaggacacccggtgaaagccattcagagtccagccaggaggccgactttcctcctctggtctgtttttactacttgagccgctcgctcagaaaacggccttagataaagcagtttcaccttcagatcgcctgaggctgcagaagggcggctgcgggggaggaaggaggaggcggagaggagcgggtgcgaagtcctgggtcgcctgcccgctgcctgatgtcgtgagctagggcacctcggccctggctgggcgcgcagcgaggcccaggcccgaggggtgaggcccaggccactccggagcgcgcgctgttcccgcgaagcgagtcgccgtctcgtagtaagtcgtggctcgggctgtgccctgggaaccctcccgcccgggcaaggtccggtggccggagcgtgcgggaagcctgcccagagtccatttccggacgggcgctgcggggctggcagccggcctggagcgggtgcagtgggtcggcgcggcgcagagctgtcagcaacagggccgctgagcagcagaacctggacgccgcgcggctcccaggccctgcccgcggagctctcccgggagtcgcggacctctgccgtcctcagtcacccgc

SEQ ID NO: 332217 - DNA, 225 bp, Homo sapiens
  chr4:154387495-154387720
  hyper
ccagcgagctagcggcgagcgcggcgagcaacggagaggagcgcgagcagcagcatggcggggctccgacgcccgcagcccggctgctactgccgcaccgcggcggccgtgaacctcctgctgggcgtcttccaggtcctgctgccctgctgtcgcccgggaggggctcagggacaaggtcagccttgcgccgctgggctcgctctgcctctccaccccgccccc

SEQ ID NO: 332218 - DNA, 986 bp, Homo sapiens
  chr4:154709413-154710399
  hyper
cgtggcaggggcgggatctcctgggagcgtctcagcccagcagggagtggggaagcaagagggaaggcttaccttcctcggtggctggcaggaggtggtcgctgctagcgagggggatgcaaaggtcgttgtcctgggggaaacggtcgcactcaagcatgtcgggccaggggaagccgaaggcggacatgaccggggcgcagcggtccttcacctgcacgcagagcgagtggcatggctggatggtctcgtctaggtcatcgaggcagacgggggcgaagagcgagcacaggaacttcttggtgtccgggtggcactgcttcatgaccagcgggatccaagcgccggcctgctccagcacctccttcatggtctcgtggcccagcaggttgggcagccgcatgttctggtattcgatgccgtggcacagctgcaggttggcagggatgggcttgcaattgctgcgcttgtaggagaagtcgggctggccaaagaggaagagcccgcgcgccgagcccaggcagcagtgcgaggcgaggaagagcagcagcagcgagccagggccctgcagcatcgtgggcgcgcgaccccgagggggcagagggagcggagccggggaagggcgaggcggccggagttcgagcttgtcccgggcccgctctcttcgctgggtgcgactcggggccccgaaaagctggcagccggcggctggggcgcggagaagcgggacaccgggaggacagcgcgggcgaggcgctgcaagcccgcgcgcagctccggggggctccgacccgggggagcagaatgagccgttgctggggcacagccagagttttcttggccttttttatgcaaatctggagggtggggggagcaagggaggagccaatgaagggtaatccgaggagggctggtcactactttctgggtctggttttgcgttgagaatgcccctcacgcgcttgctggaagggaattctggctgc

SEQ ID NO: 332219 - DNA, 687 bp, Homo sapiens
  chr4:154712018-154712705
  hyper
cgtgagctctgagagatgctacgacttgggcctgggagtgggataagggccctctcgctttcacgcccccccaaccccccgccggccccggccaacccctaaatccccaacgccctccgctggggtcgcctcctccccgcagagccccttgttgggagttcaaggagcccgaagctggtctggctggtttgagccccgcgctgccgcacgcccggaagtggctggcggcccccgcgctccgcgcgccggctgcattgttttgggagccctcgctgcccggcttgccgccaggaggtgctgggagtcgcgcctgagtctccatccctgccgtgcgcagtgtccacctctggccagcttgtttgcccggcccgcggcgtcccctgcggcccatcgctgctcctcccggaacccacgccacttagtctggtcccgaccctgcactcgctgctgctgcctttcccacctcaagtcgctctccccactcccttctgcttttgggctaagaccggtccaattgatcactggggaacagggcaataacctcccgcggaggctgggacgcgggcacggagctctgcccatatgagcagcgcagggatgggacactgggtgcccatcccagcgcgcctccccagactggtccctgggatgctcacacgtggcgcggcaccgcggcggcgccttcac

SEQ ID NO: 332220 - DNA, 721 bp, Homo sapiens
  chr4:154713481-154714202
  hyper
cgttacatgtgcctcggtgaggtgaagtgactaccgggctagccttggggacctgtcgcgacttgtcgggtgtctccaaccgcgttgccgcctggctttcagccgtgcgctggccagccgggcgggtgacgtcacctctccccgggtccgtgcacccaggccttccctgctccgggtgagtattttttcatgggattcagccatctgggggcgccatttcccaaaacagagattgtccctttgaggttgcaagtcaggttcctttacgctgagatcccttacatttttacttttaggaaggttttttcgaggggtggggggatgacctcattccttcgcctttggccctccctctacccggccccacaacgaggacgcccctgcagctggctgggccgcttcctcttgccacgcggggggacctgtgcccgcggccgtgcacctccgtgtacgcttctgctcctcggaccccatcggttcagacgcggatttccgagaacgagaccagagtctgcgtctggagagcctttgcccctcatcttaggaagagtctagtctgagaacaaacagtttgccaactcctaccccgagctcttgcgcgtatctccttaaatatttcaagggtctgggccccagatgggtgctcggaaagcaaacgaagggtccagggaggccgaggccaacgcggagctcagcgcccccttcttgcctgaaggggcgc

SEQ ID NO: 332221 - DNA, 558 bp, Homo sapiens
  chr4:155254035-155254593
  hyper
cgcctgtgtttgcagcatttgtgtcatcggtgagagagactcactgacttccacttgatagaccaaatgttcgaaagtccaggatgggctgtgttcgcgtttctcgataacgactgtcagcaccagcagggctgcctgaggatgcacgccttggtcctcggccctgagagtcagcgtgagctcccgctgctcgcccgcgcccaggctgccgttgaggaacagcacccccagggctctgtcgatggcaaagacgcctggctgcgggctggcgatggagtaccggatgagtccgttccgcccactgtctctgtcttccgcacgtgcgaggtacaaggctgtgccagggggcgtggtctgggatattctaatctcatccgaggtcctgaggaacgctgggtggttgtcattgacatccatgactgttatgttgacctcggtgctgctgcaggctggggcgctgccgagctgcgcctgcaccgtgagcacaaccacgggctgcgtctcgtgatccaggggcttccgggtgcgaatagtgcccagccgcgggtgaatggagaa

SEQ ID NO: 332222 - DNA, 1234 bp, Homo sapiens
  chr4:155663080-155664314
  hyper
cagggacggaaaccgttaattatcacgtttcctttcatctccaggggccctttggcccgtgacacaagaggcttcggtattggcgctttcccagaactggcccagaggagccagttcagagtgtgaggtcgggtctgcattgaacgtacacaccgaggtctatcagactcccccgattttagcgaagggtgctgactgctgtgctgctagaggctagcaagctccctgtgcgcagctgatgagtttcagcaactcgccacctgggcgcttttctttaaattttgggagtaaactgggaaaataaaaaaatctccacgtccactggctctctccccttctccaacttcctctttcgactcgtttgtgggagttttctcctctttgctgggactataatgtgatgcgcaatcgtttgtgaatgaacaaaagtcaccggcaagcagggagacggggacagatcgctgacggcagattgagggtggcagcaaaggcccggcctccaaggataatggggagccgttttccctcacgcctggtctctatggcccccttcgtcttccaggtaaaatgaatgttccttcatccatcatccgcagagtaccctcaggcgtgcgtagaatctgctgatgaaacctattagcgccgactgggcagctttgtggagccacccgaggctctccattgtggcctttgtctgcagaatttaagcatttacataatgcattagcacggaactcagcacccggtggggacatcgcgtgccaagcctggcgcggccaacgcttcagcggctccctcacccggcagctccctaggaccaccctcgaggaggcattggagtcgggctgcaggcgcacgggcaaagaacttagcatctcatccaagtacttcgccttccttggccgtctccgggaggttatgcttaaaaacataaaaataaaaataaaaataaaaataaagggaggcggacaaagtttcggtgggtgaactgaagctgggtccatgtgaccctgaagccggagaaataaacttaacatgaatcttgctttcctggcgggcgttgggaccccgccgtttttcatgccaaccgttggaagcttcgtactcaacggccacaggtgcctaggagcgcagagaggcctcgggttcaaatcaccggcgcgcagggactggactcgcgggtagcgacccccccaacccccccccccccgccctacacacacaccctcgcgcc

SEQ ID NO: 332223 - DNA, 1167 bp, Homo sapiens
  chr4:155664665-155665832
  hyper
cgaaagattcggtcaggaaagaatctgcaggcattcgaggcgctcgcactttgcaaagtaaatgcaatctctttattaagccgaagtccctcatatctatccttttagaggaaggtggtccaactcagaaatctctcccaagaggactttccaccgaagactaccgcgaagtgccaggaactcgccccagtcccgacaggtgcaggacctttcgtgccgccacaccttgggactctacctccctaaataggccacttaaaagccagtagtgcaaccgggatcccgcggcgataaagaatcactgtgcagaaccctggagctgggagtcggcccgcccccctcccaaagaaaccgggatcccgcgtcctccccgccgctagcgcagcgcgccagcggcgcccaatcagtgagctttccgggtctgtgacggccttcggctccgccccctcgacggccataaaaagtcgcagcgaagcctgcacctccgagcaccgcgcgcggccctgcccccggcacggcccccaggtgcgctccttctccggctgcttgtagcactggtctcactgtccccgccgtcagccaccggttccttatccgtctcattccccattgtggcttggctgagccggtcgccaggcctcgctgtcctcctttgccttcctctctcctcagcggccgtactttgcgccgtacctcacctggcctgcaggtgagcagcagcgcagcacccctgcccggcgagcttaacttgcccagcccggcccctgccggagtggcaccggcacctctccaagacgccctcttccctgcaggatgaagaaccccatgctggaggtggtgtctttactactggagaagctgctcctcatctccaacttcacgctctttagttcgggcgccgcgggcgaagacaaagggaggaacagtttttatgaaaccagctctttccaccgaggcgacgtgctggaggtgccccggacccacctgacccactatggcatctacctaggagacaaccgtgttgcccacatgatgcccgacatcctgttggccctgacagacgacatggggcgcacgcagaaggtggtctccaacaagcgtctcatcctgggcgttattgtcaaagtggccagcatccgcgtggacacagtggaggacttcgcctac

SEQ ID NO: 332224 - DNA, 806 bp, Homo sapiens
  chr4:156129168-156129974
  hyper
cgctttaccttctcgtttggagcacagggaccgcccagctagaggagcaccagcgcactgcgccccagccctgggcgagggtgcggaggatttgttctcggtgcaatcctgctggcgcttttccggggttctgcgcggatccagctccccatctctgctcctacacacacaaaagaaaacaactctcgattggaagttgtggaattttctcagcccctacgaggcgcggggattctccagccccggccctcctcccgccagcctgaggtctccttcgctcgcctgccttgctagggaccgcagtccctcagccgcagctgggtctgtccgccccgcctttgccctcgccttttcccggggcggatttggtgaagtcggcctcaagtccaggaggtctgtcttcgccgggccagctctcgcggaactggggggtagagagcaaagggagagattcgtggaagggaagggaggtaggggtggcgcaaacgcccagagtatcaaacttgggggtggcacagtaggtgacagcagcagctgcaggtggtggctggggacccgcgagggggcgcccctctgggtagggtctggctgagcgggcttgcaagcccgggaggcggctgagagaccctggacactgttcctgctccctcgccaccaaaacttctcctccagtcccctcccctgcaggaccatcgcccgcagcctctgcacctgttttcttgtgtttaagggtggggtttgcccccctccccacgctcccatctctgatcctcccaccttcacccgcccaccccgcgagtgagtgc

SEQ ID NO: 332225 - DNA, 711 bp, Homo sapiens
  chr4:156297402-156298113
  hyper
cgtcttatttaaaaggccatcaaaaggatcgtcggcgtaaaaattatgagcaccaccaccaaaaaaaaaatgtatctatatatttgcatacagcgctattcaaagaaaaagatcgtaatgctaacccgcaaacagccagcgagatgtattgcaagccaatttttcctctcacaaaagtgttaaagagagccagacaaaacgacgaagctttcgcgatgagccgcattaaaatcgcggtttcccgtactcggagcagaggcctggcagggccgcccatagcgttgtgcgccccgggttccgttccctaccaggccaggtgacgtccgggtgctcgccgctcctcaccgcgccgtatgctgagcaccagcgaacgccaggcccgtgcacgtccaagcgcggtctctgtccggatcccccatggcccccaggtcccgctttctgttcccggccccggacgcccgcggccagttctccgcgaccctgagaatcaagagccaagcatcgggtaggagctgctcaccttggtctgggcctggcggcgcccgcagagccggtcctggaccgagcgaggaggaggggctaataacagaggcggagggcggttgctaggaaacagcgtcttcgggaggaagtgacttccccaccgccgggtctctcgggtacccaacaccgctcttcggcccaacgtgtcgctggggcaaccacccagac

SEQ ID NO: 332226 - DNA, 748 bp, Homo sapiens
  chr4:156587883-156588631
  hyper
cgattgggcggctgcagagaccaggactcagttcccctgccctagtctgagcctagtgggtgggactcagctcagagtcagttttccagaagcaggtttcagtgcagagttttcctacacttttcctgcgctagagcagcgagcagcctggaacagacccaggcggaggacacctgtgggggagggagcgcctggaggagcttagagaccccagccgggcgtgatctcaccatggtgcgttttggctgctactttctttttcagtctttcggtgcggagaaggggaggaggcgggcagaggtctgaaaaaatcgaatgccttatggaaaggaactgcaagggttcctttggggtgatcaaagagggagacacagacacagagagacaaaggcaaggaggactgtctgggagccacgcgggcgatacagtttccgaggcacgccgcgtcccgcctagcctgttgaacaggtagacatgagcgacccaagcgtaagtgccgctgccgcgagtgcccagggtgcactcgcgcggggaccgacaggtgccactgcagggtcccctctcccgctcactgcctgccacccctgacgcctgctctctttctccattcgcagtgcggatttgcgaggcgcgccctggagctgctagagatccggaagcacagccccgaggtgtgcgaagccaccaagtaagtggtcgctgcatccccacgcgggtcggggttcttcagacaggcggtccctcttcc

SEQ ID NO: 332227 - DNA, 807 bp, Homo sapiens
  chr4:156680543-156681350
  hyper
cgggaaggggaggtgcggcggaggcgtggggtcttcccggctctggccggccccaccagtgtgggaggctgagcgccagcggaagggaaggctccgggttcgcgtccccgcgctgcccccgatgcccagcctctcccggagcggtgacaggtgaggagggtgggaagatagcgtgggggtggggcggatggtgacggggagaatccaccagggattggggggttgcgcccccacgatccgactcctttagtgcatagtacccctaagggagaggagtcaggggcggggtgaaaggttaagccagcgccatgggagcagaggcagcagcctcgcccccaagccgcttctcaggtacagcgggtccctgacgctcaagtctctccctgtccccgcagtacggatttgtgaatcacgccctggagttgctggtgatccgcaattacggccccgaggtgtgggaagacatcaagtaagtggccggctaccctggctgtggcccaggtcggcgcccagtgtgggaggccccccgcgcctcgcctggtcctcagcctgctggccgggtcgcgggcgcgcatccttggaggtgcctccgcgcctcgctcccggctcgctgcagctgcgctcccacgctccgggactggaaccaggaggggaggggcggctggggcggggctgcgagggcgagaaccgcggaaaggagcccctaggggtcaccacggcttcccgacccggcctgagcgtgggaacgcgctgccggcgctcccaggctcagcaggccgggcagctcccacgcgtgcagagccccga

SEQ ID NO: 332228 - DNA, 350 bp, Homo sapiens
  chr4:158141404-158141754
  hyper
cgcttcgccgccaacaattagcaattcggcttctacacagcagccggagatcagctttgctgcatttggtccaggttggagcatctccgcagcagctgcaacagccgcacgaaggtagctccgggcggggagcgaggcgctgtcctcggtgctgaaaggccgaggcgcgcggtgggcgcgacagccccggagacccgaggtctcgcggagggacagcggctacgggccccgagctgtgctttctcagcgccgcgcacgcgacgcgtccacggtggtgcggggtgccgggcgccgtgcgggggagggggcgcgcgctcccgcctcctgccgcgagtcgcgcacgcgcgccc

SEQ ID NO: 332229 - DNA, 1212 bp, Homo sapiens
  chr4:158142705-158143917
  hyper
cggcctattcgcgtgaataagagactcttggatttttgggcgctagcgcgcgcccctcctttccctcccggggcactgacactgttctcttgcttgctgtttgttctttgcaggggggctatttcctaggggcgccgatcaagaatacagtgcatttcgagtagggatggttcagttttccacttcggagttcagactgacaccccacatcgacaatttggaggtggcaaacagcttcgcagtcactaatgcttgtaagtaatgaatattcatgcctttcgggtgctgcacgcggaaggccagcgagtgtgagtgtgtgtgtgcgtttctggggtggtgtgtgtgcgtttctgtgtgtcagtgtgtgggtgtgagtgactgcacacacgcgtgcgtgtgaccgtgtagagagaaggtggctgtaatctcagggacccccgctggctggagagggctgaagagagagggaaaggacgtcaagagtgtgcgcattagggagccggggtgagggttggagccagggagggcggctttcttgggttcaaggggttttcgctcatcttgagtgcttcaggagaagccctcccacctcgctccccatcgagcgcctgttggcaccctgcccacagagaacacgttgttccccagggcgcgcagtcgggctgttggacaaatcccacgagggactgccggagcccagtggcctcctgccccagcagctgccgctctcgcccgctgcccccagtttagatccgcagcaccggctgggctcaccctgcggccctcgcgagctccatgttctcctctttgggacaagttgttgaaatggttccggagttgggatcggggctgttacataacgcccacccgaggggcgaggagcggggctgacgcaggctcaggccggccgggtggcgtgggggtggggcggggaggcggtggaaagggggagcgctgtcaatttctcctgctcagttgcgcttccgcttaagttggagggggcgaggccgccaggggcgccgcggtcagcttgccagcccggcgcgctttgttctcaggtagctgggctccagcagaggcagccggggaaaaggactgggaagccgtgggatctggccgagtttgaaaatctggagaagtcgctgatcagccattttagtctttgcaatgctccatattaaccctctcactccgcgcagtgctccgggactc

SEQ ID NO: 332230 - DNA, 120 bp, Homo sapiens
  chr4:159093914-159094034
  hyper
cgcagccaagcaagtaacttgtaaaatgaggaatgccatcacccctcgagtgtccatcccacataacttggggttagagcacaagcgttcccaggaactactcaccttaccatcttggcc

SEQ ID NO: 332231 - DNA, 723 bp, Homo sapiens
  chr4:159690017-159690740
  hyper
ctcccgccggggttacgtgagcccggggcgggcggccgccgggccaatggccgccgccggggccgccgcgctcctcccgcgccgccgccgccgccgtggggctgcgggctcctcccgcaggagataactgtcagcgcgcgaggcggtggcgggccggctcagtcatatgaccggcagccggcggctccggcgccgagcagagttactcagtcgcagcggccccgcgctcccgcaaggctgggcggccgcgccgccgcgatggccccgccaccgcggccgccgcccccggctgcgcgctgagccgccggccccccgagcgccacggccggagctgcggcggcggcatcatggccccgaccctgctccagaagctcttcaacaaaaggggcagcagcggcagctccgcggcggcgtctgcccagggcagggctcctaaggaaggacccgcctttaggtgagggggcgccggggggcaattctggcgcgggacccgagttggcttcggtgctcgccggggaggggacgggtaggggaaagggaagggactgtccaggacggcgctgcctatcgccggcacctggtcccgggcttgtcagcgtggacgcgcctgatccgagtgtggctccggaccctccgtgacccttcctcccgctctttctccacaactcagggtccttccccatttcagagttctcttgtgttccttggggttcccgggcgtgc

SEQ ID NO: 332232 - DNA, 649 bp, Homo sapiens
  chr4:163085074-163085723
  hyper
cgctcgcgtctcaggttcagcaccgacagcacagtggacagtaccagctcctttcacctccagtttgtctcagtcactgaaccaggctgattctcgctcctcctccctaggcaggagctgctgccactcaacccgggggtgccccgcccccaccatctgacgtaactattttgcatatcaactcgccgagaggtgaggggccgcccccttgactgggcttctgctagagtcagctgcggcaatcggggcaacaaaattcaggcttaacgtcagcgtgggcatctttggacttcaggatgtattctcaaccagtccagtagaaactaaacgctttgacggtgctggagcctttgccttcgcggggactgccgtttctgcgcactctaagatcgctgcgggcacagctctggaaggaagacggggcggagagagggggcagtggagcacggagaggaccgagtgggaggcgggtggggaggagacggagaaatagaatgaatctattcaaccattcttgaaaacatctccaatccttttcatcttcctgcccaaactttgctgcctctccctgccatttggttatttgaacggatccgtatttggtgttcctactcccttccctcggttcacggagcctctggagggagtc

SEQ ID NO: 332233 - DNA, 868 bp, Homo sapiens
  chr4:164253272-164254140
  hyper
cgggtgtgggataggcgaactcgggcgccttcccagtgcctcggccttttaaagagaaccggggtaaaggaaaacttggatccccatccagaaattccccgggagcaggtggtgggaaagcccgaactccgcgtagggtaccctctcctttcacccgcgtcgtccccatacccttcggcaggagcccgcgaacggtccggtgatttggagcaacctgcgacctgcctgcactggagaccccaccttggtcccccagagccagtttcggacactcgcatcgtttttcttcccctctcatccttcaccttgtcaatgagagatttcgcagaagtctctggaaaggcataaactcgcaacttaccctctttggaatttgtctttttcgctcctgcttattaaagaaggaagggtgggaatggaagggagcagagtggggaagatccgctggtatttctcctgctcagatcctaaagattgatgaagctaggaagagacgcctccttaaagccgaactccacctcatcccggatcacgtgacggcgtcccgcgagtagcgcctgaagctcccccaaccccacaaacacctcacaaaggtgcacacctcggggaagcattgcctaggaattttggaaagaaaagcaatccaacagaagccacacattattcgacacagacctcccgcgcaggggaaaggaagccctaatccccacagtcctcgactccggggaaggcagggcagtttcccgaggcttgaaaaagtcggtgccactgtgcttttctttgtttgcaggtcagtgccatcttgtggccgaagtcatacccggctggagagctcgagcgccagcccaaaccaggaatcaaagggctc

SEQ ID NO: 332234 - DNA, 727 bp, Homo sapiens
  chr4:164264781-164265508
  hyper
ggaccggcaaaactcgatttgcccatcaagttaacttggtcggcctgggacccgaggccagggtgaagggacgacatcccggggccctgtggcttctccctagagcgcccaaacagcggcgtaggtctgggacgcccccggcccccggctttggaagaggctggcgcggagcaggcgccttggagcagggtctcgggggtccccggaacagtcacgtgttctcgagacgccgttaaacccccgccccctcttccccaccgccgcctccaggtcctgctcccgctgctgccgccaccgccggggtgcaggagcgatcgcgctgggccgcgctcccgggagcccagggcctgcagcggccggggcgccccgaggtacgggctcccgcccctccctgccaacccctttcgcgccgggtaggcctgcaccgaggggccgtggcgggtccccgcgcgggctgcgagtctgcgcaggtccctgggagcccgcacccgtctctggtgccagggcgttgtcgggggtcccaagagagcggggtggggaaggtgaagggagcgcggctggaaaaatggggattagggtggcggaacaggcacttgtcaggagtgaagagacagcggagagggtactgggctgaattctttcgtgccgagcaggtccctccggttcccaactcacccgggtggagcaggcgcgggccgaacccgggaggagagtgtcggggatccgc

SEQ ID NO: 332235 - DNA, 767 bp, Homo sapiens
  chr4:165304258-165305025
  hyper
cgtctctctgcctcgactggtcactccacttcctggagctccagaaactccctcagcacctggataactgcgacactcacccgtgagcgcaggaccctcctggcgtcttaagtcccagctctcagtcccgctggccgcaggaacacaatgacatctctcgcccaggagggcggttgcagggaaccgaaatcggacacaacagttgcagtgaacccgactcagggttgagcgcatcagcgctaaacccaagacaaaggctgccctgtgtcttccgtactcagcgctctcctttggtaatcggtccccgtccccttcaagcccacactaggagcgcgtgagcctgtgaagtggctgtcatcgactccgcgctttccgaggggtgcggctccgtgactagtaccacgccggtgtaaacagcgcgccgcgcactggggatccgccagaaacggcgcgcgcgcagagcgggcgctgggggccaatagtagcaactaccccaggctgcgggctggagccgcctcctctcaccagagaggcgcctactgggcgagcccgccgcccgcaggttgggtggcagcacccgccgcgaaccccagccacgctccccagtggacccaccaggcaaaggcacctgctgcctgccctccagggctgatgctgtgccaagccccgctcgggatcagggacaagccgcccaggactaccagccggagagaaggggctcccagtgaggctgattgaatgaatgatgtttgcagtcacttaccggc

SEQ ID NO: 332236 - DNA, 689 bp, Homo sapiens
  chr4:166299999-166300688
  hyper
tgtcatttcacctgcgtcgtcccggacgccatttggctgttgacgtggttccgagccagcaaataacgccagcagccctcccagatccacgccggcccgtctctccgccggccccctcctcgcagtggtttctcctgcagctcccctgggctccgcggccagtagtgcagcccgtggagccgcggctttgcccgtctcctctgggtggccccagtgcgcgggctgacactcattcagccggggaaggtgaggcgagtagaggctggtgcggaacttgccgcccccagcagcgccggcgggctaagcccagggccgggcagacaaaagaggccgcccgcgtaggaaggcacggccggcggcggcggagcgcagcgatggccgggcgagggggcagcgcgctgctggctctgtgcggggcactggctgcctgcgggtggctcctgggcgccgaagcccaggagcccggggcgcccgcggcgggcatgaggcggcgccggcggctgcagcaagaggacggcatctccttcgagtaccaccgctaccccgagctgcgcgaggcgctcgtgtccgtgtggctgcagtgcaccgccatcagcaggatttacacggtggggcgcagcttcgagggccgggagctcctggtcatcgagctgtccgacaaccctggcgtccatgagcctggtaagggc

SEQ ID NO: 332237 - DNA, 382 bp, Homo sapiens
  chr4:166414525-166414907
  hyper
cgtatctctacagcgtttctcagctttgatctggtgaagtttcctttgtgggctcaggtcaggcggagtgagtggagcccagggcggctgctgcgttagaaatccgggtgcagcagatggcgccctttcctcagctatctcgccccagagctgggaggtggtgccacaggctgccgattcttcgcggttcttcaggcaaaggaaaaggagctgctggagttaaaataccagtgactttctagtctctgttaagaagtgctaacgagctgcgaatggggagaccgaaggagggagcggaaagaggaggaaggaagaaaactgctgcgggttgtgtgtctaaaaattctcacacagtttttcatttaatccgtataataaatcc

SEQ ID NO: 332238 - DNA, 934 bp, Homo sapiens
  chr4:166793770-166794704
  hyper
cgcccacgtgagccatagcgccagcccatcggcaaggtctcagcgtttcctgctgctgcaatctgtaactcgattttggattttttttttaattgcagttctgaggatcttagttcttagcaaaactttgttggttaggagaccaacagtagtctgtttattttcttaccaaaatcgtgaagactcgcacacttttcctccattcctgcgctgctctaaggttaaacagcagcaaaggaaagaaatacacactcgctgtttatttggggggaggggaaatatggatttgcagctaagttatcacgatccttcgctccacccccggtctggcactctcaactgacacgtacatcatctattaattgctgtttgcgtacacagatacataatatattcatttttatctttggtaaaatataaatggaattgtcagcgcgctcctgtctgtttgtttgtctaaggctatcaaaagaagtcaagagaggaggctgtggtccggatcctgaccctgattgtatgaataagtaagcaggatgcaagtgattgggttagatggtgcgaatatttttttttttcaagttaggaagagggtaaaaagacaggctggcggggggaaggcaaacagtgcatccccaaatcctcacacttttgctctcttgcagtcagttgctttgctggcttctgcaggcttttaaggtctcgcggcgtagaaatgcctggcccccacccccttcctcggtctcccctttcaattcagatgtgctgatgtgcagaccggattcatcttctcggagctgcggcggcggctttgggctcaggcggcggcggctcgcgctcggccgcggagtcctggcagcagcggggacgcggcgcgggagtccgagctctggtggcagctgagcccgcggggcgccgctcgccgagccgcggccgc

SEQ ID NO: 332239 - DNA, 937 bp, Homo sapiens
  chr4:166794712-166795649
  hyper
cggcagccagaaggacgacctggcaggctgcgagcgccagcgccgccagagccgagtttgcctgcgccctccccgcctccgagtgcagagttccttacctgccctccgcccacccgtgggcccctagccaacttctccctgcgactgggggtaacaggcagtgcttgccctctctactgtcccggcggcatccacatgtttccggacacctgagcaccccggtcccgccgaggagcctccgggtggggagaagagcaccggtgcccctagccccgcacatcagcgcggaccgcggctgcctaacctctgggtcccgtcccctccttttcctccgggggaggaggatggggttgggaacgctttccccgaggatgctcgtgtggctggtggcctcggggattgttttctacggggagctatgggtctgcgctggcctcgattatgattacacttttgatgggaacgaagaggataaaacagagactatagattacaaggacccgtgtaaagccggtaagtggctctccaggttgggacggtggcgcgccgggggccgctgcgctgggtttcccatgggtggcggtgggagctcacctgtttccttccctcccgcgtcagcccctccgccgcccctccttctctccccctccttttccttcccttccccacccgcaagtggcagccgctgcggccccagttgactagagttctgtgccagtgggatccactgccaagctcccatctcccagtttgggaataaggtcctagagtttctgatccctctcccctcccccagcaaaacgaaacaagtcgtaaatatagcttgctgctgtaggttttaaattccaacactcagcgggctttatgcatatggaagggacaccgtcttctttcccctctcccccagggcgcggtttcccagcgcttgttcgagagc

SEQ ID NO: 332240 - DNA, 287 bp, Homo sapiens
  chr4:166795984-166796271
  hyper
cgcctctggcgccgctgccagcctctcgcgcgcgcggggcggcgcttccctctcgccgcctaaggtcggaggcgcacgtgcccggggccgctaccacgtgagcgcagcgcctgagggcgcccagcactggccgcggctcgtgtccgggcttcgggagctcctggttccttgctctattgggctgtggctgaggtgatccgcgctcagtgtggacgcacaagtaacttcgtaaaggttgcatggtggttggggctaacctagcagagcggtttgtaagcggaaggcac

SEQ ID NO: 332241 - DNA, 63 bp, Homo sapiens
  chr4:169552556-169552619
  hyper
cgccggtggaacttgcctgttaccttcttacaattccccccgcccctgggcaacgcaaaagcc

SEQ ID NO: 332242 - DNA, 1585 bp, Homo sapiens
  chr4:169752831-169754416
  hyper
ctgccctggagtcgcgtttattggacactctttagtctgtaaaggaaaaaaacacaaacaccggaggagaatcatcctaacaagccgacaacatatctatgggcctaaaaaacttaaattctttcccgttattagcacttctcgatcgttccaggaaagcccgatttgtagcttggctgccccaggaaggggcctgcgaccagaaagatgcaaagggcgggacaaggttacgagtgggtgcggggaagcctccctaacctgggggccgcgtcccagagctgcgagccacgcctcctctctcccgcccgccgcgccgccggactcttattttgaagggcggcgggtgaaggctcggagcctcctgagtcacccggcgggcgaggtataaagcccgatacctgccccgcgcccggtccgcggagcccgctgcagctcccgctcgctccggacgcggaatcgggcagcagcgggaggcggcccggagagccgaggtaggcgcggggaatcggccctgaggctggtggaagaaatgtgtgaattaaagggagtgcagcgtgcagggtgggccgcgagtcgggagtgcagggctcgggacagggtgggggcggggaggacaagagactcgtcagcgcactttccacccggccggttccttcccgagccctctccctcccccggcccgcgggagcacagatccctgaaagcggagctccagataggaatgtctgcatcatcttggcagggcccagacgggagaagatgctctgctgccacggacgatccctcccgctctcctaactcttctctgaacacctcgcacccccacggccccccgcccctctcttaatcttggccacgctccctgaggggtcagacctggggtgggagagcagagaaagcggggctggcagagacaggggtgagggccgggagaggcgatgacatcattccctggcagctggcggggagagggtggggacggaggggtccccccgacctgagccgagccctcccttcccaagcccatcctcctttctttgggatggttcaccccacctgggcgccattcaaaggaagtttgcgcgtaactcggggcgtcctttccccggccgggtgctgtgcccggcccgcagtcggtgtttcttctgggcctgggggcggcgtggagccggcggctcagtcccctcagtcccaggccttggcagccgctttgttcacgccgggcgcgggccgaacccgaacctcagctgcagcactggcagcgcgcaccggccacgcgtgggttcccggccacggccgggccaacaagggagggtcccgtgagcagccaggctggccctccccgggcctgggtgagctcccaaagctggagcgcagggctctaggccggccccgccccggggctgggggcttcccgcccgtttgtctcattttaacttttgggggcagctctgtcccgaatggtgagtggtccagactctagaaaggggtttggtcgcttgagcccggattgaggcttgggacctttgctctcttgctggggacggaagggggcgcgctgggcaggagagggggcgtctcggtc

SEQ ID NO: 332243 - DNA, 226 bp, Homo sapiens
  chr4:170679068-170679294
  hyper
cgcttccgagcgccgccaaccgcttccgggttcaaaagcctccaagccgaatttcagcgccgcccgggctcgccaatttaggggaaaggctccgcccattccccgccccctgagacctggcaccggacgcgttgaggccccgcccactcccgtgctgggcgcgtgcaaggagcgtcttctgtcagcgtagtctgcatctaggctttctggagcatcttccagggtc

SEQ ID NO: 332244 - DNA, 1749 bp, Homo sapiens
  chr4:170947105-170948854
  hyper
cgcgctcctcgccctcggaaggttacggttcgagcccaggatgcggcagtccccaaacggccagcccccgccccgcacggatctcgaagcatcctgcgaccccctggagcccgctgcccggaccctgcggcgtctcgcagcgcagcctccgccgcagtctcagccagcccaaacacccgaaagttcggcggccccggcgccgactcggccgccgacccggtgcggggctggctcccacccgtgcccctccgccccggcccgccgggggcccccgctaacctgacaccgccgcgccactcaggtggccgccgtgcacccctcgccatggccagcccgacagcggccgctgcgccgcactctgcgccggacgcccggtagcgcctactgcgggcgagccgcctccgccggcgcctcacagcgttgcgagctgcgccgccggctgccgggagcgcggagcttcccacctacaggagcctgggccggccggggccgagcatgcccagtgcggctcgccgggcggcgcggaggcgcgggtgtagccgccgggttttcgcggcagccgcgggcgggggcagcggggcgggcggtgcggcgcgagccagtcggtgctgcggagcggccccgcggaggagccaccggaggctgtagttgccggggagtcccgcattcagtccgctcagcctctgggccgggcctcggcggcccccagagccccacacccgcaggcccagggcctccgcggcagcgcgggactctcactccgctctctctcccgcccggggcttccaccgcaacttctgtgggcgtcgcatcgcacgcgtgttcaaggacacccaggaaaaggcttcttagggtcccatcctggggcgctaaatgggaaccagtcaacccacccccaagcctaccctgtctccttgcaatcaaatgcaatcacgagcaaaccaccttgcttccgaaagcttctcaggccttcccgggcgactgcgctgtaagtcttaaacgtctcttaaagcaaagtccacagatggaagagtctggaaaaaaacccagcgggccgttccctggtgactttctgagtggtggggttccaggaatttttttttcattttctttaaaaatattatttgtaatttccacgttttttctaatgaaccataagttgattttttaattaaaaagtagagtactctaaaattattaagtacctacagaagtttcgctacacgatcctgcaatgttagtggcttcttctcctccttatctccctttttttttttttttttttaattttaaaagagaacagagactctcaatttctggggcgggaccaggctccttcccccggctttttagtgcccgccctcttggccacaccccactccggcctttttactcccgtaccgccctcttcccggtgggttgctgcgaaaacccggaaaggtggactttccacattgacgctcccggcggctccggcagccagactgggcatgttccgccgccgggtcaggcattgctgtgccaagagaggagctttagcaactctcagtctctctgctcctctctgttcctggcaaactggcaaagtagtgcctctgaccccacgccccgaggtcggacctgcagaagtgggtcaggacccgactgagcatgctccgggcagtgccaggctgccgcacgcggctgcatctggttgcccaaggttgatgtagccgcggtctctcgtcacgacatcgaagctcgggaaac

SEQ ID NO: 332245 - DNA, 991 bp, Homo sapiens
  chr4:171010636-171011627
  hyper
cgcagagcctggctcaccgcgagcgtgcacaggggtacgcatggatgcaaccaagcggtggcttgctagggaaccctccttagaggctgtgcgaggaatgccccaccccaaaggagagatggtcaccccgtttctcactcatggtccggatgggagaagggtttctggctgcgctcgctgccgtgatgaaccgtgcgtaattcatgtcttctgacagccaagcatcaagcttcttcttcagtggttgaggactagaaaaaccaaagagcctcgtcaagtcctgcctgctaactcctcactctggcaacgccaccgcgagatgtgtccccccgctgcgtctggcttcccgcgcgcggtgcccggagaacgccgccgaaactccccggctggacgctgcgttcggtctcccggtcctaaacgggtctggggctgtgtggcgagcccggcaaagtccacgccgcacgcgctcctgcggccgccagggcccaggccggttttgccccgccgcgggcctcgccgcgccccctcccgccccgcgccgtggcctatggccgcccgcggcgcgcgcctccccgtcccggatcatcgccctcagagcgcagggcgcggggtagcccaggcgcgaggcgcttgcagccccaggccaatgactcttgacctcgccgctgggaatcaccgcaacccggcgtccgcgttggccggcctaggcgccggcccagaggctagcccaggggctgaccgaggggaccggaagtgcccgtgatcctaatcctcgggaaccatctggcggcgacttgggtccactgcagggggctcccgagctgcgcccagccgggagcggccccaccctcgttcccgcgcgctccgctggcctcctctcagtcactgggactgtgcattttgcccgctcagaccatggctatgctaaatacccatctttcgttagtgaaactctgggcactctcctgggaagcatcccggcgaccaagac

SEQ ID NO: 332246 - DNA, 1685 bp, Homo sapiens
  chr4:174089737-174091422
  hyper
cggagctctgcggtggccgccagaggggagggggccacggggaggagcggagggaagagcccggggaaaggtgtagccgaggggagttccggatctggagctggaaagggcaggcagcggagagggcggcagccgtagcggtaggggtgggggaaagagggggaggagagccggaggagggggaaggagggaggggagagcggtggcggcggctgcgccgggctgtgagtctctcgccgccggaggaagatgaggctgaagattgggttcatcttacgcagtttgctggtggtgggaagcttcctggggctagtggtcctctggtcttccctgaccccgcggccggacgacccaagcccgctgagcaggatgagggtgagtgacccgcccggccccctccggcggcagcgaccggcaacttgttttgtttgcccgcgtgtggagggagcaggggcggcggggtcgcggcacggcgtgggcaccgcagctccgcaggtggtgctggcgcagcgcgggccgagggggtgccgagccccgcgcactccgacctccctggccgccgccggcccgccccctcgccgccccttcctccgctcttccccgccccgggctccgtcgccgacacccgcgctgccgcggcagcggctcgggcggccgctctccgcgccgggactgcgggcggagcgggcggagagccgggtccggggggctgcggccgcccggcgtcccgctctggggggccgggaccgcagcgctcacggcccggggacgcggggttggtccaggctgcggcctgtggcgcgtgcaggcctgaaggaggcgagatgccgatgccgccaccgctggtccggtggaccaggccccttggtccagcctcccctcccgcagccgcccgtctgggggtgttcgcagccccgggctcccccggcccgcccgccggggagtgggagggcgatggcgccccgcctccggctcttacggagagcgcgcctccccctcaactccggcggcggggagccggggtgcgatgcgcggccgaggcctcgcccggaccgccggtccccctcgcgtccctgggcgagggaggggcggttggccggagatggcggaggggcgtccccgccccgcctgcccgccgcccccagccctcagcgcctggggaagcccctgctgtggcagtgctcgggcgctatccgggggaagaggagcagttcctcttccttggctgcggcagggctgcttgggccggaaaactaacttgtgtcggcgcccggccgccccgcgccggctgccggctagctcaggccgacgccgaggggagcggcggcgcggagctcgcggcggctccgctgggacgcatttgtctgccgcccagggcgcgagtgttagcgctgacattccttggatttggagggtttagtcaggcgcctcggaacattagttacccggagccgcgccgcgcggggaagggaccgcgggcactgcggcttccctgacccggcagcgggcggcgcgcaccggcctcgcccccgaccctgacctgcttccccccggatgaaccgttgcaccacctgcttcctcctccccgctgggacagccaactgggccggctgccagtgggggtaggagagggtatgaggggctcacgaccgccgaggcggcggggctgcaggaggagtcgagtc

SEQ ID NO: 332247 - DNA, 732 bp, Homo sapiens; identical to SEQ ID NO: 230799
  chr4:174430341-174431073
  hyper

SEQ ID NO: 332248 - DNA, 679 bp, Homo sapiens
  chr4:174437914-174438593
  hyper
cgcgcgctgacgttacgcagaggcgcaccgggttccgactccaccgcggcgccgagggggccagaggctcccagttcttccccgcatagttcgacaaagccctactttgcttccctgggtctgggatctcaacgtgaagggggccgagagagcggtgataaggtgctagaaaggaaacggcaagaggaaactaaaaaagtggagagaaattttgtgcgccgtagtgcttagcaagctggggaaacgaggagaaaacgagcaaagtctacaggggagggagagagggaggaggcagggaaggagaggaccacgaggctcccggcgcccaggccgccacttgggaggtcccggccccaaagcaggccgggccaaccgtccccccgggaggctcggggctcgggcggggtcacaattacacctcggctccaggcgaggacttaaaaaccaagtggtggggactgcagtctggaagcaaggccctgcggtcatcggaggggggccaggcccgtgcacaggaaccttttacaaggcatgtgggtacaagaaaaaaaatcaaaataaaccactttcatccagcatgggcagtgaaaagaaaagctgccttccagagggggcgagcgggagttttgaaattcattgtgtgttttgcctttatataaggagttttgcgttttttacc

SEQ ID NO: 332249 - DNA, 940 bp, Homo sapiens
  chr4:174439755-174440695
  hyper
cgcagtcccccttctccccattccagaacctgccgagcccctgctgcatctgggacccgccttcaccgtttcccaatcccagcggttagcccctgcgccccctttttggtctccactttgccgttcgaaaatgcctaggttggtggatcgaccctccgcggagcaaagacggatggctggcaggagcaggttcaggagctgggccaaggtattctctgcttccgcctttgtgtccgcccccccgccccctgctccccgcttcccgccagcatctctccttttctgctcaggagtgtttggcccggcggtccaccccggcttcccgagatacgctagagttgcccccacgtcctgtccgccgcgcccctacccaccgggttgccttcggggcccttcggtgctgtgtagtcggcgtggcgctgtgagctaggcgaacaggaacccccaggcccgccacgtctacgctattagcagccaggtagccctgcgggtcgaagatgctcagaggaggagtaaatgcagagaaaaaatagaggaaggaataaaaaaaaaaacaaaacaaaaacacgtaacatacacgcactcaaaaccaactttgggattggactttttcagtttcacacgaagagacttggagtatctggagaaggtttttgaagacgtttaggagggagggtgagttttctgctgagaaactcaatctgccatacagtagcggccccatctgggatctgtcactgctgacagcaccagagggcacagccgtgatcttctgcacagcctgcactccccgaaataccctccttaatcaaaggatgtctgcgcgcctgagctcagctgaccgcgccgggagcaccagggccgttggattccaccccagcccgccccctccccacgcacacagccacggcccctcgcgtcttcgcggcacgttaattaa

SEQ ID NO: 332250 - DNA, 625 bp, Homo sapiens; identical to SEQ ID NO: 230803
  chr4:174443429-174444054
  hyper

SEQ ID NO: 332251 - DNA, 865 bp, Homo sapiens
  chr4:174448153-174449018
  hyper
gatcccttaccacacgggagtgtcctcttcgtattaaaatatggaatgcttttcttcaaatatccactttttttttggagggggagacggggagcagatgcctcaaagggggtcaaagagaggggaaggaaattgcacataaataaaccggatgattccaaatgcaaggagtcctcagagcggagcgcggacggcttttccggagtcctgggtctgcatctggcgccttggcccctgctcactcgcgctctcctcctcctccttctcctcctcctcactgcttgagctccagggcccagacgtgctgcggccagcccgtccggcctttggttttcttgtcgttgctgctcactgtgcttttcaagatttcgttctggacagaggaaaggcgagggcgagaaaagtggaaagagaaattcagagaggatacctggttccacaccaacccggagcttcctgcgccggaggagacagtgaaccagagaggaaaggatacgatgggggagtcccagcccctgcagagaagctaccaaggttagcgctaccctagccggcggggaggcctcggcgctgcagcgctcaacaaccggatccacaagtttataaacaaccgcccgttttcgagtcgtttatggaggagcggggggccttttctcttactccagatgtaggggcgggagctggagtcggcgctaagtctggtttctctgttttcattagcaatcctagatccacatctaggaaaaatagggcgaaggagcctctgtttcggcctgggcctctcggccagaggctctcggcctccagctcagcagtgcctctcctccaaggcttctgaaatctctggttattcgggaggtcactc

SEQ ID NO: 332252 - DNA, 1076 bp, Homo sapiens
  chr4:174450407-174451483
  hyper
cgggtggtggggaaaaccacctaccagactcatttcgccctccgcgcccctccacgcgccccagcgtgcgcgcagccccgccgcgccctcggcccgggcccctgcctcagcgctcggcgtcctcccccaccccccaccccccagcccccgggcgcccgggcccgcccggcagccgcagagggggctgctgcagcccgggccccgtccccccgcctggccagccgggcccgcctcagcagcgctgcggccgccggctccccatggggcgcggcgagctggtcctggcaccgtgcgcccctggccgccgccgccgccgcctccggttcccgccttgctccacggcccgcgcttcggctcctgcttcccgggctgctgcgcggaggcagaatcctctcgtgctcatacaaaggtgccggggctcccgcgaggctggtacgcggagtctcgggaatccaagcccgggccgcggtcctggcaccgaagctaacccggaatccaggggcgagtctgagccgcggctggaggagccggtccagctgtgccggggggcggcggggtcgactgctcactgcaaagctacctccgtgcgaccctccccttcccgcctcttcccctccccccaccagcccgatctgggttcttgggcgcttattgttttaatgaaatttttggttgttgttgttttggtccttaaatgtgattttagctgcgagtaacgtgtcctcgctcctctcgcgctctctcggagggttttcagagaggtctcagtgcatccattttctcagatcctctcctttcggggcaaggatctggggccctgaatgagccttggagctcgaagaccgcggctcgggctctcggagggctctgcgcggtggccgaggaagctccggggtgacggcggtggttctcctgggctggacgacgtgaggggagcaagcggattttcccagcaagatctccatgtacagctacatctttagggccgctcgggttaatatatgtcgtcagaggctcctcacgccaatcccggggcggcaggggcggcgcctcgagctctcggcaataaaactttt

SEQ ID NO: 332253 - DNA, 122 bp, Homo sapiens
  chr4:174451765-174451887
  hyper
gctttgtaggtaatcgaggtaagaaaatatacgcaggcagcctcttacaattttatgcaggggcgccgggagcctcgtgacgggcggtgggggcccccacaaaggcgcggctgggagctggc

SEQ ID NO: 332254 - DNA, 1257 bp, Homo sapiens
  chr4:174458999-174460256
  hyper
ctctaggcaccccacgattagctgagtgatctagggcaaggacctaggcgtctctaagtcttagtttccccatctgaacaatgtggataatgacacgtacctggggtgggcaggctagagtaaatgggaaaatcaaagcgccagccagagcgggtcgcactgttagttcctgtattttctcctcctgcctctggtttcttccgttccgttctagctgcctgaagacccagcccgacagcgatgcctgtcagcccgcgtcgcccaccagggcagctgctctcccaactcgcatggggggcaccaccccgcctcggtgccctagagctgagcgcagccgcggctccacggggatcgccagggcctcagccctcgcggccggcggcgcgggagtgttgcggggcagggaccagagcgcgatcagagcggccacccccgatttaggtcgccagctttccagtcactgcgatggccactggggcgccccttccatcctggttaaattctcattgtgatccccagccctcttctcggttccccacacccaggaggccggttctccgccgctcaggctgggagaggtcaccgctccgggcagggtggacccccagctccgtctcggaggacctttcgccggaggcgagcaggaaggggttaaccatgagcctcccaccctcacctcccagaccctggtgccgggctaaggcctccgcttccctcctgaggtctcattaggaaaccctcaccgctattttcaacatttcctcaatcaagtgcctttaaatagagctgcacaaacagattggcggcaaaagcgtagatcttgtcacgattgagaccaatccagtatttcagccttgtttgctttgcaattacgggttggcttgtggctacggtgccaccggggcaaatctgcagccgctcgctttctcctctgcgctccgggcgggtggaggaagcgacccgcggagtcactgcagggaggagagggggacgcgcgcggggggaggcggcggagggcggaggagactcgcttgcaccccagggccgcgggcacgcagagctgtgttgaaggacatacttttcaggttcctgacagtcactgagctatacgcaataataaagtgcgtgattcgcgtgtggaaaccagtgtcgtgtccttaccagcttccttttctgtccaccttccctctctcttctacctccgtttcgcttttcttcagtgcatgttagcggtttgctggatttcccttctccctc

SEQ ID NO: 332255 - DNA, 381 bp, Homo sapiens; identical to SEQ ID NO: 230811
  chr4:175132785-175133166
  hyper

SEQ ID NO: 332256 - DNA, 1044 bp, Homo sapiens
  chr4:175138136-175139180
  hyper
cgtgcaatgtcactttaacctggatagcgtcaggtttcctcacgcataaaataagatcagatgatgccctcttggattctttgactgcaggacaatcattaggccatagtgaacagatgcgcttggttgccagaccgcgccctttgcgggtctatcaaaagggcaagcgcatattctggagctgtctcggagacttggacagaaagattcgaggcaaatattctaggctgggaaatttcgcgccgagcccccccctcagttagcctgtctaaaggctggtgtggccagagcgaggcagagagctctgcacctactgtcggggctgacaatgatttatgcgcttgtgacccacgtagaccataaacctagtttgctagacgtacagggaactgcgccgcagttaatgcagaggacttatcctctgacctgcaatgtctccccacctggtgctctacagctccagagagcagggatttcagcttttcctccctcattggatccaatttcaatcccctcggttaactgaaagtgtgttgacttccacccagccggcaggaccctaagggcgcctggagcagtctggtgcgggtcctggctgcagcatgcccagcagagctccgggtgcaggaggctgcaaagccaccgccgcgtccaggccccttgagcggaggtgggaacgatccgccttagagttcaaggtgaattgctgtgacagtggcgggtggaggaggggagttcgagccgttcgcctcggggaagaattatccccgatcatttatttttagatctgaattcctccagaacccagcagaggctgtggccagagccccagggccaggcaagcggccaagctgcgctctcgataaaggagccagaatggttccatctggttacaaacatatctttttattaaaaagcaatcagatcctgaagcgcttcccttgcggtttaccgctctccgcaggctgcttctccgaagccagcggtggtagcgcccactcggttgagcccacgcctccgccaggcagcgcctccgccaggcag

SEQ ID NO: 332257 - DNA, 463 bp, Homo sapiens; identical to SEQ ID NO: 230815
  chr4:175139429-175139892
  hyper

SEQ ID NO: 332258 - DNA, 884 bp, Homo sapiens
  chr4:175749925-175750809
  hyper
ccgaaactaatgtccgaaagtgtctcacgtgggccatgatacggagagatattcacgatcctgaaaatagtcttatccaaggcatggggaaccagaaagacagaatgaaaatgtacaatctaaccccgcatggtgttggtgtagactgatgcttgggaagcttcagcaccttagacagctccccgcagtatgcggaccccttctcagcattgagcagaagtggagagtcacagtgttataaatgtgcaggtgatttttacagtgaaattacaaaaatgagtgagatgaaatgtctgaagtgcctaggtgctgggcaacagttctctaaagctccagcagcaaaggaagaatgttcgttcttccctgactgagacccaggattggaggaagaagagcagcaacagccggaaagaggacgcctctccacctgctccaagcgccgcccgccggaatccagctctccaccttgggttaaaacccgagacccggagcgcggcaaagggaagcgggggtggggccggacaacccggtcctgtcgaccaatcacgaccgcacagcgggacggagtgacaggccacttacgacggtaggcggggcttagcgcttcaccctttaacaaaacccaaacaaaccaaacggcgactggagcgaggtgggcggaaaaagccacctgggaaagtcagcggttttgtggattaggtagtgtaaccccgcaggagggaccctttagtattcccttccgggaaaaggcacactttaggtcttctcggatgtgacactgtctgttacactctacaccgaaatacaagagtcagcagtaaacccagaccctggcggagggctggggaagagaagacaatgtggtgcgtgaacgcccgtggaac

SEQ ID NO: 332259 - DNA, 1090 bp, Homo sapiens
  chr4:176922585-176923675
  hyper
cgctcttcgaggtgactcgtgggaccctgcgtcctagtgctgggtgtgaatcggctatttcacacccagttcttcctcccctccgccacacgcagtcacattcctggagctattccaagctgcctccgctaagcaccgaataagcggaccctgcctggaaacttgagcgaagctgaactgcgccgaactccaccgtccagtgacccgagccagtgtggacgcccttttaatcacgctgtttacccaggtggaatttaggaagaatcagccttcagcctcaacctcaaaccttttgtgcaaatgggcacttcgtttggaaagggactagaaattgtccccagtctggccctgcaccagcaccttcctctgctcaaacctgtacaaagtggaagttttaggaagtttccatttctcgtgccccgtttcaacttgctccccaaagagaacatgaaaacgtgggaactcgggaggacagagatctccctgtaatcgcctcgctattcggatcctgggtctcttagtctttctttatttcccaaataccgcccccagcacggtagaccggacccccaggcttgggtcctggggccggcgcagaggatcagcgcccaagcgcagccccccaccctcccgacccactgtaaacagtcgggcaccctccctcgcctccaggtgccaccccatcgccatcgcctctctcccagaaaaaaaagtccggagacaagagggcggggggcgggggacgccaggcgcggggggaacagagctgggaaggacgcagtctgaggccgaggaacattcattttctttctataatgcccattcccgaggccgagcctttgggcgaggtgtacgcgcccgcccgcgcactcacccatggcccgaggtcctgcttctctgcagtccccagaggagagcgagtgaccagacgctgcgcggggccaagttctccaagccgcgctgaggctcctcgcgccctggcaagtgacagcctcgcccctcccagcggagacaactcgcagggcgcctggcgactctgcgggcgcacagacccctccctctttccacctgcctcctctgcgagaagccc

SEQ ID NO: 332260 - DNA, 615 bp, Homo sapiens
  chr4:176986744-176987359
  hyper
cgctataaaatgtgttaggtggtgagaacgctgatggttcaccgttttcctccactttcagcctcagtgcaaaccctctgcccaaagcctcgctccagtacggaggagctgcgccttcaacacactttctctgttgccaggtaaccacttctccctcagcctagtctccaagggtcacgagccacttccgcctccccctctcgggcgctccaatcagcgacctgtgtagctgtcacgtgggcctctggggcagaccctggagatcgggctcgcggcgccttccatcgtggctccgcgctggggcttgcggagcacgcttcccgcccctcggagcccgcgggcccggccgccccgcccccgggcgccctgagcgagcaggcggggagggcggggagggtccgcgcgttggtggtgctcgcctcgcagctgcgcccgccggcttcagcaccttccgctgtccgccgctgcagccgcctcctcctccaggtaagaagccggtggggccgcagagataccaaggcaagctcaggattgatgtgggtgatgctggaactgtcgcggcgtcatgcgagaggggctctgacctccctgtgatcgcggaccagggtaatgtac

SEQ ID NO: 332261 - DNA, 504 bp, Homo sapiens
  chr4:177116437-177116941
  hyper
cggcggaaagcaggcggggcgcccaccgggggggcctaggactggcttactcaagcacctgttgatgttcctggggaagaagctgagatccagaccctgaagccaacgcagaacggaacgagacaagcgggagctcttcggcgcatgcggatagaccagacacttcttaggcctccctcggatgggagctgctagctgtggcgaaagtgacggtgacttgtctagggctgccgcagtctgtgtcaaataccctttttcctggccggcggcagccatgacgctttctgggttgctgcggcaacagcagaaggcggggctgggccttattgctggcggcgcggtctcgtggggcggggcggagtcttatggggcgagacctcagcgcctgcgcaagcgccgcagcagccgcccgtacttccgctttactcagattttggaccgcggggccgggtatcgagggaggcaaagctggggtcccagtggtgtggctgcggtctggggagc

SEQ ID NO: 332262 - DNA, 985 bp, Homo sapiens
  chr4:180979285-180980270
  hyper
cgccctggctcttgtaggtgggtctggagtgtcacgtaggcaccccaactcgcgccgggggccgtggtccgcagactcccacttcattgccccggaggcctgagcccgccccgcccggctgtggctgcacctttcccgagagtcggggcagcggcggctcgaaagtggaggcagcctaaccgcgtagcgctgaaaccaccattcacaaatgcaaacccctgtcttctgtggataaacggtggcggcgcgcgtccgagcgtccccgaggggctgtggggagcccccggggagagcaggaaaggaagcggggtggcggtggctaggaagcgactgagccttctcgcccggccggcggaagagggagccgggtcccggcgcgccgagccagccgcccctcgcgcagttcctcggccgcggcgcggggttcgccccgcttctccccggcagcagccggctgggtgcccccggcacagcacagtgcggcaggcggcagcgtcctcccctcgcctcccccacattccctcacctcagccaaggcggcagccccggcgtccccgcccgcccggccccgcgcccccgcccggagcgcccccacccgttgcgcccccgccgggtcccgccgcgcagccccgccacgctgcagctggagcgaccgccgcggccggccccgcagaccggggaggaggaggaggaggggaagccggagagggaggcgcggggaggagggatggagccgggaggaggaaataaataaataaaacaatcacctccgcgccaataagagcgagggagagagcaagacgcgaccagagagccaccggggcccgctcgcgcgcctctgagaggctgtccgcgcgcgcgcgtgtgtgcgtgagtgtggatttgccgggactggagctggaaagttcaaactaaacgtgttgctctcgccgagtgccgaggccgcggcggaggctgcccaacttccccgggccaagtgagtggc

SEQ ID NO: 332263 - DNA, 293 bp, Homo sapiens
  chr4:183727549-183727842
  hyper
cggcttctgcggacatggaaaagccgtcccaacatccggcggccccgtgggcaggggtcctgggacgccccctcctgcatccccgggcgggccctgcaggggatggcggcgatttcaggaagggctccggcgccccctagtgacgcgcggctgtggtagggaaagtcctgcacgccaaaagggcagttcccgggccagaaaccgaggtgaaaccgaagagaaggcgccgccgctcgccgctcgccactctccaccccaaccgcggcggggccggctctctgaccctctcttcc

SEQ ID NO: 332264 - DNA, 268 bp, Homo sapiens
  chr4:183839058-183839326
  hyper
cgcagcgtccccgtggggacccttggccggtggctgggtcacagtttcacacactggatggggcagggaactgggtccggcgggggcgctgtgcctcgaggctcagtgcctcgaagctagatttgcatttggctgcgcctgacaggctttcagtttctgctcaaattgtgcggaagggcctgaggtgtttgctaaagcctgccgcgccctgctcgacccgtatcaccgcacaggcaccccacctgcatgttacctcctggtaatgctc

SEQ ID NO: 332265 - DNA, 2041 bp, Homo sapiens
  chr4:184019261-184021302
  hyper
tggcgtccaggccccgccagcgctgcacccggcattgtcccgcctggggcaggcgtccggtccctcggcagtgcgggccagcacgtacgtagtagctgctgaataaataaatgcctatgcaacagggaacgtcccggcccaccccggccgggccagggcctaggaagggcgggcgtccggcgccgccgtgggtccctccggcgtggccgcccacacctcctggccacggcggggctgcggtggggggacatcctggggcgggcggctggacggaagggactagagtcggggcgcgtccacggccaaccgccccgaaccaagcaggggaggccagggaccaggagcttccggggccccgcggctggagcgcccggacgcgaaggggcggcgggtgacggggcgcggtgcgggcggctacagggccggacgggagttcctccgctttccgccgcgcggctcgcggtctcagccgaggtcatcgagggccaggagccctggcggaggccccgccgtcccggacccaccgacgcactcccagggcttggcgctttcccaccaccccggaccgcccttggggtgccggaggggctcggggcgcggcgtggggagcctttgtgccctctccgcttgttgaggttttttctccggaggagagctccccgcccgccacccctttcctctcgaaagttttgtggtttccctagaagacgaaagaggttgagaaggttgcggagacttttgcaatcttccccgtccagaaactctaaaacctctcggcgtttggcccaggggagctatctggggtcaaggggagggagctggccgcacattccttcgcccgccttcctcccacctggagccgcggccccgcggggcagtgcgtccgagctggtgcggcgacgccggcagcggcggggttaagctcaggaatgcggcgcgaggaatgcgcatgcagatgaggcgggcgggcgcatgctaatcgcatgcaaatgaggggcccgccgctgccgcggcagcgccgcagcttcccggatccgagcccagacggcggcggctccggcagcctgggcgccgcgaccctcggcggccagagggggacggggcggaggaggaggaagaggcggaggcagcggcggcgagggggaggagggttcgctcgccggctccgacgcagacatggtggactgatccgcagcggggccgcgaacagcgtttcctgaggcacctcccgcgcgtggttccgccgcgccccgcgccctgcgcccctcagcccctcgccggcgcccgcgtcgcgggttggcagcctagcccggcagccgcgttcccgccgcgtcccgcgcccggtacctatggaggcgccgctcgccggcgaggccgccgaccatgcctaggagggccgggagcggtcagctgccgctgccccggggctgggaggaggccagggactacgacggcaaggtcttctacattgaccacaacaccaggaggaccagctggatcgacccccgggacaggtgggcgccggccgcgggggcgcgggcccgttcggacacggcggctgttgtcccggagacccggccgcgcggggggctggggcggcgccggcccgcggtgccccgaggggtcccgggagggatgtggggctggctgctccggcggggccgaggagccgcccgtacccgggctcctccgcccaccggcttcccgacgcccctccggggacccggccccgaggcaaggctggagtcgctgccccgggccgacgccgcgcgccaggctaacggacccgaggggccacctgagccctgttaggaacttccctaggcttcgaggtgcccacgtggaggctgcaggacaccttcggcctctgggcggcgggggtgggctagggcctcactgccagttggggaacgagccctccgggccacctgtggcatccctcaggccgtccttggcgcgggagcctgggctgcgagctcttggcgggggcgcccagactggccggaggtcccgagctgggaaggggctcccgccccccgcc

SEQ ID NO: 332266 - DNA, 1357 bp, Homo sapiens
  chr4:184718577-184719934
  hyper
cgaagggtggcccggagctgcaggtaacgcggtccagagctcaggccggagcgggccccgcacaccgtcccttccccgcagcgacccgcgggctgcgcccagggactgcgccgggcgcccgggctgcagggacgcgggcgcgggggaggcgcggccagccctgccctgggggacggtcgcgctccccgctggtcttgcagccacgtcccggcggctgttcctgggagcggcgggaggcggcctcggtgagccaggtcggcgcggcagatgcctgggaagatggagaagtttctgcagatcgcgcctcactccctggccatcgtcctgggcccggcagaggcgccggcgggggaaaggccaggggcagcccggcccgcgcccccggcccagccccgccagctcgcccggcaccacatcggctacgagatcttcgccgacttcaaagccgagaacatgcagcacttctggaacaagaaggtcacggccgcggtggccgagaccttcttcctgggctggatcgacgagcaggtcctgctgatccagggcaaggaggaacatctggaggcgctgcgcgaaggctggacgcgccgggccctgcggccgccctcgggcttccacatccgctgcctgggtgagtgcgaccgccgcgcgcccgtcccgtcccttcccaccggatcgcgtccgtgccgtgcggtcgcgggtgccccgccctgccccagcccgccgcgggcaccgccgaggctcccctgggtgcccgcgtccctgccgggggaggagccgggggccctctgcgagcgtgggattggggaacttcctggcaccgaaaggagggagccgtcccattcccggtgcgccgcccccgcctgcccgcgggagcctccccggtggcgggcggtgcctgaggccggccaggtgggcgccgcggctcggcgggcggctcggagggcgcggcgctcggggcgcgtgagtgtccccctcccggcactgctccgcggctggagtgcgcgggccgggcggaggtgggcggggaggattccggggctcgggtcgcgcggggctcccagctggagcggcggctcaggtgcgcccgggacgcccttccctgggcggcgactgcgggggacgcgccgggaagctagggttgaggctgagtgttgcgcgcacgcatttctcaacgaggcaaggctgcagagttcgtcttaaatgtctcacctgcagcacatctctcaagtcgttttgtgtgtctgagggaaggaagagacacaaagaggccggaggaaaaaaaatctgatcctcaacaaaagagagcaaaacgtaaagaggggcagagtcgcccagaggtgaaggtcgccgccgc

SEQ ID NO: 332267 - DNA, 210 bp, Homo sapiens
  chr4:185089657-185089867
  hyper
cgggggtgaaagttacaggcagacactgcccgcggggctccggacagcaaggagcgagccctctgagcctggccacgctggcccgccactgccctctgctggcggctgcggtcttcaccaccgcccgcagccgtccccgtagtccgccgagaggcgccaggctgggccagccttgaattctgggtttgcttctcccggtttgaaggccac

SEQ ID NO: 332268 - DNA, 365 bp, Homo sapiens
  chr4:185747631-185747996
  hyper
cgggcgcggccccacagggtttcccccacgctccctggccggaagaccttttctgtctggtgtctgcagagcctgacgtgggcagcgcccgcagctcgcgccggtgcaggggagctgagggccgactgcgcgctgcaccacggcggccacctgctgtgcggttctgagggcttccgcggttctgagggcttccgcgtccctgccatgcccatcttggggcttcagaagccaacacgatggttttcgggctcacatcccaaaggctgctcttccttttagcacctgggacctaccaggaacctcaacctctaacaacattggtccccgttaccgtggagtttgcgcccagcgttcgctggagggcc

SEQ ID NO: 332269 - DNA, 84 bp, Homo sapiens; identical to SEQ ID NO: 230844
  chr4:185938239-185938323
  hyper

SEQ ID NO: 332270 - DNA, 992 bp, Homo sapiens
  chr4:185939454-185940446
  hyper
cggcggaacagcctattaaaggcttacttaattactttaatgactctggacaggctttaaaacgcactcggcgctgggacggcgggcttgctgggatttgtaaacaggcgatcatgtgagactcagcggtgggactaaaagaggcgacactgttttgtgagggtcctcgccccccggtgcccgcggccgctgcgcccctgcgctccgcgcccgcgactgctgcaggcgcttgctcgcccgccggccccagtttaccgcctccttttcccgcccgagctgttgccatgcaaatgttattcctgggccgatcacgtgtcctttgaagggccacgtggattaacaaagctgatctgcccccagctcgcccccctcggctgctaattttttttttttcttaacttctttaaaactgatcttgaatgcatacatcctccaaacgcagctcccctaatcctatggaataattcaactcgtgaatgcatctggagccctagatgaccgctttataaggcagccctcggagttgggaggctgcagtctacctgggacactcgaggaggcacacgaggcggaaaagtggacgggtgccccgcgccaccgcctctcccgagggcgcgtactgaccaggatgtcagacaagctcaaggaacgcaaagtgagtcggctgagcccaaatggcacttgcgccctggtggtggaggcatctgactcaccgacccgccacttgggtggaccgatggcagggaagtgcccgcacgggactttgagtgtggaggaatctcgagtggtttgggaagggggtggggtagagagaggagggtgctcaaccaggtagaagtcctgcctggaggctggcggccacctccccaaaggcctgggtagggtggctggaaggggagcgcgccagcgcgggcgtcagaaggcagagctcacctggcccgagcgtggcgggccaggagtcccttcctagagcgaatctgagcagtgtgcgc

SEQ ID NO: 332271 - DNA, 619 bp, Homo sapiens
  chr4:186049498-186050117
  hyper
cgtgagccccgcgccctccccttgcggagattcggcctggaaagctccgcggctctggccggcaccggtttccttcccgcctccccgcactcccacccccgctcctagttcagagcgctggtggcgttacccacagccgcggaatcccctttactgttcccggaggagctgcgaggtggaactggccgcgcggtgggggctttccccggccccgggacgagcactcagcgtcccctccccgcgacgctccctcggaatcccggggaagagcgcagcagaggcggggaggaggcgcgagcggaggggaccgacttccaccgcacctgggtgtcgccagccccgcctggccctcggcgccgggaccccgacgcaccccgcgcatagcgactggtggcctggtgggggactgcgcctgcgaggccttcttcgcgcagagatatcggggttctctgaaccccagaaatgggcctggcaggggaaggaagctgcaagaaaggagttaatctgcaggatgctcaattctttctatgacaaatcgcttcactccccgctcggcaggtcagagctaggggtgaccgagttacgccgcgggcgctgcctgagcaacgctttctaccgc

SEQ ID NO: 332272 - DNA, 394 bp, Homo sapiens
  chr4:187026478-187026872
  hyper
cgccagccgcgccgcgggagcagtggggaccctgctctcttggcccagtagccctagagcgggtaaagccccgccccagccccccactccctccggcgggggctgctcccctgctcgcctggtggtcccagcgcggccgccctcgggccccggcggggtctgggccgcgctccccaggaacccgctccagcctggccccggagagcgagagctcggcgcctgcgtggcccccggggctggccccagaaccctgttccttacgctgcctgacatcggcgaggagggggcctcggacggcgactccggggatggcgaagcgtgagtagcagcgtggtccgggcgcgtgtaccttttgccgggacccccgacccctccgcctgccgcactcaccttc

SEQ ID NO: 332273 - DNA, 1311 bp, Homo sapiens
  chr4:187647047-187648358
  hyper
cgggtgggtggtcagtgaagactggggtgagcaagcgcccacgtcgccgagcgccggggaggtccaggttcgcctccgcacagaaccctgcaaggagcgcgcctcgccaggtgcccggactagagggcgctgcgcccctgcaaatctcgcggccccgatgcgccctccctaggcaccattgctataataagttacattcaaaataatgcacaaacagcatcgcctctcaagttctttttaacagtgctctatatgtattttatgaactcccaaagctatgcatacgaatctttcatcgccgatccgcacaaagccagagggatgcgcagctcctggagccgagaacccgtagggcgcacacgcttccccgcactcgcttagagccacacaccccacgtaatttcattaacgtttaaacttaaatgccaaaaggcatgcacgatttgaacaaagaactcaccagtctagccgagtcctcggccctgggctctaaagtcctcggcagctccgtgatcccctcgcggtgtagatatgtgttaagagccgggtttgaagtaccaactttgcctccccgggatcttcagcatgtccctaaccagagtgccaacgtccgtgccgccgggacccaggcggccgcatctccggaggcttccgaccagggcaaacttaagcaccaaacgcaggcgaaaagagagtgcgcggggccggaacgagggcccgggagcagccaagtttgtcaggacgtgcccaggcagccagccgccgagttgaggagttgcggccgccggctgcggcgactcgctgcctctttccccactccctcccccttggaggcggtgggggaggggaggtgacgtcagcgccccgcctcgccccccgccccgggcgcggacgggattctccggctgggcgcgccaccccgacagtggcagcagcggccgtggaggctgcgggggtcccggcctctgcggtctctctggccggccgcagctgtggcgcgggtgaaacgcccgccctcctccttcggctgcgtctcccgggcgccggcgagcgcgggcgttcctcgcactcagcgcctggagccgcctggagccccgctgcgcgcacttccccggctcgcggagcccctccggcggcgtttcccacgccgcggactgcaggtgatgctcttcctcttctgcagccgaaattcgtcgcgatgtgtcgcctgccagatttttgctgggcggaagcatgaacagtctctgcagactggcctggacgacttgtactttgtggccctccaacttctggatgtgaattttttttcac

SEQ ID NO: 332274 - DNA, 854 bp, Homo sapiens
  chr5:53214-54068
  hyper
ggggggtgttgctgcgagagcgggcaagggcggggacgccgcgctgacccggtcctggatcccacccgcgctgggctcagggccgcgggttcgggtcctgccgggcgtcccacgcaccggggacgggcacgaaaccgtccacctgcctcagacctcggctgacctctgggccgcgggagggcccgagggtcttttccgcctctgctcgctgttgtgtctccaaggtcagaatccctgcggccggggctgcgcaaaacgccccccacccccgcctcactgccgcccccgagtccccttctcaggcaggctgtgggggttggggttgggcttcgcgagcccaagcggacgccgcaaagagaatgagaacctcggagcgctcggggcgggcgggcccagcccaggctcttcctacccctgcgggggtccgagggccagcggcatcggcggcgggaggagggggcgggggcggggaattagggggaggcgggtgttaaagaggagaagggcgggggcggagggggaggaggagacggggcggggaggacccccaggtttccgagtctccgcccgggctttcgttcccggctgtgtggccccgcgcggttcccgagcagctccaggaactgaaacgtgaaggggacctcggtgcccggagctgctgcccaggtaaccgcgctgcgcccggcgagcagatggggggtagtcgccccagtcctggactccgcgagggggcgcggggagtccacgctgcggccgcgcagacgggcggggcggttcgttcctgcgagcgccggaaccggggaggaggctggggaagagaaaggggcagaggggcgggcccgggggccggggcc

SEQ ID NO: 332275 - DNA, 1660 bp, Homo sapiens
  chr5:472600-474260
  hyper
cgggcgacctccgcgccaggtgcgacagctcaggccggagacctcgtctgtggggacgggccgtgtccggggccgccaccctgagaccgggcgcgggcaggacggaacctgggggggaaacggggcaggtactggctttaggagtctaaatccccaaacgctgagcagacggaagacgttcctgccactttacctgcagttcaaagacctggcgagggcctggaaacggcgctcggcccaggccgcttgcgggcgctgggcctgcagccgctgcaggtcgggccctgagtcctggcgctcgggaggtccctgagtcggtccccgagtcagtccccgggcgcggggctcggttgggggggcccggaaccttgggctggtttcacgcaaatccgtttggggcgagcctcggtttcccggcagcggtgggaaagggcgcgagcggccagccatggcgcgcggacccttcccgccggcggcgtcacagcggcgtctcctcctgctccagcgcgtgcggcggtgcgtggcacgagggcggcagcgacgccagcttcagcagcgcggggcggcggcgcgcgcgaggccgctggaacgagcgccggctgtgcacgcggcgcgccgccgccgaacgcgcgtgcgcactcggcagccctcggcgctccggccccgcccccggcgcaggccccgcccccggctcgccctcgggcggctctgcgggcgcaggcgcggcactctcggagttctgcgcaggcgctggcgtgggcgaggcggggctcggggctcgcggtcgctgtagccgcgcggggatctggggtttctctgggacagcggcggcggcggtgggcggaccgtggcgcggggacgagcggccggttagcggcgtgtcggagccggtgtcacctgcgggagaggaaggcgtgagcggcgcgcggagcccgggcgctggggcgggaggggcgtccccgggggcctcagctgtccccgagcccggcggctctcgcctcccctcccgcggcgcaccccaggctcggcgtccgctggggcctcctcccaggacccgggttcgcggggcagaggcggaagcagcaacagcgaagccccagcccggccccgccacgtccccccgccgggggtcccgggacagcggcctcctcggcgcaggaaggtcccgccccaggccctgcagcgcgggaggtcaaggtccccaaggggacctgcttcctccatctcaaaccgccctggcgtcccccgggtgcctcccaggcccccagagggagctcagaaagcccagaccccacggcccgcccctctccctgctctgagctggaggcagagtccgggtctgcggggccggccctccctgtatccctgtgagagggtcggggacccggggcgtctgtctggcttcccccagccctgctctcagctccctgggagcgcaggatttggactcgcggactagctttcggagccacctaaaggaaatctcaggcggccctagtgccctcagctccgtgggagcagcagagacgccagagtatctctgtccgggctcctgagggaggtgcggccagcagggcgctagaggaggaagaggggctgctggagagagagagcgcgccaggttcaggtccagggaggagagagagcgagcgcgcgaggc

SEQ ID NO: 332276 - DNA, 1541 bp, Homo sapiens
  chr5:490616-492157
  hyper
ggggaccattgtgacgtggccacagagccacggagtgtgcccggctctcaaaggagcggccctgacggccagactgatcacaggctactccatcccacactcgacacagctgggaggaagctgggatctcatgggcgaggggccatctggcaaggtaggtgtgagcctcgaggggccgcgggtccaggagtctctgctacaacccctgaggctttcccttgggtgcggtggctagggcggctgccccatccgaggtgtgtcctgaccacctatggcatcgcccacgtgacgggcctgccatccatgagcctgtctgtgccctcggcagctttccctgggctgcacctggtgggtgatgctggacggcagggactacagggaggggtgagaaggcgccaaggaaccacgtgctgggtgaggcggccccaacccgggagctcctctttctccatgcgtctccttggtctcaggtttcagccccttgattcccatggagaggccgggccgtgctctctcttgaaccagacggaaaatcgccaattcttgtgagtctggttcagctggtggatttgtttgaggctgagttctcagaccggtgagggcggcaggtgccggaggcctgcgctcagccgtggggcccagctggtcaaagctaggctctgcctgaggtccctggacccacctggtcaaagctgtagcatccccggcagcagcggcgggcatcagggctgcaccgcacctggcatgttgagaggcgccagccacgcgtggtctgggtccggggcgggaggcagtgcccgagagatgaagcatccaagaccaaaaccgcgcagcagttctggctccggctgtggctgcagcggtggccgagcggctccggcacacaggctgggagggacggtgcccgatacaccaggctctgcagtcctcctcctctccctgggacctggtggccggcgagtgtggacggacccctacctctgcccagtgccggaggaagagcggcagcccctggccacctgcagcccccaagccgagctgccgagatgggaactcctccccaagcagaacacgtgctgggacctggggacgcgcaggggactggccttggtcacgagggcctacggggctgccagccacgtttctcacctgacacttaccgcctggaggccagggtgcggcaccccgacctttctgagatgaggcagcgccgcccctcccggaccccaccctgatcccggccggggcaacagtggcgcagactcacccatgagcccactgaggaagacgccgtagagggacagcccggtggtggccgcgttccacacggtacccacgacggcgtacaacaggatggtccccaggttgccgaagaagaggcggttgggcatgaagtagccggcgtccagcacgatggggggcagcaggtagaagaagaagacggtgggcgtcagtgtgaaggacgcgatgtggtcggccgcccagacgatgccgcccagcaccaggcccagcacgatgagcagggcgctctcgggaaccac

SEQ ID NO: 332277 - DNA, 1150 bp, Homo sapiens
  chr5:523704-524854
  hyper
cgaccgggattttctaaaaaaaaaaaaaaaaaaggaggcccgccaatgggaacgctgcgcctgtagggaggattctgctgggtttcatgcgggtagcaccgcttttcttttctgcccttgtaactcacgaaaaaacgccatcactccaaggacgtttctctaaaaagcctgagaaccccgaaggaaacccggccccggggactccctgggcgcgagcagcctgcagtctgcggggctcggagcggaggcggggcggagaccccacagggacccgggagccgggagtccggggctccgaggctgtgcccccgccggggaggggagacctcgggacccgcaggggcggcttagcgcggccagagtcgctcccgagtctcgctctgctggacccgagagccggactctcccgggcggccgccgcgcggctccgacctgatgcgcgcggccacaacgaagcccccaggcccagcagaggcggccgcacaccccgcgggcagatccggagaccccggggccacttaccgatcttggccaagctggccacgaggatccagagcgcgatgacgtagggatcctgcacgtgggcccactcgaaggtgaccacctggaagcccccgctctcgccgtgcgcgccgccgggctccacctcgacgcccccggcccgcgccagcccgcccagcgccagcgccagcagcagcccccggtcggggccccgggccccgagtccccacattgccgcctgctcagcgcagggctgggacgcgcatgtcgcggggggtcccggctgggctgggccgacgcgcggggctgggacccggcgaggacccggcgcgctccggtgccggtaccggctacagtccgatccccgcccgccggggtggcctttaatcccgcggccccctcccgccccggggcggagcctgcccgcccccgccgcgcactcgcgagcgcagacaccgccgcagctcccggcacgcccgccccgcccgcgcacgcccaccccgcgctccctggtgcccaccctcccccggagcccgcggcctggaggtccgggaggtcgcggcaagagcgagcccgggactgcgcggccgccttcctggggcgtggggagcacagcgcggggcagcgggacaggcggttccgcgcagct

SEQ ID NO: 332278 - DNA, 772 bp, Homo sapiens
  chr5:676510-677282
  hyper
cgctggcgccgcagaggtgggccccacagccttccacacaggggcatctgacccacggcccggccccttgcaaagccaaggccgcagagggggaaggtgcaggagctctgagatgaaagaggtgatgagtttgcggcaatgtaggaatgaaatacatcggccacaggaggacgcaggtgcaaaccaccgaaataaagccattgccacacaggcggacaggacggggctcagggagaaccgctgcttttctcgggtgcgatcatggtggggtgtcgggacatgaggtgaaatgtgctggggcgtgtgagggtgcctcagtgtgcttcccagcattcatccaggagaaaacagacaatgcgtgacacggcaacagacgtgtgcacacatgacacagaaacgcacgtgcacatgcagaaacacatgcacacatgcgcacacgtgcacacacgacacagaaacgcgcacacacgacgcagaaacatgcacacacgacgcagaaacgcgcacgcgcgcatacacgacgcagaaacgcacgcgcgcacacgacgcagaaacgcgcacacgtgcacacagaaacgcacacacgacgcagaaacgcgcacacgtgcacacgcagaaacgcgcacacgtgcacacacgacgcggaaacgcacacacgtgcacacagaaacgcgcacacgtgcacacgacgcagaaaaagcaaacggcacgatgcggtttcaaggtggtggccggagccgcctccttggtgccctttgccattttgccgccc

SEQ ID NO: 332279 - DNA, 210 bp, Homo sapiens
  chr5:1004778-1004988
  hyper
cgcctcccagaacgcggagtcgcggtggaagagggtgacgccgccgagagttcacgagcgtgtcccaagccgagtgaggagcgcgcgggggcgctcttgctcccaaggccgcacgagcgccaaggcctcgcggggagaatagccacggggggagacggggcccgcgctgcccccacgaacgctgttggtggggaccccacggctgcgccc

SEQ ID NO: 332280 - DNA, 634 bp, Homo sapiens
  chr5:1009142-1009776
  hyper
cgcggggcccggcggggcgtggcggcggcgatggggaaactgcagtcgaagcacggtgagccgcgggccggtagggcgggagggcgggcgggcgggcgtggggccgcctctcactgtcgttttcctctccccgcgtcccgccgtgccgcagccgccgccgcccgcaagcggagagagagcccggaaggtgagcgggcgagccgacgggcggggcggggggcggcgacccggcccgggaccctcagagctaggagcccgcgcgcgtcctgccctggagccagcagtggggggacggggccgcgggtctccaggagcgcgcgggacccccacgcctgcccctgcgcggtctccaggcgatggggacacagcgaaggcgcagcgcccgcggggctcacggcgcgtctctttccctcctcggtgcgggtttcccgcgcgtccgcccccggaccgcaggggacagcttcgtggcgtccgcgtacgcgagcggccgcaaaggcgcggaggaagcggagcggcgcgcgcgggacaagcaggtaggcggcggggcggaggctggggtcgcgctgcgcacccgcccgggggcggggagcggtgtcagagctgttcctggtgcccgcccgcggacaggcgagac

SEQ ID NO: 332281 - DNA, 207 bp, Homo sapiens
  chr5:1061585-1061792
  hyper
cgccgcacccgccgtgcgggatccctgagtctcacccgccgcacccgccgcacctgccgcatccgccatgcgggacccctgcgtctcacccaccgcacccgccgtgcgggatccctgtgtctcacccgccgcacccggctcatgggagttgggagcagctgtgcctgttaagcaccagtatttaaaacagcacaccagatcaggtgc

SEQ ID NO: 332282 - DNA, 860 bp, Homo sapiens
  chr5:1064412-1065272
  hyper
cggaaggggcctccccggggactcacagccagtgcaggggcgggcacggcgaggcgaggggggtccccacaaagcccccaccctcactccgtcagctcctccaaggaccagccagagactcacagcagagttcagctgctggtcatgtgtccagggaatcccccagcccctgcggggctctgggagaaggggagggagtgcctggacactttcagatggccgctcccagggccagggccttcgacagcctcagagcacacaccctcgggtcggtggcctcaaggcccatcgggacctgacagcgcacaggcctggggacgttgaggggacagcgaggagacagaggggacggcgaggagacagtgaagggatagcgaggagacggtgaagggacagtgaggggacggtgaggggacagcgaggagacggtgaagggacagcgaggggacggcgaggagacggtgaagggacagcaaggggacggtgaggggacagcgaggagacggcgaggggacagtgagggaacggcgaggggacggcgaagcgacggcgaggagacggcgaggggacagcgaggggacggcgaggagatggtgaggggaccgcgaggggacggcgaggagatggtgaggggacagtgaggggacggcgaagagatggtgaggggacggttaggggacagcgaggggatggcaaagggatgcagaggagactgaggggacacgggacagtgaggggacagcgaggggaggcagagggggacagtgaggggacagcaaggggacactgaggagacacacaggggacagtgaggggacggcgaggggatgcagaggggacaccaaggggacagtggggac

SEQ ID NO: 332283 - DNA, 991 bp, Homo sapiens
  chr5:1111396-1112387
  hyper
cggaacgggggacgggaacacggaggacgcggcctgagcaaggccccggtggctgccccctccccagccagggcgcagtccttcctgttccgcctctggggggtgggcggctcctccagggtcaggcgggggcaggacgggccggcccgggctagtgttaccggacggccgcggcgcaggggaagggagagcgcgggggacgcaggacgccccggctcccgaaccgcccgggtctccaccgccacccctgtcccactagggaccacccaggggcccgggctccctccggaggcgcgctccagcccctccccgtttccatggctaccagcagcggcgtccacacctctgcccccggtcccacccgagctgaccgtaccgggagccctggcagggcccctcgccccctagcgctgccactaacgtggggtgggggccctcgtgggggaccgagaacaggcggtgggggcgcgggaaggggcgcctcctgtacccccggccccgccgcccgcctccgctcccggatgccgggcccagacccgcgctcggggcgctcggcctttgtccggccaggtgcggccgcgctcacccgggctggggcgctcgggctcggggccctcgggggtgcccggagcctccgtccgctcggcagtctcgtccccgccgccgtcggcgtgagcctccacgggcaccacggtgaagttggtgggcatggccgcctgcagccgacagtccccgtcccggcccggcccgcgctgcgccgctcccgccgacgccacgggacttggaggcaggggcggggtccgaccgagccgccccgccccgcccgggccacgtgacttcacctgcttgccccgcggccccacgaaaagttggcccgcggcgacttcctgcagggaccccaacccaggctgcgtctgtctgaccgccgcgacccgggacgcggggctttcgctgcctgcgctcccgaccatcgcagagcccgcgaatcccc

SEQ ID NO: 332284 - DNA, 765 bp, Homo sapiens
  chr5:1155508-1156273
  hyper
cgaggtcagagggcgccccgggagctgtcggcccatccccgcggcccctgccccggctcggtgtcacctgcaggccccggacagggcgggatccccgcagggaactgccccaggtccccggagcgcgcggcgggcggcaggggcggggctccgctgggctggggggaccccaggcagggaccgacccccgggctgaccgggagccccacccccgccggcccgccaggccgccgccgcccacctgcgcccctcgaggggaccggcacctgcgcgcacctaccgtagcggccgggctcgcggcagtagagcagaatgggaagcgggtcctcgtcaggcggctcgggcgcggctgcggggtccaggccggggtcgggggcccggcgggggctcggggtggggcgctggctgtcgccttccttggccccgggccccgcaccccccgccgcgggggtcaccacgaagcgctgggacatggtgtccgcgacggctgcggggagcggggacctgagcgcggggagggcggggccggcggggcgggcgcgggaggccgggaggaagggagggaggccgggggggagagagggaccgagcgcaccgccggggatggggccgcgcggcgcggggaggggccgggagggcgaggcggactccggctgacacctcggcagcggtccctgcccgcggggggaccacggcctcggcccccgaagaacgaagagcggcctcggctctcgctgcgtgaccttggagacgccccagccgggc

SEQ ID NO: 332285 - DNA, 984 bp, Homo sapiens
  chr5:1294715-1295699
  hyper
gttcttcgcgccgcgctcgcacagcctctgcagcactcgggccaccagctccttcaggcaggacacctgcgggggaagcgccctgagtcgcctgcgctgctctccgcatgtcgctggttccccccggccgccctcaaccccagccggacgccgaccccggggaggcccacctggcggaaggagggggcggcggggggcggccgtgcgtcccagggcacgcacaccaggcactgggccaccagcgcgcggaaagccgccgggtccccgcgctgcaccagccgccagccctggggccccaggcgccgcacgaacgtggccagcggcagcacctcgcggtagtggctgcgcagcagggagcgcacggctcggcagcggggagcgcgcggcatcgcgggggtggccggggccagggcttcccacgtgcgcagcaggacgcagcgctgcctgaaactcgcgccgcgaggagagggcggggccgcggaaaggaaggggaggggctgggagggcccggagggggctgggccggggacccgggaggggtcgggacggggcggggtccgcgcggaggaggcggagctggaaggtgaaggggcaggacgggtgcccgggtccccagtccctccgccacgtgggaagcgcggtcctgggcgtctgtgcccgcgaatccactgggagcccggcctggccccgacagcgcagctgctccgggcggacccgggggtctgggccgcgcttccccgcccgcgcgccgctcgcgctcccagggtgcagggacgccagcgagggccccagcggagagaggtcgaatcggcctaggctgtggggtaacccgagggaggggccatgatgtggaggccctgggaacaggtgcgtgcggcgaccctttggccgctggcctgatccggagacccagggctgcctccaggtccggacgcggggcgtcgggctccgggcaccacgaatgccggacgtgaaggggaggac

SEQ ID NO: 332286 - DNA, 310 bp, Homo sapiens; identical to SEQ ID NO: 230879
  chr5:1645164-1645474
  hyper

SEQ ID NO: 332287 - DNA, 451 bp, Homo sapiens
  chr5:1667629-1668080
  hyper
gctcccggaggtgcgggcggagataggagaccccccccgagcctggggggggcgcaggaagggggcgcgcggggcgggggcgcgcaggaagggggcgcgcggggcgggggcgcgcgttctccctccgggcagcctcgtgggcggtagatgcagccaacgcgtccgtcaaagcggttcaggggcgctgggaagaggcggcggtgaccccgggacggcagtgggcccgaccgagcctcagtgggggtcccgcgtgtacgctggcctcgccctcccgcctcgcttctgggcttttgctccaactctcagccgccgtggagatcgcagggggcgtagggccaagccagggattccgctgtgccccgggctcgggagaggtgtcccgggagtctatggcagaatttccccctcatcctgcgctgggagaggggtctcgccccggatggaactccgc

SEQ ID NO: 332288 - DNA, 901 bp, Homo sapiens
  chr5:1800443-1801344
  hyper
cgcttatccctgccttttcaggtatctacccgtaactccattcgccttcctttttgtgtgtgtccgggtgagttgcagacgtggctgcgtccactccgcgctccctgcaggccccaacgcttcatcgcagcgcccactttttccacctgacccggcgaacaccgggcgggccgctggagtttatcagctccaggacaaatctgcctctgaccaccacgtttgctgggacatctttgggaccggaggttttcatgtgcattcttgtttctcatgcctttcctcctctttatcatcttccccgccactcatccatctctagtgttttgttcttggagtcacgtggtcctcaggctctgaccacagcaaaagaaaagctggatgctggagcttaagctgggatttatacccaagtcaactctaagcaaaacgggcctttttagaggctgtatttgcatgctgtaaaatcagtcggtgtactaggctttgttgcagaaatccccaatatacgtttcctctgcggctccccgtaaccacacacaggaacgcttgccttgaacgaggagaatgcacttccagtctcgtctgctaagcagttgactccttcacccaataattttgatatttaaatgtctcatgattatcggttaccataagaatataaacaatgtattttcagtttacatcctcccctgcctgtccgctaaataagaaccactgggtactcctaatcgctgaaggtttcgcacaccattgcctgcctcatcagggccctagctctagcctgcggctgcaactgcatgaggctgcacctgccggcgcaacggggccgcttaacttttaggccattgatgaaaagtcaaacaagcgcacagtactcggtgtaatcaggggcatttttagc

SEQ ID NO: 332289 - DNA, 2703 bp, Homo sapiens
  chr5:1874606-1877309
  hyper
cggtgagggactgggagaccgggatggggagagagagggaggccgggctgtctcgtcagcagcaggcgtgcccagggaaacgcaggtggcatacatcgcatgcataatctcaggagacggccactttaaatcttaattggttgccttttaaatatcatttaagggctggcttccctgcctctctctctagttaagaaggtgtcgtgtcaaactctattaccttgctggacgtctctcccttaagttaaaaaaaaaaaaaaaaaaagaaaagaaaaaagaaaaaaaaaatggaatcatcagccgcggtttgagaggtcgataaagcttttagatttggagacgttttccgggagcccatttcctgcggctaagagttgttaatggagcttaaggaattatcttaggccgggcggccgggagagccgtatatctcccgcgcctgttcccttgtcgagcctgaatatgctgctgtcagactcgcttaatgaaaagtaacgcaccgctgattacagttttatttgggctctatgtaaagagcgccgttaatttgcatcccctccttggtgtgtttgaattcgccacgcctgaataaccgagcgcgccggccctgccggcctcccggcgccttcccagcccttctctgacaatctccctgggagcccagtcgcccgccccgacccttccccgtcacgcccccgccccactgacatcgacctccctggcgcgtccactcagacacctaaaattcaccccctccgtgtcacctctttgcaaacgccccctccccaccccgctccgacttcggaattgtcctgcctgacacctccccaccccacaagatcagccagagggtgtttgggggcgcctaaggcaaaccggctggactgtgccccaagggaagggtgtgggggaagcgcccagcgaggggatgccatttcctgcgcgtccccttagaatgtggctgaatccgcctccccacccgacgtctttatttaacacaatctcgcagcttattcaaataagccagctttgtcagccagttccaccaagatccgggggctccagcgagatggaattcctatggccagggccacggggaggggctggggtcccgagggcagcaagcttggctggcggcaggagccctgggtcctccccaggagagggacccagagcccagaccaagtccaacccgccaacctgcgccacccatgcgcgcactgggggctgcagagccccgccaggctgcccgcggccgggagcgtaaggccggggtccacgcctcgattttcagtgtccgcagcccctaccccgcctatctgcgacgcaaggcgaaaccttgtttttgcggaaaatgcctggctttgtctagggctggggtgggggcgtctgggcagccaccctcggccacattaaaattcctggcgccccagcctcgggcctcaacgctgtcccccgagacgccactttcgctattactgtcaagtacccttgactctttatttttgcccttttatctattacaactaattcgagttcttttgcccttttcagtctaagacgtgggctttctgcaaagcctccccctgccagcgagctctcggagcgcggagcctttagaaattgaggggtttactgtcaaaatgaaaatttcacttcaaattaccttggctgatgctcgctcgccaggccgggggctcccgccgcagccttttgacaggcacatgagccgcgagcttccgaacctcgataatatcatctcgagcgcgaaagtcaatacggtgacagcgcgcggccggatacaatccaattacgctcggctgcccgggcgctcctggggctcggggtccggcggccgagggtccccctcagggcccggtccaggccctgtcgccagggttcagggcaggccccaccacgcgggggactttggtggcccaggggtccccacgaggccgcagtccgggtccgcccagccccaggctcctagaggaaagccgagcctagtgagtccctccaaggccgcccgcccgcaagacagtcctgcgtctccggctatcctgtcccaggcaagggcctgtggtcgcctcctcgccgcccccgggccgctcccgtagtccttgggacacctgggcctttgatgagcccagcagggcttcgggcggagggctcggggtggggggtggggggcgagaggagaggcctcaagtccgccaggcgcctgcgggggatgcggaaccgcctccgccgcggggatggggaggggagcccggatttctgagcgtagccacggcttggccgggccccccgagccccggatcgctccgcgggttccttccacacgcccttcccgccctgccccgaggcctttcctcccagtcccgcctccggtcggcggcctgtgaagctctgagcatttccccccgcggagccgcggctcgccggctttccgagcagagctgattgcggagcggcgggtccccggaaataggagagccgaggttaggaggtggctgagacggcagaggcgtcgaggccgccctaactcctgcctaggatgggcagaggccgctaacagagaaaagcaacgatgggctcccacgcccccccccgggacacggctctgggaatttagaaagtttaaaatctaatcaaagaaatccctattttttcaaacttctagagttgggtgatgggaagtac

SEQ ID NO: 332290 - DNA, 346 bp, Homo sapiens
  chr5:1879488-1879834
  hyper
cggtttgcacggtgaccgcctaggcatggggctcggcgtttgggacccccaagacgtcctagaaccgcagagaaggcactgtgcctgcactccagggcctcagcccccagtgacaacctcccaacccacctgcgttcttggagctcttgaggggctcctcccgcgcctcctcctcgcccccctcctcctcctcgccctccgcgtagggccgcttctcgtctgcgcacttgttccgcggcggccacgtcatcttgttctccttcttgaggcgccggcgcgcgttggcgaaccaggtggagacctgtgtgagggtcatcttggtgatgatggccagcatgatcttctc

SEQ ID NO: 332291 - DNA, 1917 bp, Homo sapiens
  chr5:1882899-1884816
  hyper
cgcgctccgcaaacttttctaaccgggtaacaaagtgagcagcggtggccgccgcgattcctttaacttcgcattccggaggctcgagggggctctgggaccgagcggcctcgcagcggcgacagaaatacatattttacgaaaaagaaaaaaaaaaaaacgagtcgcgcgaacccgtcaagtcagatgtgcgcggcttgaagcggaggaggctctgacgtcagccccacctcgcgcagcccggcctggccgcagactcgccggtcactcgccggcggctcaggccgggaggggccaggacagtcccggccgcgcggtggacggaggggccattcctccgggcgttagcaaataaattccatccgagtcaatatcgcccagcgaacggtgtttctctttagtcacccgagaacgagaggcacttttaattagaaattaattaatgagcagctgctccttcccgccccactgtaatcattcgtctcaattacaaatgagacctatgaaaggacacgctgaagatgtaatcaacagttaaaattagcccggcgctgcgcaggcggccggcccggcctcgcgctggcgcgctctgctccgagtggcaggaaggggctcgcaggcgccccgcacgcgtctcgtcactattgtttaatcgagaatcagcaacgcctcccgccggtttccaccctacgccggaatggactttcagaacccactgcggccgcaagacagcccgcaagagctggtcaaaatgccctcaggtgcgtgggggcttcggggccttagttggagcccgacaccctgagactggcggcccgagggctgtagggccgccccgggcgtgcgcccaccggctttgcacctctgggcagccgagtgtcgcggagaacgccccatcttctccaccgcggtcttttaagttcccgctcagcccaccgcccccacctcgcctccccgactttcctccccgatcccctttccgccggccgtgctccgccggcttccccctgcccctcgcggctaagccggggactgccgggcggccctgcgcgctcggaagagcaggttcctcaacccaggccccggcccctcccgctaagctcgtccctcccggcgccccgcagggctggctgcgagggagggggcgttgggtgcctggcggaggcgccctcccctgtccattttgcccagctttctgtctggggcgcacggagcaatcggaagaggggaccgagcgcccaccccaggactccctcggccagtaccctccctgggaccttgcccaagttcaaagcggaggccagtgagcaggcggcaagggggcggcaagggggcgcccgggccatcccgaacccgttccccgccttctgcgccatcgccctccgggaccgggactcgccccggttgccctcgccccctgggccggcctcccgtggtaagttgggaaggaagccgtgcaaggcagcgttgtgcagacttgctcagaaagattcctgggttcagacctgtgaatcgccccagggtcaccctctaattaatgatgacgtcctcgccctctccccagctgcaagcctgcctcccagaaacgaaatctgcctgctcttttgacagctcggttgaaggtgattgatgactatctggagaccacagtacacatcatataatatctgctgcgtaattgctttaatttacagatgaaaatacgagttctccgatcgcgttggaccggagcgggccacgtccgagctgcttgcagagggaaaccatcggaaataatgaatagccgctccatgcaaattattcagacagtttagcgtcggtagccgcgagaaatatataaagaacacgagtcaaatgacattaataattgtttctgaattctgtattgatttcgcggcaggccgcgtttctttcttt

SEQ ID NO: 332292 - DNA, 638 bp, Homo sapiens
  chr5:1885078-1885716
  hyper
ggtgtgagcccagccgggccaagggctgggatggggagtagagacccccagaggggaggcattcagctgtggcttgtcctttcctcacctatactcggggacctggcctcggcgactgtgagcactccgccggctgagggggagagccagggcccaggggcccagccacctatgccctgcacctctgggctctagtgcaacagctcagcccacccagacctgaggctggtgcatttccttccttccagacccggcggggcttaactggagccgaagccccagaacaggcggccattcatcttctgagcagagtctgggagaagcagcctccacttcccagggcagccagtacgtgggggccctttcgggggcttcctttgaccaccaccgccaccttctcctgttctcttttgcctttccagcctgtgtgcataaatcgacgctccagtccccaccagcgggcgaccctttctccgtgacccagaaacctggcctctgaatcggctttcccaggccgccgcacacacacgctccacttcctgcccgccagcaggccccagcgcctggggtccgggcccagtcacagtcaccctgcctcgggaagctcgcaactgcccaggaggcctcctgacccgccc

SEQ ID NO: 332293 - DNA, 826 bp, Homo sapiens
  chr5:1931173-1931999
  hyper
cggcggtgcctggaggcgggctcgccccggctgctccacgcccaggccggtccctggcatttcagccagtgggagggcgtccccgccgcccccgtgcctctccgcaggggctgcgccgcgtccccgggcctctccctccgccgtggcctggtctgcctgctccagggcgcagctgcgcccgcttcagcgcctcccgggtctgcgtggcctgctcggctcagaggcctccaccacggtccgctccctgccggacgccgcgctgctgtggccgcggtggttctgtggctgtgagggccgtttctgtccgtccacaccgccttccctctgcaggtgaggaatggggtctgcttcgtttggaatgtgcctttgccgggtcctgcctgacctccaccttccagccgggacgcgcgagcttttccgtttggctgagtcaaaaagggatcgcgcgcatcccgccgcccctcaccacgaagcgcagacacaggaggttgcagggtcagtgctgcggagaatcccagacggccccacagccgccgccacccgcggggcactcgcccgggctctgccgaggatgtgggggctttggtctccgcagagctgggactcccgaaggccttaccagaaactcaggagcagccccagccctgcagagcccgcgagggtggagacgggagacccgctgtggggcctgaggctgagatgccggcctgcggtgaagccggcgggacgttccaacccgctcagacccgcccactccgcagggcccgggcccaccccccggcctgtggcctgtgctgggctgcgcagccggcggtggagggacctg

SEQ ID NO: 332294 - DNA, 498 bp, Homo sapiens
  chr5:2038439-2038937
  hyper
cggcatttgcccaggcgtttcctctttacagacgagtcagtgtctttgccgtttggaaccttgtcttcactatgggatggcacttgatcgaggcggccccgcagcctgttccgcggtgctggcgtctccctctccctggcgaggctgccccgaacccctctgcaccctccctccaggtaccgcccctgggaggtccggtggggaccacggcccgcgacggccgccgcacagccacctcccggcgcgtgcagtgcgggcccggagccaacaggtggcacaaacgcatttgacttgggcatcgatcgccgcgcccgcccggggccgcacctccgccgccagcgtccctccagcccggccccgatgccgcgcaggcgcagtgctcttctctccgcgggccgggccgggtcagggtcaggatctgacccgagtctgggtcaagccatggcgggcggcaggcagcggacggcggcgcccaggcagtgcgccctctgctggcca

SEQ ID NO: 332295 - DNA, 283 bp, Homo sapiens
  chr5:2743466-2743749
  hyper
cgggcgcgggaggcagcgcccgcgccggccgccgggcaagcgccccggtgctctcggcagcccccggcccccggggcccacctgagattaaagcgcgaattccgataaatcagctctaaggaaaccctgggccgcggagagcagaagggctgtcgcggatccaccacgcgggcgccgggccgcggagccgggagcgcgcccaggcctgcacccgcagcaaagccaaggccaccgccccaaagcccatctgctcctggtcgccccgttttgccgacgtctcccc

SEQ ID NO: 332296 - DNA, 795 bp, Homo sapiens
  chr5:2750510-2751305
  hyper
cgagggccggcagtcgcgacaaccccgtaatggcctcaatcgcccgtaacgtgcttcgccgcggcccgggcctggcccagctcagtaacctcgagactcgcgagccgcccccaggtcgccggagcaggagctgcgctcgggccacggaggactcaggcggcccttagcgggtcacgcgcccgcaagcacgatatttgaaagcatggtccgctggacagagtaaggccgaaacctgggcgcctcgggccggactccggagccgcagctgaatgctcggctcctgggcctaactcggtgacccccaccgccctgagccccgcgagtgaatgcgaaccgcccggccgtcggctcagaggccgcagtgacgcggaccctcgcgccccacgccaatgcaggcgagcacacagcccgctccgaacgcctccccaggctgcggtgcggaaaccagggacaaacggcgccagaccccggccccggcggagacgcacttcccaggctctcagagaaaatcagccggcgagccgaggggacgcgcggggggcgcgcgggtcccggccgggctcagggacgtccccgcctgccgcgctgccctccccacccggggcccggctcagcctgcggggcggccaaccgagccggcgactcctgagtcgccagccgcgccacattcccggcggcccccgcccgccgaacccgagccccgctccgcctgagccccgtctgggtcccggcgcccaggagtcccgcgtcccgcccgcgcccggttaccatgtaggacgggaagccggcggcggc

SEQ ID NO: 332297 - DNA, 2439 bp, Homo sapiens
  chr5:2751307-2753746
  hyper
cggcggcgtcggccgagtactgcagcgggctcccgaagccggtggccgcctgcgccgtgaaggccgccgagcccgggtaggggctgaacgccgagcccgacgccgagcgcgccagctcctcgctgcgcggagccgccaaagccgacgcgccgtaggccgggcacgagtagagcgccagcgagccgggcgcctggtacaggtagccctgcgggtaggacatggtgggcgcggggcgcggggcccgcgtcacgccgagcagcgggcagggcgcgcggcgccctccatccacgcccggccggggcgcggcgcggcggcgggcacccggacggccggcggaggcaggccggcccgggtactagcctgggcggcccgcgggccggggcggcggcggggtggcggtggcggcggcagcagcgcggagccggtgggcgcagccgcgcgccaggccggcggtcggggtttgggggagtctggagtcgggagtgaggagttgaggaaggagcgctcgagtttccgagggacattggaacgcgcagctgtccatcacgcgctcatctgcatattcgggggcccgcccctcccctgctccgcccgctgcagcctccgggccgcggccgggggaggggcagagagacgggagggaggcgggggagggcggaggcgacggaggcgggcggcgggagggaccggcaggcttttgtggcgcagccgcctctctagcagctccggccccagcccgcggctcgcggacctgcagcccagcccggccgcgctgcgtgccccggcgcgcacccctcccactcccatccactcggagccacgtcccctgcccggctccggccggctcccaccgtccccggccaccgtcttcgcccctgcccggcccccgccccttccagccactaccccgcccccacccccttctccaccctcacggactaggcagaggccgcccgcggtcaggccaggccgggtccaattaggggactcacagcctgccccgctgtgcaccccgaggaggcccggcccctgtgtccaatccggaagtcgcagggaagtggggaggtcaggatggtggcgcccgcggctcgggtcttcctccgggcagtgcgcgcggctctcacttccacggtcccggacctgctctgcctcctggcccgaggctccccgcgtggcctcgcgtctggtcgcctacccctcgcggtccactccgcccagcatggacctggatccggggcgccttggttgcgaattgccaggagggccctgaggtgagctttctgcccccaaatccgcagcgcaacccccggggccctgaacgttacgactttccactgttgggaatgacgccagggcttcagctaagaagacgccgtcccctaaagagttttattttattttgtttttctaagttgactcctctttcagatttgtgttgtcaaaacactggggggatgattgttacctgacaaaccgcctctggcaggacctgaagcctcccagtcacgtcgagaacgggcaggagctcaggttggcgccgccggtgcagtgggcattacaggtagctcaggtgacgcgcggctggagtaggggggcggttgccttgcggggctcagaagcgaggcggttggcgagggttcctaggaccccagcttcctagaaccctctccccatcacgcttctccaacccttttccactcggggatggccgaagagggcgtctggctgcccactccgaagggtcacctatggggggcgctcagggggatggaagagtgtcaggtctgtgctggcctattgggagcacccacccagcaggtgcctctatcctcggaagccgtctcgggtgggtgcggtggagaagagagagcgcagtggcctggggcgggcctcagctcaggcctgcagccgactcctgcacccctgctggccctgcagcctgcggagcagccttagtgatctcaggacgcagggcatgttgcggcctccctgtggtgcggctgcagcggcgcggagggagcggagcccgggttgccagtctggtccagggcgcaagagaaacactcacggcatcaggctgtctttccccaggtgcaagggaaccagttgcaaactgcagtgctgtgcttgaggatggctcctcctgagccggcaggctcccggtaggcgcggtccaggcacgttacccctcccgccaggagctcccgagccgagccactcgccccctaccagttatcccacccaccccttcgcccacactgctcccccaccactcttcctacaaaccacacccccatcctgcacacatcctcttcaggccatctcaacacacgcacacgcacacacacccacgaccacctctccctccacccacagacaccccgttcccacaggctgggccccctgcaacgacccagcggggggtttcaaccttgttgc

SEQ ID NO: 332298 - DNA, 997 bp, Homo sapiens
  chr5:2755231-2756228
  hyper
cggaggctcgggctcggggtctccccggggacgcggccgactgagaaggccggggcgctcgccgggcgcggcgccgtcctccgtgtcgcggggacggaaggaggcgacgcaggccaggagtcgtgcgcgcgggcggcgagggggcgctgtggcccgtgtctgccggcccgagtcccggcaacggtgggcgcgacccacctcctcccccggcggcttaattcggggaagaagaaaaaacggcatcgaggcatttcaataaaacctaagcgactcctgatcctttctcattgtggttccttatgagctttcggtgtctggcggggaaacagttaccgttcgggggtgtggcaaacttttttggcaattaagatgaaacagacgcttttatgtgggtttcctttaatgaagtaacattggaaatgtaagtagtttcagtgcatcaaatcacatcgctaccgtattcgcggtcaccggccctcccgttccagggctccccgcgtttgtcgagggagagagcgaggcaggaacagggggccggggacatgagaagtttggctaagaaatttttcttttctttgaaaacaaaagcgttgttataaatggaacaaaatttaagtcaacatggaacccacatctctttcaaacgtcgtttctaggtctagtactctgtgagtaggttggactggatttcacgctcaaccggcatttctaggctctcaaagacgcttccgaggcctaaatgttttcctggaaaacacgtgcagaggagcatccgtggaagactgaaaggtccccgcagctccagtcctggcaggatgtgcaaggcctctcgaggttttcaaatgggcccccgaggcctgggagatccccgagtagccacgcgggcgccacttcagggacgcggggcggcggctactgtgggccgggagggcccccgcacgggctgctctgagcgcctggacccgggaccctgcgcgcgctcttttctttttctttc

SEQ ID NO: 332299 - DNA, 291 bp, Homo sapiens
  chr5:3121996-3122287
  hyper
cgaggatggccaggaaacagttaatttgatttgcgaggcgaaaaggtcgcatgttttgttcagccctttctcagccccttcctccctcgctcggccccagatccatggcagcgcggtttctctctgccatagtctcggctgtgtcatggctgcatcccacgtgggcgacacacagtgccccagcgccaggcagcggggacaatggtccccagctcagggggttcctttgccggcgtcccttccccttggaatgcgctttcttgcacctcctgtttacaaacaaaataaaac

SEQ ID NO: 332300 - DNA, 732 bp, Homo sapiens; identical to SEQ ID NO: 230917
  chr5:3599385-3600117
  hyper

SEQ ID NO: 332301 - DNA, 82 bp, Homo sapiens; identical to SEQ ID NO: 230918
  chr5:3600374-3600456
  hyper

SEQ ID NO: 332302 - DNA, 390 bp, Homo sapiens
  chr5:3600735-3601125
  hyper
ccccaggccagattcgccggcacagcagttaaagtcgcccttccagccggtacgcgacaagtgagtgctgtttgcttttgctatgggagaaggcggtggggaggggggaggaggagtggtcgggacccgggcggagctggctgggtggcggtgggggtcgcgcagtcctagttgaaggagcgctccccgccagccctgggcgccgggcgagccgaggagactggagtttctccccagccgggagccgcgctggctgtcgaccccgcccccagggctccgctactggaaccggcgtcgcccggcgctgcgtcccccactcacagtgcccctgtcttcttgtctcgctgtgtttcccatgcagctctctggccccgcaggagggaacgccgc

SEQ ID NO: 332303 - DNA, 592 bp, Homo sapiens
  chr5:3602671-3603263
  hyper
cgaagtcagagccgagtcccgaggtcagagcggccgtcctccgctcgcacccccagcctgtgacccgcccttcccggcttgctcgagacccactggcgccagtgctgcgcgtggggactccgtgcatggccgaagcgagggggaaagtcggggcgctggtgtcttttcagaggttccaggaaagagggaggctcgcgttaggactaggaggtgccagtccacggctcctacccgctcccgacgcccgcatccttctacagccctccaccccgttcctggtccctgtagaggggaaggtcctctccctgccccgaggcgggaggaaaagcggcgaagaggaggctcgaagggcgccgcgtagggcaagtgggccgaggacaccgggggcgcgtcggggagcggggagtgggcggggtgggatgaggcagggaggagccgggccggagcggagtggagtggaccgcgggcggacggactcgggccgggccccggggagcagctccgcagtcggaatggacgtgctccaggcgccctctatggtccgaaagcggaatgcggccttgagcagcgcccatctcgctcctggggtgtg

SEQ ID NO: 332304 - DNA, 859 bp, Homo sapiens
  chr5:6448769-6449628
  hyper
gccagcccgggacccggcaagggaaagggcaagcgcgcggcggagctggccccgcgcgacaaggcgccggcggctgcggcggcggcggcggcggctgcggcgggggccgggggcccccgcgagagggcagcgggcgccagggcggggccgggcccggcggtggcggcggcggcgggcggcagcctggtccccgcggcgcgccagcaacactgcacgcaggtgcgcagccggcggctcatgaaggagctgcaggacatcgcgcgccttagcgaccgcttcatctccgtggagctggtggacgagagcctgttcgactggaacgtgaagctgcaccaggtggacaaggactcggtgctgtggcaggacatgaaggagaccaacaccgagttcatcctgctcaacctcaccttccccgacaacttccccttctcgccgcccttcatgcgggtgctcagcccgcgcctggagaacggctacgtgctggacggcggcgccatctgcatggagctgctcacgccgcgcggctggtccagcgcctacaccgtggaggccgtcatgcgccagttcgcagccagcctggtcaagggccaggtaaggcgagcgcgccggggctgggggcgcggggccgagatcgggtctgcagcgccgccgggcgcccgggccccgtggtgagggccagcgccggcccctccggccatctcgctccctgctctgactacaccagcgccccacggggatgctccgagcgcctccacctcttttccctgagcgttttcttcctgcccctgctttccgtcccgtctctcccgtccccgtctggtctcagtctctgcccgtctctctggtatcggtctctgcc

SEQ ID NO: 332305 - DNA, 635 bp, Homo sapiens
  chr5:6583144-6583779
  hyper
cgcttctcgggcgtcggggctcgccgcagtcacgctgcacaccctcccggcctagggcggcgccggcccgggactcgcgtgtctccccgcggcgccgcgcaggacccgggcctcggagcccggcagcatcccctgctggccgctgggctgaggagccgcgggaggcggggaacgcggggccgcgggggctgggcgggccggagtgcgcggtagagggggcggcgcggccggggtgcgcggtagagggggcggagcggccggggtgcgcggtaaagatggggcggcgcggccggggctcgccagcaccagccctggaaccccatgggggacctcgacaacagcgcctttgcggcgtgggcccctttctgcagctcctccacccgcgcgctgtcggctccgggacactggggctttgaagggcgccagttcccagccgcacctgcacgcctaggagggcgcaggccgcgtgtccctgtgggaggaaggccccggcaacctgcaaagacctcacgtcacagaaacttgcggcgtttgcccccgatgcgcgcgtcaggtgctccgtcccttccaggtggcagaggagagggaagggtcgcgcctggtgggggcctgagagccaccgggctgcggtgcgc

SEQ ID NO: 332306 - DNA, 1483 bp, Homo sapiens
  chr5:9544956-9546439
  hyper
cgaccgttcccacgcacatcttgggagaaaccattccctctggagcccgatctgcccgaaaccctggggtctgaaaccctgagccgcggtgtgcaaaatccgtggagcagcggagggatgcctggtgaaaggggctcgcctagctgcagcgcacctggctggtggttccccaggcctctgcatcccccgccttagtgtctttcattaaccaaggcgcttggcggagttgagcccaagtcccattgcctcccggttcccctgtaaggaaagcaggaaaacctgcccaagccggtggggctgcgaggtggccgctcccgaaccgccaagtcccgacctccgtgtcccctgcccccggctcgcggcagtgcgagcctggaggcgcgccgggggcgggcacagaccagtgtgcgcacctttccgggtgttgggcaggggtcccgtctcgcccaccgcgacactccggctccttacctctccatgctcagacctcggcacaggcgggtacacaaacttccagcccgtgcactagctcaactgtgggcgcccccggactgacggtcgtcctaatcctgtacgcgcaacccccgcccaggtgcctgctgatggatcccacccgagatcggcaccacccaccagccgaccgctgcagtccccgggtcccggccagcggcgcggcgcggcgcggcgcggtcaggggctcctgccaaggccacgcaggaatcgggcgggggtcgctcaccaggtgcgaggagcgctggtgccagtcatccagcgcctgggggccagagcggctccgaggatcctcttcagcacctggctagggaagtggaggcagcagctgcagccgccccctgccacttccccagagccgccccctactcgctgagttccagaatgggggcaccggcttgggggccacgagcacggtccccgagcgcgcggccaaccggtgggtgggcaggttcgcgcccagcagagacgaccctcgaggtggcaaagttgggtgtccaagccagctccgcggggcagtcctgggtgggagaagggagcgtcccgggatgagcgacactggccgggccgcccctgcacggggaaggtggagggccggggctgcagcgggccaagggccgcggctggcctgaggctgcgaagcccacccgcggcgggaaagcagcgctcgggagcgggctcagggagagcagccgccaccggcgccgccttcccggcaagtagatcggcgcggggcgagcgggcgcggagagcgcggggcggagagcgctgggcggggagcgggggacagcctgggcccacccccgccccgccccgcccctgccccgcccccgccgccgcgccgcctcctcctcctcctcctccccgccggggtgaaactcgagcgccccacccgcgcctgacctccccgagcccctccccgggccccgccccttcccggtacaggacccccaccttcgctcctgggagcccc

SEQ ID NO: 332307 - DNA, 305 bp, Homo sapiens
  chr5:10307607-10307912
  hyper
actatgggaagttccttacccgtgcacgcggcaaagaccttctttgccatagtcagaacacacgcgggagttcagaggagcggggcccgggcttgtgtgggcttgtgtgccccggggacgcgcacgtaccttgtcccgcggcctgagactgcgctgcaccgcgcggaggccgaacccagaggaggcggcgtggcgccgggcggggacgcgagagggacgtggacgcggcgaccgaggacgcggggatcctgcgggaccagtggctccagtcgtagcctcctgggagagccaagcccggagggggc

SEQ ID NO: 332308 - DNA, 687 bp, Homo sapiens
  chr5:10333412-10334099
  hyper
cgctcttagcgccagagcaccccagccgtcctgggagcccccgaagccaagcatattcgaactccgaatccgctcgatcgccggggacctgccatctgggttcggttccccaaggtcgctgccgaccttagaccgcgggggtgtggggcgccggggaaggagacagaaggacaggcgccgcccagggccgcggggacacttggggctgcgtcctgggtgggcgcgatgctcccccagaacgactggagatggagagtgtcggggagggaaacgggacccacgaattcagggcgctgagtcggcggaatgcgccctgactccccctggccgagagccggctcagaatgaaagagcgcggagtgggaggtctgggaaatggcagtatttgtattagggagagaaggaaacaggagtgggagccgcacggcttggggaacgcgggagatcgcggattgcggggatagcgcagcgcggctgcccggggctgctgggaggggccggacgaggccagggcgagcggggtaactgcggccggccggacggcggcggtaaccggctgcaccgaggtggttccaccaccgcgctgggcgcttgcggttcgtctgctccaacgaaagccgcgtcccacgctccctgccgccgcgtggttttgcctcctcagaggggcagcggcgacccaggggctgg

SEQ ID NO: 332309 - DNA, 468 bp, Homo sapiens
  chr5:10354870-10355338
  hyper
cggttatcgtgcaaatgcttttctactttaggtatatttatgggggtatgagcgtctttcaaccttatgggttgcgattttggcgattttaaacgaaaatgaattatcaaacgccgtcatggagtgcaataatgagtgaaaaaagtttgatattatctatgtaatgagttgataacgacttatttttttttaaagaagtcttgcctttaataaatacctcaactataacatgtggcacttgatgtacattcgcgttccatcttcgtaaaaagcctgtggaataggtaggtattatcttttatagatgtggaaatgtaggcttcgttattttaatagcttgtcgaagctttacacaggtagtaagaggcagatttgaacctaggcattctgattgcaagtaatttccctttcattatgccacagtgtgtttattatatacactgagtgtagctaatcgccactggagac

SEQ ID NO: 332310 - DNA, 208 bp, Homo sapiens
  chr5:10563418-10563626
  hyper
cgcccatccccggcgccaggactgacggggagagggcaaggccgggccagaggggctgtgggcctggactgcggctgtcgcccgcggccctgctcttttgggcagccagacgtggggtcagcgcccagtcgcagcctccgggggtgagtccgcagatccccgcacgtgacacaggccaggcatggggacggggagttcctcgtcgtcc

SEQ ID NO: 332311 - DNA, 1429 bp, Homo sapiens
  chr5:10564301-10565730
  hyper
cgcgaggggaaggccccgggggaaggcgtgtccccgcgccccgccccgccccgcctcggaaagcccccgcggtcccgcccaccccaggggctcgctcagcctccggagacttttttctttgagcgcagccgcctggtgccggtttccgccgagctggagcgcgcgggccacggcttctctggggacgcagaagcgagaagcggggacctcggcgcgcgccccgcgtcccgctcttcctgcccgcgccccggcccccggcccgcgccccggccgccggcatggtgctgctggccgggaccgggccggagggcggcggggcgcgctgcatgaccccaccaccgccgtccccaccccggggcgcgcaggtcgaggaggaccccgctgactacgaagagtttgaggacttctcgagtctgccagacacccgcagcatcgcctcggacgactctttctaccctttcgaggacgaggaggagcacggcgtcgagagcgcggagagcgtcccggagggcgtcccggaaagcgtcccggagacggcgaccctcctgcgcgccgcctgcgccaacaacgtggggctgctgcggacgctggtgcggcgcggggtgagcgtcgaggaggcgcaggagactgaccgcaacggcagggtaagcgggcgtccccgcaggatttgagccccctcactgcccccactcccctcctccccaccacatccccgcgcctcccagctcctggctccggaccggtccctcggtcactcagccgccgcccagagcgccttttccccgctgtttgggagcgcggtgccctgggtggcttccccgtctcaggctgggggacgcggtgcggggagggagcagtcgaggtgtcagcgcggcagaaacgccagtccggcgtcctcaccgcatccccttctcgtttaccggtccccgtggacctcctgactgaattcgcgctggctgcccgtgctgcaatccaggatgggcttcttgcggcccggtcccctcctgactattacctttccccaggtccctggcaggggaccattcctcctcccctgcaggagacagcccctcctgcccagcgccccatttggcccctgggcccctcgcgccgcccttgtcctaacacgctggggcgcagatcggctcctccagccgcaatgatttggaagcaacagtttcttccctcgccgggacagcttggtcccctaccccacctccgctgagctttgtggcccgcgccgcgaccagccaacgtgatctctgactggtctgtccgcaggtcaccttcgcgagccaatgccagccggggctccccagagtcagggcatagggagagccccagagccgcgggcatccacccgggtagggcaggaggcgtggaggcaggcacaggctatcctttcgttatgaccagattcagagaaaac

SEQ ID NO: 332312 - DNA, 828 bp, Homo sapiens
  chr5:11384907-11385735
  hyper
agctggtggatgggcgaggaggagatggtggactgcacggtggggggcgaggtcacgcggatcggggacaggccggccgaggacacgacgatgttgatgggcgagctggtgctgtaggacttggccaggcggctgggcgactgcttgggcgaggagccgcgcggcgcggcgtaggtggcgccctcgggggccgagccgccgcgctgcagcttggtgggcgaaccgccctggggcgcggccagcggggagcccccgcgcggcggcgcgggcagcgtggagctggagtagtagagcgcggcggcggcggcggcgggcggcgcgtcgggcaggtggaaggcgctgcccaggctgggcgcgaacggctcccgcggcggcggcggcggcggcggcgcgggctcgggccccgccaggtggccggcgcggctggtcgtgccctgtgcccgggagaggagagaacacgcgcacttagcgagggagaagcacacggcccacccggcccagcccggccccgagagcagaggcacaccggggatgccgcgggcgcccggcggctctgcgatcccagctgcgctcggggcagtacgcgaacctgcgccccgaactctcctggggcggatttcttgtcctgacactggcacaggccagctgactactggagggaagtcacgtttgacaaatgagacctgtgtttgcttacatgtagatgttatttcggaaatagcagaagcatcgcattagtcacataaagatttttaaagccccaccccgacagggcaatcatgatctccctggtcgcaatcacaatctgtttgttttaatgagaaattc

SEQ ID NO: 332313 - DNA, 1537 bp, Homo sapiens
  chr5:11903295-11904832
  hyper
cggcgctttctggagcctggctgtctattgtcagcacgcagaagcccccgaaacctgtgaagccggctgcaaaggcttgctgggaagccgctaaatatagaccaagggggctcagggtctggcaagccgcgggagcctgaagacacggccatggacgcatatgactaagtctttccattttgttctagccaaacatcgtaatgacattgaacataagggcaaaagactggagggaagtcctccccacccccaccccgtctcctcccgtatattagggacgtcatgaatgcaccgagtatgttctcagggtggcggggagcagcattgtcggtgttgccctaaatacgcttcctcccggggagatgggtggcagggagggggagcacgcagggcagccacttggtaaccgctccaagaaaggcactaaccccggacccccttccaggcacagcggcttccgagggggacctggcgcgatcgcggtcctccccgaggcaggcagaaaccccgcagcagccgccgccgccgcctgccggccgggagcccaggaccacccccaccagcggcaagaggaggaggacggcgccgggaggaggctgcgcccggccccggccgcccagccccgcaactcacccaaaggcgcggcgcccggcggcttcctcgcaaacatgcaccctccgccggcgacagctcctcagtccgggaagaggcgtgcgcggcgccgcccggcttcagggcaaggtcctgaccttgcccaactgcagcatcttccgcttttgttgtctgagcgcggccgcgggacaagggatgctggcgggcggcaggggcgagcgccgcgggcgagaggcggctcccgacgcgagtgcgcagcgcccggcccggcggcccctccgagctcggcgagcgcagcgccccctgcccggctccgcgggctccacgggctcctgcgggctcctcggggctccgggcgccgccgccagccggccgggctgagagagcagccgccgcgcccgcagctccgctcagccggctgtcgccgcgggcgcgagcctggggccgccgcggcgcccggcgccgagcgctcccgagctgcgccccgcgcgcggcccgcgccacctgtgccgccgccgcctcagccgccgagggcgaggctcctcccgcggcgcgcggcagcctcagcctccacctaaacctcggcggccggcccgggcgcccggctagtgagggagcgtccgccccgccgccgaaaccggccccgggtgcggagcatgcccagtgccgccgcgagagcggcgcttcgccgcgcgcgttccacttctcctggttttcgcggcagcagcggcagccgcgggagagaggggaggaggccgcgggttgggagagggccgagcatccttgggaacgcacgccctggacctgagatgggtggatgctccggagctaggcgaaagctggaagggacccgggaagggatggaaccccaggttactccgcttccctaattcacgtgcaaggcgctgacagttgactctggtgg

SEQ ID NO: 332314 - DNA, 873 bp, Homo sapiens
  chr5:14142660-14143533
  hyper
agccggggcataggcgttttgaactagaatattcgtccagcgctggtttgacacggatcttccgcaaaggaacatttcttttggcctccccagaccccgtcatcttccccattcattctggcggagtaaggactgagaaaccgtgaacccgaggttcagcagccgaaagtcccctgggagatggggatacaccgagaggaatcccattttacaggagagctttgtacccttaggagtaccgtggcctccgggactggagcagataacctgttttcgggccctctatgttcactcaacaactattaagaagccccctccccgagccagggccagcgctgagcccactagggaggcacccgccccggcccgcgtcaccccgccttgcgggctagacgacgaaacgcctcggcgctcaggggaccgcgcaccggtgcaggagccagcgccccggttgggggcgcaatgccgggcctgggaaggtccgccccggctggtcagagctttcctgcgccttccaaggcttggagctgccccggggaagcagaccgaaccaaaccgaacgttcctgcagcctccccgccagccctgcgggagcccatccgcccaacgcggccccgcccctcccccaggctccgcccaccgccgagcccaggctcggcccttgacgaagttcgccggaaattaccgaagcccctcttttttttccttcctctccgttccctgttctcccttttcctttcacccgggttccctcggccgtgatttccccctcccccctccttccttccccattgaaatcaagatggaggctcgcggcagccgccggcgcccgtgatcccggaggtctcgccggccacgggcccccgccctcgc

SEQ ID NO: 332315 - DNA, 125 bp, Homo sapiens
  chr5:14205146-14205271
  hyper
cgtggctgcagtagagacagaggccaacatttgtggtgcaaagggaagtgcccacggattcaggagggcacaggattttattgtcttaaatcattaactattgcccgaaaaatccacagaacatc

SEQ ID NO: 332316 - DNA, 175 bp, Homo sapiens
  chr5:14581611-14581786
  hyper
cgggccttcgatgaaaagtgccaaggaggtcgccggatccgcccaagtggaattcccaagatgtttcccggggagcagcctcaggaacgcgcctggaccccaggagtagcttcccgccccgctgccgagcctcggaggtctccgcagttctggggcccgcgaccccgacagcgcg

SEQ ID NO: 332317 - DNA, 867 bp, Homo sapiens
  chr5:15500076-15500943
  hyper
cgttgcttcgctccgaagggttcgcgcgtagcgcgctgagccggtgcccaggctggggcctggagccgcagccccgaaaaggcgcgctgcccctttaaaaggccgcgcatctccgggccggccttcctccccggggctccagctgtgattgacgctgggcggcgagaggaggcgcctggcgctaacaaaagtccggcccgcgggcgagctgcgccgggtcgctagtcttcactcgctccggggacccgcaacaagtggccgccgcgccctccccggggaagccgcgggcgcgcaggggcagccgaaggaggcggtcgagccgcggagcccaggggcctgcccggctcagcgcccaccggaggggatcggggcgggcggatggggacccggcggcggcggcgcggtgagcctctgggcggccccggggcgcgggctgtgcgcggcgctgcgcccgccggcccccagcgcggattgtaagtgctgcagctgtgcccggccccgcctggagccaccgggggtgccaggaggggacgcagcaccccctcccactggagtgcggggacctctccaggccggaggtcggccccggagcttgggggggatgtgcagctaacggtcccgtcgggcgggctttcctcgggccgagcgcgcaggacgtgcgccgcagctatggagtgtcccgggagacggcgggcatgacggctacaggatgggcgcgaacaatggcaaacagtacggcagtgagggtgagtgggccgcccgtcctcagactcccggatcgcgtccctcctcccctttccctcgccctcccgactgggaagggaggttctcgcccgcggccgtgacgcaccccatttggcaccctgt

SEQ ID NO: 332318 - DNA, 1370 bp, Homo sapiens
  chr5:16179011-16180381
  hyper
cgctcacagggcagaaccagacgagcctcactggaggcaaactgggaggtaggcgtgcgctgtccgtggtgctgaaagcttgaccggcgcgagctggagccgccaccggctgcctcggggtctcgccgggccttacctgctccgcgccctggaagcagatcttgcagatgggctggtggtgctggtgctggtgcccagcgcgctggtcgccgccgccactgctgctgctgcggctgctgcacaccgagcgcgtctcgggctggtctccggcgccccgccgctcgcgctcgccgcccgcgccggcctcagactccccggggccgcctttcgctgctgccgcctccgggaggcgcctcggaccttccccggagtcgccggccgccgccacttcctggccggcgggctgcaggggcaggggcggaggcggcagctcgtccgctcccctgcaccgcggggccacctcccctagcggctcgcttggccccgcggcgcgctcgggggtctcgggggacgcgggcagcggcggcaggtagcgcggggccgcggggaccggggccggctctcccggcggcggcgtcggcggcggcggcgggggaggttgcgggggaggctcggcgtccccgctctccgccccgcgacaccgactgccgccgtggccgccctcaaagctcatggttgtgccgccgccgccctcctgccggcccggctggcgggccgggctctggctgcagggaaagagagcgcggagggggcgggagggagaggggaaaaggagggagggggcccggacgcctggggctagggggcgggacggggaggggatgcggaaggttctgcagctgcggcggcggcaggcgcggccgttcggtggagccgccggctcggctctgatggaggcggcgccgaattcggctgcgcgtgagagccgcgccgcggaagggggggccggagaagcgagggggcgggagggaggagcggcgcggcgggggtgacggggcgcgggcgcggggtgggctgggggcgcggatcagtgggacggagttcggggttcggctccgagcgggcgggctggaagtgggggatccctcagccgcctccacgggccggccccgcgctcacgtcggttccggggcggatgacccctctccaaacggcgcagcgctgcggctctcgtgagctgggaagtagggggcaggggagaggccgcgggtccagaaaccgttactggatgggccggtgggatgtggcgcgggccgggtggggcgcgacagtctgagccgagacccgcgtgggcttaagggtgcgcgaggcgggtgccctgggcgcgcccgaactggctgagcagtggagcgggaaagggcgcgggaccc

SEQ ID NO: 332319 - DNA, 325 bp, Homo sapiens
  chr5:16934300-16934625
  hyper
cgctgtagcgcgttatcctgatgttccccccacttgcactagggggcagagttctccccaagggggagccacggacccctgtggtgctcagacaggctacaggaggagtgagatccgtgcaaactgaatacaaatttctatattttcatcagattttctaagggacccagaacacaaaaacaacaaagttaagaatcattgccctaggggcagggcctccgttttcttacagatgcaagcaattaaacaccggaactcactgtagcccgagggtcctttaccactggacaacgtgcaactcttgcagaaagttctggtgcctttc

SEQ ID NO: 332320 - DNA, 1600 bp, Homo sapiens
  chr5:16935468-16937068
  hyper
cgcacgttttgcaaaggaaataccagacaagacctttcttggagaaaggcaggtccccgctgaacattttattgggcttcctgcacccgggcagtcgagcgggcggatcgccccgcccgcgccccggcgcgcgccgcctcacctggcgcgggtgtcccagggcgccccgagagccagccacccacgcaaacggaaacgcaccttcgctacctcccggagcaaaatgcgagcgcgggacaggacgaaacaaaacctgcccgggcttactcatcagagactccgcggggggatggggggtgatttcaggagactcccagaaagttgcgccttccagggcttaggaaaaagtacccagggcgcgcggcgtggtgggcagacgcctctctccctgggctccggaggccaggtcggactgggagcgcacttacctcggtgaagaagttatccattgttccagcgcagtcccggactcgccgagtgccgctccgactcgcggaagtcagcgccgccgcgggtccggggaaaccatgcgtgtcacggcgccactcccgaggacgcgcgcccgcggggctcccctgctgccatcgcccggtcccttcttgtccttctcaccttttgttcgcccaaacccaagtccctaactcgcccgtcccgacggcagcctttgtctcttcttcctccaagttcctcactactgggcgcagcgctcgcaagcggagaacagctggtggcacattcttcccccaggcgggggaaggcggcggggtgctggcgagcgcggccccctccctctgcgctccggccgggggccctcggggcgggcaggaggacagcgggccgcaaagtgagcaggagccgcgatccccgcgcgagcgcttggaggtgagcagtcccgcgccgcggctcagccagctctcgcccgcgggactacagcccagcgacctcgccccgccctcccgcagccggccccgccctcccgcagccggccccgccctcccgctcgcggccccgcccccaggagcttggccctccgccaaccacaccgtctggccccgcccgggcggagcgccccgcccccttcccgaccaggccccgcccactctaagcccgaagcagccgcaggctcgttagcggacccgggagggggccgcgtgtttccccaggtcttcccacgtaggcgtggggaggggatttaactcttccctctgcagagagagactaaacaatcacttagaggggaggagaagggactgggggcttctgtgcctttcatgtttagcagacccgggaaccggctcaacacggatctcattaatgcagcccggtagactagcaatctcgggaaggaagcgcggtcagcggagctgccggggctgcggggccagatcaaagcggaagacggaggctaatcagaatttctggaagctgcattcccgtgttgactttctgtcctgcagtcgggtttgcttaagacgtttgcgtaacagcggggaaatgtagttttgaaactggaaggggacgtggccaatatcacctttaaaaatgtaacccttttctagacctcaaggaagcagagatggcagatggcactgagatggac

SEQ ID NO: 332321 - DNA, 781 bp, Homo sapiens
  chr5:17216361-17217142
  hyper
cgcaggcgagcatgaaagcgatccaaacacagccagagggcgccaaaatgccgcaaataaaagttccaaaggcgtcaactggcttttgcgggaaggtaaaattggcttttgtgtaatcaaagagctaccgttgtcaacgatgtcacgttacgttatttttgtatgtccctcttgccaacaggtaagcaaagtgaacgcatcttcctaccccggtggctattctgtgtcccggtgctaaaccaagtgtccgcccccttagggcacccggacaagccgcggttggccctagctttgactcgagcgctcgcaagcagcagcgtgcgggctgcctcggccaaccccgtcttctcaatattggtggcctccattaaagcacagacatcaaaaacatcgacggcccctttcccctcttctcttccctccttcctctcccaagttccgagagcatcctccgaggggcgacgtctctcgccccaccagctggacctcggcgaccgcgcctcccccgaagctgcagccttcggggctgagccccgcgggtgcgggtgcaggtgcggagccgcccaaggtgcgcaactcgtttgcagcggcgcagcccagacgcgcctgcagctggggctcaccccaacctcgctgccagccgaggtagcggaatcgtagtcgacgtcgggagcgggctggactggggtctgagaagggtagctggtgccagggggtgtcattcatcacctcgaggcagctccctaagtctgagcgagagcccgagcacttcttatccaac

SEQ ID NO: 332322 - DNA, 1280 bp, Homo sapiens
  chr5:17217633-17218913
  hyper
aggagggaggctgggcgggcggacgcgcggggggagggcactgggcaggaaggggagggggagcgagcgcgagaaatgcagaggctgcagcggcggcggcggcggcagtagcggcagcggcgacgacggcggcggcagcgctccaactggctcctcgctccgggctccgccgtcgagccgggagagagcctccgccagcggccaggcaccagccagacgacgccagcgaccccggcctctcggcggcaccgcgctaactcaggggctgcataggcacccagagccggtaaggaggcgcgcccggtggccccgcgccgccgcggacccgggggcctccgtcccccaccgcgccgcgccccgccccgcagcccccgggctctcccttcatgcagcgggcagcagggatgtgggcccggattggacggcaagggcctggggtccctctgtgagggctccgtcgcacttcggggatcccgggtgatggggggcccagaagtgggaggcttcagccgctcgcatggtggaggggtgaggggggcggcgaggttggtaaacggagctggggggagggggctgtcggggagaggagctgcgggtgacgggaggaattgccgaatgcgaaaccccctcagtgcgttgagtcccggggagacggttctgtgggctgaagggagcgcttccgtcatcggagcccttaccagcctgggagaaagcgctcggggcgaggggcgcagcagccaaagatggagggtgggggtggggtggggcgggagtccggggagaaagaagatggggaatctggcccgatcagaaggaagtgggtggctttttgctttggcaaacgggttttctcgacccatgggactcctggatcttggttctggggccaaggaatacgaggttcacacggcgacgtgcactcagaagcacctcccgagcagatcggagccccagcctcgtcagtggcggaattgccttcctacgaacccgtgggctgcctcggagcagtttgttttttcgagcctttggttccaagaatgcgccaggcgcctccgccctgggtcccggccccggcccgggcccggggggtgtgggcttgaacctgacagcgcgcggccctaactgggctcagccccgctgggagcgtagggttggggttgagcagcttttgcccaaagcgctaaagctgaaacccggcgcccggttcctgctccccccgcccccgtcccccctccatttccagaaaaataaaaattgcggaatcctggatccgatcgcac

SEQ ID NO: 332323 - DNA, 677 bp, Homo sapiens
  chr5:22852992-22853669
  hyper
ccaaagcaaaaccacgcacaagctcctaattcagctgccagatctgtgtgcagcttcgttcagcttctcactacgctaggcatcactttattaatcatgtatgaatttctgtgcatgcaccctgaagcgatcacacacacgcggtgcaatcccaatcaaaaacggaagccttacctgatggcagaaaaggcagctgcaggagcagcagcaccgacggccgcagcagggtgccaacagctcagccttgcgcggaaggtgagacccttctcttctgtttcccctttccaaatcactgtgccaacacactgctttgcattttgtccgttttcattcaaagaaggttctccaggccgggcagccagtagacaccactttcttcctggaagaggctgcctctcttctcagaaaagcctggacccctctctgtggctccctccacatttacccttcagatcaataatgctctcggagcggctggagctcaactgcagcggcgagcggcgagccaatgggggcccaggattccctcctgtcatctccccgccctcaaaacaaaacacagcgtgcctttgacacatcattgagtagtgaaaagtaattgaatcctatatttgaaatgtattttgtttgttctttttcccccctagcgttcattgtagaatgctttgaatgaatcc

SEQ ID NO: 332324 - DNA, 796 bp, Homo sapiens
  chr5:31639088-31639884
  hyper
cgccttgcccgcggcggggctcgctcggggaaatccccgcccaccttgttattcctgcaggggaatccccgccccccgtccctgtcactcggggaagggagttcccgcccctcgaatcaaccagggggagggaatccccgcccatcctggaggctcggcggatcccctgcgcagcgaggcgaggagcggaccccagcgccggtgcgtgccggccccgggcagcgggacgcggcggggcggcggctgcaggcagccgaggagccgcaggccgaacccaaggcaccgggattgcgcctcccgcggctgccggcgaaccgcggctctgcagctcggggcaggcgcggcggcggcaccggtggtggccgcggtggcggcagctgcgcggggacccgccgggcggcgcctgggtctggacgcgcgaggaagccgcgggagcctcggccaagccgcgagcaggtgaagcgaccgtcccgctgcagccgggacgcgcggctccgggtgggcaggggatgggggaggcccggcacccccgagaccgtgtgtgcccaggaaagtttagctacaaatccgggtgcgggaatcccagccctggcagggcggggagtgaggacgccgaaccggggtcccacgttgggcggcgcaaactcctctagcatccggccggggacggggagggcgcagcccaggggagggggctagacagagcgggaccgagacagcgggacaaccggagacgcactgccgggggtactcaagacagggccgggacctcctgctcgggcgcgcatcccgggtc

SEQ ID NO: 332325 - DNA, 1236 bp, Homo sapiens
  chr5:31854462-31855698
  hyper
cgggagaaggtataaaggaaatgcttcagtcgtgcagtcaccggcgattgtaattcagcggtgttaactttggttactccagccgaaaggctctgaccggggatttctggaaagttccctgacatcctgccccatacgatggttgtgattttagctgggggctccacccctgtaagaactcaggctgccgcggattatgaaacggagtggtcatgaagtgaattgatgtgggaaggtggagcttcttgcaatggctcggagggagaacttttggtgcaaacgagggtctagggtagggcgctttttcctctaacctgctccaggtttgccccaggaagctcctgagccctcggtgtaaacaaaggtgtctggatgagaagccccaaactccctgaaatcctccccagggcggtttccttttcccggcgaggggagtgaccggggaggggatcttggaatgccgtggggttttgacaagtgagcaggggagtggcgagccgagtttaggattgcattacaggcttttcctaacctcctccaccgcggcgcggagggaggaggggggggtcctcccacagacctggagccggcggagagcagccttcgggaagtcctgcaggagccgcgttccaggagggcagctggcagccgccccaggcccccgggccgcctgcaggtgattaggctaatgagctgccccgggggcgcggagaccggcctggcgagcggattacccggcgcccagctgctgccggcggagactcccaggagctccggagaggaaccctccgaaggtgacttcagaactggaggtaggaaatcggcttctcaggcgaaagcctcaggttttctgatctgatccaggtcgggtgcagactggggctgaatccacaaatgtggagatttagccacagcctcggaggcgcggagcggccacctaagcgtctgcccttctcgtctcccggatcactggggtgtgttgtttttaaagtgggggatttgcgtgttgagagacggtttgtgttcctcgggaggagtaagtgacttggagctggtttgtcaatggctggacggaaggaggcgccccggctgtgtgtgacgggcagggaaggggtgcccagaggggacaggtaatagggggttccggagccacggcggtttcagaaccttggggcctgtgccgttgaagccccggtaggggcggggggcatggcagcagcccgggaaatctgtcat

SEQ ID NO: 332326 - DNA, 2064 bp, Homo sapiens
  chr5:32711037-32713101
  hyper
gcgcgcatttctctactttaaagcacgtttccttttttgaagccaggagctggagagcgtggaaagggagaggcggtgatcgcacaggcacgcggcgtggtgggggctcttgccggtgcagacgtgggcgatttcagctttaaggaaaaggcagagggcctgcggggagtggtggttagggacaggggcgcgatgggtagtgaaggggtgcagggaggagccctgatgtaagaatgttaatgagagactcccccagcccagcccccacatctccccacccccacccaccccacccgctggaaacacaagcccggcctcggcgcgccatgtgtggtaacacgctcagccgctgccacgctatttaaacgcgggctatggatccaggaaccggcgcgaatcaatgagatcaaatgcgagggagatgcaccgtcaattacaaacacttggacaagtctaactttttttttcttctacaaaaacgctttcaaaagcaaccttagcaacgcccaaataagaagccacctctaagcaaaatagtatatgtataaacggagggcgaatatatacaagtatatatatatgtatattacagacgcacaggtttacacccggtgaactttttctttttctttttcttttttttttaagaaaaactagtgacattgcagagaaggacgcttcctctctatcttttggcgcattagtgaagggggtattctattttgttaaagcgcccaagggggcgcagggaccttggagagaagagtggggaggaaagaggaagggtgggtggggggcagagggcgagtcggcggcggcgagggcaagctctttcttgcggcacgatgccgtctctgctggtgctcactttctccccgtgcgtactactcggctgggcgttgctggccggcggcaccggtggcggtggcgttggcggcggcggcggtggcgcgggcataggcggcggacgccaggagagagaggcgctgccgccacagaagatcgaggtgctggtgttactgccccaggatgactcgtacttgttttcactcacccgggtgcggccggccatcgagtatgctctgcgcagcgtggagggcaacgggactgggaggcggcttctgccgccgggcactcgcttccaggtggcttacgaggattcagactgtgggaaccgtgcgctcttcagcttggtggaccgcgtggcggcggcgcggggcgccaagccagaccttatcctggggccagtgtgcgagtatgcagcagcgccagtggcccggcttgcatcgcactgggacctgcccatgctgtcggctggggcgctggccgctggcttccagcacaaggactctgagtactcgcacctcacgcgcgtggcgcccgcctacgccaagatgggcgagatgatgctcgccctgttccgccaccaccactggagccgcgctgcactggtctacagcgacgacaagctggagcggaactgctacttcaccctcgagggggtccacgaggtcttccaggaggagggtttgcacacgtccatctacagtttcgacgagaccaaagacttggatctggaagacatcgtgcgcaatatccaggccagtgagagaggtgagcaggggcgcgtcccgggccccgggccctaacccaaccgctctccgcggctctccctgcacactcgtccactctgcagaccccactccccactgcggcgctgaggtcgggtgcgcgcgggcactcgttcaggtatgcgccgtgtggctgcgacaacctttgacgaccgcccatcgcggtgtacgtagagggtcccagggaggtgaaggggttggaggagagggcgtctgtagctcctgcgtgcccaggtccaacaggtgctgtcaaacacttcgatgttttttcttcccagtttccactttgccagcgccgggctggtgattagggggcgcactcccagtgcctggctccatccagggtctgaagcatccgaggcggaaagaacttgttccccagtcctttgccagcgtgcgcccccacttagtgcggaagcgtccgcggacgcct

SEQ ID NO: 332327 - DNA, 421 bp, Homo sapiens
  chr5:33892023-33892444
  hyper
cgctcgcctgtggcccagcaggaagatgcaggggtgcatggtcaggcgcgagaaggcagcgactgcaaagctgcccgcgatctccctgtgcttttttaagcagaaaggagctagacacctttttcccctccctcctcctaaaaggggagtgattcagctgacagtgtccgctttcggcggggtgtggaatgggccagagcgggagggcgcagcccaccccggtccccacccctccgcctcccgcatgccccgcggcctcgcagcccgcccgctcggtgcatcttcctcccggactcccacccccgcgctcctccggccccgccccgaacgccaggcccagctggccgagccggccaaataggggagacccgggagagccgccctgggaggcactggaggaagctgcgagtgagaggccccc

SEQ ID NO: 332328 - DNA, 576 bp, Homo sapiens
  chr5:33936135-33936711
  hyper
cgggtgggctttgcctgcagctcaactctccctcgcggcgcgggcgcggctgggttcagcacctcggaaagcgcccctcgcggcgccccgggattacgcatgctccttggggcccgccgccttggccgtgcaagtgccaccgtaactggtgagagccgctggcaacccacccggagttgacaaccgcggagagacgcagacacccactgacctccaggaagctgagcgtggtggatggaactctacgatctctttctctccaaggacggaaacctcatccaagcagtcccagaggaaacggataaaggtatttgaaagggagcgagcggccccaaatcgcacaattgagcggctgggggagttatgcgccagtgccccagtgaccgcgggacacggagaggggaagtctgcgttgtacataaggacctagggactccgagcttggcctgagaacccttggacgccgagtgcttgccttacgggctgcactcctcaactctgctccaaagcagccgctgagctcaactcctgcgtccagggcgttcgctgcgcgccaggacgcgcttagtacccagt

SEQ ID NO: 332329 - DNA, 1675 bp, Homo sapiens
  chr5:34655746-34657421
  hyper
cccatgcgcaatctcgcctgtcagttcaggctgtaggtttctcctttctaactcctgagcagaacaacactgaacggtggtagtcttgccttgccacccaatgagtgctagaaaacagtcacttcaaccaattggttcagtccggagaacgtgagcacattctactttactttctgttcaatgattttggaaaacaaccttttagattctggtcagaaggggcttggatccgtgactttgaaacactcgccactaccacaaacgactttggaagttaatcagaaataaacagtatctgggatctcatccgtcctaaacccaggggtcagagcgtggggggcttccactaacttcaggttaagaggatgaaacagatccgcggagaagggtcccacgatccctggagactaaaagcaagccacgaacagccgggacgcgcgggccggggagatgcgccgggggctggagggcggagagcaccccccgcaggtcccggccagagcccggggccgggtcacctgactcgcggaatttggggccgcgaggggtggaatgggaggggaatggttagcgcctcccttcccgctcccactggatccaggtcggcgggggccggcgcccggcggccacgtggtggtgctgccgctgcccccgccccgccggcctagcccgggagctcggcgcccactgacccccgcagcgggggaggaggagggactgcggcgcaggaagccgagcaggaagcgagcccggcggccgcgttttcctggggaagcggcgggcggggtggagcagccagctgggtccggggagcgccgccgccgcctcgatggggtgagtgcgcggcacggagttgggaggctcccggcgcggggtcccgggctcgtgtccccgcctttgtgtctggagctcgggcgcgggaggcgctggggacggcgcccgggcggagcggctgagcgggctgcagccggggtcccgccacctctccctggtccaccgccggcagcccactgtctgcggagagcagatctggggacaagaggaaggagaggaaggtggagatgagggtagagcgggaagacccggccaagttaggagaagggttcttcccgggtcctccgcgactcgcaggccggctggggcggggcgcggggcaggggccgcggcggagggagcgcgggtgggaatgaatgagcagacccggagatgcaccctggagtctgcgccgggtcccacctgtttcgccccgcgcggcgcctcgctgcccccgcgtcggtgctgctgagcccaatccgcctcccggctgaacttggaggaggtggggagggaggtgcgagcgggagactccgggtggctcccaggacgcggggtccgctattgttcctcctctgactccagggagcccctcggccggcccaagggcgggggcgagacccctctgggcctgcccctgccccctaccttgttttccccgccgcagctcggggagaacggatgctggagttggggcagactcggggccgccgggacttcgggagtaaggaggacgtggagccaccagaaaggcgcccgccatctcccgcgacccctgcctggtggggggtggggggtggggtgtcgtcctcaaccaccttcgctgccttcttgggcaggttggtgtcggtttagtttctgc

SEQ ID NO: 332330 - DNA, 720 bp, Homo sapiens
  chr5:35229746-35230466
  hyper
tccggcttctggcccggaggctgctcatctgcccctacccccgctgacttttgggaggagcaacacctttcaggtcagcattgctaaccctaaactttccccgccggatgcccgcgaggctgctgcggcggcggctgctgctgatgggagagtctcgagtccggctttcatcacatcacctgtctgcgccccttccccctccccgctctttttttcttttctttttattttgacgcaaataatttgcattctgagaatcccacaatcaacgccgaaactcatgctcaaggatacaggtgaagatgcctttgacaaaggcgaatgcgagccgagtgcagtttgtaaaagctggggttgggggcagtggtggaggcaaagcaccttaagagtattttttagcccctctgagaagggacatccgggcgggaggcgggcggatcccgggcttccccgccggctgccgactctggctcctggctggcgttctctccaggagcccgcgccggtggccccgctctccccttcagcacgcgggcctcgaacccgcatcccggagagcggccgcccgcgcagcccctgccgcgcgccgtcggaggcggcctcagctcgccatgggtactcacttttgccagggagcaaagtctgccacatcagtcgatgagtacttcctgcacgaggacatgaagctccattgtgtggaaagctgtttcgcgaacggtc

SEQ ID NO: 332331 - DNA, 450 bp, Homo sapiens
  chr5:36690207-36690657
  hyper
cgggcctggaggaagcgtggcgggaaggctggatccccgccgcaggggctgcggggctgtggctgcctgcgggctgggcagggccgggcgcacgccctccttccgggtggccgcgggccccgaccccaggctgccgtcagtcgagcggcctccgcagcggccgcgcttccccttctcccacccgggtggtcccagaactggagcaacaatggccggctctgtgtggccgcgtcctggggccaaagcagtcgggacgtgtcacgccgagggagggctccgaatgaatacgctgacaataagaaggaagggagagcgagggaggtgatgggcagcgtcctagagggaaagcgggagatgagaaatctacgagatccgcgaggcggcgtccggggagcgagcctcatagtggccaccagggggaatgcggagctcaccttgggccgcttccgc

SEQ ID NO: 332332 - DNA, 745 bp, Homo sapiens
  chr5:36744888-36745633
  hyper
cgtcccggcagctggcccctgggcacggcccccagcccggcgtcccagttccagccgcgctgcaggggcgcgagggtgcccggctcgcaggtgtccgcgcgcaccgcagggctgcccgagtgcggctggcggaatccctccccagctggggaggaaggcagttgttttcttcctggtggaacgttccacttgaaactgttccacaagggctgttctcgcctccgactccgggaggaactgtaattaacacagcaacaaacgcccacgacgctaactggcaaagggagtgtaacacgagccgctgctacaaccgaactgggccaattgctttcccttcttgcctcccatttggtctgttttggttccgcagtcatccaactgtagcgtttcttaaaacatgtcagtggctggtgtttgtgttttgggttgaacagtttcacacacgtcgctggagcccgtgctcgaccagctgctgtgctggggatttgctttctgcggctttgggagtgtcaggtagcaaaacgaagagagtagtcgactagaacggtggcggggaggaggaggagggattgtctgcagtggagtcgggagcctcctccggaccaggacaggtaaaaccggtctgccaggtctcagggggagcgggtggagacgtcccacctcacctggctgcgctccgactcaggctcagccggcaggttctggggcaatgggggaagggagaggggccgggcccttgtgggtc

SEQ ID NO: 332333 - DNA, 786 bp, Homo sapiens
  chr5:37248996-37249782
  hyper
cgttctattcctccggatcctgctcgagaagctgggggactcgggtccggtgccgaggtgtggcccgagcctggcaccacccacgccggccgggtgaccccggccccttggggctcccgcgctccgtcagcaggcgacgctgggaggctggggtaggcccagagcgaggacgggcccggactgggtagtggggatgtaccagggccgggtgcggcgggagacggcccgggaggcggaaggtcgcggacctgcccgacagaagagtagatgaggggagaccgaggacgcccgggtccggggagcttacgaggaggccaggatcgcggggtaaggaatccgcgggcagttacctccgccaggggcagggtccggccagtcaggcgcgagaaggctaggcgaggccgactgcgcggggtgaagacgccaggccgacagctgcgggccctaccgccagccctgacgcgagcctgcgtcctggcgacggcggagggcgggcagggggcgcgggcgctgccacggcgcctgctcagaaccggccgggaacgccgcgggcgggtctccccggtcctccgcccctccagccctgctctcaggcctccgcccgggccctctaagctgccagccgcgcccgcctccgggctcctcgcccctcctcccgcgcgctcccctcctcagcggccgccggaccccctcagttcacttctcccagttaacgcgttcctcggacgctgctagtttgagcgcacaggcattgggcggggctcacgggggagccgcttaataacc

SEQ ID NO: 332334 - DNA, 1272 bp, Homo sapiens; identical to SEQ ID NO: 230997
  chr5:37836727-37837999
  hyper

SEQ ID NO: 332335 - DNA, 206 bp, Homo sapiens
  chr5:37838250-37838456
  hyper
aaagaatttgggacacttctcgcaggcaaactgggaaagcggtctgtttaaagggccaggttccaggcccgagagcacccgaattgctagcgggaaagggctagggacacggcggacttcccagagatcggacacttgttacttgttgaaaaggcgccaccttccctgacaaagcgaaggcgcagcgaaacagtacgagtttggtc

SEQ ID NO: 332336 - DNA, 1296 bp, Homo sapiens
  chr5:37839492-37840788
  hyper
cgtttgctctggggtccagacgcacccctctgactagggcgcccttcagccggccgcacccacccgcgacgcaggcaccacccgctccctgctccccggcccgctccctcacttacctcggatcgggtctccgcagaccctaggttggacattaactccaggtgccccaagtcccagccaggagacccatccgggctgatggctggagcgcggagccccgcccaacaggtcaggggcaagagttcgcaatcctggggtcgcgcggggcagcaagggcgcgctggaggcggcggccaagactcccgccgccgccgccgccaacagggcgagggctgccggcaactctcccgccgggcccccgcacccccagaagccgaggtccgagcagccgccgctgctttgggtggggggctgacagggctgcgcgcgtcgcgctcttggctggggctgcgcgggcccggggcgctgcgggcggctcagcggcagctgccgcgctctgcgcctcctctgggcgcactgcctgggagcacgagactggtttgtctgatgctgctgccggagctgaggtcttgcctggagatccgaacgagacaccacgtcaaccggcgcggggagtcccgtgaagacatgagggcgccaggagcgcaggctggtcttctagagcccgggctgggggtccggggtccggggtgggggaggggaggcgcggggccccgggagggaggggtcgggaggcgtcggctgggcctggcggtgggggaggagaggagagcagcgaggaggccctggagttcccgaggcggggggccggggtgcgagtgggcgacgcgaggcgcccctccctgggctgcagggagagcgctgagagcgcggagacgccgcggggctagcgccttctcctctccgggtggatcaaaaatcgagaggaatgtgcggcgctctgcgcgggccagccgaaaggggcaatccgaacttgaccgcggcgcccgcgccgggctttgcccccgcgcgccgcactgggagggtggcgctctgccggtgcagggcagcgccgggctttcctcgcgcctgtcgaaggccggccttcccgctcgggtgtctcgccctctcgcttctccgcagggcaggaggcagtggcgagaaaaggagctgccggccggagttctagcaccgagaaggagaggtgcggagcggccgggtgagggaagccgagtatttgccaggggacgctgcgagtggggatgaatttatagggctctcactccgtgacgtgccctccagtggcttttctgattc

SEQ ID NO: 332337 - DNA, 887 bp, Homo sapiens
  chr5:38257421-38258308
  hyper
cgcgctcccaaacataggctaactgtgaagagccaggacgcccaccgagtcctggcagcgttgcaaggtggggagggggcgggcgcggtcctgtcgctagtgactgcagatttcctctgcggggcacttcctacggcctttgatctttccccaggaactgccgagggccgcgtttgcctctaagtttattccctcttggtttatttattgtatctgctttctcttctcgctggtttggaggtcagaacgccagtatgcaacgggacttgtgtcccaggcagggtctcccctctccaggcactaccgcgaaatctggcaaaaggtacattttactgagtcctagggcagcaaattcagcggcggagaaagagtctttctccattcaggagacaacccaggaagcccgatcccgggatcagaggccaggaccccgccccggccccctgccccaggcccagctgggcgccgcccaggggcttttctcggtccgcctgggggctcgagctcgcgtccctccctaagacgccaggcttaacttggagtttcatctcctccccaggagggtctcaagttgccttcctctgccgggaagggcccccactcccccgctccaggccctaatctccacccggcgtcccagtctgagcggcctggcctcagctctccatctgcgagccttaaatcccatttatcttcttagcgcctcagacccggacggtcccgcctctcttcctctcacccccaccccacttgcaaatcacagacccccgtctacccctcgcatcccccaagtgcgctggaccaactacagcaacctttgaggtgttagaaaaagtcgcctagaggggcgcggcaggaggagggcccaggtggggtggagggggggc

SEQ ID NO: 332338 - DNA, 1453 bp, Homo sapiens
  chr5:38556107-38557560
  hyper
cgaaatcacctggcaggtcacctctccgaaggaaaaacatttcaagctccctcccatcccccaggtaacctctggcctcagaactcactgccctgcgtggggcagaagttctgggcgctggagtccgcgtcccccaggacacgagggtgacccaagggcgcgcggagagcggcgggacccggagcggcgctctccggggtcactcccctaggacgctccgcagagctgggagcgctgccccaccccgcccgggccgcccctggggaccccgctcggggctccgcggctcccctgctccgcgccgcgcccacccgcccccaggactcacggtacgctcccgcgccgctatcttgccatcccctgccgccggctctgtagcctcggccgccgccccggggctgcccagatcccacagccgcccgggggcaggagccgccaaggagggggccgggcacaatgcgccgccgcctccgcagccgccgtctcgcctcccctgtgtcggcgcgaggctgcttgaggcggccacgggcgaagggcggcccgctgcgctccgcgaaccccgcgggccgccgccgccgccagagcctcccagaggcaacggtaacggccaccgccacggccgagtcgctccagccgggactgcggcgcgcgggggcggcgcctgcacgccgctcggctgggggcgcagcgggcccggccccgcccctgacccgcccctgcccccggccccggccccgccccaacccgcgcgcccccgccgatccccggccgcgcgcccgcgcgcgcgggtgctccaaggagtcggaggaacgcggccgcgcgacgggccccggacgccgagggtggtgcttcctccgagcctccggtggtgaggccgctctcagaaggtcatggaagcgcaggggagagcgaggcggccgagcccaggcaaatcctcgagaaaggccgagtgcgcgacggctctgcggggaggaccgcgcctccccgaatgcggccgctgctgccgctgcaaacagtgccttgaggagaggaaagcggggaaccgtgttttcgccgcctctgtaaccactgcacacaagaaaaccagcttctgggagagggggatgattgttgggactttgcgaattacctaaacagcccagggccgaggcgccgccgctcgcgtcctggtcctcctgccgggtgtggggctcccctgcccgagatggccagcgggcgcgccgagagtatcctggagccatctagtcttgcctcggaggcggggtgggcttatttgtgcggagaagaaacggatctcttaatggggtgagatttttcctccgtacattgttcccatttccgcagtttcacttggcctcggttttctagcagagtaatcaccaaatgaaattagctggagagcgtttgatggcgcagaatcacggtctgaagatgtttacgctgtatgccggac

SEQ ID NO: 332339 - DNA, 814 bp, Homo sapiens
  chr5:38845661-38846475
  hyper
tgcctgaagattttcggacggggatctcacgggtttggcctctgggttgggatgacaagtgcccctgtgggatacacagccccaggcctcatcggtcactcggcttacctctggttccgccggctggcccgtgcgtccttggccggggcaggagcagcgctgcgcgcggggcacggagcctcggccgccgagttttcggtttccaagtttccttcccaggcctctcccacttcctcttctcaccagtgcccgcccgcccgcaaagtccgggttgtgaggctgcgcctcccccaggatcgcggccgcctccccccgggactgaagggagggaattcctgtgggtcccaggagtgccaagagtgcgcagcaagacgggaaattgcaaaagacctcacccctctgccctcccccgcggttttccagtaactcccgcccctccgcgcttgccccgcagctgattcatagccccggcccgggccgcctctgcacgtccgccccggagcccgcacccgcgccccacgcgccgccgaggactcggcccggctcgtggagcccttcgcccgcggcgtgagtacccccgacccgcccgtccccgctctgctcgcgccctgccgctgcgccgccctcggtggcttttccgacgggcgagccccgtgctgtgcgggaaagaatccgacaacttcgcagcccatcccggctggacgcgaccgggagtgcagcagcccgttcccctcctcggtgccgcctctgcccagcgtttgcttggctgggctaccacctgcgctcggacggcgctcggagggtcctcgccccc

SEQ ID NO: 332340 - DNA, 657 bp, Homo sapiens
  chr5:39424892-39425549
  hyper
cgaagctactcaccggctagctattgcctccgtgaagcgagcatgacttccccgcgcccggagcctccaggctacagcgcagcggatgcggcgggcctcgcttaaatagccgccggccgggagcttcggagccgcgcggccactcccggcgagagatatggttctaatcagatgctggcagctgaggactccccaggaatgtgccaggatgtttttgctgcctgggcttggtaactccccctcaacgtgtctgcagagtcttccaaacttaactgtttattaactcgcgctgcagcggcgcagaggaccccgctcccctgagctccgcgagccccaccagctgggggcgatcgcagggacccagcgacgggaggggaaatgtgttcggggagaagtcaaaagccccagaccgacgcgggcggggggcgggtgcaaataaggacaggaaagggaagctctggaggaaaggggtgggatccaccgagcttcgtttcacagatccgttccctggattgccactgcgagtgatgtggcacacggagtcatcctaaccaacccgttggggccctttgaacaaaggactgcctttactcctgacttttctgacaagggacaacggttcctgcgcagatctgcagtttctaaagttgatcgcgc

SEQ ID NO: 332341 - DNA, 1503 bp, Homo sapiens
  chr5:40680513-40682016
  hyper
cgggtccaggacatctgagggctgaccctgggggctcgtgaggctgccaccgctgctgccgctacaggtgagatggcgttgggctgacgttggggtcaacgggtagagaacgcagggatgcggccctcgccgaagagagccaagaagggaagagcgcgctctccaaattgcttttgtaacttgttttcagtgagcattttattgattcagaatctatcgagaatagcactagcgagctacttttcccttgagatgggtcttattcatcttggcaatggagtgagttggattgtggggaggaagaggaatgggaaaatcagtttataaatattaatgtcagcaagagtgtgctgttggcaggacgtatcgcgagcctggagattttggtggccgcagttggtaagtggctacaatccagaaagtaggatcgagttgctccccttgtcttatcagtgtatcgtttctcgggcgcgggtctaacaccttacaagtggtaatttccgctcacggcagctttgtctctcttctaccatccccagacccagccttgcactccaaggctgcgcaccgccagccactatcatgtccactcccggggtcaattcgtccgcctccttgagccccgaccggctgaacagcccagtgaccatcccggcggtgatgttcatcttcggggtggtgggcaacctggtggccatcgtggtgctgtgcaagtcgcgcaaggagcagaaggagacgaccttctacacgctggtatgtgggctggctgtcaccgacctgttgggcactttgttggtgagcccggtgaccatcgccacgtacatgaagggccaatggcccgggggccagccgctgtgcgagtacagcaccttcattctgctcttcttcagcctgtccggcctcagcatcatctgcgccatgagtgtcgagcgctacctggccatcaaccatgcctatttctacagccactacgtggacaagcgattggcgggcctcacgctctttgcagtctatgcgtccaacgtgctcttttgcgcgctgcccaacatgggtctcggtagctcgcggctgcagtacccagacacctggtgcttcatcgactggaccaccaacgtgacggcgcacgccgcctactcctacatgtacgcgggcttcagctccttcctcattctcgccaccgtcctctgcaacgtgcttgtgtgcggcgcgctgctccgcatgcaccgccagttcatgcgccgcacctcgctgggcaccgagcagcaccacgcggccgcggccgcctcggttgcctcccggggccaccccgctgcctccccagccttgccgcgcctcagcgactttcggcgccgccggagcttccgccgcatcgcgggcgccgagatccagatggtcatcttactcattgccacctccctggtggtgctcatctgctccatcccgctcgtggtgagtgaccggggctggggccctactcggcctttttctcgcatccacctcccg

SEQ ID NO: 332342 - DNA, 496 bp, Homo sapiens
  chr5:41510373-41510869
  hyper
cggcacgcgctcgcctggcctgagacccaccctggaagacgagtttccctcccgcgggcatcgtggcaagttaccacttagtggcagataaagcagggcggggcaggtggagcgggcgccgagcgcctagcccgcagcccctgcgcgcctacctggaatggctaaattggtgagggggatgctgtgcatgctctccggcagagttgccatccagtcggctaatttcagctcgtttttcccctgagacgaggccatcgtgccagtcggcgtgcagcgcgctggtcccagcactcctcgggcaggctggcaggctgctgccgctaatccaatgtttgctctagccccgctagagtttacactcctctctgcgccacacccacaggatggcgcagacacatgctaattttaataattattcaaaacaccccgtgctcccttagtgcctccgccagactccgctggagcttttgttcctgacgtccgtgctcagctctct

SEQ ID NO: 332343 - DNA, 796 bp, Homo sapiens; identical to SEQ ID NO: 282880
  chr5:41870078-41870874
  hyper

SEQ ID NO: 332344 - DNA, 770 bp, Homo sapiens
  chr5:42424338-42425108
  hyper
cggcagggagttgcgggcgacagacgaaccatcacactctggcgtctgctctggcccgcgagtagtgtacgtggaggggtttactccggagacagttttgttaaagtcataaaagttttgctagtgtgtttctgtttgccatcatctgcctggctgcggcaggaactgccgaggctgctgctgttgcgcggggaagaatccccggcagcgcgactggagagactggggaggtcgagctgtgcgcgtggacacagcgcgcagagcgcgcggtcttttgcgcgtttgtgcgggccgcagccgcacgttggcaccgatggaactggggtcagtagagtgacagccaccagtccgcatgaactggggtaagtggaaattgtggcgagccgacctcccccagcttttgacacactagtggttgtaaaatcaaccaggcttaaagttttgacagaactgccagaggctgcgggtcaatggggtggccgcgtgtctagggagagggcgctggcggcgcagagggtgcggggcagggcacttgcgagtgcgtggggaagtctatttggggcgagtgctttatatatagcccgaggggatgcctgctgagaccgagctgcgggggctctcggtctggcgcggactgtgtgtcctgaatgagtgtacgtgtgcgctgtgtgtgcgcgcgcgagtgtgcgcctggggaggcgtgtcggcgcctgagccagtagggtgtgcagggtggaagaggccacagaggtgccgcctgtctgtttgtg

SEQ ID NO: 332345 - DNA, 1687 bp, Homo sapiens
  chr5:42950747-42952434
  hyper
cgcattcgctggtacccagatttctacaggagttaaacgtctcctgagcagctaaagcagagcttactagtaagaaacttgcaatgactaaggaacttgaggcagggctaacccggggttgttaggattagaattccgaggctacaggaaacccggaattgctgagatgtgagtcacagggtgactcagcctcgttacgatgaaacagtaacttcctactacctagaaatcgcagccagggccagaccggtgtttgtcctaagtcggaacttgattgggctgagaaatcacattgtgactattccacgacttgaacaaggggtagaaatcgcaggcaccgcgaaatagaaacttcctaggaccaagaagccaacgacgcccgaaaccgtggggtcctgtcacagaaaccccagcagcgcagccaccggactgggttctggaggccgagccgcagtccgtgcggcggcgctgggaagagaaggcgccccggcagctcccctgccaccggccccgaggagcggctggctcccccagcccagcgccgccgccgcccggtaactccaggcgcaactgggcgcaactggggcagctgcgacaccgaatccctcacatctgcaacctgggtgctgcggccactgagaaaatggaggcgcagaccaacgagcggtgccgcgaccgagagacctcggctggcgaaatggtggtgccgggagcctgcgagtgacgccagccggcggggttgtcaaggacaacattcgttttgacgcagccaatggcgccgtcaccaagaaaccatcgactctgagaaaaaagagaggttcggccaccgagaaactccgtacgacaagtgctgtggcagaaaaaccgcctactccgcgccacaggcaaaacagccaatggaaaccccaggtgctgcgaccgtgacaccggcactagagggtctcggatggagaaagcggcgcacggagaccaggaaactatgtgtagcacaactagcagaaaaccgtctggtcggccatccgggagaaagcgcggatcagaaacaagcgacttcgatgcagggaaccgcgcagccactgaagaaagtgacccacgtggcagtggtgccagcgaaacactgcagtttggacggcagctgtggggatgccacagagaaacatgcactgccactgaagtacatccagctccgcggagctagtgttcatatgatcaagaaaccgccagttgggctctgctagaaacttttagtcctcccttaacggctatcctacccacaacagacaatgcctttacccagcacctagcggtgctgagacccgcctgggccagcacagagcgcagagcagtacgggtacggagaaacgccggactcagtgaaaccagccttgcctccagcggattccccggcttcgccggacgccacaggcagagtgccgcggggaaacctctggctccctaaaccgattagattgtgggagtgggggggacactcacaagttgtgtggaagggaaccagcggcaatgggacccggcgagcacttgcccgcagcaaatgcctgcgctgctgcaaaaaaaacaacttttggcgcaaagaatgttgcggccagagagcatccgctgtcgctgacaaaggagtagcaatggcaatgagaaaccgccggcgccacggccgaccgcggcggctcac

SEQ ID NO: 332346 - DNA, 1161 bp, Homo sapiens; identical to SEQ ID NO: 231019
  chr5:42991872-42993033
  hyper

SEQ ID NO: 332347 - DNA, 201 bp, Homo sapiens
  chr5:42993333-42993534
  hyper
ctatcccctggttcaagtcggggaatagccaaaatgtgatttctcaacccaagcaagtacccacttaggacaaacaccagcctagccctggcggcgatttctaggtcgtaggaagtcgatgtttcgccacagaaaggctgagtgaccctgtgactcatttcccagcaactccgggtttcctgtagcctaatcataacaaac

SEQ ID NO: 332348 - DNA, 992 bp, Homo sapiens
  chr5:42994611-42995603
  hyper
ctggggagccaagctcggtctccgcttcggtggtttcaggtcccgggttctgtctggcggctctgcttctaatgcggagctggcggttttgcagcaacgcttttgccagtagcgcccactgagcggtttttcagttgctgcaccgttcttagcgcccaacggaacgtttcccgtacgcggagtccataagttgtctgtgtcgtcactttctcggttctggcaccgctagtatctcctaggaacttcctaaacccgttttacggtgcagaacggtaattgcaccgagcctctgtgccaactagtacttccgtaataccgttagccggctcttttcctgtcacaacacattaaaacgtgttaaaacacattaaacggattaaacacattaaacggattaaaacacattaaaacgtcacaacacatttaaacagagtcggtccattcctccagacagtatgtttcgggatggaagcacccctcctaagaatccgcagtttctttctagcagcaccgttatggcgcctaaacggatatttgtttggcaataccagcgctatccgctaggtgccggcgcttgctgagtctcagcgccgccagattcttgctagcgaggtccagagcagtgcagagacctagcggacagttttccggtggcagcaatgctcatttcccggacacagatggtttttggcccctgaagaactctttaatccctgcgttttgtagcgctcgttctctgtaaggtttgcttagtatccgtttcatttcgacttcttttctcgctgtttttctgtcggaattacgatttgttttgtttctatgtgctctctagaattttaccggttttcatttgtctactaattttcgtgcattcgttactattgagtttcataatatctgggtgccctctgcccacgagctccggagagcataaatacccaggctgatggtagtgctaaaggttctgcttcatctcgtcaatcagcgcaaac

SEQ ID NO: 332349 - DNA, 1000 bp, Homo sapiens; identical to SEQ ID NO: 231023
  chr5:43007484-43008484
  hyper

SEQ ID NO: 332350 - DNA, 186 bp, Homo sapiens
  chr5:43008736-43008922
  hyper
cgtgagccacagcgccccgccgaaacgttctgttgtgttcagcgcttccagcggtgcagcagccgagaaaacactgagtctccgctattggcgaaagtgctgatgcgaaactgctggctcgacataggcacagagccgcggaagagaaccctagagaccaggcaccagctctgctccccgactcac

SEQ ID NO: 332351 - DNA, 1396 bp, Homo sapiens
  chr5:43017299-43018695
  hyper
cgctgtcaattctacatccaacgctggaatctttcagcccattttcctccccggctgtttttgaactactatccccaaatatcgaggatatctgacagagtgaaccatcagaataaggagcgattgccacagagttccatccagtaggggagggacttgatgtgcggggcaagcctgatgcccgggtcaggcgactgtgcctttcattctccacggagatcttgaacctagagtttccaagttccgaagagatgcggttgtcgacagctctcctagaatctctgatggctctgaacggggacaaaggtctagggcagagggatggtgtggaaggacccagccacggccattggaagagcagtttcctgcaatgtaatgctgtttgcgaccagcataagctttagctctctcccaggacgagccacatccgccccattcacggtccttattccagctcctttccctctgcgaatcacactgggtgggtcgctgggggcctcggtaattacggattatggcacagccaagaaaaatacaggttttcttaagcctgaagccactgacttgaggggggagagtaggagtaatgccagcagcagttttgtatttggtttttgtttttatattctagtctctaggccacaagacaatgttgcacccagtgccagtcgatccgtcacggcgccgcaaactttccctgaacggagggtttgtggctgacatctctagtttctcagagcctgggagtgatcactggctgcaccgctgatggcgcccaaaagaacgcgcatttgtctttggcaacagcgctgggtttcgcctcgtgcccgcgcctgaagggtcctagcgccgccagattctcacactcgcgggtccagcgcccagcgctgctcctcccaccagtcatcggtttctcacacgcacttcattggcagcactggcgagtcagttttccggtggcggcggcgctagttggtctgcacgaaacgtttcccttctcgctccgtgtgtcccattctccatcccacgtcctccagtgccggggtcatggtcgcagcacccggcgttcccgttggctcttttgccgctgcgcggagccggcggtttttctgtcacagcacttgtacggagtttctcggcggccgaacgtctctttttttctcagagacgacggtttcttggtgacagtaccgttggttgcgccgtaacgaatgttctccttgacagccccaccagctggcgtcactcgcaggctccagacgccgccatttcgccaagccgaggtctcttggttgcggcactgcttctggctcggtgcctgtattttctcggtgcctacagcgcccaggtcgccgatctgagggcttcggagtaccggccgggcgcggtggctcac

SEQ ID NO: 332352 - DNA, 1638 bp, Homo sapiens
  chr5:43019005-43020643
  hyper
cgcgaatgcgattttttttaggtttaccgatgatcagtttagcagtgcctgggagctcttataccaagtttgttttcgcaatattgagtcccaccttagctaagcttgtgtgtattttaaactcccatggaagtcaggaaatgtccgcaaacgcgatttctggttaccaagctccgtttggcaatagcaagtcctgccgaacgcgactttttcctcttgtggaccaagtctgaatagaccagctactgcgatttttaagtcgtagtaaaaaaggtttaaccgtgactgcttttttttgttggtgttgtttgtttttgtttttgttttcgtaggaaatgtagacttaggtgtaacatgtaccggtttagatctgacagagatatcacaattgtaggattgcatcttttagcaaggtttgtaatttcttctttctaggattggttctctgtaatttttgcttatttttaaattctctctttgtcttttgctctgagaacgatgttaccgatgtgtttgctttccatgtttacttgcattttagcctttatttttttaattttgattttatttaaatgttatgtattttttttctactaattttgagcgtctcagcttcctgcttctttacttacattctctcaggatccggggagccgagctcggtctcagtctccctgctgtcaggtgccaggttgtgtctggtggctctccttcgtatgcggagctgatggttttgcatcagcgcttttgccagtagagccgactagcgttttctcagttacggcaccgttcttagcgcccagtgtgacgtttcccattcgccaggtccttatgttctctgtgctgtcactttcttggttctcgcaccgctagtatctgctaaagaacttcctaaaccatgttttactgtgcagaacggtgattgcacggagccgctgtacgcactagtaatttcatagcaccgttagctggcgctttttctgtcacaacacattaaaacgggttaaaatactgcaagcggattaaacacattaagaggattaaaacattaaaatgtctcaacacatttttctgacacaacacatttaaacggagtgggttcattcctccgaagaggatgtttaggcgtggaagcaccgctgtttcccaagagcacggtttctctctggcagcaccacttatggcaccaaaacaggtattttttggcaacaccagcactattcgctaggtgccggcgcttgctgagtcccagcgccgccagtttctctttcggtcgttaagtagctcagagccctagcggacagttttcaggtggcagtaatgctcatttcctggaacagatggttcgtggcccttgaagcgctgcgatctgtaaagctagttctctgcaaggtttgcttagtgtctgttttatttcggtttcttttcttgctatgtttatctgtcggaattacagtttgttttggttctatgtaatctctaaaatgttatcgtttttcttttgactactaatttttgtgcattcattactattgagtttcataatacctggcttgcctccgcccacggcctccggaaagcataaatgtccaggctaatgggagtgctgaaggctctgcctcgttgatcagcacaaac

SEQ ID NO: 332353 - DNA, 507 bp, Homo sapiens; identical to SEQ ID NO: 231035
  chr5:43396923-43397430
  hyper

SEQ ID NO: 332354 - DNA, 328 bp, Homo sapiens
  chr5:43557434-43557762
  hyper
cgcttaccacaggcaggcccgacctactcggtagttctcaggagagacgtgcgagaccgacagttgacgcccgggaaataaaaacacggggggagggggcgtggaccctgcgccagggttcgctggcgcacaggtgtgttcaatgactcggctccggccgagacccgcggactgctgaggagtggtccctgggagactgtcacctgctccgttagcatcgggggaagggagtagaaacggaatcaaaatatgtgtcccctctttaattcaccctaggtgtttaccacagtaggtcacacctacgtttaacaagcttcgttctcttccc

SEQ ID NO: 332355 - DNA, 215 bp, Homo sapiens
  chr5:43603571-43603786
  hyper
cgcaggccgcaggcttaggtggggaagaagcaccgtgcctcttggtgtccctttctcgtctcctgctggggcgatgtcgaagggagtgggctggtggatttgggaactgggtccccgaagagggcagggaatgaggcggcagctgtgcaggtgcagatatttgcagctttgggggacagcgagagtcgtacggggtcatttcggccctcaagatc

SEQ ID NO: 332356 - DNA, 742 bp, Homo sapiens
  chr5:49736607-49737349
  hyper
cgcgcccgactcgcggggcgctgttcgttcaagactcgccccaaagagcgcaggaacgcgagccgcagcagtttcagggttcagcttaggtgacacaaacgtagctaatgggaggccgccgccgactctcccacccgcccttaccagcatccccgcgcctctccccgccacccttgcccggcgcgccggcgatgccctctgcccgcggggacccgagcctcgcgcgccctccgccctccctaccctggaccctgtacccatcacacctggggcactgccgtccgccgagcttgggcgcgcggcagcgagaaggcactggaggaggagcagccggggcgtacgcgccctggcctccagcaggccggggagggcgcgcatggcgccagagggtccgcctgggtcctcgtggagactgctccctcagctcgccgccgcgggtgtccagagtccctgcgcacactcgcaggtggcccggcgctcgcagccagtgccgcgggtaggacgctgaagaaaaggcggaatgggaggggcccggccgccttgccccactcccccgagacgctcttaccgcgcccggccctccatcagttatgcagccctcagccggctgctggcgttcccggatgtgcggtggcggtgctacttcccggctgcagcctctccggcctccgccctctcggctctagcaggtcgggagagagcttgggcaggtgatgtctagccaatctcgtggggagaggtc

SEQ ID NO: 332357 - DNA, 321 bp, Homo sapiens
  chr5:50263380-50263701
  hyper
cgccagtcaaccagagtcagtcgctctctctctctccctttcttccctcctctcccccactcttcctcgtctcccgcccccgccccccatctttctccagctagcctcgccccaattaacgccctacagccagtcagccttacacctgctggaaaaatcttggtggcagtggtgggaggtggtggttttggtttttagcagagcgcgggagcaccctgtcacaccctcctgagaccgccctaggaccgtcctctggaatatcttggagccaggagccagggaggctttcctcagtcccagtcgttgcctgtcgccgctttc

SEQ ID NO: 332358 - DNA, 886 bp, Homo sapiens; identical to SEQ ID NO: 231046
  chr5:50264822-50265708
  hyper

SEQ ID NO: 332359 - DNA, 300 bp, Homo sapiens
  chr5:50674575-50674875
  hyper
cgtcctttcagaaagaatgatcaactacatggaggtaacttgctctgggtttcctgagatctcgggcggacccgtccgtgttttgccagattcagtgcaaatgtagatttcagctgaaccggtcaggacttgagagatagctgtttcactctccggactgcaaccacttccgcgagaatctgatacatttaatgaaagctttgccaaatgtacgggtcagcgcgtccttgggccaccaccacttgggtcagcacactgcactcactagcgccaacctgggctccacgcagcagaactcgg

SEQ ID NO: 332360 - DNA, 363 bp, Homo sapiens; identical to SEQ ID NO: 231050
  chr5:50677750-50678113
  hyper

SEQ ID NO: 332361 - DNA, 592 bp, Homo sapiens
  chr5:52778284-52778876
  hyper
cgtcgcatcctgtttttgtcaggttctttaatctgctcttcgagtctctgcaggttatgaaatgggacgaataaaagtaaacagtctagtaaaagtcaatgcaagctgcacgtgttgtgtctgggtcactggtaactgacattgatatggctggggcgccctgtcttctccctctctccctccctccctctcgcccacctcccatctctgtgatcagggcttccccctccactgccttctttttccacccctccacccctttcgatttatttcctacttttctcccgcgtctctctcacttcccctcctccacgctcaccccctccccatccccgccgggtctccttcgctagccacctcgctctccctgccctgccaccgctcactgctcactcacccacctccccacccttgtctcttcacagctgggaactgctggctccgtcaagcgaagaacggccgctgccaggtcctgtacaagaccgaactgagcaaggaggagtgctgcagcaccggccggctgagcacctcgtggaccgaggaggacgtgaatgacaacacactcttcaagtggatgattttcaacgggggc

SEQ ID NO: 332362 - DNA, 727 bp, Homo sapiens
  chr5:54516349-54517076
  hyper
cgcgctccggctgcagtctgtgcgcagcccccggaaggcgccatgcaggttcccgggcctggtgtcagtattcgcgggctctggcagcagtcggggccgcttgggatcgcggctctgaagggcttcatcgcagcgctcggaaatctccctcaggatggcgtccacttccgcgcaatcctgccccgcagcgctgaccaactcctccaggctccttttggccttcgccttgagcaggaagggctcggccgccgccccacaatcccgggactgtgtgatcatcagcttctacgaaagacagggaagagcgccgccctggggcctgccggaccctccgggttcggagcgtgcaaaaggtgacctaggcgcgctacgcaccacgcactcagcggtactctcctctcccgggcccccacgggtcccgatgctgggcggggatgcactgaactgttcagttccgacgtgctgcagttcccacacgcccgcgccccacttacatccagcaccgaggccaggtgccgggttcggctggcgagttccttcagctgcacgttccgctccttgagcgaggcgatctcctcctgtttctgggtcaatgtcacgtgcagctgcaggaggagacccaaacattcaggggtaggtactgtgctgggtctcgtctgcatatctggcatgaatcaaacccagatcctgacgtctcatcaggaactggggacgcacaggcatttac

SEQ ID NO: 332363 - DNA, 1008 bp, Homo sapiens; identical to SEQ ID NO: 231068
  chr5:54518559-54519567
  hyper

SEQ ID NO: 332364 - DNA, 887 bp, Homo sapiens
  chr5:54526958-54527845
  hyper
cgcagacagacacttgcaggatttagacaaaccacaactgtttattggtgaaagactcagcttcctcatgtgctcgctgcaaaataaataaaataccagatgctagtatcgtacactatttacaacctgcagctgaccaagcaggtcctgaagccttctctgtggaccagtactgcactcttctgaggctacgggagaggtccagcagccgggccagggactaaaaggaaacgaaggatctgttttatttcgagctcgggggcaggctgcacttctcgcagatctgaacgggcagcatgtgagtcaaggaagtactgtttatggccaccagcagctgcaacttgcccatacagtcctccagcgccgcctccgggtggtctcccagtcgcaagtccacgggccgcgagacccgcagcatgcggtccgccagcgccaggcagcagatcgccaggagggaaggggagtagctggtgaaggcatagtcggccagactcagctctgccaccccccgcgccagggcttgcgcttccagagcttcggaggcctcagcctgccccgcctccacgcgagcgtgcgtgaaatgctccaggaagaagctaatggtgggcgcacccagggtgaagtgcagcttgtgcagcacgatgcactcgaggttgcagagctgctgccgggagaaggcgccgcagcagagggccagaagctgcttcacgcgcggcgggtgcacctccacctgcaacacagggcgcactcaaccccgctttgcggcttcccgggccccaggcccaccccagtatgacgcccggactttccccatcccttccagagagacagccggggctctgcctctccactgcttccacgtaagtgacctagagcgtacttccagc

SEQ ID NO: 332365 - DNA, 308 bp, Homo sapiens
  chr5:56110226-56110534
  hyper
cgtagagtccagggactaggaggactcacaacgcagcgatgggcagccaggccctgcaggagtggggacagagggaacccggccggtggcccgaccctgcagggaagaaggacgtgcggcgagaagcatcggattcggggagggccgggacctggccgagggtgacattaccgagcacttcctggcacagcgctggtcccctccccaaacgcgctatatgtggttctgtacgggactgcctttcccaaagacagccaaggaaaaactaaagatcgacggggacacccgcctcccttcctcgccccaac

SEQ ID NO: 332366 - DNA, 549 bp, Homo sapiens
  chr5:56112644-56113193
  hyper
cgaactgcactgctaagtcacttgagtgacttctgtttggagtttgaatttggcctttgaagtttgcatttggcggagtggtgtaagagccaggaccggatgtgtcagccattcagtttcaaagcagtggtgactgctccccgcagcccctccggcttggcccggggactgcggcgcgggtgcagtgcttcctgctcggtgccctggcgcgggccgcccgctgaattccaggggccgcagtgcggtgggcttcggctcagatgcgtcttctggtgcatatgaagtacagtatgtgtaaggtaatttagaccagcggtttattggcctcgcccatttttggctactggaaatttttatgttaaaggaaattcttttaagtgtgacagctacatccttgtttgtttgttttttaaaaacctgattaacgtatgcaaagtacaaagtcttgatgggtattttgagttgctggaaatgtttttgtgatagtccctcgtggccctgtagaattccctgacctttattatgagaagaaagcgtgtcattttgtga

SEQ ID NO: 332367 - DNA, 1547 bp, Homo sapiens
  chr5:57877870-57879417
  hyper
tcagctctgcagcccgcggccagcggcagtgtgtgcgcgctaatgacggcggaaggtgcctgggggagggcctggggaggggctggccagcgctatcgcgcccctggcacttcctaagagactgagccctttctctgcagctgcagcttggattccacgctttccctccagaggaaagaagccctccatctaaatcagctgtcttctccacatccctcctttttctctccgccagacgccacccctaccccttctattgtgttgtgccttttcattttagccccgcttcctacgtagagccctaacctcctttgtagcgagggcacttgagaatttctgaacctcgagttgtaatggagctgtatggaaaggtaagcaggcgaaaggagttccttggggtgcttagccagaaatctcgctttcacgcacttcggtgtgcgggttgtgtgtgtgactatgtacgcgcgcgcgacttctcagtgcaattatgcggataaaccactttccttatgtgtgtaccgttaatcgtctttctcccctacgtttggtgaatgagattgtaaaactgccccactctgcctaaggaaacgtagaaactttcccgattcggatggggaggggtagggcggagagtcccagagaccagctctggcttcgtttgcattggaaattagcacaaggtagtgttgtttcctaatcagaaaatcaccatctacttccgaaggcgatagttagcaaagaaaaatctccagctgagataagctggggtcacattcgcctgcccctggcgaggaaaagagcaggggagactgggagaggtaacccaggagcgtttggaaaggagtagggaggctccgcggccgagcccgactggcggatcgagcctgtttaatggtttgcttgcttgccgggagttgtagttcaccgctcgcccgtttgccgggaacacccggagggcgagactacagctcccaggagtgcacggggctcctcggcagtacgcgtgtgcggcgccaggagaggacagctccagtgctgatgttggagccggttagcgaaccccaagagtgcagagtgtggagcgtggagcgccgggactgtgcacgcttgaccggaagcccagaccagtgcggtcctagccagagagaaaggacatttgccaacaatgagacacgaagcgcccatgcaggtgggtccataaagaaagagtggcctcgggaggaattgaaagagatgcttttccccttgctccgcgcacaagcagttcaacgtaaggaaaggtctaggcggtcacccgcggagatgcggctctgtgacatgaccctgggaacagagttgggtttctttacgctctgtgtggctgtgattggggctgtcttgatgagggatcgggctattcgcaatctttctaggctctgtaaagaggataagagtgtctgtctaaaatgaaaacccaagcaaacaaaagtcagaggagcatgcaatctcgtgttggcattgatctcctctcttggcatccggggtttgagatcgcggtgaaaactcac

SEQ ID NO: 332368 - DNA, 1068 bp, Homo sapiens
  chr5:58334886-58335954
  hyper
cgccatgctcggatgcccggtgccggcacatgagggctgctccttcatattgcccagcccggcagtgcaacgggggcggaggctgtgctcgcggggcggccggcctcggggaggcacggtctctccagcttggcgtctcgggtcggcctccagggagggcgtgcaaagagcggcgagccaactttcacacagcgacgcgagcggaaaaaccactatgcgacttttcaactgtgcggcgggcccgagtcccagtccaggagcccggctctagcggatggcgagggggtggcgagcgcgcttgggtgcccgccccgcagaggagcgtctggtccacagccggatctcctcggtccccaacccggagccgcggccccacgcccgccccgcctgccgagccttctgcacggcacttgaagtgaatgaatcagccgcggccgggtgcgcggccaccacgtttcctgttttctttctcaactcctcgggcggcaggcgcagcgcggctccaacgccgcagctttccgggaacactccccctcacgcccctctcggccctcggcgctgcctggctcctcctcaacccccttacgaaaagattccgaattgcaaaagcctgtccctgtccgtgccacccgccgcgtccttcccctcgagctctgccccgggggccccgccacctcgcagtgccatccccccggcgcagccgggcgccactcgctttgaagtgcagacgaggaggcgcgggcgcgagcgtgtgtgtctgtggggctgctgtgggactgtctgtgctaggagagcggcggaaaacccggcgtggagcgcctgcagtccgccgtccggggtcgcgcccgccgcggggctcaggagggaccggcacgcaggcgcgcacggccgcgcacctgtctcgctagaaccccgcgcgccccgccgagccactgccctccaggttgcccagaccgctggagcctctgcgactccacgaccggctgcttcctgcgaagtttcacaaacaaggttatttaggaccctcaaggtttctgagggtttaagttttagggtttctgggggttc

SEQ ID NO: 332369 - DNA, 1217 bp, Homo sapiens
  chr5:59188919-59190136
  hyper
cgacttagatggagtatttgagaaaaggggaggtgaccctttgcctgaatgggggagggggcgctctccactcaccgcctgagtccctggaacgaggagggccaggacatcctggatttcttcaggccgggccggtggccggtctccaccgcgtaggaggtgcggtccatggcgcgacagtacaggtagcgctcggtgtccgagtagccgcgatgccggacgcggccggtggccccgctcgaggcgtagcggccgcgggcagccccgggcggcggcgggggcggcggcagggggggcggcggcggcggctgtagcggacactggggctggggctggggcgagggtggcggcggcgggggcaggtggtgatggggatgcaggaggcggaactggggctgccggagcgggtactggtggtgctgctcgtgcctccagagatgcttgggggctttgagcgtggccccgccggcgctgtcgctgccctctccgctgcccgcccgggccggcgcgctgctgccctctgcctccatcctggctcgcggctccgcgacctgctgcccagcccgggttcaccgcgctggcccgagcgccttcctgatgctgctgctgctgctgccgccgccgccgcttctgcagcccagcagaggctggtgcttagcttctcacttgaaggcgccagagcctcagggctaccgagagggggccctgccagcgggaggggtcacagaacgcggcagggctccttccaccgaggctatggcagagacacgctcccgggctccccaagtcaccaagactagggtgcgcggtgcccggtttcgccagaggttggtccttcttcctccctttcttcttcccttcctttgggcgccggcggcgagagcagggattgtcagcaactcgggctgcagaagcagcagcaacggcggcggcggcagtggtagccgcctccagggcaccggaaccctgatcccggagctgctgaaaagttggacagctccaggctggcacgcccgagctgtgactttcaccaaaaccactccagccagtcaggagtcagacctgtcctcttgatccttcccctcgccgtgcccgcgcctccctcctccacactgctccccactgccccggagccttcctcttcacctccgcttgcctcagtgctcttagagaaatggagtttggcgattcctggctggttctcagagcttgttgac

SEQ ID NO: 332370 - DNA, 266 bp, Homo sapiens
  chr5:60921445-60921711
  hyper
gttctctgagatgtcgctgctattactgtctcaaatttccttttaaattttgctgtttgagtaaattagtgctggcctttcctgagctccgcagctccgaggtggcccgactgccgggcctccaccccttttccccggtcccgggtcggtttctccgggcgcaaccagcagcgccacaagccggttgggtcccctggctccctctccaaggccagcgcggtcatgcgggcgggcgggcggtgttccccagagaccgcccatcccgc

SEQ ID NO: 332371 - DNA, 489 bp, Homo sapiens
  chr5:64398796-64399285
  hyper
cgcctccggcaaccccggtgcttcagtgctcccgacctttctctgccgcccctcgcctcggcggccgccgggagcggctgtggggtgcgccggtcgccccgggcccgagcgggaggagagtcccgccccgccgcgccccgcctccgggcgccccgacgctgccggcgcggacgccattgctgcggccgctgtttgttattaaactgcccagagaaagggcttcgagtaaaaacaccaactttccagtcggggcggcgcaggtccccgggccctggaaagttctgggacggccgaggtctccccggacacccgcacccacgcccccgtcgtgccctttctggcttttggcttcctctcctcgatttcccttttgtgcggccccgggcagcttcctcaggccccgccgcccccacctggccgccctgggagctgttcctcccccagcagcaggagcatccagctcgggttttattacctcccgagacactc

SEQ ID NO: 332372 - DNA, 436 bp, Homo sapiens
  chr5:65220759-65221195
  hyper
cgcaataaacgcgaaccctgccaggctgaattattagggccagcgcaattcaacgactgcaccaccaccgaaccgctggggttggaagcctgcgtcgcatcggagcgtacccatgtttcttctaacaaaggcacgatcttgaggccatttcgcgggcccttttcccactcccagcgccagctttgtctccccgccggtatgaggctgagacttggaggaggctgagctgcgccgctggggaacaagctcgaagggcgggcgtgggaagctgcaccgcgctgccgctgtggtttcctgcgacctgaccgtgccattagaggaagttggagtgctgcagctgcaagagatacctgctgccttcaaatcagggctggactccaacaacccctgtgcaccgattactgtcgtacaaagaaactccatcggccggcgcggc

SEQ ID NO: 332373 - DNA, 1043 bp, Homo sapiens
  chr5:66299591-66300634
  hyper
cgtacttgaaggggcaatacttgtagcatttgccacataaatgccaggtagtgtctttccacatcggggctcaccattacctagatctgtagttgccggccatgaagccaaacaggtgtgcaccgtggtcattgatggaacagatgtaaactcataaatttagtttactgaggttttcggtgagtgtggcttcccgtccgcgtgcttttcctatacaaccagcggcgtcctggcggaggagtcactgtggacttccccggagcgttgtcactgccatccctcccgcggtgaatcacaggtcggcctcaggtgcgcgcagcacacacccggagcagccgcgggtttatttatttatttccgggacggatccattccgggctccggggagggggagcggcggcccaggctgcggggctgtcccggcaccggctggggtcgcgccgcggccgcctgctccctttcccgtgagcccccgctcctcaggcgcggccggggctggtggggggtgggggatgcaggaaagctgggggcgcggccaccaagctgtccagggacaaggccctgccgcctcctcccagccggaccctggaagggtccacaaaggtgtcaggttcaagtcctccaataggcccattttttaaaagtgcttttaagtttccgcttttttcaggaggggagggcaagagcagctttttctattcaaattcttttccttgtatgtagataccaaaaggaaactcggcactgggcatgttcggatgtgaatggttttgctgataagcaacagcctccggaaccaaagcctcaaaatagtcgtctcccccgcccctcgcagaagcggcgagtggtatctgccaaacagatgacaaagtacctccgactgaatcccacagacagcgctttgagcagaacgcacggctcaactcatgtaattactgtttatagctggccgagcctgactaggagagggcagacccgagaggaaatcagtttcccggacctttgagaggaggctgtgtgttaattaaaggctaggacgggac

SEQ ID NO: 332374 - DNA, 150 bp, Homo sapiens
  chr5:66511687-66511837
  hyper
cgtgcccttgccctgcttcagccccacagccccgcctgggttgctggtctgacccggctgggcagggtggctgtgagctgccggtgtggccccaggcacctcaaagggtcctcggtgttcaacaacaggaagtgctggcaggcttccctc

SEQ ID NO: 332375 - DNA, 490 bp, Homo sapiens
  chr5:67583960-67584450
  hyper
cgcttcactgtcggctacttgagccccgcgagccagccagcgcgctcagcagccagtgagactattttaggtcccctcacaatggccttctcatttcccaggcgaaaatgagcaagttggtcttgcattggccacttgtcagccgatgacaactttgacttgggctcccctccccctcccgaaatccctagctcagcaaatatttgaacctgcccaagttaatcatgaagctgcgatctttatctaagggagacgtgcgagcgcctgggctcctttcctccccgatacagtagcgaaatccagttggcttctcaatgaggagccggcagtgagcggcggtggcccggacgcactgccgggcggggcgtggggcggagggacgagccgagccgagccaagcggagctgggccactgtgcacgcccggagggtcctggcggcgcccccgctcctgcgcgcactctcggcgccggacacgagcactgcctgcc

SEQ ID NO: 332376 - DNA, 705 bp, Homo sapiens
  chr5:71014805-71015510
  hyper
cacctctagcccctcggcttcagctcaggcccctcggggagcatcccttgccgtgagactgacagcctttgggggcgcagggtcctgttctctgcgctctagcccatctgtgcgcagagcctcgttcccaggcgcctggaacccggcgggcattgacgtcaagcgccggcggagcgctgcctacagacggttgacccgggccctcctccacacccccttccttcttcgcctcctccctctttcctgcacgggggctcgggctcactataaaaggtgggagcgcgtggtgccccagcaacgacgagtttcagaacgatggagagctcccgcgtgaggctgctgcccctcctgggcgccgccctgctgctgatgctacctctgttgggtacccgtgcccaggaggacgccgagctccagccccgagccctggacatctactctgccgtggatgatgcctcccacgagaaggagctggtcggtattcccctcgctctcgacccccttgagctgtcgccttgtctcttctcttgcacgcctccctcctccccccacccccactcctattcccagagtcagggcgcggggagctgagcgcaacgcccaggcacccactgccatccgaagagcgtctcgagctcacgggctcctggcagtctgttgagcgaatccctcatcccggcccctctgagcaacagggaccccagc

SEQ ID NO: 332377 - DNA, 993 bp, Homo sapiens
  chr5:71403137-71404130
  hyper
cggcgccgcctccccgccctctctcactccccgctcctctccgccgcgcactctccgcggcgctgggagagggcggagggggaggcggcgcgcggcgccagaggaggggggacgcagggggcggagcggagacagtaccttcggagataatcctttctcctgccgcagtggagaggagcggccggagcgagacacttcgccgaggcacagcagccggcaggatggcgaccgtggtggtggaagccaccgagccggagccgtccggcagcatcgccaacccggcggcgtccacctcgcctagcctgtcgcaccgcttccttgacagcaagttctacttgctggtggtcgtcggcgagatcgtgaccgaggagcacctgcggcgtgccatcggcaacatcgagctcggtaagtggccccgcgcccccagagacgcgcgctgggagacgcgcaaacacgaccccacccagggcgcgacggtcactgcgctcctcccgcgcgccccgcacccatgcctctcctcgtcacctctcatacttggtccagaccctttctgggctaattaagaataatccgaattattagatatgagacccagagggagagtctccaataaccttgagggatctgtcaccacgctgagtccgcagcctgtgctgagttggccaccgcctctcccgctaagtgaaatgcaggtgtcaggggagcagaggccacaataaagccgcaaccgcaggaggcagaagggtgggggagacctgatgcaaccactcctttcagtcctcttctggcctcaggaaaaggctgggacccccaccaccgcagacctggggccgaagcccatgtgccagggcccgcgtgggattcatcctcaccacggctacctcagcccctgagaaacgccttttctgatttcaaacctcccgatcctttctttcctcagaatgactaggctagtcctagggccacgcccgctccccccgcccccccctcccc

SEQ ID NO: 332378 - DNA, 980 bp, Homo sapiens; identical to SEQ ID NO: 231122
  chr5:72415782-72416762
  hyper

SEQ ID NO: 332379 - DNA, 281 bp, Homo sapiens
  chr5:72497779-72498060
  hyper
cgtctgcagaagttcgccctttgctggcccctgtccaggctctcctctcgctggcccacgtgatcctttcctgccagtctcccctggctccagcttcctccacgcccagggctctgccctccgccgggccgacttcccgcgaaactgcagcggctccccctacaggacaaaggaggaaacgctagcggggccccagagccctctccaatgggacccaaagggacacatcccggcacagaccctccccactctaaggcagagcctttcgcagggcctatcac

SEQ ID NO: 332380 - DNA, 1332 bp, Homo sapiens; identical to SEQ ID NO: 231126
  chr5:72529230-72530562
  hyper

SEQ ID NO: 332381 - DNA, 1567 bp, Homo sapiens; identical to SEQ ID NO: 231128
  chr5:72594247-72595814
  hyper

SEQ ID NO: 332382 - DNA, 886 bp, Homo sapiens
  chr5:72598958-72599844
  hyper
cgccgccggtactcaaggagccacccgcgcgcaatgtggaagggcggcgagtcgccctcggggcccacagcgccgtcgggcaaagaaccagaggcgtggagcgaatgcagcgcccgggagtcagggctgttagtggcgtggcccgccgggcattgagctgtttcctccaacgcccggtcccccgcggcctaggcccagtgtttgcttttgcagatacgtcagagggaacattcaggaggggcgggctcccaggctcccaggagaccgcccggagcctccggagcgcgacgaggcgcggggcctcggagatctggcctgccagattgagggggaggggagggggcctggcccagcagctggacaggcgcgcagtgcccgcagcccgcgagtgggcgcccagctggcttcgcacgggtgaggggctcagcctgcacttccctcctccaccccgaccgccgaacgcgtcccggctggcttcagagtgcgcttctcgtggacgtgctgcgcgcaccctagggagatgcgcggcgtccgcgcgggtcagcgccccagtaccactccccagtgtactccccaggtacacgcttcccttgcgcggcgagtttcaactcaggtcagaacggagctgagcggtgggcggagtggagaaaggtcccggaaattggccaagagggggcggtttcgaggtagtgccttcgaagtgttgtccagaccagcagggagggtcgcctccacctgcggggcctcctccagctccacaaggtagccccgtagggacttgcagatctgccagacctagcagtgagaccactgctcccactgaatggcgccgcctgcgggctggcccaagctctatgcaccggctttatctcattttctcctcacc

SEQ ID NO: 332383 - DNA, 487 bp, Homo sapiens; identical to SEQ ID NO: 231133
  chr5:72677215-72677702
  hyper

SEQ ID NO: 332384 - DNA, 1295 bp, Homo sapiens
  chr5:72732470-72733765
  hyper
cggtctttgaccccccgcgcctcccgcccacagccggagcccggcagctggaagcacccgctaccccggggagcgtctccaggccgcggtctccggccttcgccgagcgaggcgggcgggaaggtagggccgcggtggagcgggcacggcctcccgccccagcccggagcctctccgccccgccgggccccgcggccgccccttcctcacccggaaaatcgtggggaggcgcggcgtagcggccggacccctggcctccgcgtcgggctgcgccacgtggcagctcccagcgccctcccgtcccggcctcgcatgctgtcgggggagcgcctcgtcccactcaggccgaaaccccaggaaggaaatcactctgggctggggacgcggcctttctgctcgcggctgttgggtgatgtgcccgaggtttctctgcccttctccgggcgcaggccgttcattcgcgccgccgctcctgagggtcgctgggcgcagaaccgcctcggccgcggcccggccttaggcgcggcctcgcgcattcctgcgctcgccacagccggcgggaggcggggaagggagcagcccgggtggcttggagaacactgaacctttaattgggctataaatcagacaggggagtgcggtggagtttatgcaggtgtaaaaacagaggggaaagcccgggccgagcagccaaagcgcccgggcaggtcagaacctccagcaaactaacatcttgataagtccgctgacaacaaaataaacagtggagaaggctggagggcggggggcgccgtggcccgcggctggttcgcagcagctcggcggccttctgcgaggggaaggcgggccgctctcggctttgtgcttggggctttaggaggggggcggttggaggagagagagaagccgaattatctccctttccgcgtctcattcccgtggatggagggccccgggagcgtttgacgatggcagtttggggcgtgcgcgctgcctcgtcggcccctacgacgtcaggcgccggagctgccggggccccgggcgagcgggcagcggcccccgcgtccctcccggacacagcgccaccgagaggccgagcctcccgctcctgttgccatttcaagggctgacgcctggaaaacaccgccaggcccctggccgaaggaggtaactaaccgagtcgaaacggcgatcagaaattaattcagtgccctgctcaggagcaaaaccgtcaaaaccccatcgagatgttggcgcaagcggattcacacacaaaggaaaacaataaaagtctc

SEQ ID NO: 332385 - DNA, 1443 bp, Homo sapiens
  chr5:72742484-72743927
  hyper
cgtcaagggagcctctagtgcctggacagggcggactcccttccccggcaccctcttcctccctaccccaggtcgggggttggggggctgtagcataggtcggctttgcataaatagagggacccgcagagccaaaaggcgcgcccgggctgttgacagttttgtccgagaattcgcagcggcgaaaatgggcgcgcgaggtcgagaggggccgcgcctggaggagcgaacaaaacaccgaaccaccaagacgagaaaaggagccgggattcctaccttcttcctcgagcgcgctaacatagcgttattaacaattggaaatcctagcagtaaagttctcgacactggacagggcagtcccttggtgcagagtccccaaggcggcggacgaggagactgaggaggcggcggcggccgcggcggccacgagggatcgggtgagcgcggccgccgggcccacggccgcctgcgccgcgcagcctcctccgctggatccgggagctggcggcgccgccaccggcgagggcgagggcgaggcctgagcggcggcggcggcctgcgcggcggcggcggcagcggcggccgggcccaagctgcccccgatgatgctctcgatggagaagggcgagcgcgccagcgctgaggcgcccgggccgcccgccttggccgcggaggccggcagggggccgggtagggcggcgccgagcgggtgcggccggtagccgaaggcggtccgggccagctcggcggccgcgccgtgcggtggcgggggcggcgggggcgagtgcgggtggaaggcggcggcggcggcggcgcgctgcggcggcgaagagggccgagggcggcgcgtaaggcggcagctgcaggccgtagccgcagccgtaggggccgtagccgtaggcatgcgggggcggcgggggcgcgggcgggaagagcgcggcggcggctgccgggtcgcccgcgccccctgcggctcccgcgccgcgcagcagcagagactcggcggccgcggcgttgggtgggagcagcggctgccgcttgaagcgcttcctccggcgcaggaagctgccgttgtcgaacatgtcggcggactccgggtccagcgtccagtagttgcccttgcccgggttgccgggctcgcgggggatcttgacgaagcagtcgttgagcgagaggttgtggcggatgctgttctgccaggcggggaacttctcccggtagtaggggaagcggccgctgatgaactcacagatctcgctcagcgtcagccgcttcttggggctctgcaggatggccatagtgatgagcgcgatatacgagtagggcggcttcaccagcgggttcttggcgccgctacccgcgctcccgccgccgcccgcgccgccgccgccgccgcccccaccggctcctgcccccgccgccggggccgggcccgggggcgcc

SEQ ID NO: 332386 - DNA, 703 bp, Homo sapiens
  chr5:72744430-72745133
  hyper
cgcccggcccgggcggaggacttgaccttctcctctcggagcagcttttgccccgtcagctgaggagggggtggcggggcccgggcgggcgaatcagaacgccaggcgcccaggaacgtgcgggacgggtgagagtctaagaacagagctcggcgaggccagggctgagtccaggagagggcggaccttcctcggcttatagcagaagggggcctgtcacatggtgtgcacgtcagagcgctgccgagggaaggaaagcaagcctaggaaatcagcccttctcgggagagaaaattcacccgtaggagggaggcagcagctgagaagagtggggaggagaggggacctcactatttcttgccaaagaggctgatgcccgaattacgcggctgtctgcaccgagggccgctgcacgagttagacttcccagcctcctcaattagtcctccaccctaacctcagaagcacacccgcgacactctggtttgacccctcgacagcctgtaggagccttccagccgggggataaccaccccatcctctgaggtggcccctgggggacgctctggggtcggttgggggtgtccagcccctccagatcgggcgagcggccccccattggatctgatgcgaagccccccaatttaagcacgataataattgtttattgaccctttaacccattctcttcggttttactcca

SEQ ID NO: 332387 - DNA, 210 bp, Homo sapiens
  chr5:72745163-72745373
  hyper
aaaacgctgtgagactggcgttttactcacttctctgcgattgaatgccctagagacttgacagttaaactaagccactctaatgagacgatctgacaaatgtcatgggaataaagaacgtaataattgaattcggagaagaaattgaaatttttagtgaaaacccaaatacacgcacaaaaattgcacctagaaactactaaaaagttc

SEQ ID NO: 332388 - DNA, 988 bp, Homo sapiens
  chr5:72746989-72747977
  hyper
cgcagtcgcgaaattccccgagcgcggaaactcaagcgattcacgtcttgcgcgacccccttgtctcccccatcgtcccctaccccgggcctccttctctacagcgctcccagctttcggccccagctggtaactctcccccggctccccgcccccaagctggtacaagggaccaaaacctttcccagaggcgagccggggaagcgacgcgaagacccccgtccggcgcaacccgctcgcgtggacgcggaaagtggcgggcggcgggtcccggtggtgcctgcgtagggcagagttgccccctggcggcggtgcgacgacctgcgggccctcgcgcccgggccggcaactccctgggagctcggcccgcgcggggaactcgcccagcagcctgtgtttctcgagtgtgggcagccggctcccgggcgtccctcccaccggctgcgggggcccgggactgggcggtagtggaggcaggtccttggactgcaggctgaggctttttccccccacgagcggtttgggccctccaggagcccctgcgcgggggtcacgtggattacgctaggtgagagccggagaggctgcgccaccgtcgggaggctccctgcctccgccctttgtcctttgcccctgaccatgagcgccccaagcccagggacctccttagggggatgaaggctggaagagacctgggggctcagacttacggggaaggaacctaggctattccttgtgcatcccaggattttacccatgaacgtgaacatgaacgtgttttcaaccccagcggttcccctggcgcctcgaccctcctttgaagagtcattctagaaggctgtattgcgatagtgtttgtacctgtcactgtgagccctgaaaagagacagaagaaaacgcgagtgcctggcctgagggtgctccgtcccgtgggtagccaggtaggtagttattctgcccgatgatgaggtcctcctgacgcccccgc

SEQ ID NO: 332389 - DNA, 164 bp, Homo sapiens
  chr5:73843900-73844064
  hyper
cgctcccgcccgccagcttcatgaaggggagatcagcccaggctaacagtgggtggtggtggatcccaagcaccaagaatacagaatgcccttgctgaagaatcaagcaatgagttggagcttatgggaagcaggtgtctaagcaagaaggcaccggtgcagcc

SEQ ID NO: 332390 - DNA, 865 bp, Homo sapiens
  chr5:74349128-74349993
  hyper
cggggttcagcccggttccccgcgcggctccgagagggcgcccccgcctgccgcctggagatggacgcggcgccgaagttttccccggcgggaaaacgaaagtcgtgaggagcagagggtcggggcgtcccggcggagacgaggctgagaccgggttaacatctccagccccgggcgaccctcgctcccccgcgtggccaagtcgacttacgagagggagcgggccagccccgaacgcggggtccgtgcggctgcggaggccgccccggcgggggccgagggttgcgctctgggttcccaggctctccgcggcggctcgctctcgccgcgctcctccgtcgccctgctggggagccgctctcgcccggcccggggtgggagagcgctgagcggcccccgtgacgtgcggagaaagtaggagcgcctccgcgctcccgcagagggagctccctgccctgcgctcccagtccccgggccgcgcttcggacaaagttctcaggcgcgcgcggtgatctcggctctccgccgctgcccggagcgtcatccacgttcggttccctcccacattagacaagaaatctgaggtcaggagagctaagtaacttgcccaaagtcgctcacaaggcagtgacgaagcaaactcacatccgcggctccttttttctccttgaacgccgggctctgcggaggctcaggccctgcaggaatcgcccaaccagacagaaggcagctcgctctcatgggtgagacgaggagtgtcccacgcagccgcgagaaatattatcagcagcgtgggaaggtggagctttttgccgaataactagagtgcaaagttgtttttcaaacagtgcctacatgccaaatc

SEQ ID NO: 332391 - DNA, 2324 bp, Homo sapiens
  chr5:75378679-75381003
  hyper
ttgctccctggaagccaagtcgaagtgaacaagtcagtcccaggcccggaaatagaatacaaaccctctttttgtccggtgctaacagagtccagcagtcagaactccctcgcgtctcacgctggacctgacccggggcgccgccaagtgcgcaacgcacagtcacagttggtgactaattaaggactgccgcccctctccttcacctgctacaaactcagagccctgacttctccagaagtacctaccacttggaggtggctctccttccccgccccctgccccagtcccacaccgcagcagcgcctcagcaccgcgacttgccggagcaccgcgagtggcgcgcgggtcccgcctcccccgcgcgccgtgactccctgcgcaccgctggtactctcgccacgccgccgcccggcactgcagcaccagggggaggaggcaggcggaggagaggaggaggaccgcagcgtgcaagccgggagccactttcccgcccctcctctcgccgctgacacgctcagaggagtcaccactccgcgcgctgcaggcgagagtggcagacggaggcagcccggggaagcgagccggagcggcgcccgcactgaggcggctgcagtgctgacaccactcagggcaagggtgtccgacggctggagcggtgagtgggggaggtgaagcgggcatccgcggggagactttcccccgctgctggatttctcttcccgactggtggccgggcgctgcagcctggggaagtttttgcagcctttcggaagcgcaactttgccccgcctgcccccggggaagcggctgcaggtgcccgctgctttgtaggcgcctttgttggagagggaccaggaaagtaggggtaaaatagatgcagtgaccccagggttcgctagggtaggtctggggactgggtcgcactttatctgggattcccagaggaggtgggtgggcagcagcggggatgcaggggccgcatctgcagcgaccgccacgctcttttttgcttgtgtggtttgaccggcagggataggcagattcaaatctagcagcctagagccccgggctgggtacctggacctataccttcatagctgccttaggctcaacttttcggcggggatccctctgcagacgtgcaggtggcgggagagcagaggtagccgcagtaagtgctgagagagcctgaaagaaacaccatgaattttcaaactctcccacatacattcccgaagcgcctgtctggcgtctaagagagagcaagagagggctggagagcaggggagcccgcggggctgaggctctttgtcagcgcctgcacttcctacgttacaacgccttcattcagcaaaaaccttttgggcgcctgctgtgcgccaggccaggcgaagcagacccgaggctgtgaagctcagaggggagagggaccaatcgcagtaaataagctaccgaggtaatcttagatggcgatgagggcagcaaaagccatcagccgaccctctgaccctttctcttagtgggcttttccccttccgcctgggttctagaactgggaagacttttctccagagcgtcgcggggagcgccccgggctgggcccacggggactgcggaatacggggatgaacttggcttggggcagccagcaccccacggcagatgaacaatcgggagcagatctgtgggcgtgcggggaccttaggcggcgcgcgggggcggggggaggggctgagccacgggggctagaggtgccgcctggacggcctgagctgggggcgctcgcgtcaccttctacgtgtgcgagtgatgcaaatgcagacccgcgaggggcgggcgggggtggcgggcgggggcaggcgacggagtctccgtctgggagcgcgcgtgtgtgcgtcaaaagctctgggttgatggatgccccgcggcgcgcctggcgcggagagcggcgacccggcggggcagaggggggcgggaggactgcggcggcgcggggcggcgaggaaagccccgcacggcctgggctggcgggcaggcggctccgcagtgcgccgcagtgccgggaaggagccgcagctaccgggcgctccccgggggaccgaggagatgaggcgtcttttaaggctcatgagagccttaaggagatgagaccgggatgccgtgatggtctcctctcccgctgaacctaatcccttcatacttagctgactgctagcgcggtagcttccgtttaattcttatccttaattctgaagaatgtggcattaatctctcaggcgttcactcattttccatggcaagttccgaaaggcctcgtgctc

SEQ ID NO: 332392 - DNA, 1998 bp, Homo sapiens
  chr5:75698194-75700192
  hyper
tgagccgccgcgcccggctctaaataatttcttatcgccctccctcagtttgtttttcctgttatcgggtcacccacacattccacaattgtcaaataggtgagggcacaggtacggaagcgtcccgcattccctccagattttatcacgctgagacacaaagagaaaaatagctcctggcgaccgcatgaaaaccccgatttcaaaacagccacatgcagtttaatttccttaaaagcttagccggaaaaggtttctgtggcttgcgaccccagctgggcttgagagaaggctctgcacactggggcgggggcgggcacaaggtgatcggagggagggggatgactcgcagttgtgttttgagtggttgccttgggttatcttgttcctccagcacacacacactcagtttcttgtcataaggggaaccctgttattttgtagacaaaaagtgacagaagcaactttcgaagcaaaaaaaaaaaaaaaacaaaaaaaaacaaaaccaaaaagacgaagaagaagaacaaaagtcaacgtgaaatctccccagaggaaaaggaaccgcgctgtttgtccctcagtaactgagcaacaccccggacacgaagggctccctgtgacttctgcggtttttcttgcacttctccgcgttggttcacttccaccctcgaaactctccagaagcgagaaataaggcggggtggccgccacccccaggccaccagctgtgcgggggccccagctgcagggggtcccggcccagcgtccctctcggccccttccctctcccccgggggagaaggggcgggtccacgcggcctgggcgctgcgcccgacacgcggtaggggtcgctgcgtctcggcgcgcgctcccaccgcggtgaataacggggcctggctggaggagaaaggaaacctgctgcgggaggcggcggcgaccggccagggagcgagggaggagagttcacttttacttcagtgtcagcgcgcggcggccgtggctggctctggcgagagagcaccgagggagtgggtcgcagatcttcgggcggctaggggaaatcggcgagaggcgggatccgagcgcgccggcggggcgcagagcccgcgagcctggccagcgagggtagccgcggggggcgcgccccgggcgggcccccggagacgcgcaggatgccacacgaagagctgccgtcgctgcagagaccccgctatggctgtaagtgcgccgggcgcgcggggttcctgctggccttggggagctccctccccgaggacggcgttggagaagccgagggagccggttgcgcggcgcagaggaaattggaaggcagcaactgcgcggctggcaaagttgggagctggagttgcaaagggcagtgaatcgcgtccccccgctcctcccgccccccaattcctaatatccagctggcaacccagaccctccactccgcatacccaaacggggtgcgcgggcagtgcggggattgcgctctgggacagaccaggttgggattttaggggtatcaggtgaggagtccgcggagctccgggtcgccgccggcttgggccagggggtggcgtaaggcaccggattcttccaacccagaaggggaggaaagtttgtttgctgtggctacaggtgggcaccgcaagtagggcgccggcgcactctgctagtgcaaagccggcttgactggaagggcgggagtctcctcctgtcccgcgccctcgaacttcacctgacccgctagagccattggcctcacaggtgtaagtccctcccctctgaaaccccccaacccctttcccccccgctcccctcgcgcgggaggattgctgtgtggagaggacgcggcactaggctccggggaatccggcgggagcccgcgtgacttgaacgagatggtgtcgattacccagccaggggctgccctcggaaataggttgctttggccgatcgtgagtggatggagccagattaacaccaaccac

SEQ ID NO: 332393 - DNA, 1763 bp, Homo sapiens
  chr5:76011064-76012827
  hyper
cgttcaagaacgtgtgaaggacacttggaaagttaccaggccatttctctcctgggcgcccgcggccctagaacgccggcctcaccggcagacgcgcgccctcctcccagatgcgcaggtgaccccggcgggcggcgcgggaaagggaagagctccgcgaggccgcgcgggggggaagcgggagaagccgctcttcctattccactcgcagtctgcgtgtgggggaaacgagtgcccggcgtatgaaacgcctaacttcgcgaaataaagagagacgtataaaagttcaagaattctgtccagactcaagggccctttctcatttaggggcaaccctgtcactacatcataaacttttaaatccgtgatccccacgttacaaaagcagaagtcccttttagacttttagcgaaaactgaactttgccggtgtcccacacggagggagggaggacgggaggccacgccagggctgcggggctgcagggcgtggacgcatcctggccggggcgtccactgtcgacgtctccacatcccaggagggtcgagacggccgcgggaagcagcctgcgagccgtgcggccccattccaaggaccccgccagtgtgagtcactgacagcttcgcgaatcaacggtgcccagaggaaaaaacttctcatttggacttctaggcccggcagtggccggcggccagggccccccagtagggcagggcggggcggggcggggcgcacagagccagaggggcttgcgagcggcggctgagggaccgcggggagggggcgccgagcggctccagcgcagagactctcactgcacgccggagggcgcccttcctcgctcgcgcccgcgcgaccgcgcgccccagtcccgccccgccccgctaaccgccccagacacagcgctcgccgagggtcgcttggaccctgatcttacccgtgggcaccctgcgctctgcctgccgcgaagaccggctccccgacccgcagaagtcaggagagagggtgaagcggagcagcccgaggcggggcagcctcccggagcagcgccgcgcagagcccgggacaatggggccgcggcggctgctgctggtggccgcctgcttcagtctgtgcggcccgctgttgtctgcccgcacccgggcccgcaggccaggtgagagatgcacgggaatggggtgcgcgggcggagggacgccgaggggagactgcgggggtcactgttgcgccttctcctcacccctgcctcagtttcctccgaaagccaaactggcatttgggctgagatctggagttttttccagtcacgtttaggtggggcgtgccacccccttcgcgggcccagccgatgcccctttggactcgatcttggagggtgcagcccgcctgccacggggtgttggatatggaggaggatggagcggaagccccctgggggagcctgcagtcctgcgttgcacttgtcattgtgtttctcccaggaccacccccaaaaagaaaagctctcacgttgctccaccaataaacgtttcgatctttaaaatataaagtggcgaaccgctgccgctgaagttttgctttgttggaagtttttttcttgcacattttacaggcgagaaaagtgatgtagagaaaagcccaggcagtcccttggcatgtttagcagagaatcagtaccagcagcccccggcccggccttgtgtccaggaggtgcgcagggtgcgagatatatggtgacaatagcagaggctccgcgtggtggc

SEQ ID NO: 332394 - DNA, 1291 bp, Homo sapiens
  chr5:76114396-76115687
  hyper
cgctttcgtgatgtccgcagttgcccacctgcctctacaataaaaaacgcatccctcctcctgcagggtccaccgcaccgggaagccctgtctgtatcagttaccaaccacaattgcagtgagtacgaatcgtggctttcccacagtcaggaaaggcaagggagaccgacgacccgcttctctaggagtaagtaaagattaaaggtagttcgcggtatagcctaggcagggattaacccgtggtcccagcgctcctgctatttgcattccaaagcagacacctcatgcgctcaaccccgcccgcaggcggctcccgcagtctaagggacctggcgcgagtccgggaagcggagggcgcagctgcgcagggaagggggccgggggcgggaccagggcgcgcgttccggtcccggggcgtggcctcccgcaggtgagtacgctgctccttcggtttccctgaaacctaacccgccctggggaggcgcgcagcagaggctccgattcggggcaggtgagaggctgactttctctcggtgcgtccagtggagctctgagtttcgaatcggcggcggcggattccccgcgcgcccggcgtcggggcttccaggaggatgcggagccccagcgcggcgtggctgctgggggccgccatcctgctagcagcctctctctcctgcagtggcaccatccaaggtgagaaacctggccaaggagggctcttatctctgaggagctggggtcctgggcacgctgggcagacggtgggatccgggcaggtgtgcgaaggctgttctgctgccggcacccatctctacgaatcccttagcctccccttggtggctttgatgtgaggtctctgcgccaaggaggcacccaggtgggacatgcgggagcagctgaagtcagcggagccgggcagaggcagagatttccccaaagaccccacttcccgtagaggctgtcatgctgggcacctccaggccccagcgtgggttcggggaaagggagggaaggaaggagtagctgtgtctaaagggtacgcagaggacctagtcccctccccgggcttggttgctttgtaaacactaagtcattaagagctttttgccaactccggagacttcctccgctggccccgcggggccggtggggttagcgagctgattgcgcagggcagggcggagtgggtgggaacccgcggcccgggagccttctaggttgttttttgcgtccctctccaactgctggaagcctttcttcgggttctggcccctgcgttcgagacccaccc

SEQ ID NO: 332395 - DNA, 1268 bp, Homo sapiens
  chr5:76506030-76507298
  hyper
gctgggggcggcgtcgggatgagtgcagaagagacgaggcctctggacagcggaggaggaggggagggcgccgaggcgcggtgccagctgccgcgcacaggggccccgcggcggagccgagccgcgggcacgctctgccctgtcgggagagctccgggagcggcgggaggggcggaggggcgcagtggggcccgggcggctgcggccgcggagccggggcacctgaggaggaaggagggtgggagcgagggagggaggggacgggcgcagaccgaaagtggggaaagaaggtgcaggcaggcgggcaggcgggcgggcgccctggcccagggccgcgggtgcgggagcccggcgaggtcgagctgggcggcggcgggggccgcgccgagggaggaggggaaggcggaggcgcggggagcgtgtttggggcgccgcggcggggagggtggcggccgctggtgcgcgcggggcgctgtgtatgcgcgctcccccgctcggggaggaagatggcccaaaagggaaagttggggtgacgcgcgcggtccccggaggctcggcggggggcaccgcggccagcccgacggagcggcggacacacaggccggggggcgcgcagtccgggcgccgccgcggccgccccctcactgcaggtggcagcgggtgcgctgggtcccggcggccgcgggcgcgggcgggcgcgcgggggagcccggccgagggatgggctgcgcccccagcatccatgtctcgcagagcggcgtgatctactgccgggactcggacgagtccagctcgccccgccagaccaccagcgtgtcgcagggcccggcggcacccctgcccggcctcttcgtccagaccgacgccgccgacgccatccccccgagccgcgcgtcgggaccccccagcgtagcccgcgtccgcagggcccgcaccgagctgggcagcggtagcagcgcgggttccgcagcccccgccgcgaccaccagcaggggccggaggcgccactgctgcagcagcgccgaggccgagactcagacctgctacaccagcgtgaaggtaaatgccccgcgctggcacacgccgtgggggccgtccgccccgtcggcggggctcgcacgggtagggggctccggcggagttgggtgaccgtgaggcggttggtttggagaggttgtcactaaggaggagtttacttttcatttgtggagatgatgggagcccaggaaatgtggtcagaaaaaggcccctggaggggtcctggaagc

SEQ ID NO: 332396 - DNA, 794 bp, Homo sapiens
  chr5:76923707-76924501
  hyper
agtttaaaacacaccgcaaaccttcccctcggccgaccgaagaaacggcatttttttcctactcctttggggcagtcccctgagcacgtgcctgaagtcgaggttagtacgcagccagcagggaccctgacaggaaaccagagcagccccggggttgggggagccctggtaggtgctggtcgtcccggacacgcctcttctggagaagcgcgtttgtcccttacttgggaggtcccgggtatctgaagcggatcccgggtctggggacatgaaggggcgccgtggccttagggaaggccccaaagaggcctaggccccggaggaggcaagagccgcggcctagcttccaccgcgtacctggggccagacacggctggggcggcgccggagagcagaactccaggctctgaaggccgagggtgcgaattgtggtcccctcccacccacggcctccccatcacgcgcacgcagcccgcgaggggcgccctccgcgccactgccccagggacaccgttcatctgaggaactctcgcgccctgcgtttcgtgccgacagcgacgctcggagtcccacctgggaaacctgggttggcccggaaacctcgggaggctcagagcttgcgtgaggcgctcgcggcgccccagcatgccgccccgtcgcggagacctcaccttgcagcccagaaaccgaacccaagcccactgcagggcgaagggcccacgcgttccaactggcgcgaatataaccattcccaagaccggcccctcccctccccccacgagacccctcccgcc

SEQ ID NO: 332397 - DNA, 1732 bp, Homo sapiens
  chr5:76925469-76927201
  hyper
cgtgtctgtgcgcgcgcgtgtgtagcgtctgagcgtgagcgagagtgcgagtgtgtgtgtttctgcccacaaaccagtccattggtgtctgatttcagatcctgagtcgactccctggtacgtaaaatggcgggaaggatactttttgccgggcgcgggaggagggtcgcgaagtgtggggaaagaggggaccggaggggaggcggcgggcgaggggggtcgtaggcgtcgcgtcgaaggtgtgggtgggaacgccgcccgtcagaaggccaggaggagggcgcgagcacggccagcgcaagcagggaggccagggtggcgggaagggtgggctgaggcgctggagaccgagccgagggcgcagctgggtgggaagggaagaggggcggccgggagacgggggaccgcgggcgatcgaaatcaggcggaggggaggcctcgcgggctggggcttggggtgagcccgagcgagtggaggagagaggcgaggacgaaacgagacggggcgaaggccggggcgggacggggcagggcgccggggtccgggtgcgcgccggaagggcctcggggcggcccccggggcggtgctgggggcggagcgggccggggcgcggctgcattaagtgaagctcatagagactgtgtgctctagcgccttgcggcggagggaggcgatgctggtgccccgccacacgtcgctgctgtccggggagctgcagagctggggcgaaccggagacgttgctggggccggggagggaggcgggcaccatgccggggaaggcgggctggtagaggtgcgactgcagccccgcgccgttggaacccgccaggctgttggacaggcccatggagttgggcggcggaccggccgccaggctgcactgggacagcgactgcgccatggcctgctgcctgcccagcgccggcggcagaggcagctgtgacacgccaggcatggcggccgccgcccagcgggtgtcgttggcgtggaaagagcacaggctgtcgcccatggcggcggcagcggcggcggcagccgacgggaactgaggcaggcctggcgtgggcagcagtgtgccgggcgcacggaacacgttggtcgtctttttgcgcttcttccacttggcgcgtcggttctggaaccagacctggagcgggcggggcgggagacagacagggagctattagccggcccggcggctggggagttggggcttgagccccagaaacccgcctcggatacagccgctctgccctgggaggaacaagtgccgtaggcccgacaagcccccatacccagccggagactgtggctccccaccaactcctggcaactggcgccccctgcacccaccaagcgcggagtcctgcgctcctaagagctcgtgccccgaagagtttacgcactgtgcaaacacaccaaatgtgtgcagtcttcaccacgcccctgcacattctgtgcactgcacagattcacaggtctgcagtcaggcatgtgtcaaagttcgacccacaggtgtacaaatgaagataaacgtgtacccatgtagcttaatagcatgccttataacactgatgtgctatagaattttcagaaacgctggaaatttggaaattgatgacaggctgtggatgacatagtttcaaaatcgaaagacaaaggaaaacccctaacgctacggttgacagagcggagaggttaatacagtgatctgcgtgggaaagtgaac

SEQ ID NO: 332398 - DNA, 1175 bp, Homo sapiens; identical to SEQ ID NO: 231172
  chr5:76932320-76933495
  hyper

SEQ ID NO: 332399 - DNA, 800 bp, Homo sapiens
  chr5:76934460-76935260
  hyper
cgatatagatatatatagatcacctaaatgaaagaaaattcggtttgtggttaaaaagggggcttcttgcattataatgtcctttagagagacggggaggtgcttaacagttgaatgaacccgtgagcagctcggcgaggggaccaatcaggagggcagcctgcaaatgtcagcgcccggagagtcccccactccgcccgcccgctcgcctgcgcccgcctgaaggaggcggcggcggcagccctggcagctccagcccggagcaggagctaaagcagcctcagccgcctcggcctcgccctgagcttctgggcccggctccctctagttcttccctgcgattttctccaggctcccctttccttccccttggccggcgctgcgcgcttcgaaggcgtagctctgtgcctctgagctaacatcttcctagggcaggggcagagcaggggtcagagcgggccatgaccctggcgtgacctgagggtcgcccccacctgcgctctctgggcctgccgctcatattggcccgccagcccagggcgcgacgagggcacaccgcggccttcagacaacgcctggacttcgccgcggctcagtaggcctgcgcctagggtccaggcgccctggctgtgccctggggtctatacgagccccaaccccacagtgggcctagagcgcaaagaggagtcggcttccctggcaccgccagcgcccgctgtctgctttggggaccctcgcggagtgtgggttcgagcgctctgcactcttctcaccgggcttcttcccggctcctgctcttc

SEQ ID NO: 332400 - DNA, 761 bp, Homo sapiens
  chr5:76936253-76937014
  hyper
caccagtttcttctgagctgcggagaccgcttcccgggaagctccgggccggactgggtttcagcggctgctgcagctgctaccaacgcggcctatgtgggactgggcgccggggtcgtggactcaggctcgcggcgtgtctgggagccgctagggtttttggcaagcggccgcagcccttctgagaaacgctttgcctgggaggagaattccgagacctaaagcaaacaaagtctccccaataaaagctttctttgcccccaaacaaaacctcaaatctagaagctagagcgctgggagcgcacagcaaaaggaggccagacagcagcccagggaggggcggcgtgagctcaggacggtgactcgggagtacgcaccggcccgcgcacgtccagggactcgcaggaggtttctgcccacctgggtggggcttgcagggtgtccacaccggaacgcagggtcagaagtggggggaaagtggctaaggaagagacagggagacctggctccagaaccctgctcccagaaataggcaggtccgccaggccgcacagcctggctccacacgctgtctggagggagggagaaggggccgcgacctggggagacaaggataagggcgcggggccgcgcgtctccacgtgcgtgcacacaagcgctagtgtccccatcccacagtcgcccccggaacggcgccggctgtgcagcgatctcccacacgcactcgctcgtatattctgttttgttgtatctttcaggtc

SEQ ID NO: 332401 - DNA, 85 bp, Homo sapiens
  chr5:76937347-76937432
  hyper
cgccgccagcaggcagagcgagaaaaacgacaatagcctggatgtaaaaagctcccccctgctcccggttccctctcggtagctc

SEQ ID NO: 332402 - DNA, 570 bp, Homo sapiens
  chr5:76939332-76939902
  hyper
cgcagggactccgggaggctctcagccagctgttcgattgatgtcgctgagggggccctctggccgcaacaattctgcctacaggacccaggatccccagcctcggagccaaatgccaagcaacgttcaggatccacacttggggctttctttctgttttttaaacgccggtagcaggctgcgtgtgcatgacacgtgtacttgtgtgtgcttgtgcgagcagtgcgtgttccttgcctgttcactcacacggagggggcatgccaggcgctgcggaggggcagaaacctgccccaaagagtctcatttcctatcccacccagaagcctttcgcaatacacgagctcgacatatacacttttttcttttctgcagtaaacagtttcccacacattcgagtttgcaaacttcaaccagacagtccacccgcctgacttttcgtgggtgcaagggccggtcccttgctcgttttttctcccatctttcccttctaactactggcgctcacggccctccacacagaaagctcgacacaaaacaatgacggattagtatccgccccctgactgc

SEQ ID NO: 332403 - DNA, 854 bp, Homo sapiens; identical to SEQ ID NO: 231181
  chr5:76940865-76941719
  hyper

SEQ ID NO: 332404 - DNA, 316 bp, Homo sapiens
  chr5:77140518-77140834
  hyper
cgcaactttgctgagccattttcccgcgaggcccccagcggcgcgggggctgtggggaggtggtgtgggagtacggtcgctgctgcgcggcgtggggagaactggagcggctgcccggacgcccccgccctggtcccgggtactttctcggcctggctgcagccgcgtggatgtctctcgaagcctccaccctattctccttattgttatttccactcaccccccaaccccctcccgccgtcctggttccagaccgcctctctcaggctgccggggagggggcacatcgcgccctccccgagaccctcggctcccc

SEQ ID NO: 332405 - DNA, 1117 bp, Homo sapiens; identical to SEQ ID NO: 231183
  chr5:77147566-77148683
  hyper

SEQ ID NO: 332406 - DNA, 646 bp, Homo sapiens
  chr5:77268330-77268976
  hyper
cgagttcacagatggtaaatcgcgtggagagaaatgagctggagagttacaccgagtcaacgcgggacacggctcccggcccgggccgggccaggggtgggaggcggttccctaccgcaggcggcgggactcccatgcgccgagggacccaagtctccactccacccacacgcccacccggcgtcggggcgctgcggcctcgcctcacgagcccagagcaggccgcagcctgggctggggatccggcacctgggcagggtgagcttggccggacatcctcctccaggactacccgcaccccacagtcgcgtcaaaagcgccccatccccctgtctctcgccgcgcaggtttcccaccgacgcccgctcggaaggcgagagcccccacgtggcccggcgcggcgcggcccccggggaccgcgagcaacaaaagcccggcccgcagcccctgctcctcgccttccttttcaattctcccctgatctcaggtggaattaggaggattaaagcagcaagtaaatgaggcgagtgtgcaaaatgactcctttctgaaccaaacggcatgctccgtgctggggaaatgagatgcacatttaaatctcatccatccaccgcctgcggccaccgccatgtacctgcctacttag

SEQ ID NO: 332407 - DNA, 266 bp, Homo sapiens
  chr5:77269196-77269462
  hyper
catcctggagggagcgcgagggcccggctcctctgggagtggcggcgacagggcgtcgtgcaatggacgccagcaccaggggcgggctggagggggaccggcgatcagggaaaccttactcctcgcaggcttcaacctgctggggcgtgtttacgtccgcaaagtccgataatatattttgtccccacttcttaggagctgattcttcttaaaatgcattgccacgttatctctaacgttggctttctgacttccccgcggggctc

SEQ ID NO: 332408 - DNA, 339 bp, Homo sapiens
  chr5:77591388-77591727
  hyper
cgtttggagctgaagtggtgcgtcctattggcgtctagctaccaaaaataaaatggaccacctcgcgcgccagtcgtgttactcactaatatgcactagggagcctaggcgggatgcttgcctggccccagagtagctctctccgggtgctggcacccgagaaaacctctttcccggggtgccttcccccagcccgccttctcaggtgggtttcagcgccttccctctcttctccccagtgcctcccgtccaaggaaggcattaacacccaaagccctggcggccaggtactgaaactgtcaagggattctaccaggtagaacgcgaacctggaggccg

SEQ ID NO: 332409 - DNA, 800 bp, Homo sapiens
  chr5:78407588-78408388
  hyper
cgcccaactgcgggtataaagaggcaggctgcggactcggagcagctcggggctgcgcagcgggaaggctcgcctagtcggtccgcatccgtgtcgaccacctgtctggacaccacgaagatgccacccgttgggggcaaaaaggccaagaaggtgagtctccaggggacccgagggcgctctccttcccctcccacctgctctgtatcccagcctctgggagcgcagaggggccctcggaccctgcctggtacccatcatcctcctactccctcccctccctcagcctcagaccagaatgtgcttccagaacttctccagcaggaccccaaggcgcctctgagcctccccactcctgccccacgttcagagcgcgcccccagagcgcctctgtcccctccagccccagcccagcttggaccagagtgcgccccagatctatgtgatccttgcctctcagacccaaaggcaccctctgagccctccctgacggctgggtgtccccagaactccgagccttccaatatcttctgaatctggcaccccaagaccagaaaactccctagagatactgctcctagccccgcaggcgcgatatcccgtccccacggagcccctccgcatctgtgtccgaggccgccgcgagcgccctctgcacccggcgcgcccagaacagggaggagtgcacggcgctggctccgacatttcccgcctggatctgcaccgcgggtgtcggggccgcctccccgccgggttctcgctgcacccaaggcccaggcgctggttgggtgattgcagat

SEQ ID NO: 332410 - DNA, 180 bp, Homo sapiens
  chr5:78531507-78531687
  hyper
cgagccccacatagttcagcacaccgttccccgcggcaacacgctacttctgaacgcaggagcgactctccgtccgggctccctccaggagaatggaggcaaatgtacattcgagggtctcaatacctggaattcgaaacgtctcagttcctccgccttagttcctcttttcccgggttc

SEQ ID NO: 332411 - DNA, 1538 bp, Homo sapiens
  chr5:78531956-78533494
  hyper
cgaatggcaacattgtggcgatgctgaggcgcagagtttaggagacgggttcatcagtcaggccggctccgggctttctgcagcagcaccaggggcgggggcggggatcttgacctgggcgagcgaccgggacgcatacagcgccggcctgaccccgcgggacccgcgcctcaccaccggagcgccgcagacgcagctccacggcctcgcgcggggggcggcgggcggccgcgaggcgctgcggcagcgcggagcttgtaaacagatccggccgcaggtgaccatgtgaactacctgctcccgggacgcttattgtccttctctcgatccgcgccacaaaggagctcggcggtcggggcgcggagggacaggcgaacgagccgggagagccggccggcgcactaagatggctgaaggcgcccggcgagggtgagcggggggcgcggcgcagccagcggggagtcctcgggcgggccgggccggcggcccttccccgcggcgagaagccggagccaccatgtcgttcgcgctggaggagacgctcgagtcggactgggtggctgtgcggccccatgtgttcgacgagcgcgagaaacacaaattcgtctttattgtggcctggaacgagattgagggcaagtttgccataacctgccacaaccggacggcccagaggcagaggagcggctcccgggagcaagcgggggcgcgagggggcgccgaggccggcggagctgcgtccgacgggagccgcgggcccggcagcccggcgggcaggggtcggcccgaggccactgcctctgcaactctggttaggagccccgggccccggcggagctcggcctgggcggagggcggctctcctcggagcactcgcagccttctgggggacccgcggctgcggagtcctggcagcaaaggggcggagagtcgtcttaggagcccagtgcgggccaaacccatcccgggtcagaaaacatctgaagccgacgatgcggcgggggcagccgctgcagcagcccggccggcgcccagagaggcccaggtgtcctctgtacggatagtgagcgcctctgggacggtctccgaggagatagaggtgctggaaatggtgaaggaggacgaggcacctctggcgctctcggacgcggagcagccgccgcccgccaccgagctggagtctccggccgaagagtgcagctgggccggactgttttctttccaggacctgcgcgccgtgcaccagcagctgtgctcggtgaactcgcagttggagccgtgcctgccggtgttccccgaggaaccttcgggcatgtggactgtgctgtttgggggcgcccccgagatgaccgagcaggaaatcgacactctgtgttaccagctccaggtctacctgggccacggcctggacacctgcggctggaagatcctctcccaggtgctcttcaccgagaccgatgatcccgaggagtattacgaaagcctcagcgagctgcggcagaagggctacgaagaagtgcttcagcgggccaggaagc

SEQ ID NO: 332412 - DNA, 414 bp, Homo sapiens
  chr5:79551988-79552402
  hyper
ggagcaggctcgacccgggctcgcacttccgctggcgtcaggcgggtgggctgctgcgatcacttcccggttggggcgccgagctccggagtcggccgccagcctttgggccccacgctccgggtctggtgcgcggtctggccgcgctcgggccctcgccaaatgagagcgcagcgcctctccgccttcggatccagagaaagagcttgttgctgcctctaaaaggttggagccttagtaagcggttcctgcctttcctgcacagaccagaccgccgggtgctggtctgcgctctgccgcgcgccgactgggacagcccacccacgagatccttgttcctgaaatccctttccttccctcatctgccaagaaaactttcaacttttgggctctccgcgcctcccaagcttcctc

SEQ ID NO: 332413 - DNA, 1515 bp, Homo sapiens
  chr5:79864945-79866460
  hyper
gaaggtgactggggcgacagctccagggcaccgatgggggcggggtgcgcgtttcgtcgcctcatctctgagccagggcaggcagctggcgggctaaggcgatcaccatccatgaaaacgggttctgcccacagccgctgcggagcggtccctgcgccgctcgcccgccggccggacgcggccctcccttgggaaatggtgcgtctgaggggcgcagccactgcccccatcccggagcaggcgcacctctgcacccggctctctgctaagggggtccggtatcctggtgccaaggctgtgcgcacctgagaagggcgggaaccggctgcccgcccctgtgtggctcctggaagcaggagctcctggaagctgcaaagggctccgcagtccccagcccgcccccagcgcccagccggcacctcctgctgcccagctgccgaggcacctgcggagacgcgcccaagtcagcccctccggagacgcgcccaagtcagcccctccgacccgcgcgctcttgcggcccagcgcgcgccgctcccgctgctgcgccgaccttcgcccatcaggccccccgccccgcatcctcctcgacaccccgcggccgggcagccctcgccggttcccgccgctcggcgaggctgagaaggaggcggaacccgcatccccgcggagtccaagccccagcggccgcaaaactggaaccgagaaccagtgggaaaggcaggaggcgcgagggtgagctcgcgtggagcgcgccccggggtggcggggcagagtctctcgggaggcccctgcagcccggcggccctcggctggccctgggtctctcatcctgctcggggcactgcaatgtcagggtgagcgggaggtgcgggcttcaggggcttgcgcgcaccgggcagggagcactgaggccgtgcgggccgctgggttccacgctgcgccctcgatgtcctcctcccggcagccgccactgcaagccaaagtttcccaagtgcagccggcagggacggcgcctcacactgacctgggacgcgctgtcgagttggcggcggcgctttcaaacctctctccggcactgcccgaccctctgtgcggccctagggcgccgtctgagctgagctgtggtcttcggctcctcggcgcctcgaatcgcagatctcggtagatgccgcccagtccccgccctgcttgcggaaagaggcgggcgactgccgcgaagcgctggagctgggacccggagcgcacacctcgccagacgcccgggcagcgaggcgcttccgctgggggtgacgcgtcggctccaggctctgcgcaggtgagggcggcaaggctcctctggacccaggggggccagcagctgctggaagctccgccttctgtccccgtaagtcccacccccgtcccccgcttcggccaccgcgcttcggccacggcgacttggccaacaacagcggcagcagggtctccccattgagggaagcacgcacccctacgtcacgggctttggctcct

SEQ ID NO: 332414 - DNA, 1096 bp, Homo sapiens
  chr5:80255909-80257005
  hyper
gttgtgcgcgagtgtgcgagcgcgtgtgagcgggtgtgtggtgcggccgggcgcctccacctccctgatccgccccatcccggcgggcgcccgagcagaggcagcggcccgggccggggcgggcgagggagggacgcgagccggggcaagcgggctgcgccaccgccggcgccgcgccgactttgccctttaaatcggtctccaagccgattacagctgagctcccacgtgacgttttaccttctgtctcccggagcgcgttgcccgaggacagtccttccccggctgccgccccagcccgccgcgggggctcggctcccgcaactttgggcgaagcggcggccggctcgggcgccctcgcggggccgcgctccacgcgggcgttgggggcttggggggctccgggggctcggccgggagggtggtggttagggcggagagcgtgcctcggccccagcccgcgcccctgccaccgcgcgccgcggcctcccgaaagcgggcggggtgccctgcgcgcggcgtggggaaagggggcgcccttcgccggccgggacctgagcggtcgcgccctcgagggagccagctgggccatggccgcgaggcaggggtgagaccggcggccacccgtgagccctccgcacccgcaccatgcagaagagcgtgcgctacaacgaggggcacgccctgtacctggcctttctggcgcgcaaggagggcaccaagcgcggcttcctgagtaagaagacggccgaggcgagccgctggcacgagaagtggttcgccctctaccagaatgtgctcttctacttcgagggcgagcagagctgccgcccggcgggcatgtacctcctggagggctgcagctgcgaacgaacgcccgcgccacccagggccggcgccgggcagggaggcgtccgagacgcgctggacaagcaggtaccgcgcgccttctctccgcggtctcccagccttgatcgccgcactcccttgccgtcctaatccggggatcaggggtcgggggtcgtgaaagagtgcggggactatgctccgaaatccccccgcgtcaccagtggcgggacatctccacgctccttcc

SEQ ID NO: 332415 - DNA, 661 bp, Homo sapiens
  chr5:80689558-80690219
  hyper
cgcagaagctctctgggctcctcacttgtttaatggaatgaaggagtcccgagagccacacatttgggaaccaccggtctcggccatgcccagcgcgggcgcactgttgcaacacccctatccctggctgcgcagggttcagctctccgcaagtaccttcctcgccttcctaccccccccagcccccagccgccgccgctcccgcagccccggtcccgcgcctccccgcagccccggcgcccgcctacccgccaggcaggcggtggtgtcgatccacttgagcagctgccccgcgctcagctcgccgcgcgcagtggcgtgcgccggctggatggcttggctcatgaccacctcgccgggcgccggccgctccatggccagggcgagagcgctacgcctgcggcccccgacaccccaccatgcccgctccgcccgccccgccctccccgcccagctccagagggcactggcgccgcccgcccgggccgcgaacccctggccgccaggtggtgggagctgcgagtgagggggcccgcactgtcatcccaggactatcgcgagtgggggaaaaccagcgctctcgggtctcaggagaagtctgggaagtgcgcggggagggggctcccgggtagacaggtctggaaggcggctccccgagagc

SEQ ID NO: 332416 - DNA, 789 bp, Homo sapiens
  chr5:82767179-82767968
  hyper
agctgcacggggggcggggaaatgggggtggggaaggagtgggagggcagtggtttccgcgagcagagcgatgttactgagtgagtccctgaatggggagcgctgctgtccccaagccgattggtacttcttgtcaggaagaaacgccaagaggtgggagtgcctggggagggaggcaggcggtccctaccgcaggcgcggggagctgcctttccgcccctccgcctgctttccaagcctggactcttaggagtggctgaagctgcggagcgcttttggagcctgtgaatgaaccctcctcctctccctcctccttcttctcgctgagtctcctcctcggctctgacggtacagtgatataatgatgatgggtgtcacaacccgcatttgaacttgcaggcgagctgccccgagcctttctggggaagaactccaggcgtgcggacgcaacagccgagaacattaggtgttgtggacaggagctgggaccaagatcttcggccagccccgcatcctcccgcatcttccagcaccgtcccgcaccctccgcatccttccccgggccaccacgcttcctatgtgacccgcctgggcaacgccgaacccagtcgcgcagcgctgcagtgaattttccccccaaactgcaataagccgccttccaaggtaatcacgtttcttttgttccccccttaaaaaacaaaaacaaaaaacttatagaaaaaaacccgcgagcttagaaaaaagaagcaattggtagaaggctttaattaaggcaaagagctgtaaggc

SEQ ID NO: 332417 - DNA, 2360 bp, Homo sapiens; identical to SEQ ID NO: 231206
  chr5:82768274-82770634
  hyper

SEQ ID NO: 332418 - DNA, 997 bp, Homo sapiens
  chr5:83679447-83680444
  hyper
cgcagctaagctccaggcccctggggtcagactaggagaggcgggttcctggggtttgctgtaatcgatgctgctcctctgggatggggaggcaggagaaagctgaagtgacctgtgagactcctctccacctcacccgcggccaaaacgcccagcgccgggtctgggtttgcgaacggctcagcccaggccctgcgccagagcaccgcacccgggggcggacggccctgcagctccccagcctcttcccgcatcaactagctgacgcccgggcgcactggcttcccccgctcccgcccgcacgaaagccctgcccgacgtctgcagtcagcatcgcccgcactgcctagggagggtttgcgccgagacccagtggccgagtgagccacagagtcgctggtcctggggacgctgtcttctaccgctccccaccgtcctcctctttcctgtatctcaccccggtaccccgcacccttctccccgctcggccccgcgcactctgctcagactttacaagcactttctcggggcacccaggactcgacgcctcctccgcgccgccagcggcgctcgccacccttggcacgccggagggaccgcctccggccccctgcgcggcgtttctcaggggactcccagcccatccctcacccagctgtccgggtcccgacgccttacctttgccgaactgggggacaccgaggctgagcccgaccaagagccagacggctaccgagcgcttcatgatcccgtctcccggacgtgaccccggctggtcaggggtcgtcgcggagggcagtgtagccgaggtggcagcgcagggcagcagcagactccgcccctactaaagaattcaagaagacgttctctttcctcagcgctttgttaaacaaattcttggagagggcgagagtggtgactaaagagaggagcctttcctccccttttgcctgcgctccggcgcgcggaggtgggtgagctccggggagccgccggc

SEQ ID NO: 332419 - DNA, 955 bp, Homo sapiens
  chr5:87436549-87437504
  hyper
cggatcttgttttttcttttcttttcatgggtccccgtttgcgctcttagtcggcttacccgtcctgttccaggagccgacagggaacagcccacctggagcaggtcttgggccaccactcgccccgccccccgtctctactcctcactcgctctccccgctcctattaagcagccaacgctgggtgatctcctctccagttcttcgtggtttcattgtagccttgatatacaagacaaatgcacactttactctgggcttaaaaaaccatctatcatcatcctttgggcatgacaaatacattgtgtgtttcagagaaattaatctggtatttagggggagaaaggcatttccaaccagtctccgtgcagaaccttcccgcaaaccctgtagcggcatttttcgacacttttctcctcctttcggcaagcctcaaacttgaccttcgagaggattttaagggtagagccttcctccctttccctcgtctgctccaagagctcacgtaggccttcttctgggaaacagcggctcaggaccagagctcggagaactgcgcgtccaggagcgcgggcgcggccggggaaaagggaggaggcggcaggagggggcaggaggtggagggaggaggaggatcggtctgaatatgcatgaggcacccagcactgccctcttccccggcagctgctcgggcgggggcgaaggagggaaggggaggggaggggaggaaatgaggctggggcggggtggccagagcagccgcagaggctgacgcgggtttggagaacggaagagatgatttgcatggcgcctggtgattggctgatggccgggggctgggtctgagaggcggcccctgaatggtttaacggaggaaattacaagattcattcgactaaagaaagccggggcgggcctggtcggcgcaatatgcagcctgtccgcaagggggcgc

SEQ ID NO: 332420 - DNA, 561 bp, Homo sapiens
  chr5:87955365-87955926
  hyper
cgaaagtagttgaggaagcctatgacaggaagttgttaataatatccttcgaaatttacctgtgaaatacagagcttgactacttttgtaaaagtggaattgaaagtaaacggcctctgtaatgcaaatcgaccagcagcaagaaagccactacctttggagtcccacgacttcacctgagcttgcaatagaccttgtgcgccctttggttcatggaatcaaaactgttttgacatgttggccagtgcccttcggtgtcactgaagctcagcccgcggacggcggtgtgtcagtgtgcaccgggaggcctgggcctcagtccctgggctcgtgcctacgcaacagcaggaccgcccgcggcctcccaggaccagtgaccgtcacccgcagtaaggatcggggcggctccgccagtttcggccctctttccaagacctctttccaaggcgctctttcctagcctcacccgagggccgcagagccggacctgtgccgggcgagttggatttagcccagttagagttaagatggtatcattagctgcgcacagcgtgacttccc

SEQ ID NO: 332421 - DNA, 1101 bp, Homo sapiens
  chr5:87956179-87957280
  hyper
ccaacgccggccaccgagcaaaacttccccgcccccgccccccacccagcttccccgcagggagaccctttccgttagcagcttttcactaagttaataacggtgtgtgtgtggtggtggcggggaggggggatttgggggttacacaatatctatatcaatgatattgatcacgtccagggaagaagcctgggcaaaactagagacaccgagtgtcagcaaaagaaagcttcttaaccacaagttgcgtgccgcctgaggaaggtgccctgtggcagggggtggccgctgggagatgcctgcctctaaccgacgtccaggcgtgactaaacctcgacgccacccccattcacaagctcaactcagggattcccaagcaaccgcagaccggaggtggcgcagaggcagtgaccgaggtcgctgattaggggccgagaggctggcaaataataattttaaaaaaaaaaaaaaccggaatagccttcgcggacgcagctcagcgtgccaggcaaaggacagtctgacgacccgcccctgccgagccccgcagcgcggcgccggtgtccagcagcctccaaggcgccgagcgcgggcacgggaacttgagctagcgcaaacttgggcggcctcccagcctgctacccgggccgcagcgcgcccccggcctcccagtcgcgcgccaacccgggagcgcgcgcgccggcgcaccagctccatcagctagaggagcccgtctcccgggaaacaccaatcagacgcccgctttcaggcgagggccgcgagccgcagcagctgcaggaggactcgggcagttggcggtcaccgggaggcgtcgtcctgccccgcggcgggccagccgccttcgctgctgccactgcctagcctaaccgcatctgcagccagtcacagagtcggctgtctcctctttgcaccgcccacgccaagtaccttgcaaggcggctgctaagcctggctaattttagatctccagaatgcgctatgcccgcgctcaactaaaaccaagtcaaaccatcaagcacagtgatgtgctgctttttgaacaaatatggctcaaaactccgtatttccctgaataaagtc

SEQ ID NO: 332422 - DNA, 1072 bp, Homo sapiens
  chr5:87962630-87963702
  hyper
cggctgtagtctttcattctcacacgctccccggcgatcttgaaggagtttttactttcggttatctagctttatgaagaccaatacactcatacagctagataaccaaagataacaactcgcttcccacacaggcctctgtcttcctcttgccagactccaggtcctgatcctttctggcagtaccgaagagtggtcgtccaggatacttgccgcgcttaagattcctccttttatgtaaatatgacctggtttctgtttgtgtgtgtgcgcggctaaaacatccaaacgagatctgttgccttcagagtttattccgaacttttctttttcctttcagcaagtaatctccggcagcgttagccaacaattcatctattaatatcagaaaataaaaccagctattaaggtgcagcaagctgttacgagtgagcagcagcatccgtcccttcacaggcctctatttgcattgtaaattgcttctttctcacgcaagactctttagcctctctctatagagatgtataaagccaacggcaatttccagcgcaggttaaggaggaaggaaaaaaaaatcccattctatagaagtgacagctgattcaaggatctgttcctgatcctttttggttaggcaccatggctttttaccaagcggtggcagcttgattgcacatatcttgtgtgtatgtgttttagggggaagatcctcgatttcacagggcttctaggctgggaaggagaagatgccgtcttgctggcctgctgctgcccccggtctgaaagaaggagaaaagggccatcattggaggggctttcactgccaaattgtggaccagcccggcaaggtcaaaggttcgagaccgcgggagaccaaggtaatgatgatgtcatgagaaatctcaagtacatggttattgatatgcatcagtgatcagccaactgccccacgcctgctgcccgagcagcggcagcgacagcagcagtagcggcagcattgcaacaatccctattttctcaatcaacatctcttccgctagcactaccgactgctcctggaaaagcaacccgc

SEQ ID NO: 332423 - DNA, 2242 bp, Homo sapiens
  chr5:87969885-87972127
  hyper
cgcgccataggggtcatctatttgaggaggaagaaaaagcgggtgtgtgtgtgtgtgtgtgtgtgtgtgtgtgtgcgcgcgcgcgcgcgcgtctgccttccacggaaagagagacggagagatgtgggagggtgggggtggaagtatgcagacagagaagggtgggggcttcgaggggaaggtgggcttcctgcaacacaagcggagaggctgtcaggggtgtgggcacgggggtgcggggaggcggtgcaggaatccgtcccgccgagtgccgtcggcccctgtgggcctgtttgcgcgcctggggctggccgcattctgggcgcgggtgtctgcgtgccggggtggtagttccgagcctgcgcgcgtgcgaccgggtacgggagggggaagagtgccgtaaaaattcagacgagtggcccgtatgtaaatgcagcccgcggggagcagggaggcggtaatgacagccgctggcgctcagccccgccggcggcccctagctttcccgccaagtgcagccggaggacagacagccatgcgtgtccttggcgggagagcccccacccgccgcgcgcgcccgacccccgcgcacacgcacacactcccctcgcaggcgtggggcccaatggccacgaacatgtcaggaaaacaaagctggggctgcgaggtggaacgatgaaacggcacacttggcggccgagggcagagcggagaagtcgccaccacagccaccggcgcccctttcttgcctgctcgtagatctgccctccggcccagaagaggccgaggaccatttcttagctgccccagaggagggggcgagcagaggagggggcggatgtgcacagggaggtgccagcggtccggtgcgcgggcacgcacacgccggcgcgcagggctgccgcgggcggaaggaggggaatgacaaggcctcggccgcgtctcggagaggcactacctccgcgctgaggccgctgagtttcaagtgcaaaacaccaggccaaatccggcaaggcggcggctacagaatggctcacacttcaagcctccttcctcaaacaatccgatgggaaggacctggctgttcaggggaagcctttgctggcctctctttttacatggggtgaagtcgaaccccaatctaggagccctggcctagatggctccgcagatgagtcccagacgtggccatggaaagactgatctctctctgctcagagcgcctgcctcggtgctcactagcgcaagcacctcccaacacacatacatacatacacacacacacacaacacagcactcccatcacattaaaacgcgcgctcatgatcctgccgttaatgaagccgaggcgcataatgagtgcacaggtaaataggtaccgaaaccagaagacttcaccagtcggctgggcgatttacctctccctacagggagcacttgtagttatcgtgttttaggagtgatttgctgttgtctgtggtctctcgctcctcttcttgtggagagaagccaaaaaatatatatgttccgtggtcagagtcttctttctgataagctacccgagcattggtctaaaacatctgttttatctgttgattttggtttgttgttttggggagtgttgcttttctgagggaagcaaaagaacgtgtgtgtggtggggctggaagctcagggcaagagtctgcgtgtgcggccggaaggctggcgagtctgagagccgcgcggtgcagaaagaaggcggcggcttgtcctcccccggggccggcactggtcccttggcaccccggcctgggctcggctactgccgccgccgcccgcgctctcgggctccgccggctgccgctccgtgttttcccccatcccggcttcacgttcaaggtttagctgcgaggtcacgtccattgacgtcagctccctgtctccctctacgtccggctacatttacatacatcaaggaaattagggcattaaaaaaatatgcaaatcctgcgcgaagaggagcgggtgcattcctggcgcgatcgccttttattgaagcttttaattaaaggggccagttggcgagcccctgaaacaaccgccaaaaccccccaaaagagaaaaataaacgctgtagccttcgagaacggttgtttcggctcctgttctgtgggcggctgaggaccgccggctgcccggctcggagaagaacaggttagaggaggcagctccagcccatgcataatcagggctccgcggc

SEQ ID NO: 332424 - DNA, 124 bp, Homo sapiens; identical to SEQ ID NO: 231223
  chr5:87974355-87974479
  hyper

SEQ ID NO: 332425 - DNA, 915 bp, Homo sapiens
  chr5:87975991-87976906
  hyper
cgaagctgggattttcaacctcttgtttattcgtaaagcccatatggaaccccggttgaatctcccctcttcggattttaccaggaggccctcagtgccccaccgccgcccatggcacgtgaagagaaaggagggagagttgggagccacgagagaagccggctcggagccgcttccgtcggggcccatgtttcgccccaacagacccgtctctcctttctctccccgaaggtacttccttaggccggcagtgtcgctacggtggtagccaggtgagcacgggcacagtcccggggcgggggcgggtagagcggccctctctcgggagctccggtgggtctgcgaacctgccgggagcggaaggctgagtggcgctgggggcccgcgcggggctcctggctcccgccggcaggggaacagcgacacctactggccgcatgggtaccgcgcccgggccgtcagggctgccctgggacggggtgccgggctccgtggacttgggaggccgcgggaaacttcaccgaaggctctgcggactgctctaggactcgtccgccctggagaagacaaagccacgctttctggagacccctgggaggactgtaggatggaactgaacacacaggcacacacgcatgcccattttttctggggaaccggataaaccctcagatgcagttgcccaccgtcccttggttttatgagagagacccaagcagaggtcggagccttgacctcctcaggttcatgacccaggcctcttcaccgcctttcccagttcagcactgactaaagaagatatctttacaaattaggaaaagaaaagagttcattatcctccctgaagcggggaaatgagtgagtcaaagacacagactcacaggcagcggttggcgccgggcacacgaaccggcc

SEQ ID NO: 332426 - DNA, 405 bp, Homo sapiens
  chr5:87979367-87979772
  hyper
cgaggctctagctttcccctcctcctttcttgatctcggcaaacaaaaccattctaccacttgagccatctgccgcaggtgtaatggatggcagggggccgacctaaccacactccagtctcttctaggtcgtcaccgctctgcaccaaacaaatgagtcctgtttcaccactagggtgccgaggtggatggtggatgctggcccccgcccctggcagcgctcagcccttagaaaccagagccagctgacaacacgcgaaacacacaggcacagcgaaaacgccgagccgacgctcattccctctgccccctccctctgctctctgtaacaaggaggacacgtacacagcctttacacacttaaaagcccttgcgactccctctgaattcttagttacttatgac

SEQ ID NO: 332427 - DNA, 631 bp, Homo sapiens; identical to SEQ ID NO: 231226
  chr5:87979864-87980495
  hyper

SEQ ID NO: 332428 - DNA, 138 bp, Homo sapiens
  chr5:87982673-87982811
  hyper
cgcagacccccgcccagcccgcacccgtgttcccagtgtctggagcacacactctaaacacatcgggacccccacccccatgaattcgccctgtttgagactcagtttctgaggccaagagttcgttctcggtggatc

SEQ ID NO: 332429 - DNA, 255 bp, Homo sapiens
  chr5:87983380-87983635
  hyper
cggcactgaggagtgtgctttaaggttatcagtcttataagcaccacgtgattagacaggaaaggtaacttgaaaacacaacctgattctgagcgaaatcattttgtcctgttggcatgaaaatgtagttacacctccaagttctgctcaggaacagacggctgcgtgtgggggctggtccctacccagatcagtacaggatcttcagctggcagacgagatccagcaaatggaattcacgaagaaactcatgtg

SEQ ID NO: 332430 - DNA, 108 bp, Homo sapiens
  chr5:87984851-87984959
  hyper
cgtcccctgcgcctgaaattcaggtcgcctgcagctacggcctcaggtgagtggctcagggaagggtcgctgaggctcttcccagggcccccgggcctctcttgggcc

SEQ ID NO: 332431 - DNA, 431 bp, Homo sapiens
  chr5:87986873-87987304
  hyper
cgggtgttaattaacgcgctaatttgagcttcaggagcgggaggcggccggtagcaccgcgagccgcgaggggccagtgacctctagtggacatgaggagatatgcagcgcgagtgagcgtgtagcagagaaaactctttcctgagcagctgctcgcgtgtctcctctgaatccaatgcaagggagggacacaagtccccaatttaagggagaaagagccgtcagcaagtggtgtcgaccaaagaccttagctcttctgatgtatctgaaatctaaacgcaatttaagcgcgcgtgcacacacacattgttacttatcagtttttccagcgagagaagaacatatggaaagggtttgagaagtgagcgtgaataactttggtttctgaacctagagaaaagcagggctttcaaagctccggaggcaccagc

SEQ ID NO: 332432 - DNA, 716 bp, Homo sapiens
  chr5:88178399-88179115
  hyper
cgtctacttcaaggtcacagaacatgctgtgaaatattaaaatccaccaggctccacacgctccaccatatcaaacatgctaatgacgtgaactaacttcatgaaactttaaatacactggtgtgacaggaacgagtcaggagtgatttcaatagctgatggcaaacggatacgactatctaaaaagttacttttagcaacaaacaaggaaatcatggaatctaacgaaaaagaatgcacaacgagcctcaacttcagccttcaaaaaaggcacagggatagatagacacagtgccgtggaatatattgatgcagattttagagacaatacccgggttttctatttcctcgagaaatatcaggggtacttacatgaaggaagacccgatcagattagtccttgggatattttcctttcttaagagagagagagagagaaaaaaaaaataacaacaataatctttacttcgtccagcgttgaagtgcttctccacctgattcaaacatgcagccacggcgacccacacagaaccttcaaagtcaatccaatagcagcccgaagatgtctgggtgtacgcgtgtgctcaagtgtctgtgactgcgagcagagcgagcagagagctggagacgatgtgtgcgtgtgtgcgcgcgcgcgaggggagcgcgcgcgagggggggggcgcggggccgcgcattcgcgcgcgccgaggccgctc

SEQ ID NO: 332433 - DNA, 1197 bp, Homo sapiens
  chr5:88179191-88180388
  hyper
cggccggtcggattaaaagtaaccagactcgtccagaaaactgcgtccaggaaggaagtgacagaagacgaatgggaaaaggagaacagctcacagcgtttgaaacatcgcgtaaaaaagactgggggtggtgggggcgggggggattgaaggatactgggaggggaggcgggggtggtagggaagacggagcacgaatggttggggttctaagcagcacgtccgatgaaatgtcttttgcctccttttttccccctttatttaattttgtccttgcctttgcttcgcgctgcctttttctctccgtctctctctcccccacaatcccaaaccgttgactctttcctcgcgagctggagaaatcatcagtttcactcttgcaaaaggggggcgggactagacctcggagcattttaataaaacaaacatacagcagctccctcctcacccctccagtctcaactagattgataaattactccactacactactttaattatgtatatggtatgcagaataaatcactgaacatcagtacctcaatcaagcacttttaaatgataattgcatcttggtgaatcaatctttccattcctgacattttgctaattttagttttacggtggggtaatagcacatgccatacgcaaacctaatgacaattctttattgcacgaaatgaagacaacacggcgagctgcggctccctgctcctctcgcggcgcctctgcggaggacgctcggagagaacctagtctcccgctgcggcgcgctcgcttgctctccggggacgctgcgagccagccagcaggaaagtccttctaaagtcgggatctttcctctgaccaataggagcgcgaccctaatagttgctcttgtgacttttcccccttttggacacgcgttagccacttctctcttccaccggtcggtgcgctcctccgttactcacgcgtaaaaaccacggtccaggatgtctgcagcactcgattccagcgtgcttttcctgcacgcccagaagtcgcggttttcaccctgagaggttggagcgctagaaagcgagccgaaaggtttctctaatgttagtaatgtacgaaataataaaataattaccagtatttgagatctcgacttcatcgcggggccatgaactttctaatcagtttggaaatatttaccgaggaagcagcttcctc

SEQ ID NO: 332434 - DNA, 976 bp, Homo sapiens
  chr5:88184868-88185844
  hyper
cggggttgtggtggaagtggggattaaaaatctcgtcctgcgttttggtgcccacttctttgtttggaaagcagagcgctgggactcaatccggacggccctcaaagacccagacgagggacgcctctagtttgagcaactcactccgctgagttattgattgcaggcagcaacaatccctccggttgatttgtgtgaaaagtgaatccgctctggctgggcgttcagcagaggcgcaacagctgcaacgccatccaattattgccgatcctcccctccaacactgctctcatcacctatatactcttctctctgcccgtctctgcttccccccccttccccccccccttttctcccggccgacggagctgaaggggcgggggttccttccttggagtgtttctagagctcggaggctgctggtagggggtgagtgcgccacgtgcgtgcgccacgggcgagcaggaggcaggctctgggccctcctggggacctgctggacctgctggacctgggtgcgacgagtgggcggccacgctggtttggcgcggggaaggaagggggtgtgccgacttgtatttagttgggggttgtggaagtcacggctgggggaaaagcgtccggtggtttgttggtaaagagggtgcgtgatgggctctggggaatggaggagggcgcaacggctgtgggtggactgtggaaacgggcggtggcagtgccggggtagttgtcctgctggtctggttttgggatcctgggctggagaaatgcgatccaaaagagctcgggatgggctcagagcgacccacgaaaataccaggggccaagtaaaatgaacccaccctttaacagtgcacaaagcgctggcacacggtccacgtctggtgacgcaggctgcccgaagcgctccaaccattttgcaaacctgggagagcaagaggggctctgcaggtctagccgccgcccctgtcccact

SEQ ID NO: 332435 - DNA, 742 bp, Homo sapiens
  chr5:89854237-89854979
  hyper
cgaagggggcaactagaaagtttagccaaaggagacgattagaaagcactgaccgcgcacttacattgggacgcccaggcagaggcaagactcgcgcgctcctaagccgaggcaggtcagcctaggcgcctggctgctggaagagtccattagggatggccaaggcagggtgttcccgacgccagagcgcggacctggctgcccgctgcggagagcagagtgcgcagcccggggcggccacccccgctccgctggtcaggtgagcgctgccccgggagccatgggtcctattggagcagagcgaggatgcagagggaggaggcaagggagggggagaaaggggaggaggatggagccctcctcctgatcctgtagtggtagtaagaatcagcagcgcgggcaaggagtacggacgggagtcagaggcagagcgagggtgtgtggagggccggcggggaccgccgggagcgcgcggatgtcggtgttcctggggccaggtaggctatggctgaggggtggtgctgcgagcatcgctgagccccaggggagcgcctcagcatcagcacctgttgctgcaggtgggcggcgagggcggcgcggagggcgggccacagccgggcccagggaggctgggcgcgcacccggcgccgcggcctgcgggtaatggggcatagctgcccgcgtcggttctgtccaaggctgcggttttgcagggagcgttaggttcctgcaccccctaccc

SEQ ID NO: 332436 - DNA, 394 bp, Homo sapiens; identical to SEQ ID NO: 231246
  chr5:92906253-92906647
  hyper

SEQ ID NO: 332437 - DNA, 543 bp, Homo sapiens
  chr5:92943286-92943829
  hyper
tgaagccctgggaatcatttcagcccaaggtgagcctttcaggcactgctctttgtccccatttggataagaaggtgcaaaactagttagacactaggctgattttggggaggtggtaggaggggatggagaagcggcctgttctaattaaagacaataagcaatcctgcgaggagctgtcctttagccttggctggaggcagaaacggtctgtctcacctcagttgttaggtttatttgagctggtcggtgaggcgaagagcagaaacttgcaggtagctctgggctcaggtgagactgggtggatggttaaatcacagcaagtgatctcgaagtccccctttacctccccatcccctgtccttctgtgctctgtgcttgactcaggcatactttgattctaactttgcttgctagatggcgctcggtgtctcaggactttctgtttcagaattaaagcggctttttagcaccgttgttctgaactatttgtgggcatttgatcagtacagtgctggtaatgttattattgcccttgttttc

SEQ ID NO: 332438 - DNA, 1408 bp, Homo sapiens
  chr5:94619403-94620811
  hyper
cgagatgttttctttcgactgtttcatctacttagaattaatagcatttctcctcccgcctcccggcccccgccccccgctccccgggtggtgaacgcctgaagagggaggcgtggtcccgcgcaccttgtctccggccgcgccaccggcactcacctggctgctgccgtgctcctcgcccgtctccggggcccgagactccgcgggactccgcgccggctctgcgggaggaggcggcggctccagcagctgctccaggcaggcggtgcccggcagagaggagctcttctggtggcacaagtgcgccccggggccctgacgccgtgcaccctcatctcgggcgcggtcccccctcgggggaggctggggcgaggaggacagggaggatgaggcggaggaagaggaaggagctgagtcgggggagcgtccgccaggaggcgtccctcccgctgctcccgaggccgccgcgggcccctttacggcggggagcaaatgctcgcggatccggcggcgtagcgtggacccctgctcggctctgccggcgccgccgggctccaggggctccggcgacgagcagcacaggttgggctgcgaggaggagaagactcggtccagcacttgcttccgcttcttgaagccgctccacctgctgcctgcaccactccccctggccggtgcattccctgtgcccaccgggggtggcggggagggcgacggggtgtccgcagtgcggcgctctggacccccagcgcgcccgcccccgccgcccttgctcctgcccacccccagctgcaggttcttccagagccgggcctggaaggaggaggacgccgccggcggctctggctcgcccgccgcggcagcccggggctccatcctccaccccctgctcctcctctcccctcctcctcctcctcctcctcctgcttctcctccctcttcggctgcacctcctcccgggtccccgcggcgctggcggtggcggcggcggcggcggcgggcgcagcagcagaaaccgggagtgcccagcgacttcaggccagctcgggggaaagaagcggccgccgccgccgaggctctctggcctcgggactccggcgctgcctcttcctcccgcacctgctggggtgggctggagccgtaaccgaatcccggccgcggcgcctgcaaagtttttccctcgaagctccgcggctccagtccactggcgtcccccaggccgcgccctggctccctcttctctctgaccgagctcgggaagctgcacgcaccggggcgtgcgcgtccagctgcgccagggaccgcacccggcgccctctgggcagcacctgtcagcggcgggggcggctgcctccaaattgggcgcgcacgcggctcacacaacaaggcgcgtctggctggagactcc

SEQ ID NO: 332439 - DNA, 1634 bp, Homo sapiens
  chr5:94955630-94957264
  hyper
cgcccaggggtccgcggcttccgcgagggtagcgtcgggggccgctgcagagattggaagagtacccgccgggaatgggagggaagacgcggggaaggtggagaataggaatcatgtgtgttcctcgagtgtacaacccacatttgagtgacaaatcacgaggacaatcgacaaaaacaactaagcgcaaagccgcccgaatccatctccctctctgtgcgtgtgccttttcaactaactttgggaactcgtatagacccagcgtcgctccccgcgccgcctcgcctccactttggtttcccgcgtcctgcccgccctcttcggtgcctcctcttcctccgggacaaggatggaggatctctttagcccctcaattctgccgccggcgcccaacatttccgtgcccatcttgctgggctggggtctcaacctgaccttggggcaaggagcccctgcctctgggccgcccagccgccgcgtccgcctggtgttcctgggggtcatcctggtggtggcggtggcaggcaacaccacagtgctgtgccgcctgtgcggcggcggcgggccctgggcgggccccaagcgtcgcaagatggacttcctgctggtgcagctggccctggcggacctgtacgcgtgcgggggcacggcgctgtcacagctggcctgggaactgctgggcgagccccgcgcggccacgggggacctggcgtgccgcttcctgcagctgctgcaggcatccgggcggggcgcctcggcccacctcgtggtgctcatcgccctcgagcgccggcgcgcggtgcgtcttccgcacggccggccgctgcccgcgcgtgccctcgccgccctgggctggctgctggcactgctgctggcgctgcccccggccttcgtggtgcgcggggactccccctcgccgctgccgccgccgccgccgccaacgtccctgcagccaggcgcgcccccggccgcccgcgcctggccgggggagcgtcgctgccacgggatcttcgcgcccctgccgcgctggcacctgcaggtctacgcgttctacgaggccgtcgcgggcttcgtcgcgcctgttacggtcctgggcgtcgcttgcggccacctactctccgtctggtggcggcaccggccgcaggcccccgcggctgcagcgccctggtcggcgagcccaggtcgagcccctgcgcccagcgcgctgccccgcgccaaggtgcagagcctgaagatgagcctgctgctggcgctgctgttcgtgggctgcgagctgccctactttgccgcccggctggcggccgcgtggtcgtccgggcccgcgggagactgggagggagagggcctgtcggcggcgctgcgcgtggtggcgatggccaacagcgctctcaatcccttcgtctacctcttcttccaggcgggcgactgccggctccggcgacagctgcggaagcggctgggctctctgtgctgcgcgccgcagggaggcgcggaggacgaggaggggccccggggccaccaggcgctctaccgccaacgctggccccaccctcattatcaccatgctcggcgggaaccgctggacgagggcggcttgcgcccaccccctccgcgccccagacccctgccttgct

SEQ ID NO: 332440 - DNA, 483 bp, Homo sapiens; identical to SEQ ID NO: 231268
  chr5:95767461-95767944
  hyper

SEQ ID NO: 332441 - DNA, 1358 bp, Homo sapiens
  chr5:100236036-100237394
  hyper
cgggatctggagccgaacctccattccagtttactcaaaactcaaaactggcctctccacgtggcttgggtagaaagacagtcaatgagatgatttgatggttttatgagtcaactcctccaccagaagcgctgtttgggagttgaaacgaaataatgagctcgggtcacaagcttttccacgaacctttcatcctggagaaaaaggaaagtgctcagggagcctagctgccctcgcattgttcctggcagctccaactccttgcacagtcttggtctctcaggagaccaaggcagtcaggacgctacagggcacgggtgtaagcgcgacgttcgcggccagccctctgccttgccccactgtaattgcgggttttgattaagaaggaggagccagttgccgactgagctttgaaagtgactttgggtggggggtgggggtggggtgggggtggaaggaggggagggaccaaaagagcctgagtcctgcaataaaggtttccccctatcttctcactcattctttccccctcgccgccggcgctctggcagcaggggataaccccggtgcgcgcctctcttcctgtttggtttactcaagcgcctgccccaacgccttctcagtcaagctgggaggaaactgcttcagcttgaaaaggatgcgggcaaaagcccagcccgactagctcaaccgccgcgccagtgcccgcctcctcttccttaacgcctagggctgcgcccaccagccggcaacgtccaggaaagggccacaggagaaatgacacccgtgcaatgcggagtgtcccggctccgcttccccgcagggactcgaggtgcgctccttttcctggccacggtttagggaggctcggagatggacacctcggcagtatctggcgaccctcttctcactcgctccgcccactcctgctctccagggtcccagccaagggcccgaaccctcggagtcctagtgagccttggccgctttgtctgggatcaggcttatcctcctagcccacggcccgggagggaacaaagagcctcgaccctcaagctctagcctctgcctctcatcggagccccatgcgcccattcatcacctttctaaagacccctttgtctgcctggcaagcacaggtctgcaagggatgcccacgcccctgcccaaagtcctgcttttctaacaactgagctagattggattttcaagccacccagtcttgtgtaaacgacctcataccggtcttttttaccccctcagaatagaccatgtatagattcgttgatgcatgacgaccattccagcccattccttgctagctttttcattctcttccagtccgctttgactgtgct

SEQ ID NO: 332442 - DNA, 47 bp, Homo sapiens; identical to SEQ ID NO: 231280
  chr5:100237670-100237717
  hyper

SEQ ID NO: 332443 - DNA, 1887 bp, Homo sapiens
  chr5:100238197-100240084
  hyper
cgtttggtgaataaagacatttctcttgagttctgcccacagattaaaaggacaaggacacacgttctttgttgacacttctgcagtgacttctcctttggcgagagagcacccagggccaacacaactgtcaccacaaccacacagagcaagttgaactcatactgggaacagcttagagaagcacgcacatctcaacaacagcctttgttatttaattcatgacactaaccacgcgcaagctcaaacaaacacacatgctatcctaaccatcactctaccctctatattcacatttcatttatggcttgactttttgtcatatcctgaaatgaagctttgcatttacccgatgagttgcgtctcctggtgctcctcagttcttgctatttcttttgtcttataaaagatcaggagcagacttattgtgcagatcgtccacctcttcctaatggagcgcatcttgggtgcccgagaaagtcctggttgccccagctcccgcaccttctcttgatataaaggctccgttttggggagatagtcgcgggggtgaaatctgtaaaatgcgaggagagcttggagccgggatcccgggatcagatcactggggtcttctgtggccgagctccctctggtcctcgaacgctgcccagcgacctctcgccctgtttgcgccagctctgccagggtcgctccgcgccgcctccctggggctcaggtttcttttcagatgagacaccttgtgcattggaggtggcggcagcttctgcagctgggttcgggggcgtcactggcccttccctcttgctaggagataaacgctgcgcaaagccaatcaccaggctgagggggcggaggctgcttggagagtaacgtccccggctctgcctgctctgtgccgggagaggaagctcacagtgctacgcgcctgcgagctcgcgcacatacacatatacatacatacacacatacatacatatgcacacacacgtacacgcagaatcacacacactctcctgggacatcaaagcatcagctctctggacctgggagctccaagatagtctatccgcatctaggtgagagggcacctcgcctggggacagattacaaaagcgtcccgccagaggaatgcttcaggtagagctaggggtggattgcaagaagagtaccttctttcaatcgcttttgctaaacacacaccctcacacgcaaaaacacgccctccaaggtggagtgaaacggggtgcgggggtggggacggcggtggaaggaagaagacttttattactcaatctggaaagtgcaaatacacacatgaacctgttagccgatgggcccactctgcatgggtggtggacgacgaccctggctcaggattctgcaggaaacaagtgatgatagaggtgtcattaggaactttatggatatttatgcgcctccctttcattgccatttggaaactcctcacgcagaagtcaaggaaactccaatcccacttaaacttcattgcggagaaacagagttctgaaaaaaaagcagctaccatggacctctcttttaaacgcaagtacacccacacacattcggataccaaggaaggaaggaaagaaagaaaggaaagaaaagggaggggaggaaggaagagcaaagtcctctctaaaagtctcaattatatatatagcctctgattgtcacctctcctccgtcccaccatttttcgtacttgtattgggtggcagggacacttttcaagagttctgtgttcgattgttcactctgagtacctctccaccatcctccagtcgttgccctcattgggagagatgcttgctactctgctagtaccacgccttggttccggtctttactgttggctggtaggtc

SEQ ID NO: 332444 - DNA, 1059 bp, Homo sapiens
  chr5:101631442-101632501
  hyper
cggtaggttgaccttggtgagagcgcaagcaagttccaaacccggggccaccttgcagggcgcgtccaccgtcccacggaccccgcgcacctgccctctcccccggctggctcgccgtgcccacctcgctctccactggcccgagcctcaagcgggcgctggactttaccttgcgtgacggccaagaggcagtagtgaagcagaaagcctccaggtgtgttgcagcgctggagacattgaggatggaagttcctccagccgtaagacccctcctcaaactcggacagcgacagtgaccggagcttctcttcggagacattgggaggggctgaaggcagagatggctctggtgacttctggggctcctggggcttctgaagctcctgtggctgagaattctctctttgggggtcagaggacaaggcagagacttcgatttgggagggcgacgcagacaagcggcgcaggatgtctgggctggaggggacaaaagccaagttctcaatacctttggcgctcttcatgtctggatgggttctcccgactccggtgcttcagagcagcagagccaggtccctctctggctcctcccacaggcaggtgacagcgcccccgtgcgggaagcttcccgcctcctggccctccagcctccagcgcactctccgccaccgcctgaaccttcctactccagctcgcagctgtctggagcgcagagcgctgagcgggggcgttagcgccccagcctgtggctttggcgctcagctgtgcctcacccgtcgcctcaaggaccaaccggaaggcgcggcgtgggcgtgccacccggcggcggccgagtagagggggcgagagttctcaccccacagccttcgaccggagtccgcctccgcccaagcccctgcggttctgacctgagccttcagcccgcagcgcgcctcccttgagcccaagcactgggaacacacagagactgtgggagtctctggccataagctccccttgggtgctgacatgaaacctgtaaacagttgcatcaggagattgttcaggaaactatcttgc

SEQ ID NO: 332445 - DNA, 1938 bp, Homo sapiens
  chr5:107005346-107007284
  hyper
cgggcttcgggacgcctacaaatcggttccaggtaatcgcgcgcgttcctccggcagcacatcgccaggccgcgggcgaagggctcccacctcctggctcggccaactctggcagcttgttctgcacacatgacgtaacccggcattagatcaaactttctggcaccttgaacccactggggtgggtggagggatggagaagatgggagaatcctctccactgccaggcgcgccgggcccagactgactcaggggccgaatgatttcctcgcagttgaagaggaaaataaaaacctaaagcttccgcttcccagcccccctcacttcccccagcccgtgcgctctctctgcgcgcaccgggaaaagagaagggaaaattaaaattaaaaaaaaaaaaaaaaaaaaaaaaactttgggggatgtttggcgggttctctccgcagtccctgcggacccacgctccaggaaggagctcccggctgcgcacactgggggctccccgcgccgggaaccggatgccagccagatgccggggctgggaagcagagaagtccctactccccggctcccgcccttttccgagtctcccggcgccccgcagaagcagttggtctaggcagccccggggactcccaggggtacctggcctttccgcggcggcttaacaaagaggggcgcgacgcgagcgcttcccgccgacgcctcaagccatcagcgcccgggcgacgcaggctccgagggtgcgcgccgccagcggttggtgcgcgccgatccccgccgccgctccttccgcagggccccgaggcccgggtagccctggctctccgcctgttatcggcttacctggggttgctgctgttccagtagacagcgtagcggtcggcgacggccttggagcccgggtcctggctgaacacacacatccagagcaccagaaacaccagcgtcaacatctccacgtgcaacatcacgcctggccagcggcggagcccccgacgcgccactccggggagagagcggggatccggagggagggaggcaggcaaagggacagagagagagcgggcgccaaataaatatgaataaataaaaatgaaagtgggcgagaaaggaaagaggcgcccaccaagctggggaggggtaggagagcgagaagaaaagaaggcggtgggatggggggtgataaagacaaactcgcacccccactggagggttcaggaggaaaaaggaatcacaagatggagagaagcgtgcgtgtgtgtggtggcggcggcgagggcgggggaagaggtgccaagctgtgtctcgggcggcggcggcaggccggtcaccccgggagagggaggtgcgcgccgggccgggcggctgcagcgcgggtcggggcaggcggcggcgcgcgctgcacagtcaccgggagttgcgcgccgcagccgcggggagacatacaccggcccgccgggcccggctcagcgtcggcgcagcaggctacgcacggctccgccaccgcccggggccctcgcactgcgccacgcttcgctccaagttactttggcggccggtgggaaactgcaggagaagggcgacgtgctgatagagggcttcgcgcttgtggtcccgggagtctgagaacccctttcctcagcctcctctgtgccttagcggggcgacccccagaaatctcagaggagtcgtaagtgctgcggtaccgggcggtgcgccgagaagggtggggatccggagccgcaacccagccttgtcggtgtcctggaactggttaagcggcagctgcgccggctttcgaagcggtcttgcctcgaaaacctcaaagaaaagtttggctcttcgcgtcttccggcaggtcccccagcagagtcggaacgcggcggtagcggaagagggcaccccgggggctggccgagcctcggggatttctcgcgc

SEQ ID NO: 332446 - DNA, 279 bp, Homo sapiens
  chr5:109024730-109025009
  hyper
cgaagagaatgtgcaagccctcttctcttgcatttcctccagcccgtcaccaagtactcttccaggcacgccaggcccgagtgtcctaggataggaaacctgagcaacaaagggaagtggggtgtaagctcaacccctgttggacgtgggggtgctggcgcctgaacgcccccgaaggcctcaactcccagaaagctgcctgccaggtcacaagagccctgtgaggtcttcctatcgccgggacactgggaggcaggcgcggggcgggtccgccgggcg

SEQ ID NO: 332447 - DNA, 1005 bp, Homo sapiens
  chr5:110559569-110560574
  hyper
cgccacggagacgcgctcaaggagggatgagttgcgccaccaccacctaggtccctctctcgctatccggcggggccgcccggacccaggtgctgccagggtacgcctggcgcccgccatcccagagcagcgtcccgctgcgcacggtctccctccagctccggtccccgcgggagggcgcgtgggatgatgcgcgggtccttgtgccttccccaagctccagcatccggagccgccctagccggcaccgcggcagccacagcctgggagagagaaaggaaagagggagggcggcgggaaaggctcggcgcgggaggagggcgggtgaggagggaaggagcgagggggagggagcctctctcctcagcggtgcagctagtctccctccagcgggcggcgactccgggttccccctcgcgccctctcgcagaggctcgcccccttccccgcccaccgtccctgcgagcgcgggcggcggcggtgggcgtgtgcgcgcgtgaaggacgccgcctctctctcgctcctgcgttcgcaggcggcggctggcggccggcttctcgctcgggcagcggcggcggcggcggcggcggcttccggagtcccgctgcgaagatgctcaaagtcacggtgccctcctgctccgcctcgtcctgctcttcggtcaccgccagtgcggccccggggaccgcgagcctcgtcccggattactggatcgacggctccaacagggatgcgctgagcgatttcttcgaggtggagtcggagctgggacggtaaggcgcgggctccggctggggaagcccgcggcgtgcactgggggttgtccctctcgcagcgacggctcggagggtgcgggagcctgccttcgtgcccttcgatttctccctacctagttagtgtcttgagagagagctaaccttcattcaggtgcggctcgagtccttcccaccccaccagagcgcctaggccggtgcagctgtaggatcagcccgactccctcccacc

SEQ ID NO: 332448 - DNA, 738 bp, Homo sapiens
  chr5:110847638-110848376
  hyper
cgcgaagcctggtgggacgcggctgcccctgcgctgtctgtgcacctcctaagaaccaggaagcgcggtgacctccaaagaacaggactgtcccaaatcaagcgggattaccaccgcccctctcccatttaacagctgaggacactgaggtctaatggattccaagtacttaaataggtgagcggcgcgcaggggcgagttgcaagccctgggatccttccagctcgccgcttcccctcccaggggctcaggtttctctttcatctgtgaggtcctctcccgcccggacgccggggcccgccatccccaacgtccaccgcgagctccccagatccatggtctggagcaggtccagaagacgcacctggcaggacgccccgggcgccacagtcgccctccacacgggccaccccaatcctgccgcggctccgtggctctccttacctttacctgaggtgaagcaaggacgtggaagcagctacggcgcgctaccaagcacctcacaccgctctcaacagtactgctcagcctcccggcccgccgatgcgcaggcgacagcagccaacttgtaagtcaccgctggtcgcagccaactggaaggcacccagcgcctcagggcaaggcgggccgagcccccagccccgccccctggcccgatcccgggggctccggggagggggggctgagaggaggtggccggaacaacgtgcgcttgttcggattggctggcgcgggagc

SEQ ID NO: 332449 - DNA, 1400 bp, Homo sapiens
  chr5:112629411-112630811
  hyper
cgcttgcctcaaagactcaggagtccagatccgggcaggaaataaagttctaaagcggctttgaagtgctttctccccagacccctccccagcgcgggtcattcatctcagcctagggaagagaccaccttgcctgaacgtagccaaacgcatcgcacgtgggagccaagtgggagatgaaataatccaatgcgtccccctcaccaccaccacccccaccaaattagttaccgtcggcttaaactcatcgggaatgtccgtgtattttaccgatcagggaaataaaagggtgtatataaattagtggaagcgggtgggaaggaacaagggatgcagactgtcgtgagtaaaacgcctcgcggcttggtgagaggttgtttcttttttaagccactcatttcagactgaaatatcaagccagttcaggtcatttcctgagtagcactacaagttaaaacaagatccagaaaatctactaatcttcaattgcgctgcctccagactgggagcacagggggatagggtgtagggctgtggggaggtcgaggggagggggatttgtggaaaagcaaacgcccgagaaaccctagctcccgacctcagctgtttcttacctcactcagctcggccgaggagtcgtttccatatttcatggcaactccggaattcatgatgcacttttcagagctgggctctcagtcccccaggtctcggagcttaagagttggacttcacaggctcaatatccactgcttggtcccttctgccacattttagtctagacagccattttcacccaggacagttgcgaagcgcaaacggaggatgcaggcactcttaaaaagagcagccgtggctcgcgtttcacggacgagccattgctgcaggaggctcggtggcgcggcgcgctcgcagctgcggcagcggcggagcccgcgcggggaccctcccgcgcgcacccagcgccccgttccggggcagtgccaccctgggcgccgcctcgccactcctacggtgcctcgccgccccccattaccaggatggagggcacttcccagcacgagccgacaccctagagggcaccggcgagctcccgaaaaaactagggcggtggggcgaggaagatccgcgcctcggattccagagaaggaaagaaagctagagggagccggagcggagctgcacttcacgccgaagtttccccttcgaatcgtctggagttgtaagtggtttctgattgaacacagctgtctagctgctggccacggggtgcgcggaggaggcggggctagagggagaaaagggtgggggcgagtagcctggaggccgagcagaggagaccgtgctgggagagcagagcaggcatccttccagttctctgcaatagtaattaaggaccc

SEQ ID NO: 332450 - DNA, 561 bp, Homo sapiens; identical to SEQ ID NO: 231306
  chr5:112823742-112824303
  hyper

SEQ ID NO: 332451 - DNA, 633 bp, Homo sapiens
  chr5:113391392-113392025
  hyper
cggttaacacccgaaattcggccttagaatacacacacacgatggaatttgttccatatctttttttttaaccttcgataggcataaatccaaacctaaaattaaaatcatccccaaatttggttttgggaatcatgttggttttcacccttgagcggcgttccctccccagtgccgcatgctgcttaaggactgttactttcttggggagggaagtatcaaatggaaacggtgtgtgtgtgcgcgcgcgcgtttatttttggcgcatgcacacccctcggtagcctcaaggtcggcgataccctgagcattcgggcccccgcctgcaggactcgctcctgccagccaaggactcaagaaggagggagtccccagtcccggcggggcgcctgggattcggttcaatatttagcacagtcagtaccgaagcaggggcagccaggtgggagctgggcgcccaaaagttggaccccaatcagcagcgagtgggcagcgggggcctggctcgcccgcgcccgcgccccggagctctccggctggctctctgctccccgaagctggggagccgggggcgctctcccgggccgcaagcaggcacggaatttgacgcccgagaggcagatggtcctggct

SEQ ID NO: 332452 - DNA, 2342 bp, Homo sapiens
  chr5:113696433-113698775
  hyper
cgaactccaacaaaactccagcactgtccgtgggcagcgactattcagcccaagctatcattcttaatttccctgccaggctgcgactaccggggtgaatcagcccgcgccaggcccctttcccacccgccgctgcagttaggacttggcaaagatgctcgatatttgcgtatttgtgaccggtctttgctttgtgtctgcgctgcaggtgaggaggaggaagagaagcagaagagcagctggaggccggcggtggctgagcagcccccacacctttgagcgagccgcctgcctctccaccggcaaggaagccctgggacctccggattcgggctgccggagggcctgagcgccagagcccaggacccggcggccgggggcgccatcccctcatgttctggagaaggcgcaaatgtgagctggcggtagcggggaaagccctccgcccccgccaggggggacccgggaagcccggccggctctgtcggcagactgcggggatcccctcctccggccccgcccccacccacccccggccggggtgccgaggcggttaaccctacccgcgccgcagcgcacttgggctagagcgccgcgcacccaatccagattccagagcctgccggctgggaaagatccggtctcggggtcggctatgatcccgcagcggccaaggcagggctcaggccccgggattctccccacacgctgctgcactggcgcagccggtcgccaaactttttctccccaaagccagtgcccccgcagttacttggcgggcagccggcagcccactctcggcgggatgatctgggagaagcgggcgtgggacgagggggctgctgttttgcagccctgcgaggcgtgcagtcggagaagtggtcggggttccacaccgtccctgagcctgcccccggccaaggtggcccgacgtgctgcagtggctggcgcaggtgatccgggcagcgcgtccggcactagtcaagggggcagcggcacgggagggaggggcgcctttctcttttctcctccccctgcagcccagctgcactgcgtgggggctctccatctccacgcaatcagcaggcggaatccctgccctggagcgccctggctctggactgcacccccctagggtttgtcctgcagattcccctccccatctttctctgccacacacgcttccctaagccgcgcgcgccgcaaactcagtctcggtccccgcaggtgatgtcatgcccattgttttggtgcgcccaaccaatcggactcgccgcctggattctaccggagccggcatgggcccttcctcgcaccagcagcaggagtccccgctcccgaccataacgcattgcgcagggtgcaccaccgcttggtctccctgcagctttaacagccctgacatggaaaccccattgcagttccagcgcggcttcttcccagagcagccgccgccgccgccgcgctcctcacacctgcattgccagcagcagcaacagagccaggacaagccgtgcccgcccttcgcgcccctcccgcaccctcaccaccacccgcacctcgcgcaccagcagccggccagcggcggcagcagcccatgcctccggtgcaacagctgcgcctcctccggtgccccggcggcgggggcgggagataacctgtccctgctgctccgcacctcctcgcccggcggcgccttccggacccgcacctcctcgccgctgtcgggctcgtcctgctgctgctgctgctgctcgtcgcgccggggcagccagctcaatgtgagcgagctgacgccgtccagccatgccagtgcgctccggcagcagtacgcgcagcagtccgcgcagcagtcggcgtccgcctcccagtaccaccagtgccacagcctgcagcccgccgccagccccacgggcagcctcggcagtctgggctccgggcccccgctctcgcaccaccaccaccacccgcacccggcgcaccaccagcaccaccagccccaggcgcgccgcgagagcaaccccttcaccgaaatagccatgagcagctgcaggtacaacgggggcgtcatgcggccgctcagcaacttgagcgcgtcccgccggaacctgcacgagatggactcagaggcgcagcccctgcagccccccgcgtctgtcggaggaggtggcggcgcgtcctccccgtctgcagccgctgccgccgccgccgctgtttcgtcctcagcccccgagatcgtggtgtctaagcccgagcacaacaactccaacaacctggcgctctatggaaccggcggcggaggcagcactggaggaggcggcggcggtggcgggagcgggcac

SEQ ID NO: 332453 - DNA, 268 bp, Homo sapiens
  chr5:114506308-114506576
  hyper
cgagcagtcatatcccgctttctgcttctatacccccaagtcgcgatgtcaccgcacgttcttgcccagtagcgcggggaccgcctgcagggtggagattcctctcccggatgctggccagggactgaagttaaaaggccgcggcaagggagagaccccccgccacccgggcctacgctttccttcctgagggccaggacagagggtcctgagcggctccggcacccccgcacccccgcggggagtgctgctgaacgttaaggcgcgc

SEQ ID NO: 332454 - DNA, 1420 bp, Homo sapiens
  chr5:114514898-114516318
  hyper
cggcaatttctcggatgcagcgcggagcccagcctcccgcactgactcaggcccggcaccaccccgcctgctgagggcgtcgtcgcgggcgccaccgacggcgccagcctgcgttcctaaaggctccaggacaggtgtggggctgaaatcccgctcctccagcatcttcccctccctaccaaaagaaggctgctttaaatattcccggcctggagcagcagcagctaaggacctggaaagaggcccgaaaaggccagggcagggcgaacgaacgtgctgtccctatttaccggccacacgctctgactgcgggctgaccctgatcgcacacttcgagcctgttcactcgctgggcggaccctccctccacgctccgcgcccaggcaggcgaggtcacccactcgaagtcaccacgtttgagtagccctggttggtggggcagcgcccccttggccaacgccccgccctcctctccatcttccgacgctgggctctcgcccttcggcgtccgagagcccctattgctgcccagctggccccaaaagcgtccgaaagtcccctcttggcttatttcagagatgccacgcaataaagaaaaggcggctactttgcattccgcagctgctgggacgcccgggctgcgagcgcggctcctggattccagcctcccgcccttcccaggcgctggaatggacacggacgcccacagtggcgggccaggtagtgccggagtcgggggcccaggccgcggcgccccgcgcctcatcacttaccttgcctttagctatcaattccatgatgtagccaaattcactcatctccccagactccgacatgtttacaccccttcacaaactctggaggaccgacgcgggtgtatcgaatttgtcctttcttttctctttttctgtttttagtctgagttttgccgagctccccgcccataagctgttaaccaggaaaagaggggaagcgccggggaaagcaagaagcgggcttgggtgaaatgaaggccatcgagggctcccgggcagcctcgcccggcttgctaggatccgggtgcagcggtcggggctgcgcgatctaacggaacaaacgagggcggcggcggcggcagcagaggccgtgaaaccctcaccaggcggagccgggcgcgcggaggccccgcctcctcgggggtcgcggcagcggttcggaccgcagcggagacaaacaaacgcgcacacaaagcgggtccgcactcggctcagcgcggccccagctagacattccccggcctttatcgcatgccggcaggttggccgtccccggctctcggcgcgaagatctggaaaaaagccccatctcactgtctggaggtgcgagggcagacagaaacgaatacagaggaggcgcaacaaaggggctggctgccagcgcc

SEQ ID NO: 332455 - DNA, 1555 bp, Homo sapiens
  chr5:115151178-115152733
  hyper
cgacggtcgaatatttaatctgcgaaacttggcagtggatttgaataaacccacagtcggggaagttagttaaattggtttgggaaagggaacagcagaaattccgtagtggcagctgacggccacaagacgctattttacatgagtaaaaatgcttgctataaggtgcccggttgcaggcgaccgaaggcgcagtgatggagaactgacgcgggtgacttgtcttcttcaacatcacacacttctcccgatggctgatgtagtgctcccctgggagcaccctctgctagtccggccagacggttccttaaggtgtcaggagggcccgaacctgagtgcggtctctccgcatctccgcgcccggggttaacgatggcttgggagtgtgggcattgctcccgaggccaggggcaggaggactggtggtttagaagcagaggggtttgcgggagagaagagaacagaaaatctcgcagacgcgcggtggcctcccttcccggcgcctgtccgccgttcccggccggaggtcagcaaggccagtaggatccaccttccgcctgcgctgtggccgcggagccccaagcgagtcgtgccagccccgcggctggccagcgagggggcgagcggcggacgcagcgcggcccgagcttcccgagccagtcactttgggctgcgtcccccacgtccattcctcctcagacggggcgagtgggcgccgcctggcattgaagctgcagcgcgctcacctgtactggtcgaacttggcgtacattgcccactcggtggggtcgctctcgtaggcttccatgatggcctgcacctcctctacattgacctcatcgccggcaaagagctggtgcaggatgcggatcagatcagccagggtccgtggcttcagcacttcggtctgttccatctcgtggggagctggctgcgcgcgcgtctcactgctgggctgcggtggaggagctgagcgagccaaggagctgggggcgagggagcctaacagcccgctagaccgctaagcagacacacacgcacaaacccagcattagagtgccgaaacgtaaggatgtcgtcgcagagacagcaagagacccacccccaggcccctggcagcgcagtggatccgggatcgctggagacgcggtgcacacacaaatcaggttcagatctgtggggttcatcctcccgggccccttttaagcgcttggagtcactaggaatgtaccaacggccctcggagggaggacgaggcggagagccacccaagaaaggtggcggaggcggggagaccctgcgggcacggctcacgcgcacatccccggcttccccgggctccgcgccttcccaagagccccgttgtctccggcgtcccagggatcgcgtgggctccgcgcaatctctcccccactttaacggcgcgttttagccgcccggcctaacgcctctccccgctccacctccgccgctgtggttcgcgacgctgggacgtagacaaaaagggtcggaggagatggctgcggggactgacgctgagtaaaggaggaaaaga

SEQ ID NO: 332456 - DNA, 1809 bp, Homo sapiens; identical to SEQ ID NO: 231315
  chr5:115297264-115299073
  hyper

SEQ ID NO: 332457 - DNA, 174 bp, Homo sapiens
  chr5:115911052-115911226
  hyper
ccagaagcgatggacgctctacgtagttagatgaattggatagaagccggtgcggttaaaaatacacttggaagataagaacacagctattaattacgcacatacacacgttaataaagcatgtgaagtaagcaaataaactacagtgcagagaatggcgtttttaacgacggc

SEQ ID NO: 332458 - DNA, 228 bp, Homo sapiens
  chr5:115911467-115911695
  hyper
cgtcgggccacaccacgttcccctccccctgccgctgcgccccgaaatcaactgcgcgccgcggctcttgctccccaagggggcttcgcagatggtacggatcctagtcgcaacctttaaacaaagtaacatcgggcggcccagcagttctcggagagatatttactagtcatggagttggctgagaaaagcaagtgcggagatcggggtctcagtcccacttaggcc

SEQ ID NO: 332459 - DNA, 190 bp, Homo sapiens
  chr5:115911926-115912116
  hyper
ccagagctgtcagcaggggccgctatccccacctttctcgggcaaaggcctctatagacctggggtagtggggggcgcggccctaggtgcgcgcgcagcccccgcggcttcaagagccagcctcgggagggggttggggagtgtggggcggtgggtaggattgcgctttcccgcgggttgggtgggggcc

SEQ ID NO: 332460 - DNA, 87 bp, Homo sapiens
  chr5:118788280-118788367
  hyper
cgctgaggttcgacgggcgggtggtactggtcaccggcgcgggggcaggtgagcatgcgaaggttggaggccgcgccccttgctgag

SEQ ID NO: 332461 - DNA, 1713 bp, Homo sapiens
  chr5:119799821-119801534
  hyper
cgaagggcaacgtcgaggggactgcaagcgtcaaccctggcgcggcagcacggcgcccctctccgcgggcggggagcgagcgcgtgtgcgcgagagcgccgggcggcggcgggaggaggcgcaggcgcgctgctcgcccgtctgcagccccgagccgagcgccgcgtctcgggagttgatggcagcaccactgtgcggccgcccggccgagcgcggagcgcagccactcgccgctgcccagggagcgcccaagatgtggggggaccggggcggcagcggccgtagcagcgccagggacgggggcacgcagcagcctccgctcgcccgcctgtcctgacctgcctcgcttgcccccaaagaatgtcagccaagtccaaggggaacccctcctcgtcctgtccagccgagggaccgccggcagcctccaaaaccaaggtgaaggaacagatcaagatcatcgtggaggatttggaattagtcctgggcgacctgaaggacgtggccaaggaacttaaggaggtgagaggcgcaggggtggggagggagttcggcacccttcgacccctccggggtcccctttccgattttcagcagggacagccagatttccaaactcctgggaaactacagaaaaggcgcctgcagacggactttctttgctcctggagtcctgagaggagttgttgttgcactttttaatttttttttttaatcaggaagaaatcaactagtgttttaatcgatggacctgggctggtgggagggatgaacgcacgcgtgtctctgaatctgtgtgtgtgacgacgggggagagggttagctgggggtgtgtcggcagaggaagtcgtgagcagcccggctggagcgtgcaagatgctcctctcctgccctattgcttccccagagtcctttggcaagtccgctgcctatctgtcagcctccccaagtcagggctgaagaggggccgggttctgggccctgggccagatcagggagggcagcctggaggaagcttggctcagactaccctccctgtctctcgagcctcgctgtagggaaggcgacccgggctgctggcagccttggggctaaggagggggtctgggactttctcactttctcagtttctgaagcatcccctgctctcctccgaacgtcgttaccagtaactctgggccttcccgccaccctacctctgcttccttccttccaccctgtcgccacttggcattgaacccgagaagcaggacgcgcaggagagtgtatgtgtggccggggtcttgccattggcgtcctggctctctgcagctgggactgcttcggttcttccccgcttttcctatcccacttcggttcagccctactcccgcccgcccctagccccaggtgatccagatggaaagaagcagagaaggtgtcagggctgaggctgcgtaactcaggcggcggctccgggcgggggcgggggccgggctgggaggggtggggtctcccgagccaggctggctgccggcggcgtcgcggagctggtagcagagtcccagcgcgccgctcactactgaatggggtcctggtgcggttctcggtgagggagtccgcagctccgctgcgtgagagctaagactagaacttcgaaggtggcggtggctgcagcgggaaaaggggtggggcgtagtctaggtccaaaattgtaatcctgtttctgaagccaac

SEQ ID NO: 332462 - DNA, 223 bp, Homo sapiens
  chr5:121648819-121649042
  hyper
tcattttcaatggacggctaggaggggggaaacgtgttgttttttcctgtgggaacgttgctttccttgggaaagttaattaaggaagcattactgtcggtgccccttttcacttgctggaggcaggatcggattcctcttggctgttactgacaagtgcccatcaaagagcccggaggacgggagaactgctgcaggacagtctcgccacacaccacgtgcc

SEQ ID NO: 332463 - DNA, 909 bp, Homo sapiens; identical to SEQ ID NO: 231339
  chr5:122423765-122424674
  hyper

SEQ ID NO: 332464 - DNA, 1906 bp, Homo sapiens
  chr5:122424905-122426811
  hyper
cgtaaaacccacgtgtccagccgggaagctgccagagcgtggaaccaaggagccaggacgcggcagcggccaagcgcagcagcccacggcggttgagtcgggcgcccaggtccgtccgcactctcgcgccctccgcgggcctcccaattttctcgcttgcaggtcgggaggtttccgggcggcacaatctctaggactctcctcccgcgctgctcaggggcatgtagcgcacgcagggcgcacactctcgcgcacccgcacgctcaccgagacacccgcacgcacccaccggcagcaccgagttttcaggtaaggtgaggctggtctgggacttaagagtctagggcttggtagataggaaggttggtggtcctaggttgggggcgggcggcgagactgttctgcctcctggcgcctgaggccaacgcggctcgggcgctgcgccacgccggctcgggtcggctccgggcgctggctgagggcgggggctgcgtcctgcagccgagttctacggggcagcgccctcctgtcgggccccagcattgctggatgggagctggacgctgcgatcggggaggcagagcagggtgcacacagctccctctgtgcggcgccgcagcttcggagtaaactttgcgcccaagcggagttgggaagagggagccgcggaaccgggcggccgccggctgaaccaccggctcgggcactttctccagggtcccagtggccctcttcccggcccctttcgcccagctcacgcgccccctcttccctgccctctgcccccagttcgaggcgccggacatgctgaagcccggagaccccggcggttcggccttcctcaaagtggacccagcctacctgcagcactggcagcaactcttccctcacggaggcgcaggcccgctcaagggcagcggcgccgcgggtctcctgagcgcgccgcagcctcttcagccgccgccgccgcccccgcccccggagcgcgctgagcctccgccggacagcctgcgcccgcggcccgcctctctctcctccgcctcgtccacgccggcttcctcttccacctccgcctcctccgcctcctcctgcgctgctgcggccgctgccgccgcgctggctggtctctcggccctgccggtgtcgcagctgccggtgttcgcgcctctagccgccgctgccgtcgccgccgagccgctgccccccaaggaactgtgcctcggcgccacctccggccccgggcccgtcaagtgcggtggtggtggcggcggcggcggggagggtcgcggcgccccgcgcttccgctgcagcgcagaggagctggactattacctgtatggccagcagcgcatggagatcatcccgctcaaccagcacaccagcgaccccaacaaccgtacgtagccgcagcccgcgcgctctctcccggggcgccggcgccggcgccggcgggcgcgggtgcctgtcagggaggcgggtcggataggagtgacacggggccgggtgggtggggagcacctggtcctggccgctggcccgcgcctccccgatctctgtgacaaaagttttctggcgttggagaaggaaagagaacggatgggacggccggtggcactttggggttccctctccctccctctcctcacctgcttcacagtcccaagtgtttggggccggagtctaccgtggacccggcctaacagacctctgccctcccgccggacagtgcccggggccaggcgggtactggcagcgtgtgacagggggtgtctgggtcaggccctgcctggccttagccgggacgagggagggaccctcagcgtctctggggagcacgcagaccagggcttgtttttgctactctccaccccacctctggaggggtcattttcgggccgcggggttg

SEQ ID NO: 332465 - DNA, 777 bp, Homo sapiens; identical to SEQ ID NO: 231342
  chr5:122430553-122431330
  hyper

SEQ ID NO: 332466 - DNA, 764 bp, Homo sapiens
  chr5:122434876-122435640
  hyper
cgggctttttttcgcaatacaaggataaacacatcctgaaactccagatagaaacctcaggaatgggcgagagggtcagaaggaacgagagacagtagggaagagagagagagagacagagacagagggagagatgcagagagactgaaacgggaggaagaagcctggaactgtcggttccgtggagagcggacatgctatctgcgcccagatccgaaggctttttggggagcctagagtcctggcccggtaccaggcagatctgggtgcggcgaattccaagggagcggcgcgggttctcttctcctcctcctctgagttgcttcggtgcccccaaggcatcaccttcctcgaaggtggcttacccaggcgggcggtgatgctgttgtctcgggagtttactcaaagatgggccgctcggggcggccggattaacccgctcccttcccttcctccttcttgtctcccgcaggttgcgacatgtgcgcggacaaccgcaacggcgagtgccctatgcatgggccactgcactcgctgcgccggcttgtgggcaccagcagcgctgcggccgccgcgcccccgccggagctgccggagtggctgcgggacctgcctcgcgaggtgtgcctctgcaccagtactgtgcccggcctggcctacggcatctgcgcggcgcagaggatccagcaaggcacctggattggacctttccaaggcgtgcttctgcccccagagaaggtgcaggcaggcgccgtgaggaacac

SEQ ID NO: 332467 - DNA, 1222 bp, Homo sapiens
  chr5:124082318-124083540
  hyper
cgtccgctagtaacgagacagaatgtgctaacatcgggataaattagtgaaagggaagaaagaataagaagaaaggactgaaaatctgggctggattccgcctgttagtcgggaagtggcatttttccgcccgtcctgacagatttgatttcttgaactaacttaagagaaaaggagggggggagtagagggaggaggaggagaagaaagggtgggatgagaaactgggcaagaggagaaaaagaaaggtgtggaggaggagacagcagatgattcagtgagctgataaaccagttataacagcattcgctcggggcggggggcggggggcttggggcggtggggtggggaaaataacggcgtttaaaatgggctcagtcttcgaaacctaaaggatgtgatgttttcctgtcttatgttgttttaagaaaaaggaactgagttcctagtatagctcccgaggggagtggaatcctctgtcgctcaggtcagccagtcatgtggtaattcgataattagagtcaaaataaggtttttgttttctttttttttttttttaaggcgacccttttcgggagtttttccctcttatactcgcagcaaacggtgtgtctcccttttatttattttttctctcctctcccttcgcccagcccctcctgtgtttagtcagatggccccggagcttggcttagtatttttaattagctggcgtttggaagctaaaagcagtaatgaattgttgatggattggaagtggagagtcgctttgctggaaatgtcggggctgggagagggggatgggcgagttagtaacaaccaaccatctaaaaggagcgattttgttacagtgcaagcctttcacatcacgtgaggatcaagggctcaattggttgtcgtgagaacaaaaatggtgacaagcgtatcaagaaaatactgatctggtctttaaaaaaaaaaaagctgaaagtctctcccctccccctgcacacactcccccaacctcctccccccgcccccccgcagtgggcgaagctacaagttatgaatgtgaaacatttctcggagatctaggatctccgaagttcggaaggagcgaaatgtaatgagcacaagagcaaagcagatgttttaaagaaacactttataaacctttcctcaacttatctccaatttgtcggctttcccaaggggccagggacggggacgcctgggggaggga

SEQ ID NO: 332468 - DNA, 60 bp, Homo sapiens; identical to SEQ ID NO: 231350
  chr5:124083787-124083847
  hyper

SEQ ID NO: 332469 - DNA, 204 bp, Homo sapiens
  chr5:124084158-124084362
  hyper
cgcacattcccctgcatgaagtccccgctaagtgctatatagagacacaccacgcaaccgtacttacggtctgtattggatcgagttgaccttttccttctaactgcattgaatgtgtttggttgcagccgctttattttggaaattataatctcttcaacaaatttattattaaagaagatggaccatcaaatgtcacagacc

SEQ ID NO: 332470 - DNA, 381 bp, Homo sapiens
  chr5:124084660-124085041
  hyper
cgtataaaacacacactgagagcgggtgggggtgctgtggggggtggttgtggagacaaagcgttttattttccaaccagattggggttgaggaacctcccgcagtaagaaggcaaaaaaatggtgcgcccctttcaattactacatcattcacataaaacacttatttattaaaacaaatctcaaacaggctgcgaggagaggatgtcggtaaatacaagtttgattgtgttatcttgggggaaataatgtatgtgatcgctcggtggcagagagaagccaaacgagccgctagcgcgtagcgaagagaaaagggaggctggctgtgtggaactgactgcgagcattttgccggcttcccttccttgttccaaggacttc

SEQ ID NO: 332471 - DNA, 740 bp, Homo sapiens
  chr5:125930492-125931232
  hyper
cgtcgattctgcatagcacacaaggacctaaaatctaagtttttgttttaaaggcaccctacacgagaaaacttttactgtggagcttcaaaatctcccatgctactaccgcatccagcgccagcggggagtcggtaggtcagtgcccgcccggcctcctcgagcgagccccggcggctgcagagatttcttgagcgcccgcgtacctctccccggcctccccagcttccattatacacgccctcgttttcctcgcggagccccagctctttcagccacgcatactggggctgattgatgaggagagtggacatgaaggcggcaggcctgctccaaggtccagagagcttgctggtctttgcagcgtgcacacacagcgcgcgaggaaggcgccacatactgagcccgggactcgggatgagcccaaggccctgagagctgctgaaatagagccccgccccccgcccgggagaacccattgggcagacccgacccctcccactgggcacgaccccgccaccgccccgtctgcccctggtcttccggaggagcctgcggctgaatcctgcctggaacaatgggagtgctacagggaggagtgggctgctgccatctggtgaaagactccgggagccacagttccagctgggaattcttttcagcaaaatattggcgctgaagtacagtaggctatagcaggggttctgaaactgtaaaatgcgtgtaatgacctggtcgtc

SEQ ID NO: 332472 - DNA, 562 bp, Homo sapiens
  chr5:126626239-126626801
  hyper
cgcgaccaggcctttggcggggtcacccaccaggcggtggaagccgctcaggcaggggcgactcacgatcgaggtgcagcagtcaggccgggaagatcctgcatgttgcgctagggactgcgcgcggcgccaagcgacaaccccccagcggccactgccccggcagcagcagctgcagcagcggcaactgctcgaatcccggccccggctcgggttacccgcccccaccccctccagcatctcgggccagacagagaaaaccttgttcaagtttgcagcaagtactttcccggtgcgcaaaactgggcgactgggaacgcgttgagacgttcctctttcccgcttctccacctttacgcctgaaagaagactcccaaagattgctttcttctgggacgctgcttggacgctaaccgcgttgattggaacagattttgtgtcttggctggctttgggtgaagaccggggagaaaaggttgcgctgcgattctcaagatctctggacctgggtaagagttgggcaaactcaactccggcggctcctggaccttggccggacgcc

SEQ ID NO: 332473 - DNA, 293 bp, Homo sapiens
  chr5:127537002-127537295
  hyper
cgataagagggaagcgaagaaaaaagcacgtgacttgaaaatgtttttctctttttaaagccacatctttctgcttcattttgatttcagtgtaactcgccgagtgaggactcttggcccacgctgggagcccgcagccggcatccgccaccgccgggcaggtgtgcgctgggcgggcgcgcggactcgcctttgcccggcccgcggctcccccgtgtggcctgagtaggtagtgatgcgaataacatgctttgagaagtcagaaggctggcgtctcttcctccggagctcac

SEQ ID NO: 332474 - DNA, 2330 bp, Homo sapiens
  chr5:127872759-127875089
  hyper
cgcagcgcgagctctgcacacgctctgcgatcggcacccctggaccccctaaccacccgccgcccaacccccggagagagggctttccgcccgctgagctgcggggttgggaaggaaaagggggacgcgctcctgggggtctttggatattctggcaaagggggctgcagctctaggctccagctaaagggtctgggacggagtgggccagaaagccgccaaactgaggattcccccctcccccaagccggagccctaggtgcggagccgcttgcccacttaccctcggagcacgtcctgctgtcctcgccggcggacgcggctggccactgcggcaccctcctcgcgatactcgggcgctagaaacccgccttcagagcctgctgtagcggaccgaacctgttgcggcggcggctggggccggggcggcttgggcggaggaggctgaggctggccggccgtgccctgcgcccagagcaccacacagcccagccacaggaagtagagctggagacacagcctccgtcttctccccatcgccggcgccgaaagcgcgcggccgtagacccgcggagagggagtgatcaaagacaaaatctgcgcgcctcagaaaagagtcagggtctaataagcccttcgtcggctccggggactccctcgggctcgggctccctgctctagctggagacctcgacagagcgccggccccctgactgcccgcgaagcgagacgcggggcgccgggtctagcgcagtgagcggcgaggcgcggcggaggtgcagccggcagccccgagcggtacacgttgcataaccggcctaaagccccgagcgactccaggaccgtcagcgggcgggggaggaaattacaaaagccctggcgtaaaatttcaaaaaatgtgaacctcaaaagaaaaaagggcctgcacgcagagctcggcggattcccgtgcgctccgaagacggatattggaaagctgcaaaagtcaccagaaagaaacaggcaagcaaacaaaagtcgcccccagaagaagaggagggttccctccgggctcgctcggagtcccacagggcaacgaagcgcgggtagcggctgcggagccgggcggaggtgcgcggggccggggcgtgcggccagcaagagagagggcgggaggctgggcgctggagaagatgcggcggtggagggcgcggcgcgggggttttagaggcccggcggggcgcggggcgggccggcgggcggcggctgtcagtgggggcgcggccgtccacacgtggggctcaacccggactgagaggccggcgcagagtgggcggggacagagtaagggagagatcgggactgaggaacgaggggaaccagggttgggtgaggggaagaggaaggaagggggggagggcgaagggagggaagaggacggagattggggagaaggggggcgaacccgagaggaaggccgggctggaagagggacttggaaagagggattggcgagcccgggtgcgagaggaaatgagcgggggatgggggcgaagttagggcaaagagagaagtgggaaaggagagggagggccaaggtccgggcgccgagaggaggggcccggggggccggctggagggggcgaggcgctaggcggctttgcttcccgtccccgtcaattggccgctagctctgttttgactgcctgtacaaagcgagtagacggcgggggatggggcgattagggaccggatttgggaaaggaggcagcagccccttcccctccccctccgtcctcgcccggccgcggaccagggactagggtgcctaagcgcgccaggcttggccggacccgcagctgaactgacccgcagctgaacttccccgccggacagaggccgcaaggttgaggatgagaacgggtctttctgtagggtcccggcccctgacctgggatggggggattcgcagtcagccaggaatagaggctcacggggctgttggttgcagcctcaatccaagaaggaggagacctcccctttgccctcctacccccaccgccccaccgggagcggcgtcagtctgcgggaccaaattaggggctgggagtttccagattgaaatgcgccctccaccaccaagagggagctcacgcggccgcggggggccgaggcagccagccggcgccgcggtcctggggagtccgtgcaggggtgtgctctggtgtgaaacctggcaggactctgcctgggcttgcatgcagggaggggttagagactctgaaatgtactagcgggcagggtggtgacaaggcgggtaaatgaggctcggggcatgcccttgcttcctg

SEQ ID NO: 332475 - DNA, 1872 bp, Homo sapiens
  chr5:128795584-128797456
  hyper
gagactgtgacaccagcctccgcccgttccgcgcgggtgcaggcggcgagcctcggctcggacaccacagctctcctgcccgcgccgggcagtcctctgcctgtccagaggcagcactcccggctctcggctggctgtgggtctgtcttgtggggctccagcactagcctgctcggcctcggaaactcctgcagcgtccagaacacagaaaatagactcatctcctaattcgccagggagctcgagggctgcggggccgcggggctgcctcccccgctcctcccccaacccgaccccaccccacccccgccagggcttcggcggcctcccggagtcacacagcctacccccccaccccaacaccccctcccccggcagacaaagggcctgggcaaattcgccgcccggcctcctagcgctccggggaggccgctgcgccccggagtggatcgcgctggaggcgtgcgccgggcgagaagccgcggccgcgggagcgcagtatggggaagaaccgcgagatgcgcctgactcacatctgctgctgctgcctcctttaccagctggggttcctgtcgaatgggatcgtttcaggtaagttcttccgtgactttctcgcttcctttccagccatcccagcggagaccgcgaacgtacgggtcggcagggctggtgcaaccggtgcgtggagagcagggctcagtgggtagcaataaaaatgagcttgaggtgcaggttaaggggtcaagttcggaaatgaagcacacttctgccggcctcgttttaaccgtatgtggaatagtttccttctaattagagcaataatatttgcaaaggtacgtttacagcacctggaggaaaattagaacgtacctaagttgatagcaacgctctgctctagcatacacttcagaaatcgtttactcgtgctggagtctttgcatcggttttcttttcaacaatgaagtgcggtcaccaaactttgattccccctcccccgcccctaatataatcgtacttttactctgaaaatgctggggtctgtaatctgatcgcaaggcttctggggttgcagagtttcagggtctagacgggtggtctccattgcattcaacgcgagcgccctgtatctatggactgtgagcttggaaatgtttgtgctactggaaccgcggcactttaagccccgcacttctgtctgccccgcccgcagagctgcagttcgcccccgaccgcgaggagtgggaagtcgtgtttcctgcgctctggcgccgggagccggtggacccggctggcggcagcgggggcagcgcggacccgggctgggtgcgcggcgttgggggcggcggaagcgcccgggcgcaggctgccggcagctcacgcgaggtgcgctctgtggctccggtgcctttggaggagcccgtggagggccgatcagagtcccggctccggcccccgccgccgtcggagggtgaggaggacgaggagctcgagtcgcaggagctgccgcggggatccagcggggctgccgccttgtccccgggcgccccggcctcgtggcagccgccgcctcccccgcagccgcccccgtccccgcccccggcccagcatgccgagccggatggcgacgaagtgttgctgcggatcccggccttctctcgggacctgtacctgctgctccggagagacggccgcttcctggcgccgcgcttcgcagtggaacagcggccaaatcccggccccggccccacgggggcagcatccgccccgcaacctcccgcgccaccagacgcaggctgcttctacaccggagctgtgctgcggcaccctggctcgctggcttctttcagcacctgtggaggtggcctggtaagc

SEQ ID NO: 332476 - DNA, 1888 bp, Homo sapiens
  chr5:129239570-129241458
  hyper
cgcggagtggcagcggtaagaacaacgtggaaaggacggaaaacgcgaagagtggcgccctggcggacctggggcggggcagagtggtaagggtcacgccaggacgtacccggctgtgggccgggggaggagagcacggtgggacagcaacgaacttgctgggggctcccggacccgagctccgccgatgaggtcagcggagcctaggcgccgggaggaggccagtagagcccccagacacgagtgtcgggaggccagcggaggggcgggacgggacgggaaatgggacgaagagcaagagctgggggaggagggaagagggggcgtcggcgctgcaagccggaggcggcccgacagggatcgtttccttccggagaggaggccggctctggactgaggcgcggacggggggcgtccaagggcgggtgacggggaaataccgcggcccgcgcttctctccggctggcagcggtgccgcctgcggctcctcctccgggccagctcggagcccggcggcggggggagcgggaggcgggagtgagggcgggggctcgggaaggagggaggagggagggcccaggcgcgccactgacagggtggcagcctaggagcggacgcgttgccgccgccgctgctcctcctcctcctcctgcagctcctccagctgccgctgctgccgccgctgccgccaccgccgccgccgggagaagtttcactcccgacccttgctcggagccccggcccagagctgagcgggagcccggcaggcagctgcagcccgcggcagtcgaggcgtccgcggcgcttcgacctccagccggtgtcggcgcctaggcggccggctgcggccgcggctgggggcgcaaaggcggaggaggggcgggtgtgagccggggaaaccgcgtgccgcgccgcgacagcccagcgagcgtccgcgcccgggacagccgcgatggctgtgcgctctcgccgcccgtggatgagcgtggcattagggctggtgctgggcttcaccgccgcgtcctggctcatcgcccccagggtggcggagctgagcgagaggaagagacgtggctccagcctctgctcctactacggtcgctctgctgctggcccccgcgccggcgctcagcagccgctcccccagccccagtcccgaccacggcaggagcagtcgccgccccccgcgcgccaggatctccaggggccaccgctgcccgaggcagcacccgggatcaccagttttcgaagcagcccctggcagcagccacctccgctgcagcagcggcggcgaggacgcgagcctgagggcgcgacggggcttcccggtgctccagcggccgagggggagcccgaggaggaggacgggggcgcggctgggcagcggagagacggccggccggggagtagccacaacggcagcggggacgggggcgctgccgccccgagcgcccgaccccgggacttcctgtacgtgggggtgatgaccgcgcagaagtacctgggcagccgcgcgctggccgcgcagcggacctgggcgcgtttcatcccgggccgcgtggagttcttttccagccagcagccccccaacgccggccagcccccgccacccctgcctgtcatcgcgctaccgggtgtggacgactcctatcctccccagaaaaagtccttcatgatgatcaagtacatgcacgaccactacctggacaagtatgagtggttcatgcgcgccgacgacgatgtctacatcaaaggtgacctccctgcgccggctttccagcctgccagtctccccgactcctttctctgtaaccggtcctagcccctgcccagcccctccgctgcttctctgccagcacgtgcttcgggctcccacaggccctggccc

SEQ ID NO: 332477 - DNA, 313 bp, Homo sapiens; identical to SEQ ID NO: 231372
  chr5:131593127-131593440
  hyper

SEQ ID NO: 332478 - DNA, 153 bp, Homo sapiens; identical to SEQ ID NO: 231374
  chr5:131800391-131800544
  hyper

SEQ ID NO: 332479 - DNA, 238 bp, Homo sapiens; identical to SEQ ID NO: 200029
  chr5:131831522-131831760
  hyper

SEQ ID NO: 332480 - DNA, 359 bp, Homo sapiens
  chr5:131892942-131893301
  hyper
gcacgccttgcttcggcctcagttaagcctttgtgggctccaggtccctggtgagattagaaacgtttgcaaacatgtcccggatcgaaaagatgagcattctgggcgtgcggagttttggaatagaggacaaagataagcaaattatcactttcttcagcccccttacaattttggttggacccaatggggcgggaaagacggtaagtcttcagtagccgccttcagtttacaggtcgctacatctttcggagaataaaatgggaagttgagaactctccttaggagcagaagcgtccctagggctccacaggtgtaggcccttaaagtgccttagggtgtggcctgcaggctacagc

SEQ ID NO: 332481 - DNA, 182 bp, Homo sapiens; identical to SEQ ID NO: 200030
  chr5:132072698-132072880
  hyper

SEQ ID NO: 332482 - DNA, 646 bp, Homo sapiens
  chr5:132082800-132083446
  hyper
cgggagtcctggcccaaggcgggcgcagtctccagccgccccacccctggctgggggctctgctcagggagcacggccggcaggggggaggaggcgtgcgctaggcagcagcggggatggagggaagggagggggtccgccacccgcctgtgcgcgcccagtcctgccgcatcctgggtgcgcgccgcccacccgcggggcgagtgcccaggaggcgaggcgcggcccggtgcgccagaggtagctccaccgcgagcgttgtgggtggggcccgccgagcccgcctccccacctcccccggcggcgccccaggctgcagtgttccgggagctgggttataaaatgccgggttaagcggcaactcagactcaggatcccgctcacgacatggcctcgggcgctcagctcccgccgcagccgtcgagctcagaggtcagcgccgtccagagcccaggcgggcgtcccggcgccggtctggaggaaacagccctgggcgttcctctcccgccgtctccgggggaggcccctctgccccgaagcaaccggagcaggtgccctgggacccgccagcccggagcggcctccctccacgcggcgtccgcagcagtccccgtgcggccccggcgcggtacggcgccagccggga

SEQ ID NO: 332483 - DNA, 805 bp, Homo sapiens
  chr5:132386973-132387778
  hyper
cgtgtcacttgcctgtgttccttgttagggcctaccaccgggtaggtgcttggaatgtgctgtggattaaaggcttaaatcctgcgggcccctcaatctgatctaaggacatgagtggcttagagaacggcgcaacaaggctaagcgaaagaaaacaaagcggtgtggctgggagtgggctccttccctccgctggtgagggtgcgatcttagactcttgagagaacccgacataaaggccgcgttccaatggcggccttctcccctaccggccaacctgccccgaaaagagcagaaggcaccctgcgggatctgcagatcagcttgcgtctcattctggggcaccgacacggtggaatgcaagacaccccactaccggaagtttctttgatgttaagaaaaacggcggaagtaggccgcagcgcttcctcagtatagtgcctcgagctggctcgcctactttctacggtaaagggaggtgctccacatctctatgcagctgtgcagcgccgcaggttccatgcgcaggctcggttggctaaatgcgctttccagccatctttcagccacccagtcctttcccaggttctcgagccaggacgtgacgtattcagacgtactgggggcggggcctcaaggggaaaagcgcctgagccgggatatcgcgagaacatcccgttctttcgtagctctggtgctgcggctccgctctcgtcgcaacgagatctttcgagatcttctccgcccccgctaccggcgcctcctctgcggccactgagccggagccggcctgagcagcgctctc

SEQ ID NO: 332484 - DNA, 1765 bp, Homo sapiens
  chr5:132946722-132948487
  hyper
cgaaggtaacagaccaagctgccggcgctgtttttcactggaggaaagctcggcggaagcgacacctagaggggagcggcgggctgtggccgcgccattcatcagtgtcggcggcccgcggccgcgagcgagggctgctggacagcgccccggcacccgctctcgagccgcgacaccgacctcgccgggcccgccccgctgacccgcgcactcctagtgcacttgccgcgccgcgcggaggctcgccgcgctctggaaaacaagaaaccccactgcctcggcggctttccgctcccgcaagagttgcgggcacaaagtcctcaggtggcaggcctggggttggcgccgctttgtcggctgcagggagccccaaagactagcgtcagctcgtccccaaactcgaggcgacaggcgccgaaagcagagtgctgtgcctgcctcgtccaggtccctcctgaaactcagaactcgtctttgttttgcgggcgcaaagagggcggagatcatccacagtgcaagctctcttaggaccaagcccccagcccgaacgctgaacgcccccaacacactgctccctagacacgttcaagcgggtaccccgggccgctcactctggaccgcggccggctacgcacaagcagcgccgcaggctgcctggagtcgggtcgtgccctgattccttcctccccagcctcacatgcggcggaccccggggaagccagggccaggcgaagcgcagcgggccctttgggctgcagcgaggagacgcaagtttccccgcaaagccgcggggaggaggtgctgagaatgcctgcccggcgccccaacccggagccaagggcaccgggcccgggccgaggggccgcgctcgcctggctccgccggggccgctcggggtcctgaacccaagaacggcgcctgcaggatttcggagccgggcgcgagctgcgggctcggcccgagcgcttctgcgtggcgccccgcgtgccaaccgggtcactccggtccccaccgtagaccccggccacgagcctcggcgtcccagcctctcctcgagtcctggccttggccggggtagccctgccgagccctggcccagcggtcccttccccgcgggcaaacttggctttcccggcgcgggcagtaaggacaagcaagcgcccgcgccgggccctgcagcaagatgcggggccgcgggcgccaggaccccagtggggtgcagcgggaccggctggtggcggcgccagcgacatggcaccctccccgcgcccgctgggagctgcgcccgcgtacctgagacggccggggccgaggggaagaccaggtggccggacttgggcgggagggagggagcaccccgtggcggcggcggcgaccccgccccgcgtccttcggctggtttctcgggctgtcggcgggtcccgggctcgctggaggctgttgaggctccagctccctgagccgccgctgcccgctgctgtgccaccgccgccgcggctgccctatttctgccgccgggaccggagcccgtgacgtcaccctctgggccccgcctgcccaatcgccgccacctgtgcgcgccgcccgcccgccagccggtcagacccgcgcggcggccacggcaggtgcgcggagcaggcgggcgcgcacgcggggcgcgatgactccggagcgctggggccatctagggcccggagggaggagggccagcgtagcgctcctgcctctggctagcgtggagctcggcaagtgacagcccctcttc

SEQ ID NO: 332485 - DNA, 546 bp, Homo sapiens
  chr5:133450702-133451248
  hyper
aagagccgcgacagcgccgccggtcccgagcgcgacctggccgagctcaagtcgtcgctcgtgaacgagtccgagggcgcggccggcggcgcagggatcccgggggtcccgggggccggcgccggggcccgcggcgaggccgaggtgagcccccgccggcgccggctcctcccccgcggtcgccgcgccgcgccgccccagttgcgcgcggccctcggggtctccagcgcgcagagcgtccctgccccggcgtcggccccgacccccgcggtcccaccgcccctcactcccctccggttctccctccaggctctcgggcgggaacacgctgcgcagagactcttcccggacaaacttccagagcccctggaggacggtgagtttctgcccggcccggcttcccttcgtcgcgctcaggccctggcctcggtgggacggggacgccaaggaccgcggggagccgggtgcctcccccaccgcagctcaggaggcggcagaacccaggggtggagagtggggggcgggcttcccgggcgccgccgggtc

SEQ ID NO: 332486 - DNA, 873 bp, Homo sapiens
  chr5:133862738-133863611
  hyper
cggcttgtggcggaccccgtttgggacgcacacacctgactctcaaatgagtgacattgcagcccccgcccccacctagcgctgctgcagtccctttgccggatccccggccccgccccgcccccggcagtggcatcttcccggcctcacctccttcctccctctccctcccttcttcccacccactcgcctgcgcctgcggagcggcgcccgcccgcctcctccccgcctgggtgcagacttgtggctccccatggtttcttcccgcccatccctgggtcctgagacatcctctcctctcggccaagggacgagaggggtcaacttggcgattcgcagctgttctgccagaggatggggttgcctgcgagacagccaggaaggcttcactctagcttccagaggcccagccctgtcccctactacacacagctaccaccccacccgcccctggggctcggctgcccttcccggtgtctcttaaacccctcccccgacctgggtgttaagcccacccacctcccggcgccgcccccggtcgaacagcctcttgcccttccttcgcctgggccggagccccccgcagcctcctccggctcctcctcccggctccggcggtcggaatcacgccggcgcgcctccagcctgcggtcccgcggactgcctccaggggcgggctggaggcgcgcgcaactcccctcccaatcccctcagccactgccgctggcctgggcacttttttaccagcttggctgctggcctcttgctggaggctgggggaggtgaagggtcactgggtgtctttgccgtatgccgaaggcacactgcggccggcgattctggtctctgcagatttccaaacctcgccgctgc

SEQ ID NO: 332487 - DNA, 94 bp, Homo sapiens
  chr5:134240165-134240259
  hyper
cgggtttccacactttttggtccaggcaaacccagacgagccagctggctcaagaacttggcagctgcgtgatgactgaacagaggctgcgttc

SEQ ID NO: 332488 - DNA, 418 bp, Homo sapiens
  chr5:134363127-134363545
  hyper
cgtagagtcccgcagccgcggagggagggggttctcgctaaggcgtcccgcggacaacgccgagaggcacagcttagcgggtgcgcaccggacaggctcgcaacgcaggacggtgccctcatgggagccaggctgagcaggtcaagaatggtggtggggaagcggggtaggcagacctcggcgggggctgcctcggcgctctgctcctacccaaggggcccggttccctttctacccacagttccctttctatccgcctccctcctcagcccaatgaagcagtcggggctcagcagtgcttagcacgctcggactatggttttaatagacgtacatggacaagtcgatatagacagatttattacagtcagtccaacatacacagggacgctgtaaacaggggcgcgggccggagagc

SEQ ID NO: 332489 - DNA, 856 bp, Homo sapiens
  chr5:134363810-134364666
  hyper
ggctctaccaggcgcgccggggccgtgtgcggctccactgagtgcccgatcctgggctgggggcaccgtccccccaaacccaacgcccgccccaacacggatccgactcgagctaaggcgctctcggccgggcctagctcggagagggcaacttggtttgtacggggtcgggaaatcctaggcaagtccaggccccgcacatccagtccgcaggcccggccactcagtccggatccagcgcggcggggacgcgggatacgaggtcgtcctcccccggccgctgggcctcggcgctcgcctaccgcgccgcgtgccctccgcggagtgggcctccggggcccgtgggaacacacacaccacccgcgccatcccgagagaaattgcaactcatccattttttcgcggcacttttctccgacgtctttttgcttttttttttttttttttttttttgtctttttggagggcagagtggggtccggaaaagcaaacacaaaaccaacccggagtgggaagtgggaggagggggctgcgcaggtgtgaggtccgcggcgcggtgagctggggcttgcgagccggggccccgcgtgcgtcctccgcgcccgcgcccgcgcccttccccgctccggccgccggcccgcgtggtgcggcggggcggtcagctgttgtactggcacgcgttgaggcccgaggccgggccctgcaggccgccgtagccaaacgacgagtgctgtttggacttgagccgcaggctggctaggctcgagttgcacgtgtcccggtagacgctgtagggcgaggcgggagtgccgtacgggcaagcgcccggcgacatggccgagttgagcgaggagcc

SEQ ID NO: 332490 - DNA, 269 bp, Homo sapiens; identical to SEQ ID NO: 231400
  chr5:134364994-134365263
  hyper

SEQ ID NO: 332491 - DNA, 896 bp, Homo sapiens
  chr5:134366533-134367429
  hyper
cgaggcagccagacaggacctgcctttccctttcgttttcgggataaggccaacagctcccgaggtccccagcggcagggaatccactgcccagtctctggcccagggtatcctgctaacatctgagtgggtcctgggccccatagggcatgggggagtcccctgggggcacaggtctttgggctggggttgccttagtccgaggatcaggtaggatgagggtcaaaggggttgaaggtccgaggcgcctggaggcctggcagacgctagtgggccagggcctaaggtggggatctccggtggagggagggagcaggtctgaatggtgggagagtgaagttctgcttgtgggtctaagctttggagggctgcagcagaggcggcccgggagccctctgcgcgggtgcccttaggcgcgcaccccttgctcacccgcacgcgcggctcggtgaggttggtccacacggcgatctcctccctcatgctcatgtcggggtagcggttcctctggaacgtggcctctagctcttgcaactgctggcttgtgaagtgcgtacgttgccgccgctgcttcttcttcttggctgggtcgtctgcgccgccgcagcccgtgcctcccgcaccactgtcctcgggccccttgggttccccgccgcgctccttctctgcagtaggcaggacggggagcgggtcacctgggcttacgccccgttgcaccccgtcccggctccaccgaaccgctcgccaccagcgctggcggtcttccctccctccctccctctagggttcctgggaactgtccccactggaaagcgcccgccgggtgctggtcgtcagtaggcacctctagtctggtgtgccgcggagaagagcccaagaatcggagctggagccgc

SEQ ID NO: 332492 - DNA, 263 bp, Homo sapiens
  chr5:134370281-134370544
  hyper
cgcctagaatcaactcccgtctcggccgcctcgaagtccccagccctggcgagaacagcccaggatgagtgaatgtttgccgaacaggatcgcaccgagcgggcgccttcgagccagcgccggggcgggggcagagcccggggcccgttccggcagctcccagcggtgtcctcgtcgaggggccgcctgcccctccttctccagcctcttctcccgggaactcagcccggctgagtgacagcagcctgcgctctaatgggccc

SEQ ID NO: 332493 - DNA, 772 bp, Homo sapiens
  chr5:134374385-134375157
  hyper
cgatcccggctttggggccctgcctttgccgcgggagaataggctccaatttacgaagctggtcaatttcagaaatccgagacccggttcttgagaagcgactgcgtgctccgggaccctgcgtcaacaaccaaacctgggagaagccgcgggaatgtctttattggacgttacgaagggaattggggtttctctcctgggaagaaaaagcccgacctgtgccggcgagagcaggctgccttgggctgggggcacctccgagcgctgcggcgggacgtcggggtccggggcgaagagagccagggcgcggaccgacgtctgctgcttttctgcggcattgctgcccgaacgaacgaacgaacgaacgaacgaagcggtttcgtttaggaaaaataccctcttgacgcgaagccacggctgaagtcccgggccacgcagaggggccagcaattccatgggtggtggggccctccatccctggacgcagcggggagcagcgggcggccctctctcctgcccacttctcctgggggtgggggagccctgtgtcacccgacgctgcgaggggctgccacgggcttctcaggttgtgcccttcgcggggccgtggcccgtgcccccgaggctgctaccctcttgaggtgcccggagccaaagcagagggttgatcccgccggttgggtgaggtagcacccggtgacggcggctatgactgtgccctgggcgcaggaacgagctcctcgcgctgcctcgaaggctcctgaccttccgc

SEQ ID NO: 332494 - DNA, 772 bp, Homo sapiens
  chr5:134375163-134375935
  hyper
cgctgtcccgcgccgccgggtggacccacacacgccaggagcaaactgcgcaggactcggccgccacctccctgcgcccctccaccgcggagaccctgcgcccctagcccagcgtctcttaccccacctgggcagcgctgcgtctgcggctcgtgggctccgggctcgcccgccgcggactctggctcaggtttcggctccggctggggccccggatccagctctggctctggcactgcacggttcttcggcccctgctggttcgctacatcccagcgcgcgaggccggggcttcctcggctcggcccgctcctcccgccgccgccgcccgtcgcccgcggggaaggcggggacactggccgggaggcgggaagggtggggggaggggaagctaggtgttcgccgggacctgcggggagaggggcggcgcgcagtcccgccggctaggggtcctggcctccctcggggcgtaggctggggtccgcgcggctggcggccgggcctcgaggccggggagcgcgccctgggacctccgtggaggggccctgccgcatgcggacgaagccagagcgggtcccagcctggccctggggcactttctctccctgggcccagtttcccacctgactcgtgaggggctggccctacttccgtttagacgggggctggtggtcgagtttggggttttgagattggacctttcttctttctgctcagcctgcgggagggagctggtcttgcgtgttggcagggagagtccgctgcccagagc

SEQ ID NO: 332495 - DNA, 213 bp, Homo sapiens; identical to SEQ ID NO: 200040
  chr5:134527188-134527401
  hyper

SEQ ID NO: 332496 - DNA, 134 bp, Homo sapiens
  chr5:134802302-134802436
  hyper
aaggctagagttagcgttgccgcagggctgtgcctcagacgaccaggcacgaccaagcacacaggtggtgctcaagaaatgaatgggagtagatgagggcattctggagactgcatggagagccagggcctgcc

SEQ ID NO: 332497 - DNA, 242 bp, Homo sapiens
  chr5:134824599-134824841
  hyper
cggcggagggcagaagcgtcttcttggctggctagagaagctccgccggagtggcctcctcccctcccccaggccggggaggaggccgccgagggctctccaattggagagcctttcatctctttgtttttacagtgattaacccgtccgagcgcgctccgagcgtggctccaggcagcgcagggggaggggagaggacggctgggcaagggaagggagggaggagggccctgggctttgtc

SEQ ID NO: 332498 - DNA, 944 bp, Homo sapiens
  chr5:134825551-134826495
  hyper
cggggccgtttccccaagcgcaaacagatgcaaatgtctctgcaaacattgcacaaagctattcagagagaggcagcctctcgcggcctcaatagccctttaaacctagtccaattgcccccaagtagaggtaaagagtccacatgcattttttcactttggctggaagaggggcggaggaggcgagggccttggggagcaaggtatgagggctgctctggttcagcggttcgtgccatcgacccgagctgcagcgtgcggaagaccggcaggagagtgcggtggctcgggggactacgcgcttcgggccgggcggggattgaggtgcagccgaagctggtgccgcgggaatgcgcggaccggagaggcccccgggacctttcaggcccacaaacgccgcgctaaatagccacgcgcacaatagcatgaaagggctcactcggaccttactgcaacacagtagattcacacccctccgaggggactaataagctcgtaactaacgcgcaacgctcagcggtgagagcgggcttgcgccctgctggcccctcgcagtacgcagactcagtctttcagcgtcactcggaggcccaagggcagccgctgcacggagggccaggcatttccttctaacctcgccagtagaggagcctggggcctgccggtgcagtccttaatgcaccccaaactcacgtggggctggcgaccccggaggctcggcatttcctggcccttcagaagacgatgtcgggacctctagactccaggctgagcgaggaagaagctccagtaaaagatgccagcgtaggcgcggtcttagccagctgtggccaagccgcctccacctccagttcagggccggggcctttcccgtcgccgcacgcagcaggtgctctggacgcgatgggcggcctagccagagcaggcacgtgcgctgagggccc

SEQ ID NO: 332499 - DNA, 392 bp, Homo sapiens
  chr5:134827217-134827609
  hyper
cgagcttctttcttctccaaccccacccccacccgcagctctggagaccatttctccaggctgggggacgcaacctgcctcccgagaggcgcgtccctgtcgcctcaggcaggtgcaggccgggcgggcgcgtggggcggggcaggggcgttatctcctgaccgaagagggccgcacatctgtttatctctgaagcggcgctggattggatttctcgatgtttatctccctcagaggaacagcgcgctggggctgcggagagcgcagctgcgggccgggcagtgattgacaggtcgggaacagggcctcccgcccctcctccgtctgggtggggggcgcttggctgcccactgcgcaccccatcctagagcgctgcaggtgagcatgccggc

SEQ ID NO: 332500 - DNA, 1816 bp, Homo sapiens
  chr5:134870248-134872064
  hyper
cggctcaaaccgaattttcatgctcgtttttcttcattagagttctacaaattgtaaaattgacttttcacctcgtcttcaggggctgatctgtcccttttctaaatcacactgaagtggtggctggggtcagttctgagccagtcacaaaggaggttttgtggagttcagaaagtgcaaaaggaaaggccgtctaggggcgggcaggaggggcgctgggctgagggccggagaaacagaccaagagacatccgccgcgagggtgcggcgacctaacaagcggctcaggtatccccgactgctttaaagctcccgcttcctccctccgcctggagagggggtcccgaggcggcagctggggccccatctattgcctgctgactaggggagggggaaagtaacagtgtctacaaagggcctagtggtaaggaatgaaacagggcgttgtgtggagcaagtctttgggcaggcttgggaaggagaaaacagggtcgccggggcggtaggtgaagtcttcggaggcggctgggctactggggtcagagagcggggaggcggcggcggcacctgagccccaggactccgcgtcgctggcggggcttgggggaccgggcaggcaggggacgcactgcggcggcaggaggcgctcccgggcaccgcctccgggcagcccttgatccgccaggcgcagtgtctcggccagagcccagatgtagttgtaggcgaagcgcagcgtctcgattttggtgagcttggtgtcgtcggggaacgagggcagcacgctgcgcagtgcgtccagggccgcgttcaagttgtgcatgcggttgcgctcgcgatcgttggccttgacgcgccggctcctgcgcagcgagtgcagcagcgcctcggagcggacccgcgtccggccgcggcgccgccgcctctcctgctcgtcgtcctgtgcccctggaacctcagacgcccgggagatattgggcgcgcccctgcgggccggcgcgggcggccccgaagcggaggctgcctgttggagtctggcacagtcttcctcgtcggtgaggaagccggataggtcactgccgctgctgctggcgcagtcgaggtcggagatgcaggtctcaaggcgggctggcatcgttgcgctgtgcaggaccgacggacagatagaaaggcgctcagagcgctgcagcccggactgagggcagagccgccagggcgcacttacgttcccaacagcctggggttgttactctgtgccagttgcgggtgcgagagcctggaagggtgcaggggcgcacggagaacttggcctggcctcctcgcctcgcctgcaggggccacgcgcccggccggtctcctgagtgatgtcgccggcgatcagatcagctcgtgtgagcaccgagtgtggcacacgactggcctcaggaccccttaagtacccggcgcaacaatgggcgcccccctcccttgccacctccgcccccgcggcagcccgggtgaatggagcgaggcggcaggtcatccccgtgcagcgcccgggtatttgcataatttatgctcgcgggaggccgccatcgcccctcccccaacccggagtgtgcccgtaattaccgccggccaatcggcggcgtcgcgcggccccgggagtcggctcgggctaagctggccagggcgtctccaggcagtgaaacagaggcggggtcggcgggcgattagcggccgaggcacgctcctcttggggcgggctgggcgcccctcgctggggtgggacggggaggcggggcgcgagcgcgaaagtgtgagccgcccagtgagttgc

SEQ ID NO: 332501 - DNA, 803 bp, Homo sapiens
  chr5:134879182-134879985
  hyper
cgagttaaagggggaggaaagcgcctcattttctatgcccccaagggacggaccgagcgggcagcctctaaacaatgtatttatcactttgcatctctttgggacgccggccgcgcccccacccttgccgccgccgtcgccgccgccacttcggttttgctctggctggggagacccggcgtttctggatttcttttatgcagccacaaataaaggctcctaggctggaagaaggggatttccccccaagtcttgagcaaacgaccctagcgccgtggctcttcctacggcgggggcctcggagaacccggcggggcgcgcggggggacgcgtgggcactgccgcgtgggcgccctgaccccgcgcccgcgtggagcgagagccgggactctgggccagcaagttccagttccccgatggggccggctcgcccggagccgcgtgaggggattagggccgcacgagaggcgaccgcgccgcggcctccagccacgtgagcacagacacggcttcaaacgtccccaacgcactaatccttgttatccggcaggataaccgcggccgcgccagcacccggcctgcctcctccgtctggctgcgggcggggagtgcgcctggctcccgagcccctgacacggatttggggcctgcaatgacgatctaccccacaccatccacattcctgggaccctcggggcaaggtcctacagtccttggtgaccaccacgcctgcaaaaagcggtgggaaagttgttacgcttagaaaactaccaacacgcgcatgcctgtaatcccagttactc

SEQ ID NO: 332502 - DNA, 541 bp, Homo sapiens
  chr5:134880146-134880687
  hyper
cgccgctccggaagagctgggatggagaataaggatgaattctggagggaaatccggcaaaacgggcattggcactaaaataggacattcgttaaggaaacaacaaagatggctgaagaatggagtatggctgaaaaaagcccactggagaggtgcagatagtcccctctgggcgccttccgaggttgggagggcattctggcccccgcccctccccgccgcaatctgtcgggacccgccgggtttccatatgaagggtcgagccggcgccttgggagcgctgaatggccgctcgcggtccggcgggcgcgcacgccccgcggcccgggctggatttggccgcatttgcatagcaggtgctgatgcttgtccattcttacttaaagaagttttaatatgggataaattaccaggaactaggagctgacgtgggcgggaaaaaaggaatcgtgtcgccagccagtcttcttaccgctgcctggcctggaaggataggaggggcaaggagagaaatgcgaagtaagattcgattttaaaagtc

SEQ ID NO: 332503 - DNA, 840 bp, Homo sapiens
  chr5:134914178-134915018
  hyper
cgtcgctgtagcggatcttgggtcccttccgggagcacttgcatttggaccctgcgagcgagcgcggggcaacggcttagttgctaggcggtctcctgcccctcgaccaccttggtgcccacccagaccaccccccgcgggatcccaggatgcctagaaattggcgcttgggttccccaggacaggacaagacgagacggcgacaaggggagctccccgcactcaccgtccacacgcgcggtgtacagcgccagcagcagcaggagcagcgcggccgccaggagcctcatgctgaccggaggggcgcggcgtgggagcagggacatggggagggcgctggcccgtcggagcggcggcccggagacgccacccagctctgctcggctttctctgcccggggcgcgccttccggctctgctggctccggctgcgccgtcggtggatgcccagggctgtctgtggccgtgcgctgcgctctgcgcttgtctccgcgctctctccacagcctccctccgcccgccctggcctcttttaaatccgctcctgccctcgcagcgagcgagctcattaatatgcagaaccactcggtgactcactgagatttctcaatgtggtgaggggaggagaccttcccagcccgcccgtcgcccgccccgggaaaggacccgctatcgcagcggcgcacacccggagccacgcgcgcacacgcacacacacatccgctaccctctcgctcacacaacacgccgccttcgcacacttgcacacccataccacagcgcgcacacatttccagcgtcccgctctgcctttggggagcccagacggtggagaggctgc

SEQ ID NO: 332504 - DNA, 639 bp, Homo sapiens; identical to SEQ ID NO: 231418
  chr5:135265849-135266488
  hyper

SEQ ID NO: 332505 - DNA, 962 bp, Homo sapiens
  chr5:135528270-135529232
  hyper
cgcgacccggcgcctccatggcgcgcccctcccgccctgccgcgcccaactgaccgagagtcggtgccttggggccggcggggactgcaaagaccccgggacgcgtccgctcactcgcctccgcgctcagctgctttccccgccggctggcggaccccagttctcggagctggacagttctgtgcccgcgcccctcgggctcactgtttctctccgtcgccaccaggacagaggtcccagtcactgactcgcctttcggctttacaacagcccgctcagctcggaccctcagctccagtgagctccaggtgctgggcgcctctgggctgcggcggcggggagaggcactcagcaagtgcagccgcagcccggggtctctgctgagcgcccggtggcagagcgcacggagggcgggtggccagggagtcctccgcgtcctccggcgccgccgccaccgcagcgtctcggaacagtcctgcaggctctggtccctgtcgagacgcccagtgttcagcgagcttgtccccactccctccggctgctgcgctcctgttttgagcaggagactgagctttctggcggctctgagcgcgctcgtgtcccgggcgggggttcgggggaggggcgggactggcggcggctgcccgggggagcggctgcgaaccaatgagggcaagagaggacgcggctgcgactgcccccagcccggcctcacatcactcagggacagagggacagagacagggacagagagagagagagaaagagagaaaagcacagggtcacaggaagactgacgggcaaagacacagttacagacctatgaacagagccacacgccaaacagggacaaaccgttgaggtaagcaaaccaactcagagacaaagctcagctgagcgtgcacacctgcgttcattatcctccttgacaggctccctccaggcatggcctggtttgttcc

SEQ ID NO: 332506 - DNA, 1147 bp, Homo sapiens
  chr5:136833998-136835145
  hyper
cgcttcaggggtcccctccgagaggctccgcgccccccagggccgggtggcgccggtactcacgtctcgaaagcggttccagtacttgtcccggtcgtactgggagacggtgctcagccactggtcattgtctaggaaattgccgtggttggggcccgcgcctccggcgagcgcgtccaggtgccggctctcgacttggaggaagcaccacgccgcggcggccgccgccaacaccgcgatcgccggcatctgcggggcagggcgcgcagggcgatgagcgaagagggcgggcggccgcgagccccgggcacccaggcgtcccagcgccccagcccggaggcggggaccccgcggcgggcacgggcagcgctcgcgcacctggggcgcctgtcgcgcctctagacccagggacccctctcacgaatgggggactcatctacgaacgaggaggctgcgtcacgaatccgaggctgccgtccaactacaggggacccgtctcgtctattctccgagtgccccacagatgccgccctcctatcaggggcttggtacccctccccagaagcggggagcccgggtccgcacgccgcactcccacagacggtgcggtgcacacggctttggggcaggagaggggagaacagggctccagcagcacccgagctccggcaagcggggtgggggctgccagcagctgggggtccccggcgacagctaagggaaaggtctcccttgagcgccctgaggtctcgggggtaagaaaggcgcgcggaggtaaccccaggccctgaccctgccagccccctaggcggccgcggggaggtcccaactactccaagttggggcgcggggttcctctgggcacgtaccttgggggccggcccgggtcccctagtccgagttgctcgagctcccgcggcacggtcgccgggaaggctgatcgccggctcgcgcccctgcgctcctgccacacgccgccgccgagcgtctggccgctttgtgagcccgcagcgatgtgctctgctcgctcgctggctcgggcgcggcgtccgcgggcggaggaggccgagcgcgcgagccaaggctctggcgccccctggtggccgcgcgctgcctgcccgacagcccggccgccccagcccggaac

SEQ ID NO: 332507 - DNA, 248 bp, Homo sapiens
  chr5:137474821-137475069
  hyper
cgagggggcggtagagcgggtggtgggggctcgaggggacggtggctggtgggcaaccacacaccattacagcggcgggtgagcggcctcggccagctgcctctgtgaagcgaccctgtcccgcagggacctctctgtgcatagggtcaggctaattgaaaagcagggcctctaggtccgcggggactttccgggttgcacctgcaaattctgaatttgaccctctctaagtactcacctcagcggcc

SEQ ID NO: 332508 - DNA, 236 bp, Homo sapiens
  chr5:138923041-138923277
  hyper
gatcctggattgcacgtcagtaggcgggctgcagaggaagggcgctgttctggttggtcctggccttaccccgccggagggcgccagctgccccggcgacgacacgggggaccggacggagcctcgggccgccagggaggggcctggctgcagaggcagctttctcactagcgactcgggcctctcaaaaccagcctttaggcatttaaaaagtgatacggttcacgccggtcttc

SEQ ID NO: 332509 - DNA, 496 bp, Homo sapiens
  chr5:139047738-139048234
  hyper
cgcctcccagacctctggggccatgaatcatttatgaggcaaaaatgaaaccaattaaggacaaactttgaaagcctctaattgctgcgcctggtggcaccgtggaatgaggggaggccagccttctcggtgcggaatctccttggcccaggccttcccaggctgcccgtcccgccgcggctcagggcgcctcccggctccctgccgcctcccagccggacgcggacgtgcctgcgcggctctggcggccgcgtctgccgccccggcgcccgcccgggtcccaggccgactaattaggcccggctacctcccgcgccgcccactgcccgctccaggcccgctgcccgctccaggcccgaggtgatggcggctgttcctgccgttctggggcctgtgccccagagctggccgcgtttctcggggcgggagccagctctgctcgcctggcttaacccagacgagcccaggacgccctatccctgaaccccatcgtggc

SEQ ID NO: 332510 - DNA, 469 bp, Homo sapiens
  chr5:139088846-139089315
  hyper
cggcggggcctcctcttcccctccccggggaggcaggtggagctgcgtcctcatctttgttcccatctggagcgcgtttggcgcggcgtggcgggggcggggctgcgcccccgcggtgcccggagagactggcccgcccgcttatctgatctgcggctaattgaaactccctgctcgcgaaggtcagctcggtcccctgacagctgccgagccgagccgggccggatggaaaacccgggctgtgcagggcccggcggggcgctgaggggaggggttgtggggggctgcctctgcggcaaagtagacaaaggcggcccctccctccctgtgcgcgctgctgggggtcgccagaggtagcggccttcgccctcaccctgcagggtgttccagccggggtcacatggcctaaggctacagaggaggggggcgcccttaatccctacgtgcccgcccaccccgctcccacgcc

SEQ ID NO: 332511 - DNA, 332 bp, Homo sapiens
  chr5:139135589-139135921
  hyper
cgctagtgtccccgcggctgccgtccgccctcccgcgccccgccaggtgagcgcagcccccacccccagtcacgctgctctgggctgagcctcggtaatttccgagtcggcggcggctttgtgtgcaccggccgcggtctgggggcggggagggaagggagggttatttctcccccctcttcctttttattgggtcattaacaacggctcggactgccgctgcgccccccctttcatgtctgccgcgcctcccgccattatctgcctccgccgcgcggcgtaattcgatgccaatcaggttggggcgcagaggcagccggatcaaagccggg

SEQ ID NO: 332512 - DNA, 307 bp, Homo sapiens
  chr5:139175997-139176304
  hyper
cggcagccaccttcacgaggctgcagctttgaggatttatttctgtttccagtttcccaactttgacagccctgcttggcggccaggcctccccggctctgcagctagagcgggggctcgcacgggggcgtggcagtcagggctgaggaggcacataatggccgaggcggcagcgggagggaggggtcccaggagcgggctgctggggctgggtgcagagggagtccagactggggacaaccctgcccagcgggccccctcggaggaggaggtattcagctgttcctagaggatgcagggactcccc

SEQ ID NO: 332513 - DNA, 739 bp, Homo sapiens; identical to SEQ ID NO: 231447
  chr5:139227517-139228256
  hyper

SEQ ID NO: 332514 - DNA, 601 bp, Homo sapiens
  chr5:139487921-139488522
  hyper
cgcaccctccctcttggagacccaggcggtgcagcaacgttctctcccaccccccgcagcgagaaacgaatgaaccccctcctactttcaaaagagaacaaaataacacgccccttaagaaaagaggcgatcctacctccgcaggcgctggagaccaccagtgatgcgtttgcttagcaatccctgagccccatttcccctggccgccttcgccctggggcctgggactgtgcgctagacgtggctgacactccctgcacggcaaccctggaaggagggagaggaaggagagttctataacccaggcttcactgccaacccctcctctgttcggttccccccaccccactaccaccaaatgcatacacccgcccaggatgcgttgtaaaaacaaaacaaaaccaggaaaaaaaaaaaaaaaacctttggtgctgacatcgcagatgaagccgggcccaaagatgggtggcccgaacaaggcatttttactgccccacagcgctgggtcagctccacagctcctctgcctttgtccgagggcaaaaggaacggatgtgaagctgaggggtcttctctgtgagcggcggtgggccccggaggc

SEQ ID NO: 332515 - DNA, 590 bp, Homo sapiens
  chr5:139525386-139525976
  hyper
cgtctctccccatgccttcaaaggcggcctgccttcccagttcccagcctcccgccagattcttgcgtgacctcgggcggcacccagtgctgctgtggacagctcattccgccgcggcggcggctgcggctgcggcggctacaacggctcccggcgtgtccccggcgccgccagggggcgaatggggtgcccgccggctcctcggactccgggcgcgccggcactgcgctccggagaggcccggccagggaagaagcaacttccctccgccgccgcagaccagccgggcagagacttccagccccaccctcaagccctctcggtggctctgtgcgcccaggcctaggggtggggggccgtaggtgctgcgcgcccgcacaggtggtcaggccgtcagcatgcctggctcgtcgcgcacagaacactgcccaggggttcacccagctcccctccctcccctccgctgccctcctggcagctccagctctgctctcgcggctttccaggttttggggtgggtgattgagtaggccgcacctgggacactgtgactggaggacgccggaatttaaggaggggacgagggagac

SEQ ID NO: 332516 - DNA, 276 bp, Homo sapiens
  chr5:139554306-139554582
  hyper
cgctcaggtacagctcgggaagtaagcccccaaccctagttgggtctggaccaacaagacacgaggaggcagcagcccacagccgacccctcatgccacgcactgagcagggttccgcatggacgctggtcttgcctcccaggcgcctgaactagcggagttggggtatcgggtggagtctcggagaaccaatccaatctgagggggacgcctgtgggagtcctaagtatccagcgcagctgggaggcccacgttgggaagtcggagaccgacccc

SEQ ID NO: 332517 - DNA, 245 bp, Homo sapiens
  chr5:139742899-139743144
  hyper
cgccatggttccctcgccggcagagacaagagcagccgctagggggcagggcgccacgagctctggaccgagtcgcagactggttggagatcctcagccaacctggggttcccctcctcctcaggcttccctcgcaacagcgggagatcagaggtcccgccgtcccgcgcctgacctcggctgaggacaggcaccgccatgggccacacgcacacagcccggagttgcagcggaccggcaggtga

SEQ ID NO: 332518 - DNA, 801 bp, Homo sapiens
  chr5:140011830-140012631
  hyper
cgccgccagtgcggcgcacacgcctgtgggcgtctccattcctgtgttgcgcagcgctagattctggatggccgggaacttgtggggacagagagccgccatcagtccgcgttcgcccagtccaggattgtcagacaggtctaggctggtaagggccgggaaggcgcgaacctgttcgcaggaaaaggcaggcgagtgtgcttgggcaatgctcagtaccttgaggcctggcttgagccactgctgcagctcggcgagccaagaacgccctgtcgcccacgacacgttgcgtaggcgcaagctggaaagtgcaagtcctgtggcttccagaggcagcggaggcatggtgccggttatctttaggtcctcgagcgtcagttccttgaggcgggagtacgctagcacacgcagggcgcctaccagtagctgagcaggaacctgtgcggctcccactgtgagccgccgcacgcggagagccttgaccgtgtcagcatactgccgcgggtcggcgtccgcatcgacgcgctttagaaacggctctaggttgagaccgccggcatggatctccacctctactgcagacacacactggaaggcttcggaccagtcgggctgaggttcggagaagttgcagacgcagcggaaatcttcatcgtccagctcacaaggttctggcgtggtcgcagagacgtgcaccagcggcagcagcagcagcaacaagcaggacgcgcgctcctggggagagagcagaggtctaggaggccccatccaacccctgtggctcccgagtggcacgcgttc

SEQ ID NO: 332519 - DNA, 1064 bp, Homo sapiens
  chr5:140305692-140306756
  hyper
gtgcaggacagacttcaacccgcagcaggatccagcgcggaaagctctgcagcaggatccagcgcggaaagccccccgcagcacttctttcggggggctcctgtttccttaagcctagaaggtgtggtcgctcacgttcaccgtcccgcctctcgccgcctccgctcggcagctccacgctgagtcccgccctctccgccggagaggtgcgccggggtcagagcgccgggacccgacgcgcggctcccaaagggcggcaggaagagcccagctgggctcagccacagttatcagcaatctgcgggcagaggatgtggaggttaagatctgggcagcctcagggcgttgtcctagaaaacaccgtttaaggagagaagtgttagtgtctcggggcgtctcccaggctccgccctgcgcccgcagccagcgtggtggtcgagaccccagcccgctgctactggagacagcacctctcgcgcccgggcgggcggcctcgtctctgcacccctaggcggcgctgcgctcctcaacacccggccggctccgctttcccagacggctgcccagcctccagcctagcaagcccggctcccagctggccagccccggcaatgccggcgttcgggaggcgcaacgtcggcggtcgctgagtatccagcccgcagcagtgacggccggcaggagcgtgctcttccccgcggctcgtgctctccaggagtccggagcatggtcctgggtcaccgttggtgtagcgtgttggtggaacgtggacgcctagagggaggatggtgggctgtggggtggcagttttatgtttgtgggtttcctgcggcgctgcagcgggacagctcgagtactcagtgccggaggagacggagcggggcgtagccgtaggcaatctctccgcggacttgaggctgccagcggccgctatgtcctcgcggaactttcgcttcctttccagccaccgcgagctctacttcggggtggatctacccagcggcaatttggtggtcagagagccggcggaccgcgaacagctgtgcagggccaaagctgcctgc

SEQ ID NO: 332520 - DNA, 357 bp, Homo sapiens; identical to SEQ ID NO: 231464
  chr5:140345951-140346308
  hyper

SEQ ID NO: 332521 - DNA, 324 bp, Homo sapiens
  chr5:140419818-140420142
  hyper
cgcgctgctcgccttccacaacaccttcctcagcttcgtctgtatttgaagagcttagtaaattaatttcccaggggcagagaagggaggaagagggagtgtctgagggctgaaaaatgcagtcgactcgccctctgctggttaaagatccgaatttgtcgccgccaaaacaacggggaatgagaaagcaatccatatggtacggaaaaattacaacaaaaactcggcttaatttaacccacctgtgaaccttaactgcctactgttcctctttagcgctgcttacttccccagcactgagatttaattagattgattctaaac

SEQ ID NO: 332522 - DNA, 31 bp, Homo sapiens; identical to SEQ ID NO: 231468
  chr5:140593428-140593459
  hyper

SEQ ID NO: 332523 - DNA, 320 bp, Homo sapiens; identical to SEQ ID NO: 231471
  chr5:140797158-140797478
  hyper

SEQ ID NO: 332524 - DNA, 601 bp, Homo sapiens; identical to SEQ ID NO: 231472
  chr5:140800537-140801138
  hyper

SEQ ID NO: 332525 - DNA, 1254 bp, Homo sapiens
  chr5:140855386-140856640
  hyper
cgctagcgcgtgtcctgctcagagagcccggcgctagctcattcttcgtgcagttattggctgggactctgtgtgccgctgtcggccaatgaagacgctggagatcgggcccctgcccgtcccctttctgcgccccgggatgaggcagagactgaacagccggcgagcaaatcaacggcatccagaaagccatgtcggactcggcgcccagcgcccaagcgctaacccgctgaaagtttctcagcgaaatctcagggacgatctggaccccgctgagaggaactgcttttgagtgagatggtcccagaggcctggaggagcggactggtaagcaccgggagggtagtgggagttttgcttctgcttggtgccttgaacaaggcttccacggtcattcactatgagatcccggaggaaagagagaagggtttcgctgtgggcaacgtggtcgcgaaccttggtttggatctcggtagcctctcagcccgcaggttccgggtggtgtctggagctagccgaagattctttgaggtgaaccgggagaccggagagatgtttgtgaacgaccgtctggatcgagaggagctgtgtgggacactgccctcttgcactgtaactctggagttggtagtggagaacccgctggagctgttcagcgtggaagtggtgatccaggacatcaacgacaacaatcctgctttccctacccaggaaatgaaattggagattagcgaggccgtggctccggggacgcgctttccgctcgagagcgcgcacgatcccgatgtgggaagcaactctttacaaacctatgagctgagccgaaatgaatactttgcgcttcgcgtgcagacgcgggaggacagcaccaagtacgcggagctggtgttggagcgcgccctggaccgagaacgggagcctagtctccagttagtgctgacggcgttggacggagggaccccagctctctccgccagcctgcctattcacatcaaggtgctggacgcgaatgacaatgcgcctgtcttcaaccagtccttgtaccgggcgcgcgtcctggaggatgcaccctccggcacgcgcgtggtacaagtccttgcaacggatctggatgaaggccccaacggtgaaattatttactccttcggcagccacaaccgcgccggcgtgcggcaactattcgccttagaccttgtaaccgggatgctgacaatcaagggtcggctggacttcgaggacaccaaactccatgag

SEQ ID NO: 332526 - DNA, 522 bp, Homo sapiens
  chr5:141262787-141263309
  hyper
gcccccggggacccggtggccgccgctgaccccgtggcatgcggctctcaaaggccccattcatctctgggggctgaaggcgccattgtccccagcggggggtggtgtggggagtgaaggggtctggactcagaaggaaggaatgcgtctggagaagttgcccccggggctccagtctcaaggtccccaccagatctccatcgggaccctttcacgaccccgagccctttccccaggagctcccagcaaccttcgcgcttctccggagggtggggtctgccgcggcgcgggggcagcctcaccccacctcactgctggactccggagaaccatttctgggaccgggagctgtccagcgcctcgggtcctgacggaccgctgattcgcctaggtgccatcggacaagcgggtgctcagagccagctctggtggctcgggagctttcccccaaccaggctaagaccactaaaccacgcctggcccggatgagcttggatgcagctccgaacgtggggatccatc

SEQ ID NO: 332527 - DNA, 399 bp, Homo sapiens
  chr5:141931151-141931550
  hyper
cgcagctcattgcagccccgaggaaatcaccgggggagggctcgggagtgcggcgcggcagccccataatttccagggcccttctcctacactgacacgtaattgtcagattgttttatgagagcagcttcctgcccgcttcctgcctggcttccaaatgtgctcattcccgaggaagcctcacttctccttctcgcccttaatcgctcctttcctgcccgccccagcccccaggctgggcgatttcctaaatcactcggaattggcttccagcgccggcgccccgggtgggctcccggagcgcgcgggcctgtgacccggaggtcagagatgcctccgtcctgtttgatgtcttgccctgggggccttccctcgcccaccccctttcccctcccctcc

SEQ ID NO: 332528 - DNA, 1481 bp, Homo sapiens
  chr5:142781722-142783203
  hyper
cgtttatctgaggcgataacgatctctaaacacgaggtatcgaatggagcccaatgaatttccatgccgcttttttgacagctgccttcaaacccgaaaccaaaacaatatttcctaaaacgaaaacgctccctcaagcgacattatcccccagtttaagttgcaaataacccagccacattaattggccctaatgaaccatgccagagggtcttaagtggtattacaaggttgcaattatcaagtctgcaaccccaaacgtcaaactagcacttgtaaaaatcgcagcacaaaaccattacggttacagggggtctttttctaaaaggggccacttagaaacctcaggcgcgaattaacaacaaacgctaaagagcaagcccttgcggggcgggggtggagaagagaaaaaagtgcgaggttaaaagagaagtacgtccagacctgttgagttctctctccgacacgcccacttctaacagataacgccggccccggccgcagtctccaagttgcgggctgtcagccccccgcgtgtgcaccctcacgcgccccgcacgccctcctcaagccaggcgccgccggggcctccccggagcccgggctcgcgctcgggcgcgccggggtggcgtgcaaatattcgggcgagtaaaattcagacgcggcttagcgttcaccacgaaaacgggtgtcgggcgacccccttggagggaaaggggacactagggggagaaaagaggccaggattcccgcgaggaatgagaggctcgaagcccccggcagttcgacagggctccgctcgccgtccgaggtcaggttcctccccctcggcccggccaggggacgcctgcggagggagaggaagaggccagcgctgtcacccgcgcgctgccctttcgtcaccgtcgcccggcccttgccagccccccacccccactccccgaggctaataaaagtttgtaggctcccgcggcggcccccgagttgtctccggtcccagcggcacctcgggggagcgagcgcgccccggccccctcccgcctcgcttcttacctctggcagaggagccgctcgcccgccaccgtccgcagttcccgccgcagccgagataaacaacttagcttgtgaacgcagaaggagcaggagggaaatatattttttttttctaaaaaaaggaagtaaacagccgcccctttctccatgggtggggggagagcccctatttaagaaagtctcccattgcccagctgacaagccagccctccgccccgcgccgggctccgcgggtcgaggttccgggcgcgcgtgccccgtcccggtcccagctgcttcggccgctccggctgcggcgtctccttccacccacagaatccgtccccgacgggcaggcggtgactcgggctcccgtcacagacacgagctcgcaaaatggaggaggcggcggcggagggaagagagcgcggacacgcgaaagggcagcc

SEQ ID NO: 332529 - DNA, 1697 bp, Homo sapiens
  chr5:142783607-142785304
  hyper
gctacctccttcccgcccccgcccagctccgcggctccagacccactcgggagctcgctctgccccttggcggcaagcgccgccagtgcccctgcgggtgacagcgggcgggccacaagagccggggcgcctcccgcggctgagctgcgtgagtggcccgcgccgccgccgccgggccgagttgcgtgaagtgtgtcacttcgaaaggggctacggggttgcacggaaacggtgccgcagcgtctcggccgcgctcggggccgggcggcctgacacgccctctggggaggcttcagggaagggacgggatagcgggggtcggcgcatacgtactttgggcccggggggagtcgcgtgccggcaggtcccccaccaccgcatcatctgggcggccgggtcttcagctgccgccgccgcgctctcgcactgggagagaagttgcaaagcagaacccaccctcccccgcgccccgaccgtcccccaccctcttccccgagtctgcgaggcggcggcggcggcagaaggaggcgccgcctgccaagttcaacccccacccctcccgcccaatgtgctcacactcgaaggaagttgcacgccaaatgcaaaacctccagcgagctggatttctttgcactttttttttattattatgattaaggaaagcagggggcggcaggcttaaaagcaagttgcaggcgaaatagtaagttgctggcgaaatatagccccccttccgaaactcctgacctcttcttccaccccggccagggcccgcgtccaagttcccggtgcaggccccacccccgaatcttgacatttgctgccctcgactctgtgcgttgctcaccctatcacgttcataggacccctgcccctacaaataaaacaaaatacaggcagctttaaaatgccagcgttcaactccctacagatgttcctgttaggagcttccccctcagtccaaggggaagggaactcgtggtccgtcctgagaaaggagagggccgtggggcgaggggtgcccgtgcgggaagcccccgccccagctcccttccccagctcgccgcgtcgggaaggcttggacgatgccgggaccgagcctcctaccttgtgcggcacagattatgatttttgtgactctgggaaaggttgtgctgtgtgggtttagggtttggggaggtaacttttgcgcccccacaggtgacatcgcttgccagctcctgacacgggcgggggctgccgcagctccacctaatcctgctcgggcgctcggccacagccactctctcacctcccgccgcgctcagactgacggcggctccccctgctctgacatcttgaagacgattggggaagcgcgtcccggaagccgcccgccgccatcttggtagggtacagtgtcgccagcccgtccccgcggccaccatcttggcaaaggttcgcgatcgcgggtagcctaagccgtccttccttggttctcaagggtaaacggttccctgtgcattgtctgatgtgaaaggaaagaagtaggctttcagcaagcctcttgtccggagacgatctacgggggccgcctccagaggattctggagccgccatcttggcaaaggaagagatactcgccacctcggaaaagaagagggaaccaaccgtatgccaacgtagaaccctcagccagaagaatttttatgaagggc

SEQ ID NO: 332530 - DNA, 961 bp, Homo sapiens
  chr5:145214426-145215387
  hyper
ggaaagctccacacgtcggtcatctgcaactccacggagctcacgagctgggattcccggaggctcttcctaaaaggaaagcctcttctttcagctggggcaggtgtgaacgtgatgccaagcacggccccttttcccgctccctgtaaagggagtcttcgaggaaatccctctcgacccacacatccctgaagcaaagcccgcagctggaaagagacactggcggtgccagcttccgcgtggatgaaggagaggagagaggggcaagcagcggaggcagcgcgggatacggaaggtggaagcggggcggtacctttcggagaaagctggcgaccacctgctcgaaggggtacttgtacacctggtgcacatccaccgagacccccatccccgcgcgccgcgggccccgcgcaccggccacgcctccgcgagctcagagctgcccagggctccgcagaggcccggaggcgcccacactcggacagccacatgggcgtggcctttttcctccgcttttcaaactttcgaaactttattggccactcggagaaacgcgcagtcggccacgcccacgcccctactgccagagtccggggcctggggttacagagcgcgggaggcgctggagcgctcccagagcacccggggccccgcggtctccacgctggcggcgccagagcggccctggtgccctcccgcggccgcgcctgccgagaaaagcttctctgcctgggagccatcacgccccgccccaggaaacctggaccttgggcttatgcgtttatggtatcaccgcctggagtcacagaataagccgtggttggcagcacgggaaaaaagtattaataaggaaggcctggtgtgacaaaggccagcattactcatgccaccaggcagctgcctctgaggcttgggtttgggcctcgtgtaaggtaaagattgcctcgggaataagaaccgc

SEQ ID NO: 332531 - DNA, 112 bp, Homo sapiens
  chr5:145316100-145316212
  hyper
cgatcccttgaaatgagtaagactgagtggttaaagttttcaaagcggttggcagcagcggcgcttggaggaaaggaagccggttggagggcgcagcgcacccctgctgcgc

SEQ ID NO: 332532 - DNA, 247 bp, Homo sapiens; identical to SEQ ID NO: 231496
  chr5:145713642-145713889
  hyper

SEQ ID NO: 332533 - DNA, 740 bp, Homo sapiens
  chr5:145719578-145720318
  hyper
cggcgcatcaagctgggggtgacccaggcggacgtgggcgcggctctggctaatctcaagatccccggcgtgggctcgctgagccaaagcaccatctgcaggttcgagtctctcactctctcgcacaacaacatgatcgctctcaagccggtgctccaggcctggttggaggaggccgaggccgcctaccgagagaagaacagcaagccagagctcttcaacggcagcgaacggaagcgcaaacgcacgtccatcgcggcgccggagaagcgttcactcgaggcctatttcgctatccagccacgtccttcatctgagaagatcgcggccatcgctgagaaactggaccttaaaaagaacgtggtgagagtctggttctgcaaccagagacagaaacagaaacgaatgaagtattcggctgtccactgattgcggcagggcgcagcgtcgggagccgggagagcctagtgctcatccctcccgggttcgggggatggttatcgggaactccaaggcgtttcctaggcaggttaggctctctcctccgaagccacagactttccccctttgtcccgcctggttgcctccggccttctctctctttcctttctattcccaccaaaaaaattttggcgctgggaaaatattgcagaagggcgggcctgagtgtacttgtgctgtccgtggtgctgaaatttgccctcgcgcaggggccgcacgacttcagagcaggagcccca

SEQ ID NO: 332534 - DNA, 950 bp, Homo sapiens
  chr5:146257245-146258195
  hyper
cgaacatctcggggaaggggtcatctgccttcctggggtcatctttctgggcgagagccccaccctgaaaaagcctaatccctgagggccattttaactcccgtgggcgccgggtccacctgctgctgaacgccgagctcgcctcgcggagcccggatggatgcgaggtgcactggggctgccggggccagccgagcccccgccccagccctagggcccggaggagtctccgccactacgcgcccagctgcccaggaagcacagtgatccgcaacttgcgcccggccccaacggcggaatgcggcggggctggcgttaccttcggtcgcatagctgtggtcgcgcaggaaactgttgttgattttgcgggtatcaatgtcctcctccattgacagcaggcttacttgcgtgggaaccagaagccggcagacaagtatccatgatccctccccgcagccagtctcacaggagaggggggcaggggagccagtgggactgcaccatggtccgagcctgaggaggagacggggaggcggagagaaaaaaaataaaaacccggcaatggagctgtcacctcctccactcgggttctgcgaggctgcggcggctcctcccgcgcggtgcgctcactccagctccagttcccagcgaggatgctgcgcctgcctccgctgcctccgggtgccaagatacgccgtgccccgaggggtctggtcccgcccgcccgccccggaggcgctcacaagcgggtctggggagatgcccaacaggttcccctccttggcagccgctccaaaatgcaaaaaagatccctcctccccctgggagagcgggcagccgcgacaaaatggtgcctttctggacccgagctgcagtggcgagatggcagggacaggattcaggcttgcctggccggaatgagggtgctggtcccacgggagggcggctcc

SEQ ID NO: 332535 - DNA, 721 bp, Homo sapiens
  chr5:146888840-146889561
  hyper
gatgctgcaagtggcgacacgcgcgaatccagggtctgggctaggaagtcgcgctacgctcagtggaggatgaccctttcctcctccttgtcccccagccccgtgcaaagtgagctggagaaagttgtgcccgggccatggcggccagggctggagaaaggaacgaaggcaaggagggaagtgacccggggcccccttaccttgtccttggggccgaggttctgcaacacctctttgccggtggcgctccggatctctaccccggcgggggcgggggaggcgggcgcgggctccctgctctcttcccggccttggcccctgcgcggggtgtccccctcgatcccgggccgactccccgatcctcggtcgctgccctggccgctccgaggagtcttcgcgccccgctgccccacgctgagggcatcgaaatccagcgtcttgctctcgaaggcgccctccacgttgcagaacatgccgccgtatttctgccgcgggacctggtccgtggtgcccggcctggccaggtacacgggcagatcgtcttcgtgggagctgtcccagcccctccggcccgaggccatggttcaagcacgaaagcggcccgcgggtttttcttccccagaggcggaaagggcagccgccggcagcgtgcgccgagccacagtgactgtggcgggaggaggcgcctgagccttcgcgccagaggcggcagtgctgctcc

SEQ ID NO: 332536 - DNA, 507 bp, Homo sapiens
  chr5:148033538-148034045
  hyper
cgtcgtgctgccccgcccccgccgcgtccccaccggcacccgtgggctcctggggtcccgacccccggcgcacttgccgcacatacccgctgccagaggcgagggagcgaggtgccctggcagattcgagcggccacccccagccgctgagccgagcttctgctgccgccgctgccgctgcgctcccagccgctgcctgcgccctccctgccgccccctcgggtgcgggctccagcccccgcgctggggagccggcgagcgtgaggcgcgggccaggggctgcgggcgcaggaccccagccccggatcacctgggctcgccgcgcatcgtccttctccccaaccgagccggactccacgggctcaacagcccccagccccggtggtccccgctgccctgcccgctgccgcccccactgggcgccagggacagcgggggtgccgctctgccggcagggcgcacaggggagtgggcacagaggcgggctggagcgatctcacccgttcc

SEQ ID NO: 332537 - DNA, 393 bp, Homo sapiens
  chr5:148206075-148206468
  hyper
cgccccttcgcggctgccggcgtgccattggccgaaagttcccgtacgtcacggcgagggcagttcccctaaagtcctgtgcacataacgggcagaacgcactgcgaagcggcttcttcagagcacgggctggaactggcaggcaccgcgagcccctagcacccgacaagctgagtgtgcaggacgagtccccaccacacccacaccacagccgctgaatgaggcttccaggcgtccgctcgcggcccgcagagccccgccgtgggtccgcccgctgaggcgcccccagccagtgcgctcacctgccagactgcgcgccatggggcaacccgggaacggcagcgccttcttgctggcacccaatggaagccatgcgccggaccacgacgtcac

SEQ ID NO: 332538 - DNA, 442 bp, Homo sapiens
  chr5:148520933-148521375
  hyper
cgtccatctcacaaggcctcgtccatctcccatcacaccctagggcccaggcagaagcccggcggggcggggcctcggacacgcgccggtgcgtccagcaggtggcagcagcgagcggccgcgccccctgcgctgccaacccgcgagcccgcatcatggatgtcgagctcccctatttcgcattgctagccctggaattcgagaccccagacgaggaccaggattcatgaaatcagtcgcaggggccggggcaggggcctctggctcccgacactggccgagaggtgggttccggggcgggtcgctgctccttgaagccgggcggggacgcgctgcccccgccctgcctccctgtggtccacaccccctttgggctccggagccgctgggcaggaatagtccggggtgcgcgcgagcaggcgctgccaaccccacttctgcc

SEQ ID NO: 332539 - DNA, 1151 bp, Homo sapiens
  chr5:148650971-148652122
  hyper
cgcggcgaatggagaagacaagcccaaagccaggaaatgggtggcggctgcagggaagggggttttgattccctaggataaaaacgcgctccaacagtctccgcattccggcatggagccggctgaggggtgcggtggtaagaccccatcgctagcggagtgcaagcaaagccgcacacctcctgggtccgggctggggcaggccgcgcgggcgcgggaacgaacgcgtgcggacggggaaaagggtcctccaagcccaagtgggagcgccgcggagggcgagcgagcggcagggcgcggcggggcgtgtgcggcaccacgggacagcgggctgcggcccagggggcgaggcgtgctcgggtctattccgggagcggctctgaggggcgggcgcgggcgcgggcggggcgggggctgccggcgagcatcctgtctgggggaggggaccgcagagagcgccggccgctgggctggcctgagagcgcagcgcgccggccgctaccagccgcgccggagcccctgcgccctgcggcccgctccccggggaccgggccggcgccatggaccgaggccagggtaagaggggccgcgacgcccgcacttgttgcggcgccgggcgggaaagggagactggacgatctgaagccggagaggaggagggagagaggcgggcggtggggcgggggctgaggaacgctcggaggggactgggagacgcggcgcttatgcaaaggtgccttcggctgccgggacaacccggtgcgtgtcaacgcccgtgtcctggggccaactcgcctctcgtgtgtgaaatcagagttttcataggctaacgatttgtaacttcataaaagatccccctctagtttccggaggacagcgagctcctcccacctcattccactctaaaggggaaaacaaggtgtacaggttcaactcccgaaacacccgctgtgggcagcccctagggagaagctctaggggaccgaagtttgcagctgcctagggcattgcgagaaggaggagcgccgtgagcaggcgcgcgtgtgcatgcatgtgtgcgccagggagggaggaggcgggggtggttctatcccgcaccagctgtgtcctcggcccagcccttctctctggaccagcgacaaagttggact

SEQ ID NO: 332540 - DNA, 87 bp, Homo sapiens
  chr5:148724812-148724899
  hyper
cgggcacagctatgatctgctttctttgctgccgaccctgcgcccagcacggagactgtagttactactaggacctcgcctacccgc

SEQ ID NO: 332541 - DNA, 299 bp, Homo sapiens
  chr5:149381214-149381513
  hyper
cgtttttaaccttaaattgtcctgcctttttttgcattgctatactgctgcctcgagtctgataacaaacttgtactcaggcttagaacagggtaataaaacaaacaaaaccgtagggtgttgtcttcctgccctcagcccaaggtggctgtaatgagtgtttcctaacccgttttgcgcagggtgcttagtaccctatatgccattcattacagatgctctcctgcagttactgcccttctccacaaggctttcagccgcccagaagtcaattcagggcaaaaaagcgcagtccccac

SEQ ID NO: 332542 - DNA, 489 bp, Homo sapiens
  chr5:149569500-149569989
  hyper
cgcttgcccaaggtcacgcagaaagccgagggtttccgtcgcgaacccccctccccactcgctcagggctctccaatccgcagctctgcgtgcgggggcgcgcgcatccccccgccgtccgtccgtcagctgtctgtctgggtgtctatgcgggcgcagcagtgcacccttccccagcctcgggcgctgcgcagggacagacaaggcattcgcagcgccctgcccgcgctccacgcccgcagccgccagacggcagcgcctgcgtccgtgcccgccccagccggtgcgcgggagccgcgggggcaaaggcgcagtggccagcggaccatctctcgtgccctcgctctctgcgctccggggcagctgagccccggccacccgctctccaagatgaagaagctccagggagctcacctccgcaaggtagggcacgagggcgggggcgctgggggtgcacctggaggagggttggagagacccgcccccaac

SEQ ID NO: 332543 - DNA, 1041 bp, Homo sapiens
  chr5:149681827-149682868
  hyper
cgccagcctccccgggcccgtcggccacgaagctcggcttggcccagtcccaggacaggtagccgaagctgagcaggctgaccagggagaagccagtgagggtgtgcatcgccaagccggcccgcgcgtcccggcgcgccgggctcctggggcctcaccacctcgcgcgcccagggcgcaccaccggcccgccggctcggatgctgcgagggagttcagcgccccccggggacggtccagtgtctggtccgggactggctgccggacggctgggccggatctgctcggccgcagcggggcgctctggggaggtcaggcccgcgccgagctgcctcccgctgcctaagcgcaggccctgcgccgcctttgctccctcttccccagctcagcccggccagcctgagacgcggcgtggcagcttccaaaaagtgctctctaccatcctctgactcccctcttccttcttgccctggatttctcccgcctcctaatttctctctcctctgctttcccggcctctcgccccacccggagtccttaaaacagcccagctccctgcagggaggtgggcaggaccccagaggggaaggggagggaggcacaagttgggcgggtcgaggggacacggcgggagagaattcgaaaaagttgtaacatctgccgggccgggccgagccccaggtggaggggcgggacgcagagcagcggctccacctcccgggcgggaagccccggccctctcggcctgctggctccagcgcccgcccctgaccgggatggggaaaggagggagtggggctgcttggaattcgatggaacagctccagaatggctgggtcagacattcctcgatcatggagtcttagcctctctgagtgccagccctggaaggaaagcccatcatttcctagtccaaccgggtcattctacagatggagaaactgaggcccggagatgagcctcaacgcgtctaagtcacagaacaagtcagtggctatgtctctaaggctcaccgtggctgttggagtggcggctcccttc

SEQ ID NO: 332544 - DNA, 434 bp, Homo sapiens
  chr5:150004280-150004714
  hyper
cggggtcccggagcagcccgctaggcggtggcggtggcggcggcgaggagggggcgtcgggcgcggagcctgggcctggcgcggggcgggggtggcggggacctcggggcggggcgcgctgacggacgcggccaggtgtgccgaggcggcggcgcccgggagctcggggaccgtgcgcagcggctggaggtgagtgaggggcgctggcctggcaggggtgcgggcaccgcgcgagcctcgccccttcccacctgcgctattcccggcgccgcccaggaggaggtggcacatctgggctccagtcctcgcacgcggggtgaccttggccaagtcgcttctacactttgggcctcagtttccccatctgtaggtggggggctggaggggtatcgaggctttcgagcagctgaggagcgggaggacgccctgacgcc

SEQ ID NO: 332545 - DNA, 339 bp, Homo sapiens
  chr5:150536722-150537061
  hyper
cgaccggacgttcagctctctgcacgcaggcagccctcccccgacaccacacacaagccattttataagcagctggagggtccaacgctcttgctctcagtcttgggcctcagccacacccttctctgcgggtcctttgactggcgtccagctgaccccaaccccggaccttcaaagtctcttgagcccccccaaattaaggccggcaggaccagcccctggctcagctccggcgcccaggaccctcaaccagaccctctgcagcaacgggactccctcccctccccctagccagggcgccctccgcccgcgcctctccgccccgaccccagatttgct

SEQ ID NO: 332546 - DNA, 694 bp, Homo sapiens
  chr5:150603058-150603752
  hyper
cgagtctgtggaacactcttcgagcagccctgagattatcagcctttaacccccggggggaggaagccgaaggcccagagaggtcaagtcacttgtccatggccacacagcgaacagccccagaccgaaagcagagggcacctgccacagacacacgacatctccccacccgaggcagcgggaatcagctgcctttccctggcccgggtgccgtgtttgtaaactcggctgcttggtgcggctcgggccggggtaaagggcgcctcccagcagagcctccctcgtctctgagctggcctctccaggttctccgtccggtatcccgggccgaccagagagagcccggggcgccgagtcctctgcggcggagcgattccgcactcccctctcctctgaaagcaaacttctccgccggcgccctttacctttttcgggggtttgcagctgctcagcctgctgtgtctgcagcccatcctcctccgggggctcccggacgccgcttcccaactccggggcccccagaggagcctgcgatccgggccccgctgcccgctccgcgcccgccggctggggctgccggcgagaccctgaaactgaacctggaagcgctgtcttgagcctgagctggggcggccgcccgccgtaaatacccgaagagcggggcctcagtgtagcccgcagggccagcggcgcc

SEQ ID NO: 332547 - DNA, 331 bp, Homo sapiens
  chr5:151066267-151066598
  hyper
cgagggccatgctcttaaggggagccgtgatggagccgggaggagaggcgcatcctcagcagagcttccctcccttgcacacgagctgacggcgtgaacgggggtgtcggggttggtgcaactatagaagggaaaggctgggcgggggtcacacatacctcagtggcaggcaggcaggcggcaggcagagcgcgctctccgggcagtctgaaggaccgcgggaatgtggaggggtttagagacaggcaacaggaaaccactcagagctctgggctgggtctatctcccctccaccccgtggtccctcctcctcctgtctcctccttccccc

SEQ ID NO: 332548 - DNA, 705 bp, Homo sapiens
  chr5:151150205-151150910
  hyper
ggctccccagaggccgaggccggcgcccgtgctccttcagctcggcctctctcccccgacataggcgctccacatgcttcatttccaaaattctcagcaaaactccgcgggagaccctggtcacatgcctggaacgagaacaaaccggggcgtgtctgtgccggacggctgggaaccaaagctatttccatagaaatagggccggccagccttgagttgtagccccgccagtgcctgaaacgccaggaggaggggacgagttgccttttaaaggcgtagcgacgagaataagcccccacccgcggcaattcgaggctgaacaatagtggtgcagctcgggacgtggtgcgagggcccacactccactggagcacgcgcggaccaccgtgcctcagctgccacaaagggagcctcgccacacgcccgcggccgcctcgcagcgcccgccaagaagcgcctggcggaagggcgcactctcaggccttccaccggcgaccttccggcgggagcctgcgggcggcgcaggaacgaccctccttcctctgccccgcagcagtgctgagtaatggtgagagcagcaaggcccttggccgccgcacgtaagaaaaaagttgtaataaaaagaaaacaacccgggaaactttactagttggttcgccaggtacaaacctatgcggaaaaggcggggtacaggcctcggaggcc

SEQ ID NO: 332549 - DNA, 372 bp, Homo sapiens
  chr5:152870120-152870492
  hyper
cgagagagagcaagggagggagagagaggcaggctgcgaggggagaggagagggagtgggggagccagcgctccagctagcatgaggacgggcttcttttcccgtgctcagttaatctggctgtcagttggtgttaacgctgcagtttaagtgttcggattccaagggaaacagacaaacctcacgaaaggaaggaagcaagcaagcaaggaaggaactgcaggaggaaaagaacaggcagaacagcgagaagaataaagggaaagggggggaaacaccaaatctatgattggacctgggcttctttttcgccaatgcaaaaaggaatatgcagcacatttttgccttcttctgcaccggtttcctaggcgc

SEQ ID NO: 332550 - DNA, 728 bp, Homo sapiens
  chr5:153852463-153853191
  hyper
tgggcgtgggaggccgctggagtcaggcgtggggagagtgggggactatccagtgaccctctcaatgggcgccggctccgtctcggctcccgggttcagggactgcacgtttctgagaccgagtttagggctccaaggctctcttcccaaagagggtttggggccagcaggattgggttttctgaagaggcctggttatgccagacttggctttggcggccgctggcgggtctccctcagcaccccctcttctttccccggctataagaaagctagaccagggtgcgcattcttcccgtgcctaggatacttcacggtgctaaaaatagtcctgggagctgggacctgtgtatagccagaggtttgtgtgtgagcgaagttggagtcctgggttcgaatctagataagcttccctccgtgctgtggggcttagatcacctccctccctgagtctgtttctccatgcgcgccggaatttctaaacggactcccagaaagaaacggaaagaaagaaggtaaagaaaagaaaaacaaaacaacaagaaagaaactttgatttttctctctgctcctccccaagggccctggggcctcgggccgggtactgaggccgaggaaggggtgcgtcggacaggctcattaccgccaagtgttgccctagttaaatcgcgggcctgtttgatctggcggcgggtggcgagagggaaaaaagaaaaaagtaggggggc

SEQ ID NO: 332551 - DNA, 1624 bp, Homo sapiens
  chr5:153854949-153856573
  hyper
cggcgtcggggcggatcatatggagggacaagagagaaagagccagatagggaaatggagatagggctgaggttctaaattcgctccaaaagggtggaagagtgcgtctttgagcccttgggttcgacagtccctccttcttgcatgttgccgccaagggccgccctcggttgggctgggggtggatatatatatatttctctttctcttaatgtattaaaaaaaatcaaaggacattgcacgtgcgatccaagtgtgtggttgcagccgacgacctgccggcgctcagcagaagctccgcgggatgcgtagcaccagtcgccggagcccagagcctggcgttcgccgctgccttcctctcctcccggggcttcaggagtggctggcctggccaggtcctcggcgcgggcctcggctcactggtttaactccagcgcccagacttgctgcggccagccggtgcgtcctttaatcctcttctcgactgggcccagggcaggaggaaaaccttcgtgctgctgctgccaaaggacacacagaagaaaagaggcgggagagacaggttttaatttttctgctccgatcgcccggcatggggtaagatgaggaggaggggaaggtgtcgggagcagtaactgggagtctttaaataagtgacggatttctgtttgcgaaataggcaaacaggctcgtaaatttgcctttatgcgcggagttcctgggacccgggatgggctgggcagcttcgggaggtttggtaaggaaaatgttctgcgtctggtgaaactgacgcgcgttgatttggctttaggacacctaagggagatcccaggatattggaagggaggggtggaaatccacggttctcccgctctcgctgcaccccacacacttccgccagcctcccaacctggtttaaacatcagggcttggatgcaggcttggggccccctaagccggagctgggagcctcagatacggaggtaaaagagcggggagtcgagctggcctagcgtcctccttcccgctctttcagcaggaaccaagcggtgctacttgaaggaggcggcgacgcgtgggggccgggatccgcccaataacaacttctttcgaggcgccgcacctcgaaagaagccggcctgcaccatccccagtccggggcagccgtttagagactcgatgcctatttatctttccctcgtccctggatgagctttcgtcagtttaccacaggcccccgcaggttggataaaccaggtggggcgcttcagctggctccactccgctacggccttaagccccccaacctagagaaactgattggccagcctgaaaacccagcgctcagaagcccccagccccggacagccagaccgagtgccaggaagtgtcaccctaaccggagaggatcaagaaggccaagacgagactgcgctctccaaagctaaaagaagtggctcttatttacatgcaaagccactgaagtcgtcctcagaaccagtccatggggagaaccagaactggccctggactgagtagaagacccgatctgttttacctcacctccaccctggactcctcagataggtgcttttcctgccccgacccactctgggccctcagt

SEQ ID NO: 332552 - DNA, 397 bp, Homo sapiens; identical to SEQ ID NO: 231543
  chr5:153859604-153860001
  hyper

SEQ ID NO: 332553 - DNA, 617 bp, Homo sapiens
  chr5:153862052-153862669
  hyper
cgggcaatgcgaaggtccctcaagcctggacgttctgcagtggtggggtctcgctcttgccctagcccctctcctaccctcacccctatccgcgccccccggactggcaggcctctggaagcccaggccgcggcgcctaccgcaaaaccttctcccgccgcagtcccgtgaccttgacgccacgggcaatccccgcaccggaccccttatctaaatagggcagtaaatcaaggacctgtcagggcccgggtaattacaggaactccataaaaaggacccggccggccgcctgtttatattagcgcggtgtaaaatattctcgctgtcttggggaatcgcgtcgcgcagtaacgcgccataaatcagcccgcggaccatttaccccgcagcttgagcgcgcaaatcccttaaacatttctctgccatgtctgaagaggacctaggactttccaatctggcccagcctgctcccagggatgggggacagtcggggcagggaagagataggcacggagtagattgctcctgggagctccaaggttctgtttgcagacgggaaactagcccagagaggggaaggaactttcctaagggcacacggccgatgagtggcagac

SEQ ID NO: 332554 - DNA, 195 bp, Homo sapiens
  chr5:153900644-153900839
  hyper
gggcgctgagctcccggtatcctctaggtggcgcacaattctctggggaaaaggagaattccaggtgaactaattccacgggaagaagggttggtttgggaggggctaagccctgcctacgggctcctgtaggggaatcagctccccatccccctgctccctccagagcagcgcccagcattcaatcattcgctc

SEQ ID NO: 332555 - DNA, 1827 bp, Homo sapiens
  chr5:155107689-155109516
  hyper
cggcggcttcccctctaacgcgcgactgtgcagcctctccccgccgcccccacccgcggctcgccctcgctccctccctccagccccgccagccggagcgcgcacaccgggactccggcacgtgggcgcgcgggaggtggcggccgctgctgccgctgctgccgctgccggagcccgaacccaagccccagctggagccggagtcggagccggcgagatcgccctccatgctgcgggagctgcggccgccttccgctcagcctctggtcccaggcgagcctggcgagccggcgaagcaccggcggggaggaggactagaacaggaggaggggcacggcggattgaagcgagctgggctgtgagcaagggacacccacagcctggagaaacagccccgctctcttgcgcgctgtctgctccagccgctactgggggctctaagcagcgcgatgctgcttcgcttcttctaggcggcggccggcggaggctttccgcagccgcttggccggcgccggcccctattccgttggcaagtcccttgtctatcccggagggcgcacccggacgctcgagccggagcgagcgcgaagtccgaagtccgcccccagagccgccaacttccctgtgagcccctctccccgccgcagcctgcgccagacctgggagcgatgcgcccccacccgggcggcgcgccctctgccaactcgccacccatgggatcgactgccctcagctgcccggcttggagtgcgtagccttcgccgcgtggcccaggagaggagcgagacaccaaggcgtttcgcggactccgcgcgcaccagtcggcttggtggccctgcgggatagcgtttatacccaggggtgagtaggccgctaatggaggccccctttacccccagctagcggcttgcatggacggcaaagagacgggagaaagttgggtctccttgcgcttaatctggcattggcagaggaatgcaacactgtttcctccaactcgattgccgcgggggtttccccagttccctccatctctaagccaaggagggagtccccttccgcttcctaaggagaaaaggggctccctagagcagatcgctgacttcctcaccaacgtgccatttggggcttttcagccgcccgcgcgttaagctagctcccagcataagcgcttagagatccgcagccgcctgggcgcgctaagagatcgtgggcagacctagcccttagggcagcctaagcgcgcttcactaaagaaaaaagactgttggtatattaaagaagtgtgtgtgtgagagagaaagagacagagaaagagacagagagacatgggtgggggcaccaggaaaggtagcccgagtaggaggtgctagtgaaatttatcttttgctgacggatccagcctccggaatgcccgattgtcttgatccgcggtgcggtgcgggttttaggggcgcacaatacagggtgtccagacagagtccaacaggtggcctgcgcgggcatcctgtggctaggcgcgggggaggggaacggctccctccccgagccccgggctgcctctgctgcttctaggggtgcatctgaacatggataaggaaatgcgctccctgctctcaggccctatttggggtgagtgtgtgaggcatccaaatgcctcctgtcggaaaacagcggcctcattgtgtgcccgattgaggtttcaacttgcaggcaactgagaggccattcagctgggcagcacggagttggctggtcctcggacttgagccatggccttccccacgatccctggcggcagtatcccagctcctccggctgggcggc

SEQ ID NO: 332556 - DNA, 1322 bp, Homo sapiens
  chr5:157001782-157003104
  hyper
agtcctgagaaacacggacatcacccggcatcttagctggaaacatcgagtcagaccccttcgcttcacagaaggggaaactgaggaccaaagaaggcggccgtcgggttggcgtggaaagagagccctggtttccagtgccaccgcggacctcaacccgtggcgtggccttgggcaagtcctttcccttttgtgggcctcggtttccccatctgtgaaatgggtgcgtttgacttggccttcagtagggctcctgccagctcggggatccgaagtgtgtggctgcagatacccagcgagccatcccctagccaaggctaccacagtctgccgcgggcattttatgtcctaccccaccagtgtggcaggcaccgagcctggtcccaggaagccgctcccaggccacacgggcagggcgctcgggatgctcggcgttggcgagtgcagcgggcggtagagagaaagacagagagagaggcggagcggacacgagggaccgtgagaaaacggaggaggataagccccgagaacggcggaaagagaagccaaaagcagaaaaacagaggaaggagaaggcgagaagggaaggctagccagtgagcggaccggctgttttctggctgcgccgggtttccccgacctctgccacctcccagggcgcagaacgtgggaacaaagcccgggctcccaggctggggacggcgggggcgcaggccccgcggagttgcgggaggcgcaggggtcgcggtcccagcgctccggacccgcaaggctactcccaggtctccgggccacccagcctccatccccccgcgcctggccacttacttgtccatccaggctcccgcgccgcccgcggccggaggggctgcagggcaaacgccagcaagcagagccgggcggcgcctgcgccccctggcatggtggcggcggcccttagcgctcggcgctcacacgccctcagccatacctgcccactgcccggcggtggaggcgcgtctggaaccccccggctcgccccgcgcctccccacccggctcccagccctctgccgagacgctccgcctccagccccgcgggcctccgccaggggatggaggaggggaggctccagcccggagggggctggagggaggggccggggaggagctggcgagactcgggggagcggggctggctcaggtgagggagaccgcggggaagggagaatccgagccccccaggaggagggatttgtggtggacgcggcctgtagagggtcggggactcgggcttctaggagttaaactggacccctctccgcacagcggcccgtttactgt

SEQ ID NO: 332557 - DNA, 707 bp, Homo sapiens
  chr5:157098032-157098739
  hyper
cggtgtcaagaccccgcaggagatggcggattcattcaggaagcagccgctccgggaagccttagccaagggtcttccggaaagacaccagtcttgatcctggagcctcaatccccgctgacccagcactttggtttccatagcaattgtctcgtcgcagaaaggaatcgcctgtgctgggtcttcagacctcagctccatgccgctgagcagccccaccctggctcaacccgttacccgccccgccagcaggccggggtcactgcagtccccacgtcgaagcggaaaaggtctgctcagctcaccgcaccccacttcttccagacccgtccgtcttcacagcaacgcgccgggtctcaccacggcggatgccgagggacaatattaccgcgtccgtggccgccggactctgcacgcatgtccaacagcccccgtccccttccccgcagccaatatgtgtctcccaggcaacgcgccgcgctcggttcagggctccgcccagggactcactccgcgtcagcgcgcgcccacctaggtgggctggcaaccagccaccagtttccaactctttctccaacagggaagccgcaatgacacagccgactaggccctcggtcacctgtgaccagggatcctccacgatcggcgggaccgccgcccaggcgaccaccagttccagcgccacctcgggttcgaactaccagcgc

SEQ ID NO: 332558 - DNA, 204 bp, Homo sapiens
  chr5:157170412-157170616
  hyper
cgcttcctgccagctcaagctaggatgcgatcccgagctcattcccggggaacccagagtattaacaaacaccctaagtgataatgatacagacggggaaactgcgctggagcaggtcaagcagcagtcgacagcgttaacctgtcagctatgggaggaggcggtgcgaggcgcgggctggtcggagccgcgtaccacgccccc

SEQ ID NO: 332559 - DNA, 217 bp, Homo sapiens
  chr5:158478427-158478644
  hyper
cgctcccgcagccccccacccccccaccccgccgcccggcggctgacggctcccgctccacatgtgcgactcgtgtttcggctttcgctggcgacaaactggagccggggcctttccgcttaggaggaactcgctacgtgtcgctaacaacaacacaaacaccgccggcccggctcggtgctccgctgcccacagtgcgctcggcaccagggctgga

SEQ ID NO: 332560 - DNA, 222 bp, Homo sapiens; identical to SEQ ID NO: 222730
  chr5:158526150-158526372
  hyper

SEQ ID NO: 332561 - DNA, 629 bp, Homo sapiens
  chr5:158527374-158528003
  hyper
cggggcccgcgcatcgaggccccgccccttcatttgcataacgtcatctttccgcccaccgcagccaatcgcggcccgggagccggctcgctggcggcgccaggccacgctctctcattaacatcccgctcccggtggcgcaggggagccggccaaagttcctcgcaaagtggcgagcgaaggagcgctgagcactgacgtctgggctggggaggagcgggtccgagcgaggacggagaggggacagagggaaagggaggcgggtgtcttcctcaggaatttgagctggggatctgcatcctggccattgcagtcctttagcatcctcgccgcgccctgagcgcgctggaggctcgcaggctgcgccctcccagggctgatgccgcgtcctgctccgccgttctgggacgtcggggacaaaagtggaggagacgggagagcccgggcagaaaaagcaggacgcgcgtcccaggtgcccacctcttcgctttgaggcgggggcggtgggatggaatatgggtgcgcgaggtcggggctggtaactctcggaggggcacggcctccacgctgggagggatgaatggacgctgggccccggcaaatgaggcgctgtgggtccccaggaagtg

SEQ ID NO: 332562 - DNA, 1196 bp, Homo sapiens
  chr5:158634816-158636012
  hyper
cgcaaagacagggagtctactctgaatacaaaggccatctttcaacttaaggaacagagagaggaaataaaactgctacctctgccatcggccgctcagcctgggtcacgactgcagcaccgacagctcattcttttgggcatgattcaagattcagtaaaactgcacactccgtattttaaaaaataaaaagacacacagtcctctccttccctttcagactagtttcctctttactgcagactgcgacgcaaggccatccactaatctttgatgcctgctcactgcacaggccccttcctctctccccgcacctcctcccacaacgcctgcagatctcagatgcgtttgaactacagtaaccccaacccagctcgcggcaagcaggcagcgcagcagcagtagcagcagcaaccgggccgccgccgccgcggggctaagagattacgttcagcaaaaactcttccaggaaagaggctcgagagctcccctcctatctcgccaagggtgctgactctgtcgcgccacgccacgtaccaaaaggctcgcgaagaaaaacgcgggcgaagttcagcatccccgaacagaaagggaactcattccagaaagggggttcacgggtctgagggtccttgggtggggaaagcagtattggagggagaagacagaagggatggcaagacagaggaaaccacggggacaaaaaggaagggatgaggagccctcttactataaaagggactgacggacgggatgcagagcaatgggcccccctcgaaaaatggactggcaggcccttccgcacccccaaacaacctcgcaccacctgaaagcggggagcttgagtttggggctgcgtagatcaaagcagggtaagacgaagggaaagagggaggggagcttggaagcaaagtgaacaaagaggcaaaagaggcaaagttggaaatggaaacgagaaagggagctggaaaggggccgctctggaagggtcttgaaaaaggcctagaaatgggatgctggggaggcaaagggggacagccccgaggaagggcatctcaggaatgtaagggagcgctccaggccctgggaagaggaagggatgggagggcggggaggcagccgaggcccgggagctggaacagagggggctttgcgcggggcccaggaggggagagcagggtcggagggaggcgacc

SEQ ID NO: 332563 - DNA, 584 bp, Homo sapiens
  chr5:159343216-159343800
  hyper
ggaagagtgactagcggggaaaataaccccagcgggccgcctaggggtgggtgacccgcgatctccacgcccaggtcccgccctcgcggcccctgcccccgccccgccccccgcagagggcgcgccctgggagcggcgggggacgcggctggcttcccggcttgcggggtggcggcgtcggggctgcgggcgccttggctggacccgcattgccccctagtgccgcgcggagtcagggcgccgggctcccccgcctgatgtcaccgccgtgcagtcagcccagaagcggctcattgaaagcagaccctcttcggcgctcgctgggcggaggacgcgccgcggtccgcagacccgagcgagctgggcaccgccgggcgcccccggccctgccgccccctcctccccgccgctcccccgcgagcccggccaggcgcgcctgacgtggaccattaaacttggagctgccgcctcgtcccctctcctcctcctcctccctctgacaggcgagcgagcgactcggtgcaggcaggagacgtgctgccgggctgggctgcccgggggagatgactcctcgccaggagggc

SEQ ID NO: 332564 - DNA, 426 bp, Homo sapiens
  chr5:159399024-159399450
  hyper
cgggtgccagtgccgcggccgcggccgccgccgacgccgccgccgccgtcgcctgggcggctgcgcctacacctaccggccgtggacgcgcggcggctcgctggagcgctcgcagtcgcgcaaggactcgctggacgacagcggcagctgcctgagcggcagccagcggaccctgccctcggcctcgccgagcccgggctacctgggccgcggcgcgccaccgccagtcgagctgtgcgccttccccgagtggaaggcgcccggcgccctcctgagcctgcccgcgcctgagccccccggccgccgcggccgccacgactcgggcccgctcttcaccttcaagctcctgaccgagcccgagagccccgggaccgacggcggcgccagcaacggaggctgcgaggccgcggccgacgtggccaacgg

SEQ ID NO: 332565 - DNA, 227 bp, Homo sapiens
  chr5:159414352-159414579
  hyper
gtctccagcagagcgcagcaaagaagacgaagcctcctggggcctttcctcgccgcctggagcggggcatccttcctccttacgtgcagagactgggaagcagctctttagacactgcagtgaccgagcccgctccacgcccctttcccctgagcaggtgcttgacgtggggcaagctcggcgttgaggtggacccgcgcgccacccgctggccaacgcgcctaagc

SEQ ID NO: 332566 - DNA, 690 bp, Homo sapiens
  chr5:160973449-160974139
  hyper
caataaggaagcaggcatagcgttttcagcatcggatccctactacatttccctgctcacagaggtatgcagacagaacccttcaaagtgagaacggaaaagagaaacgctgggcacacttacctctgcgcacagacagcggcgattattaaggggaaggaccaaatcccaaagtagccccttttccgcactctccacatccctttagtttttgatggaattgagggtttcactgaagagaggagatccaacttagtctgcccagtgcagtaattctaatgtgaggcgcatgcgcacggcgtaccaaaacatcaaaggggaagcggcggctgccggggaccgagcagatttccttgtttaaaaaaaaaaaaaaaaattaaaagggaaaaaggaaaaacatgtatatgtataatacatacatatttgaataatatagaaaagtcaccccacagcagcatccagaataaaatttttgttgttatcctttcgttaagacaaaataactacagcgtctggtaagtttcggtagttgcaagaggcagttttgcaccgagcgggttgtgggtttttggtgtgtgtgtgtgtccttttaaatatgcaaaaccagattagaaaattagaggagagcaggtgtggcgtgccagcggaagataggtgccggtaagcccacttctggtctcagccggacac

SEQ ID NO: 332567 - DNA, 881 bp, Homo sapiens
  chr5:160974516-160975397
  hyper
gggtcctgttttctcgccgtgtgacgttcctgacccgctagtccgggttatttatagcaggaggggaggggggcgaggggagcagaaaggcaatgctgtctctccaggtttcggtctgattctgcagtgggaattattagtgggcagggtggggtttgcatgagggggagatgggacgtggaggcgtgagggatgcgggtgacgggcgccctagcgcaggtgcgggggactggagggcgtgggcgaccgcacagagcaggaagggcaggtggccgggtgggacgcgccccggccggtcccccagcgccccctccgctgcgcgcacccgcgcgcacacacgtgcaggcgcactccccacccgccgccatccctccttacctcgcaggcccgcgctcgccgcccactcccgcggcgtgcggagctggcgcccccggcccctcgtccgggacaggggacggggactcccggctgttcaggggctgtacctctggatacaagaagccggagcggtccctagaaggcaggcaaaatgaggaagagcccctcacctccggaggcactgtgttctcccgcggtctccgcgccacctcgtcctcttcttcccttccccgcgcccaggggactcgcacacccagaggctgcctcttcccttcctcctgaagctcaggccgcctcgccgtggccgccgggacccggaggaggcagcaagcttggggtggggaaattgggggagggagatactcaattcacaaaagaagtcttccctccgctccagggaaagagaggagccacgggcggcgtgaggtgctacgagtctggggacacaaggccgtccgaaggaaccggagtccacaccagcggctctccgggtactcctgagt

SEQ ID NO: 332568 - DNA, 1036 bp, Homo sapiens
  chr5:168727259-168728295
  hyper
cgggccctgcgtctggaaccctcacccctggagaggcactgctctttgcccatcgctgggggtttcgagacctctctttccagatctgaccaagcctacagacccccagctcggagagtgagggatcgtatccaggaagggatgagaatagagactgcatccagggaggccgaggggaaaggacggatctggcgcctggggccccctcggtgggacccaggtgggtggcccgcgtggggtggggcaggggtactcacaggcgctcagcgttgcgggggatgccccgaggaaccgcgcggaggcccagcccgtggcagtccacgctggcagcggagcaggtacacttggtggggcaggcgacggctggaggcccactcaggacgctcgccagcgccaaggccagcgccaggcgggcgcgcacggcggcgccgacccctgcccacccgggggccatggtgtgcagggccccgctcctggaggaggctgcctctgcggggcaagacgcgtggagcccgaggaggcgcgcggggagcgcgggcggcctggggagcgggcggcggagttagcgcggaggaggggcgagctcggtgctcaggcgcacggggcgcgggcggagcggggcgctccgggcggcggcggcggcagcaacagcagctccatcggcggggccggcgctgccccgctgcgcatcgctgggagtgcccaggtgcggagcgccccctggccccgctggcccgcgggccgggttggggacctggggcgagcgcaatggggcgtggcgcccggggaggtccggcttggggctgggctggggagcgcggcggctgcggctggggcacggggcggccgggtgagctggccggcgctcgctctctccattcagtgagcacggcagacaccggagacgcggggcccacccctccggcccccccccgaccaagaaacgccaactccgcctcccattggctgcgccgcgcgtcatgtcgactaagttgggaactttgctggagcgaccgagagcctggagggaggaggc

SEQ ID NO: 332569 - DNA, 795 bp, Homo sapiens
  chr5:169063996-169064791
  hyper
cggcaatcaggaaactctctgcacttgcggtggtggtctggcgagccccaggtggggactggcctctgctccctcgcctggggaggagacaaagtgggagtggtccccaagttttgcgtgaagtggggtggggtggcgtgtcttagcctacggggcaccagccttctagtgtgcccctgcccaacgggagggaggagggagcggggagccccggcgagggaggagagggcgggccctgagaggagtttgaaaagaggaaggaagtggggccctgcggcgcccagccaccccctgacggcttccccacgggaggacgcgaggccccggcccagccatggccccctggcgcaaagctgacaaggagcggcacggcgtgggtaggtgcgggccccagggcgcggcagggagcgggacaggtggcgggagagccgcgagcaggaggatgctgcggggccggcggcgcggggtgggcagggcgcgctgcctgcaggtcagagggcgcagcctgcggcggggcctcggggcgggaaagccgaggctcggggagaggacggcgggaccccaccccgcaggctaagcacagccctcgccctctcgcctgctgagggaaccttagacatttccgagatagggtcaagacctgcgcttgacaactcagttcttcgcgccaaactcggcgtccccaggagtgccccagctcgccgcgtgggagacttggccttgtagagggagctccactctcccctggctcagccttggcctgcccaccatgcatacttccaccccctccaaagc

SEQ ID NO: 332570 - DNA, 615 bp, Homo sapiens
  chr5:169930891-169931506
  hyper
gcagatgagggtgcgcaggggtgagggcgcagggctgggcgtcccccgcccccaccgtgcagccctcgcccccgccccgcccctccgtagttgcccgcccgccgccccctccgccgccccctccgccgctccgactctcgccccgagcgctggcagcaggcagcaggcagcaggcgggcgcgctgtggctccgcgccgcgcggtccgggctctgttcattcatgattggtactcggccctccgagacccagcccgagcgcagggaggggagccgagtgtgcggcaggaggggcgggcggacggcggctcccgcaccgcacgcggcgctggctcggcagcctcggccgggcggccgctctggccccgtgtccagtgccaggcaggcttcagggcaccgtcctcggccctgggcgagggaaccgccgggccgggtcctcgcgcggggaagcggttccgaaggctcgcggggagcggctagccctgagtccctgcatgtgcggggctgaagaaggaagccagaagcctcctagcctcgcctccacgcttgctgaataccaagctgcaggcgagctgccgggcgcttttctctcctccaattcagagtagacaaaccac

SEQ ID NO: 332571 - DNA, 413 bp, Homo sapiens
  chr5:170108015-170108428
  hyper
gttttctggctttgaatgaccgcctagcgcttgccggtgcgccagggtgctgtgaggatgtgggcagagggcgagtccgaagggctccagacactgggaatagtggtggtcgtgtgctcctccctgaaacttttgcactacctcggactgattgacttgtcagacggtaagcgaaccctggagcttccccgttttctgtgaatgtgtttttgtggcttcggttgctgtgacagtcgtttcgaaaatgcacggaaatgagggcggagacccgagagatttgaaaaagccgggctgaaacagcgtggtattggtccccgcctccccagtcgcgccccagtgctgcgctgtccgtcgtgctgaaatgtggtgcgcctggggagtgcgggagccaggaagttagggtctcctgctcc

SEQ ID NO: 332572 - DNA, 687 bp, Homo sapiens
  chr5:170171114-170171801
  hyper
cgggggaaacgcgggcaggagaagggaagtctcgctcaggggagtggtgtgcatggggcagaggctgccagggacgctgaaggctgatagccgggttggcgcggaaatgggacgccgcagggtgggacaggcgggagggatgggatgggcagggtgtgatgccggacgaaggaaacgggcctgcccggcaggtggcagagagccacagaagagctccgagggggtggtgcgtgagatggcgctgcaggctggaaaggggctgcaggcagggtgcctccagagaccgcaagagaacagcttgcgagggaccgtgggaacttcaaggaaccgcaccgccctcctggaccacccgagaaaacaggggaagtgggcgaatgagtagaccaaagtactcatgacagggcaggagcaagtgagagaccctggaggaccatggagagaacgtggtaaccgatggagagggatgaaaaccgagccgcgggtgtgagtctgaggcgcccccaggcccaccagcgtgtgagcggcaggtgctgttcgccatcagccgctagatggagccggcgcctcgccgaatgcgccgggatccgtcgcgtggatgtcaggtccgggccagggagccaaagcggcggctccgcggggaccctccacagttccggactccagcccagcgccggcttcagggcgtgc

SEQ ID NO: 332573 - DNA, 991 bp, Homo sapiens
  chr5:170737045-170738036
  hyper
cgaaatagcggagctctccgtgtcccacggggcgccacggggtccgcatggggcctgaacggtggcggagccgggctgggcttcaggggccctcctgtgtctccgcagcggcggccgcactcacgcccttcaccgtgacccggcgcatcggccacccctaccagaaccggacgccgcccaagcgtaagaagccgcgcacgtccttttcccgggtgcagatctgcgagctggaaaagcgcttccatcgccagaagtacctggcctctgccgagagggcggcgctcgccaagtccctcaaaatgacggacgcgcaggtcaagacctggttccaaaaccggaggaccaagtggcggtgagagaggcctgacccggcccaccttacacctgcccttcacctgtcccgccccgagccgcagcctcgcactagccctattttaaggctatccactacccccgcccccctctgcctcccccaaacacacccccaccccgccttcgcagattgtacctcttcctttcacccttctcgctggcctgtgcttctctctccatcgtggtctcccacgccttggtttctcctccatccccatccccatctttcgtgagcccctccaactctctccccgtgttttgtacggtctcctgcgttcacttgatttcctctcacccacccccgccccaaacacacaggcacacacacacacacacacacgcgcacacacacgggcctctcgcactctccttctcctccttcttccagcccgccctctcggattttcaacaatcctcgtggacgccggtttcctctccccccatctccgcgtctccattccagccgcgtttttatccgatctctgttttgattcaacccgtaaacggcgaagcgatcgcgtctggaaaggggttcaagacaggccctgggcgaactggatgagactgacccagcccccgggcgtcgtgcgggtggtgcagagccagcctgctcacccgc

SEQ ID NO: 332574 - DNA, 978 bp, Homo sapiens
  chr5:170738045-170739023
  hyper
cgaccccggttcccgcagggccaagtcagttacacataggccctgcccttgctatctggcgaaaggaacaatctttattgttggtgaagccacaatacccgggcgtgcaggtgggcggcgggcagagtcccctcctggagaccctctggcacacaacaaaaacaaatgatcctaaccggctccctggatataagagcctcgggcgtaaagcgcgggctgggaggcagacgggttctgcgcctcgaggctcccggatggcctcggctcccgggagggccggggccccgccggcggccccgcggtgccgggtgcatgacggtactgtccctctccctcccccggtgcaggcggcagacggcggaggagcgggaggcggagcggcagcaggcgagccggctcatgctgcagctgcaacacgacgccttccaaaagagcctcaacgactccatccagcctgacccgctctgtctgcacaactcgtcactctttgctctgcagaatctgcagccctgggaggaggatagttccaaggttcccgctgtcacctccctggtgtgagcccaccagcgcgcaccgtcgccacggatcgccgcccccacccagccgggcgccccggaccccccaggcgggctgcgggggaaccggcgccgagaggggaaggggccgcctagcccgagtaggccccagggcgcggccacagactggcgggccgcggaagggggtagggcccgagctccgcgcggccgcacaatccgagcccccgccccgcgccccgtcccgccccaggcccgggcctgacaagaaagcgccttacgtttctccgccccccgcccgcaccccccgggccgggcgcctgtattatactttgtacttttgcccaaacgtgtaaataataaaaaagttttggcttttttctttagaaaccggccacctgcttcccccgcgggggccgctggaggaagggcagccgacccggcc

SEQ ID NO: 332575 - DNA, 918 bp, Homo sapiens
  chr5:170739045-170739963
  hyper
cggggcaccctgcgtttaggctgggtccactcttcttcttttccgttccttttatttaagtctttttatttaataaaaaagttagctatttcacttaacgccgcttttatttcgttttcgttccaataatgctcggcgacccccggccctgcgccccacccctgcggcggtagaagccgagcggcggcgcgcagggcgcgtccacttccgcaacgttcgtctgcattcgcctcggctgcaaccccggcccgggcccccgaggaggatgcgcggtgcaggtcagttggtgccggccacccgcagcctgggtgcgcacgggatggggactggacatgggaaaggtgctccaggcccgaaggccgcgggccagcgccggggcgggctggggagtgaaaggctgggcctgggcagatgcctaggccgtccccaggtcaaatccacctggggggtgggaggcagggtggcctcgaacttcttagagctcaagtcggaactcggagccccacttcaccccgcaactcgctttccgccctctttttcccgcggagcctcagagaggacctggctctggccagtctgcgcgcgctgtgggcaggctttgcgcgcagagccgctgcaaatcctcggtctccaaacgcctggggagcaaatgcagcgcacaaccctaggggccctctccttgtcgggtttgcgtgggaccccaggtggagcgtgacgtcatgtgacgtcaccgcagcccccgcggtgtcactgggctggagtgggcggggcgcccggaactcagaactctaagcgctggtgtggtagcgtcgtggccggggtccacccagctccaccgtggctcaagagctggaagtttcagaattgcgaggtttggagcggctgaccccttccagtcacatctaacacacaaagccc

SEQ ID NO: 332576 - DNA, 584 bp, Homo sapiens
  chr5:170740470-170741054
  hyper
cggggccgcgtcccagagcacccctcccactccacgagcacccccacccgcctcatcccactgcctccctcggagccggagccgtgcgccaccctgcaggttcccgtgctccgagccttcgttctatgcgggctgcgggactgtattcacctgcagggctggaggaaggggagggcgcctgagaaacaccttgaacccccagcgctcccgccgtcacctccacctccaagcccagctagcctgggatctgcgcctttcaggacataaagacacccagggagggactagggtgactcagaacttcgggtctcttccgtgagtgttttcctgaaatgcttttattttctccaataaaaagcctgatgaacgccgtcatcgggttgggaaaggttggcccttcggctgaggactagagggacccttgactttgctggcggagaagcgctttcctcagagacgggtgtcgcggtccagctcccttccgttccgttttattctgttgctccataataaggcctagcggggttttttttcttaattgtttttatttcaacgcgcttttggggaacagatggtcaggtggc

SEQ ID NO: 332577 - DNA, 1320 bp, Homo sapiens; identical to SEQ ID NO: 231607
  chr5:170741501-170742821
  hyper

SEQ ID NO: 332578 - DNA, 920 bp, Homo sapiens
  chr5:170743178-170744098
  hyper
cgtgcagcggtggcggccccgcgctctcgcccctaaagcaagcgctctttgtactgggtggaggagctttgagtagtgagggtggagatgcagcttcggggtggcgcagccaccctgacactaggcccggggtcgcagtgggacagaagagtctgccgctctgacttgggctctgagttccaagggcgcccggcacttctagcctcccaggcttgcgcgctggcgcctttgccatccgtgccgaagtggggagacctagccgcgaccaccacgagcgcagcggtgacacccagaggtcccaccgggcccctgggcagggtaaccttagcctgtccgcttcggcagctttgcgaagagtggcgcgcagctagggctgaggctcttgcggacctgcggtcgaagcaggcggctgagccagttcgatcgccaaggcctgggctgccgacagtggtgcgcgctctgttccgccgcggccgggccaggcgctctggaatagcgatggggggacacggcctccaactttctgcagagaccatcgggcagctccgggcctaagcagcgacctcaccgaaggttcctgggaacctttgccaaaatcccagcctctgcctcggtccagctaaaccgtgtgtaaacaagtgcaccaaggccgcagagcggctggtgtggtgcaggcgcctgcgttctggagtagtgaaggttcctccacagggaaggcggttttccttccgtgaaattcgaaattcagccccccagttccaagcgcctgctccgttaatagcatctactctcagcgacgcccagacccaggctgtgcactgtcttggctcagacactggcaaagtcctcgagaaattgccttggtgatcggtgccttccctcgggccacccagccgccggtggcacggagtcttccgcgc

SEQ ID NO: 332579 - DNA, 772 bp, Homo sapiens
  chr5:172198713-172199485
  hyper
cggggaaactgaggttccccaggcgaagcgactgacttgcccagaaccacactactggggtgggggcagcaaataggcgcctaagatgaagtttagagaaaaatgaacaactctgccgatagaaaagtcgtccctaccaagaccgactcgagcgagttggggcggagaggttcagggcaatgctttcctgtttcccagacttttctttaaggtggctttaaaatatctacatttgccatgaaagtgtgagcaagcaaactcccaccgggaaataatgctattcctagtcttgtggcccccggaagacttggagccaagggaggcaggtcagggggctgaaatcccggtgaggggtcgcaaggccccgcagtggattccagggtttggcgtttggaggggtgaggggcgacccgcagcgcgactcgacggcgccccccaggggccgcccgacacgtttctgtcaccttggctccagactgagcttctccatccctttctttattatacaaataggcagtatacacagtgagcgcccactaagcgctgggctgggggcctccaacccggaacagaagccggccacaaccctcgctccctgtcgtcgcggccgttataggccgaaagcaaaatccaatcccgggccattgtgggcggattgccaggacctggatcgcaacacttgggaagacccccgccccgcccagcgatctccgtgccctgagtcccagtgacggccccctggacagcggagcctgctgcagcgacgcgacgc

SEQ ID NO: 332580 - DNA, 251 bp, Homo sapiens
  chr5:172234246-172234497
  hyper
cgtcaattgatgccaggaatattctgccagccctccaagggtggtttcagcaggcttacttcctggtcataatcacttcctccatccccggcttctgtcatgctcagccctgacctcaccaccgacccgccctgcccctcccattagctgcgtcaccactgcctgcccccacgtttagcccagcccccagcccagatctcagccttgggtgaaaagtgtcagcccgcacactttctgttttacctccggcc

SEQ ID NO: 332581 - DNA, 780 bp, Homo sapiens
  chr5:172655933-172656713
  hyper
ccgcgtgatgtttccgagtcagcggtgaaacctgcggcttccgcgcgtcctttaaaaatacaggtatttagatacacaccgtggcgtcgacttaaggtgaaatctaaacaaaatgaaaggacgggagctattctgatttggccgaacctgtgcctgcgggctgggaatgacccaaggaaacgaagggacggcggagccagtgcggcgggggccgggtgggaggcggtggcctcgtgctggggacccccagccccggctcgcctttgccgggaaccaccaagctaatttttttccctttcttttttaaataaacctaccttccttcccccattttttccttttaatatcgctgtttatctccattttttttaactgcggcgtgttcttgttcgattttaaaaaatactaaaaataaaatgagtcccctaggtgcctccctggcgccctaggcatggagagctcatgcctgcgccaccctcatctccgctggctttgccacctcggaggcgccccacacttctcctttgttttgcttttctctgagccggttgagttttcttaccctgaatgcgtcgtttatacaattagcaactgaacacagaacaaatatcaccgatataattggggtgggggtcgccatgtaaacacggggtgttgttactttaggatacttctgaccctgtcccggcctgagtcctcgctccctgactcagcatccacgcaggaaagcctcgccccagccaggcaagggcagtccctgccggctccttgagttctgcc

SEQ ID NO: 332582 - DNA, 898 bp, Homo sapiens
  chr5:172659536-172660434
  hyper
ggatcggtcagggtcgcgccacgcgggtcccttccctaccaggctcggataccatgcagcgtggacactcccgagttgctctgcggaatcccggggctctgaaccgcattcaagtccccgacgccgaagttcacgaagttgttgttggcggcggcagtggccggctgcgctggggaaggcccggcggggtaagcggcagtgcagctgtagccagggctgcaggccgcgccgccgtaacccggataggcggggtaggcgttataaccgtagggattgaggcccacgccgtaggcaggcgcgtagggcgccgagtcccctaggcatggcttgccatcgcgcaccagcactggcaccgcgatcctgcgggcaggcggcggcggcggcgggggcagccccaccagctccagagtctggtcctgccgctgccgcttgcacttgtagcgccggttctggaaccagatcttgacctgcgtggacgtgagtttcagcacgctggccagctggtcgcgttcgggggccgacaggtaccgctgctgcttgaagcgccgctccagctcatagacctgcgcctgcgagaagagcacgcgcggcttcctccgccgtcgcgcccggggccgctccgcgttgtccgcctctgtcttctccagctccaccgccttctgcagcgcgcacagctctgagggggaacagagaggcagagagacgcttggtaagagcggcttgacctacggagcgcggccgcacagtaatggtaagggatcctcgtggaggccactgtgtcctgcctggagcgcccagctggctgcggctcactctgccaagtgcactgggagccaccgacacgtctcactcagcatttgtagaaagtcaggctggctcaaggcgctggagaacaaaa

SEQ ID NO: 332583 - DNA, 730 bp, Homo sapiens
  chr5:172663853-172664583
  hyper
cgacagtgtgccgtctgagacgccgacgcaagtgaagtcaagcattggcctgatgttgggacttttcctgtccctcatcaaagccacactcccaggacctggggcctccatgctggggagagaggtgagccccgcagggcagcccaggaggcgcgcaacgccctgaccccggcttctaggcgccagccgtcagtaacaggcctgggctgccacgccgaaatcacgcctcgagtttctgagccagggactactgggggtctggaattgttagtctagtctgtggaggatgccttttcttaaatgtggggcgttcaaggcccaggaaacctcgtccccccacctcttcacctcccaacccaaattctccttggacggagctgcatgtcagcggccttgcggcccttcctcgcctggacttttggccacgttaccgttatggctgtaaattaacctagcttgggggcccgccttgcctttgaagattgttttcgagcgcgggcgggggggggtgtcgttggagaggatgcctatcgccgaggcggtgacgtctggcaaacgagccacatccgattcaattaaatgtctcgctgaaaagagctcggaacgagggtcctgggagcgctgttaagtgaatctgctggccaggcggctcgcgatgacagtttgaaagattagtgtgagcggacgcctgaaatattaccgtttaatgggggacatcgaggctacatcc

SEQ ID NO: 332584 - DNA, 940 bp, Homo sapiens
  chr5:172665306-172666246
  hyper
cgagcgcattctccgtgaataaattattattaattgaaaagcgatcggcgcagccggagccggcccccctttcgtgcaatcagcagggctggtcgcaaaaggtatatatgattaattgaaagataagctggaactatcaccgggaatgtcattaatgcgctggggagacgtccattggagacaggcggcgttatccgcggctttatcttcaacaacgcctcgctctcggcccgcgcgggggaaacagatgggagtttctgtctgggacgctcgccccatgtttatattttgggaagaatcgcaactcgtgggagtccccggctggccccctgataaatgaacattagcactttttcggactactgtatcaacaaaggggctgcggcgctgcaataattggcgagaaagcaaacagagggccgagagcgcgactctgctcttcgtccggctgatggatgagcagctccggctgcgcgccggactcccggcctcggcctccgcctccgcctccgcctccgcctccgcgctgggcccctccgccgcccggcttccttcctggccgggagttgggggcggggggcgactctgagggccgccgacctcgcccttggctccggaagagtccaggcggcctccgcggcaccggatttttcctgcctcgggactcgcctcattcaggtggctcagctggcaccaaatccttctcatttccacgcttgttcagtgcccacggggtgtgccaggcgctctcacggatctcgtcacggatcctcttattccgactgcaggcctgaggagaatgaggttcagagacgtggagtaagttgctcagggtcacacagatgggaaaggacagtgtcagggtgttaggattcgaacacacagctgactgcacagctgagactgttttcttttattacacgtcgctgcgcccaagacc

SEQ ID NO: 332585 - DNA, 911 bp, Homo sapiens; identical to SEQ ID NO: 231631
  chr5:172670864-172671775
  hyper

SEQ ID NO: 332586 - DNA, 948 bp, Homo sapiens
  chr5:172754473-172755421
  hyper
cgcggaggtacgctttgcgctgccctcacgctcccttccgaaagcagtgcccccagggggaaagttcgcaatgccatttgtctcgccggcaaagttctgggatgtcgggcatcttttgaggagggggaagacgcggcacccttactgaggccggcaggccaggaagagaagttctccgggcgcagggcgcagcccagctccggggaccctctgggcctcccgcgtgccggccgggatgaagcgcgctttgcaccggacccgggattcgggggcgggggctggcgctggcagcgtcagacgctgcttcatttcccctcgaccctggggaggacagcaacaagtcctgccccagccatttcatcaccctgctagcacgtgcagattccgggccctcggagcccggcgcggacctcgccttgcctcgcgcttccctttgcacgtcccgtgccatcccaagagtttgcgtggccctgggtgggcgcctggctcccggcgaaacgcctggggcgcgccgcgtgggtgcacggtgtcctctcccagtagctcccggctgcgggggcacatgcacttacctgtattctgcagggacaggcggcctttctgctgggagctcctgtcttggggaccctcgggtgggttggtggcgtcggtcccccgcgccgggtcaaaggtggccaacaccaaagccagggtcatgaactggcccagccgctcggcacacatggttcttggtattaacctcccgtcgggagacctggatcctttgtgctcccctcttcctcctcctcctcttcctccttcgccgcttcccctcctcctcccactcttcctttttgctcgccttttccctcctcctcgcggccgcggctcggatagaggttacccagcgccctcccgtagctctccggagagcatgtgaccaggccgttagcagcgccgcgagtgccc

SEQ ID NO: 332587 - DNA, 951 bp, Homo sapiens
  chr5:172756215-172757166
  hyper
cgccgcggagcatcgcgtgcccggaggccagagcttgaaaggcaactttacgcgtctccaaacacactcctgcattttctcaaagcgctgctcgccaccccgctccgggttcccttttactctccagtcatccgatggaagtggtgagaacaaaaacaaagacaaaaaagctaaatccggggaagttatctccatctcctcccttttcttgttcggccccctccccaagaaccgccgggtcgggatagcccccggctactttctcacccggcccgtggagggaaggagaaagttgggcgccgcttggagcgcctcttcccctgctgtgtgtgtacgtgtgcacgctcacgtctcccccgcgccggggccggggacaggaactgctctcggtcccgtcaccccacggcgcagctcggggggctcgcagggctgggggagggcggggacacgagcgccgcgcccaagcgccccagggcacgcacccggcgttggcgcgcactcgcccctccccccgtccccaccctcctcctggagaacaggtgagccccggtaccagctctcgatcccccacccccgccccgcgccccgcccgcgccctctgcggtaatgcgcctgggaagtttcatcacccactgcccaggcgacgcggccctgggtctccgcggcggggcgcactgcccgcctggttggggccgccatgtgacacggctgggggagggggcgaggagacacgcgggcaggtcatcttttggccggcgcttgacttccaaagctttcctttcccgtgtcccggctgcacgcgggagtggggaaggcggaggcggggggccaggatggccacggctggccgcagctatccggcgtgtcgagctctcctgagtcggaaggaaggagaggagggggtggggagggcgtcttcagagtgggcttcccctgcgctggagcgccagg

SEQ ID NO: 332588 - DNA, 539 bp, Homo sapiens
  chr5:173738806-173739345
  hyper
cgctgcactggacgctgggaagactttcaccgcagagcgggggctgctggaggggcgggtgggctgcggcccggcggcggcggatgcctgtctctgccgaagccgaaggaaggctgcgtgggcagatcttccagctaggcccagagggacggccgacattcaacccgccagtcaaaggagggaagggctggcggcaggagcagctcaggaggcagacccgggcgcgcgggggcgcgggggctcgggggcctgtgagggatccccggacgggcagctgcggggtgcgggccgggctgcaccgcgacaaaggcggcccagcggcggcatcggaggacgcacgctgccccctggtggccaggccgctccccgcaaacgcgagctcctttgttttgcggtcccggcttctgcggcccaggcttgctggagagagtctgaagccccggcttccagagcgggtggccacgatgccagggccgcgcagggaacctggtgagccgagggtcgagtcccagccctgcagctcgctggcggcaagggcc

SEQ ID NO: 332589 - DNA, 1065 bp, Homo sapiens
  chr5:174119516-174120581
  hyper
tcctcctgtgcagacgaggaaactgagtcacacgagaggaagcaattgctgatagttcacagttgccacgccctcctcatgcctttacagacatcccaggcctttgatcaaactagggagaggttagaagaaaggcgagacgggcctcagaagaatttggatctgttgaaaaaggattttaggacaagaacgaaacaagacgcgttttcatgggaacgcaaacccagtaacttctcagagccagggcttcgcagagaaactgcatcaaaaggaaaagagtctggtcccaacctttatttctcccaaggcatgaaactcctgatttcaaaccacttctctttgcctctgaaagaaaacaagaaaaagatggggctgtgtagttcttccaacagtgaaaaaaagaaagaaaagagagaagaagaaaactgtttcgggtttcgaaacagaaagggcctccttcccctttatcgataattttgaaagggtcgctgtaagacactgactaatgacacgtgacctttggattctccacgaggcagcaggcgcgggccccgagcccagcggggacccctctgccagttaggggtcactctctccattcaacgctttattagccccctcaagtctcagggcgaagtcctgctgctttgagacgtttacagctttgattgaggaaagctattcagggctggggcgaggatctgtttgttttcaggaggaagcctctgtgagcctgccccctcccccctgtgtttccagagttgctggagagataaaagccatacctccttttgaccttcattggacagtaggagccccgactcagcgtggaataataaaggcatatcatgctgcataaattatcccgtgattgacgctctttcttccagctctgacttaaaggggggtgtcgggggctggggcagggaatggggaggggttcggtttatttactcaagcacctactgtgtgctgctgatggggaacttcctaggcaagtcattgtcgcatttcatccctacaaacagtcccaggaggtaaatattatttatccctgtgatgtgc

SEQ ID NO: 332590 - DNA, 1084 bp, Homo sapiens
  chr5:174147435-174148519
  hyper
cgcctggacgacttcatctgtggaatggggagaaagctcaggctttagggggccttcagtaatctgcatcgtgcttttggcaaaagctccttctctccagccccggctcaaacccgggctcggtcctgactccggaccttagggggcgggaacaggagaacaggaaagaacaagcttgggcttgcagagcttcgcaagcaagacgtttgtacccccaaaacctccagctgtgaccctgaatatctatctacccgacttcctgggctgtgtaactcggaaagtgatctctctagacaccagaggaccgaaccttccccattctcactctgcaacaagccagtaagaaaaatgagctcagagacgagtagccttttgcccgaagtcacacagccaatgttttggggggtgggtgagcggtgttgtggaattcctggcggatgttggcgcccgcgggtctgcctgcttctgatacccgggctcggtagaataggccgctaacgagctcccattaggaggaattgtcactcctctgggagcgagcttgtcccattagggcgaattgtcattcctcctggagcgaggttgtcccggctccgcgcaggctgagtgctggggccgagagcaattaacgcggctccggcgcgggcagccgcctctgccccgggcagcgggggcggggcagggcgggggcggggcgcccggcgcggctggagccggtcacccggcgcagccccttcccccggagcccgcctttcatctccccgcgcctggcgcctgcccgaagcccaggcccgtctacagcccccttcgctgcccctcccccgcccccttctagccgctggggttacaaactagccttcggccctcggggttacaaacgctgcgttctgcgcgcagtgctccacagtttgcaaggagtgttttctccttgggactcgcagcgcgcgtacgcggttgcttcaagaaggggcctggcgggtgtaacgcgccccggggagcgcgggaaggtgcagggttgaggatctacgctcagaggcctcagccgcgcgggagggattcctgtgtctcccacttctacctgcgc

SEQ ID NO: 332591 - DNA, 2057 bp, Homo sapiens
  chr5:174150711-174152768
  hyper
cgaggcaaacactggcattcaaacacgcacgacaaacacaggctcaaacaaactcatgaatgcacacttgcactgtcttgagaaaaaggtcggatccggatcgcgctcagaaaggaggttcaggagacaagtacagagatttcaactttctaaaagtgcgctggatttgctttctagtgagagagatggggacaactgatttaaattcttcactccgaaccatttgggagagaggcactcctgaccacttctcgggctccttccggcccctcttttccaggggaaagagttgtaataataacagtgggcgcttttgagcgctggctagtggcgagttactcttctaagtgcatacatttctttcacagggatactggcctgtgagtttcagcaccgactttctggaactgtaaagtaagccaattttgacgcatagtaggggcttcgtaaatgtttctgcaatgctgtttgcgaatcttgaacttattctggcggtagagggagagtgggatgggcgcagggtcccttttaaagaagggtcaaaagagagaagaaatgggactcggcgaacttccgctttaaataatcgctcttaattaggtctcgggcttttcagtttcggcgtgattataacccttcagggatcgcctaataacaactctgctgactgctcctgtaattaactcctaatttatttcaaacaggaaaaaaaaaaaaaaaaaaaaaaaggagggggggcagccccttcgggaagagccaatcaggggcgagcgtctctggcgtcagcgccaggcccggcgcggattggcggcgcgcgtctcccacttcccctcggaggaaaggctcagctcccagcgcgcccctcccgtctccgcagcaaaaaagtttgagtcgccgctgccgggttgccagcggagtcgcgcgtcgggagctacgtagggcagagaagtcatggcttctccgtccaaaggcaatgacttgttttcgcccgacgaggagggcccagcagtggtggccggaccaggcccggggcctgggggcgccgagggggccgcggaggagcgccgcgtcaaggtctccagcctgcccttcagcgtggaggcgctcatgtccgacaagaagccgcccaaggaggcgtccccgctgccggccgaaagcgcctcggccggggccaccctgcggccactgctgctgtcggggcacggcgctcgggaagcgcacagccccgggccgctggtgaagcccttcgagaccgcctcggtcaagtcggaaaattcagaagatggagcggcgtggatgcaggaacccggccgatattcgccgccgccaagtgagtgcgcgccggggcaggagtaggaggtagcgcggggtactggagggagcggggggcgggtgttccagggctgagggtaccgagacccttctgcgtgcgctacactcccgggaaagcaagcccagggcctctggactcctgggtgcccggggcgttcggcgcgcccagtgcgccgtccgcatccaagacaccctctgggtaataaccgcgctgtgtgtgtctgagactccctcgacatacagattgttttttcaagagcgaaccccagctgggtttacggggtcgctcggtggtccgtttctacagccctcggccctgcgctctggccacttggcttgtttttgtttcactgttccccggagtctctgcctggggagtgaaggagttggatccatgttcagtgagcacttggatgtaccaggaacgagacaggttcaaaactcaaccctgagagttgtgcccccattttaaagatgagctaactgggcttagccagacattgaggagaaaccattttctttcgtgagtcccgcgggtgtcgaagccggatcccacgaagggatggtggcaccagggatggtggcatcagagtctggtgcggggaggaaatgtctctctgtggtctccgcagccagcacctccccggcaaggttctgagcttcgccgggagcgggctggggccagaagcgcacgggctcttcttggctcacagtaataattaacc

SEQ ID NO: 332592 - DNA, 795 bp, Homo sapiens
  chr5:174158680-174159475
  hyper
cggtgactcggaacagaggcagaaaggatgcgaggacttcttgctgcgtaaacagcgcggcgggcagattggcacctggcacctaccaggactggcgcttcgtcccgcgtttccattgtgcccgcacgcactttgaaagtgggcgccggaaactccgtttttcttatggggccggggtcgggcaacgtggttcagaggtttcacaagctccagcacagaagtgatccaaaccgaggggtcggctcgaagtcggaggctgattttgtcttgctcagtcgctccgccggagctgagccgctggaacgacccaaacctacctgaaagcgcgtctctgcagtcccgctggacttctccggctcgaactcctaatctcagcccggaatccagccatattcatttaaggattgcgttttccaaaggccaaagcctttcccggtttcgtcatcagccgccaggttgggtccctaattagcctgtccaccgagcttccttcccggcgccgcttggaccccgcagccccgggcgatctcagcccgggtggggaatccggagacgccggctccgggttaagactctgctcgtccccaggaggacggggtcgcgatccagagtgcgatccggagaaaagggctgcatcttgcgtggctggcgggttagactggaatccgtctggggaactgcgcaccatccccatcgctccagacgccgaaacaaaacctgaggctcggagaggggaaaaagagttgttcaggctcgaacatacgcatcccagcctcataggtggatggggttacc

SEQ ID NO: 332593 - DNA, 589 bp, Homo sapiens
  chr5:174162402-174162991
  hyper
cgccaggagcggtgcgcccagcgcagggggctcctagtcacctcgacccttccggcgcccttccctccttagctgcacctggcaagccagcaagggagtgacccttgcgcaggaagggggcgcgtcacccggtttccccatagaaccgtgggcgtcgcaggcgagaagggaagcgtccaggcgctcggccccttccgccccgcccgctgccggccgcccgtttgatgtcgcgggcccggcaggaatgcggccgggttatcaatcacccagctggatcccgaaggtctctgcctaatcacatttaattgctcgtggaggcccactctcgccccgggccggccgccgcgctcaattactccccaaatacctgccatcaataaatacgcactgacaccggcccggcccgctccaccggcacggaagatcgcagccgaccaggcgccctcctccctgccccttgtcccccatcattaaacttacacctcgacgcccaaagaagcaagccgagcagataataacagccccctgtaactgagcgcttcccaagtgccagacactgttgctcggcgatttacaccaatcaactcac

SEQ ID NO: 332594 - DNA, 774 bp, Homo sapiens
  chr5:174178103-174178877
  hyper
cgaatcacagactccccgcagtcagagatggcgaagcctccaccgggtcacctcggccggcccccgggctcccccgaccccgccctggcagcgccccccgccgcgagctcccggggcggaggagccggctcggctttgattagcaacacttgcgggggccgcggcgcaccctgacagcccggcagctccgcgccaaaatggatgggtctcgggcggcgagggcacggatacaaatgcgccgccgcgttctcaggtacacaaatgcggcctcgggcgggcgctggttcccaggcgcacggaggcggcggccccttcaactcggggcgcgggcgggagcggaacccgcgttaattactgtacgtttccactgtaaagagtgtcagccggggagcggggccgccgcgcctgcccggccccggcgcacaaaagcttcatatattctgaatgaaggcgaatcgcagcctcggcctccttgaaaagagccgtgagggagacttaattctctccctttcagctgtgctcagactgtgaaatccacacaatcgcgcccttctctttaaagggagggagaagaggggccgcggccgcgcgccccgccatcagctgcgcgcacagagggagagttcactccggggacaagggcggcgcgaccggcccggggctcttgggcggccgcgtttcccctcccaccggctgcagcccccttctcccgcggcactttccggcgtcttttgtggggcgagtcctggcgagggtgtccgccgtcaggtgcac

SEQ ID NO: 332595 - DNA, 308 bp, Homo sapiens
  chr5:174220739-174221047
  hyper
cggcggctcctcctcgcagaaaccctccgcagtcccctaccccagaaaggtttcccttccctccccttcccgcaggcccggggctggtttggggctccagtctgagcgcctcctccgcgacgcgccacatggctggcaccggcgcgcccccgcgcggccgcctgcgagaagctcactctccgcggaggcgaaatctggttttgattcaattagattaagttcaggggcagggagggaggcttagtcccgggccctgcagggactataaaagagaagtttgaggctcgtggggtgggggacgggggcac

SEQ ID NO: 332596 - DNA, 762 bp, Homo sapiens
  chr5:175084709-175085471
  hyper
cggttgcccggtcaagggcgggctcacaatctgcggggcggggagagggaaggagccagggagaaaagggagagaaagagggggcagtgtggcagaaaggaagaggaaggggcaagtgtcagagtcggcgagatgaggagggagggtgtaggagaaaggaaaatagaaagtgggtgagaccgtgggagagggagactgggggagaaaatgtgggcgtgtgcgcgctgagagagagagagagagagagagacttggagagggaaggaagggaaggagcgttgagagcaaggaggagcgagttgggggcggagacgaggaagtgggtgcgaggcgcggggcgcaggccgtgcgcgcgccgcccgctgcatccctgcccggagcgcagccggcgcgggcgcgggaccgaggcgaaccgggtgcggagccaatacccgcggcagcagcaccaggtaacgcggccgccgcctccccgcggggcctcggctcggggtggggtcccaggcgggcttggggacccggcgtgggctggcggagccgcccgaggggctgctcgggatccccggcggccgtcgtggccccgaacccgggttcgagcctcggccccaccgctccctggctgtgcctgaccttgggcaggtgcctccgcctggcctgcgagcctcagtttccttgtctgtgaccgcgggggtcgtgccttccccaagggggcgttgagagctcgggatgcagccccggtgcacagcagtgctcgggacgcgggtc

SEQ ID NO: 332597 - DNA, 903 bp, Homo sapiens
  chr5:175223589-175224492
  hyper
gggctctgtgccctgcagctcggcaggcattcgaggcggacagaaacggggcttggcgccccccgcgtgcacgtgtgctagcccaggcaggagggagcgcctcggcggaggagtcaaggaagagggggagggagaaacgcgccagaacctcggcccgggcgccctcgtcggccgcggaggagctgcagcctccaacaggttcgtagaacgcgcgctcgctccctgtggctgagccgccctcctccgcgggagcggttggcggagagaccccggccacaggccccgcgctcgagagcttcctagaggcggcttcctccggcctctccccctccctggagctctcagccgccggcggctcttccggggcgaggcagagggcgcctcgggcttctcgctccagcaccatctcggggacagctcccgcgccgcaccgggtccctatcgggtcagcactgcagcggcggacagcggcggccgggcgggctcctccgcaccctccgccctggttccgcgcggctgctaaggaccgtccctcgcccccgcgggccgctcccaacgctagcaccgcggcggcggacagctctctccggcggcaccgcgaaccgcgaacaaagccgcgggtctggggcccccagcgcgcctaggggtggcgtgaggccgcatcgatcgggggatttcagcttctcccagagaggtgtcaccggcgagctaggcgggggcctagcacagccgcgcgtctccggcttgggtccgccgcccgccgaggcctggccgtgcaatggcggggcccagctaagagtgggcaagaggtagaggggaaacaggcacagaacggtcccggctccgctaggcgggctgggcctaggctgaggtcccggcggggaggaaggagtgcgccgcccc

SEQ ID NO: 332598 - DNA, 920 bp, Homo sapiens
  chr5:175298515-175299435
  hyper
cggtagaacgtcagggcccggctgaggggcgtgattggagggcgccttcggcagccgcccgcggcagaagccgcggctccagctcgcctggcggaattgcacgcggcggcgggagctggaatagcagaaggaaccacctcgtggagtcgggccggagccctgcagtggctcagacggttgcagggaccgccaggtcggtgctggccgagggccgggagggcggagctgggctgtgggcaacagggtcccggctctcgcctcgaggccttggggcagctcgggaagctggggagcacggctttcggggggacagctccccaaggctgcctgggcaccggatggggactgagaggcggtaaaggggacactcccgggtgcgctctccgtggtgctgaaaggacagctccttgcgaggggccgcgagcaggcagctagctgcgaactaagaggaagcgtgggccctagccggagactccgggcagagcccgaacggccggggtcccggagccaggaccgccccggctgcggcggagactcaagtctgaacccagagaacaactttgagctcgcgggagtgggggacgtcgatctaagctacttctggctgtgcttaacccgaagcccgccggagcacgcttcgccccggaggagggagtcgcccccaggggtacagtgcgcactcccggagtgagtcagagggcggcggcaggggggcggacagaccgcaggtggaggggaggagaacgtagacattgacaggggatgggggaccaaggggactatttgtccctttccgggaggagccgccgcttggacagcgcacgcccgccgcctggagtcttcgggaacgaccccttctgtgctctcgttctcgtcggcctcaatctgcccccttccccagcaaagtttgaaaccgggcc

SEQ ID NO: 332599 - DNA, 985 bp, Homo sapiens
  chr5:175792171-175793156
  hyper
gatgcggcgttgggcgggttacttaactcctgggcctcggttttcccttctgcgtggtatcattgtaaggggtaacggagaaaagccgtgagctaacccctggtggatgctagcaagcaccgccgtctcccgtcctccccaggcacagcctctccttcctccaccctgcacctggcagggggaccggaggtccccgcgcgccggccagcgccccaccacccacgccgccgggtcccgggcggcctgccgtgacagcggcagtgcattgtggggcttgtagtgcgggactgggtctgggtgggtgggcgcggccgcagcagtcgcagcggggccatcttcggcgggcgagtgggctcggcctgtgcaacccgcacctgcgtccctcgcccggcccgatggcgccgcggccgctgggccccttggtgctggcgctgggcggcgccgcggcggtgctgggctcggtgctcttcatcctctggaagacctacttcggccgcggccgagagcggcgctgggaccggggagaggcctggtggggcgcggaggctgcccgcctccccgagtgggacgagtgggacgtgagtgccgggccgaggcctgcggaagggcgggcaggctgggctgcgactccgcgcatgtggccaaggggtgtgaccacggaacggccctgctggtgccgggagcttggggggtcgagggcttggcagccgcagcgcacaggccccgcgcgggtgggcggtcagagcccgggaaccgaggaacgggtgggtgtgcttgggtgcgtgcggcgccttggcgccacgccgtcgctccacgccatgaggctcgggtgttccagcgggggccggagtttggagggcgcggctcgggagcatcccggggcccagccgggtcggctcgcgcccctccggcgcctgcgcagtgcaccccgcccgggggtggggatgtcgggagaaaccccatcccctcccgcctgcggtcggga

SEQ ID NO: 332600 - DNA, 241 bp, Homo sapiens
  chr5:175969793-175970034
  hyper
cggtctgttccccggacctgcagccgctccagggcagggcttaggccgctctggctccccggcggccggcacagggggcgtcggggaaatgtttaggacggacatggcgaggccaaagaactgcagcgcgtctccggctcgcggtgccggacgcctgggtcccagccgcagctgggactcgccgggggtggcggtcgggacgtgcgcggggcgcagggcacgcgggggctcggagttcccc

SEQ ID NO: 332601 - DNA, 90 bp, Homo sapiens
  chr5:176038454-176038544
  hyper
cgtgggactggcgtctccaggcagcacgccaggcaaggagaaaacctcagcgtgtcggaccggtttcagaaccacggacagcaccacacc

SEQ ID NO: 332602 - DNA, 892 bp, Homo sapiens
  chr5:176056921-176057813
  hyper
cgtcgaaccggagtgctgggttcggcgcgaatatccaggacccgcctgtacacgcacggcacagtcacacggtcatgcacacaaacatacaccacggacaagctcacgtgcacacacaggacacgcagacgctccaacgcgcacgaataccccgacccacatgggcgcggacacacgtccccacagccgcccgggcagctgcaaacaccggagcatactcacatactccggggtgcacactgacgcgcatcccccgggtctccctccattttccatccccttccccagctccctcctgtcgccccagtcccctctccatcctcatcccgttccccatccccggcgcgcggccgcctcacctggatgcggggccggggctggggatggagcggcggctgcggcgggcggacgcgggggctccgctaggccaggccggggtggaccaggggccggaggggggatagggccgggatcaggcgctcgggtcgcgggtcctgagcaggagcgcagcagtgcccgggtctcgggtgcgtagccagccaccgctcgttcctcgcgccctgcgagctcgcgcgctccggctccggctccggctccggcgctgcggcagctctgagctcagcgcccccgctggcggccgcgccgccccttcggcctgactgacagggggcggggagggtgacagcgcgtagccgatgagcctcccggggcgggcccgggacgcgcccctgggggccccggccgtaagactcgcgtagtctgttgggagttgagggagggggacaacgcggcgtgtgaagagtggggaagaaatcacgcgactggatttggagttctgctgggctcgaatctcagctgtgctttttattaaccgtgggaccttgagctactc

SEQ ID NO: 332603 - DNA, 368 bp, Homo sapiens; identical to SEQ ID NO: 231670
  chr5:176107132-176107500
  hyper

SEQ ID NO: 332604 - DNA, 159 bp, Homo sapiens
  chr5:176239899-176240058
  hyper
cgtgacccgggctcctcccgcgctgccttttgcctccgttgcaacagcctccggtgaaaaatgtgtctgtgagccgctgagggagggatggccagcgggcagcagggggcgccgggggccagcgcgactgactgcagccgcttgctccccaggccacgc

SEQ ID NO: 332605 - DNA, 709 bp, Homo sapiens
  chr5:176559896-176560605
  hyper
ctgcccgcggcacccgggacgatccagcctctgcctcgcgggcgtcgagcctgagacaggagggagccctggggctgcacaggcttggctcagggaggcagacccgagctgctgcctccattttgtttcctgctcagcttggtctgtggtggtggtggtggtggtggtgtgggtttggggtgcggccgggtagggggttcgcctgcggccgcgtctgctcggggcctgaggcctcgaagaccccagcccaagcccccaggtgagccctgcggcaggaggggggttgccttggcctcgggccgaacccagcgggctgagggcaggtgcccagtggatggggagcctgggctgtaacctaagatggaggccgggactgacgcgggcccgagcagggctggcgggacgatcggacaggcctcagccgcgccaggtgccgcctgggttggggttcgagacgcgtagggtgcgggagccgtgtgcggcccgaggccagcgccgtgccccgaggtaggtgaggggatcggaatgccacccacgacgcccgcaggccccgacactccaaggaggcgcgcgaggcccctggggagcccgcctcaggccccgcccgggcagccgggccggcccgtaggccccggccgcgagcgggcgcgcagggggaggggagggggcggcagcggcagctccgctgattgggcggcgctctcacaag

SEQ ID NO: 332606 - DNA, 795 bp, Homo sapiens
  chr5:177411423-177412218
  hyper
gacccaagagagctcgtcccacgacggagcaggtccctttgcatcccgcggggccgccaggtgcaattttcgctgggccgacggcgcggagatgggccagagtccggccatccagaagtgcctggagcgcacagcaaggccctgccctcggctccgtgaaggtgagggggtaaagtcggcccggagtccccgggggtgcaggaggggccccgcgggttccagcagaccctcgacggaacgttccaggcaggcgagatctcgcacagaatctgcccttttaaaggctcggctttgtcctcgttaaacttgcgtctggcaacgcgaccgctgcggctcccgagcaagattagagggtttccgctcgcaggggcgcgcccggggaccgcgcctccccgcctggtctcggcgccccggcccaggggtcttcagtggtgaggggcgcccagatcgctgcatcccctggagctctgcgcccggccgagccactcagagctcccgccccgcacacccacttcgagctccaagtccttccttttctatactccaagttggatcctgctgggaaggaagggcccttcctgagagaccagggattgcgatttcccagcacaaagtcgaattcatgacttcagcttcaacggggctgcattctccccttggcaggaatgggatggagcgagggtgaagctgctggaaagacactcgttttatttttttaatcgtaaacggggcaacttccaactctgccagttttaagcttctagagtatctcctcggcggagcgcggtggctcac

SEQ ID NO: 332607 - DNA, 91 bp, Homo sapiens
  chr5:177543589-177543680
  hyper
cgtgaccgtctgcaccgtgtcctctaacatgggctctctgtgctgctgggtggggctgacatgtggcacaccgtggcgtgtgtggttgtat

SEQ ID NO: 332608 - DNA, 1494 bp, Homo sapiens
  chr5:178016455-178017949
  hyper
cgccgtgaccaccgcctctccaggtgtaccagcgttggttaggaacagtaggtgctactggtcacagtcaccagatacttcccacgagcctcatctttatccccgactctggccgccggcgggaagcggcgtgtccgagcgcacaccccgtggagactgaccctaggtctgttactccaaagtccctggtctctccttcccctttctcgcggccgcctgcctggcacgggaccctgaggccggagcggagaccgcaaaaccccttggggccggcaccccctgcctccgccttggcgcagacgtgcccatctctgggacggccccgagcgcacgcagccggcgggcgaccctcctcccagagacctgcacgctgcccccggctcccagcgtaccgccaccctcaacccgacacacccaagtccgccccagccacgcgccaagacgctcacctcccgcagcaggcgctccaggtgcggctcggcccaggcgtccagggcgcctggcggccccgcgcgccgcagcagctcccgctcctcctcgagcgccgccacccggccctgcagcgcggccgcctggacacccagcagcaggcaggcagccgccgagcccacggagagcagcaggcacagcgcgctcaccgcccgggacccggccgtcgtcgccgagcgccctccgccgccgccgcccgccgcattgcccttccccgcgtcgccgccgccaccggcgcgctcgcctgggcccatggcgcgttcgtcgcgcgtggactctccgagggggcggtgctgctggggcagaggctgggtgcgagaggagcaggcgggacagcccgaggcacgaggtccgccgggcgcgggggttagcctccgggtagcagcggatcgccgcgcacgcccccttcgccgcagccagctcctccacagcggccactttgggcagtttcctctatgcaaatagaccctgccagaaaaggagcagggacccacccaggggaggagcggccgggctggccccgcgcggcgagggggcgggggcgaggaaggagcgagctcctcggagccacccgtcggcgccgggctgatcccacgcgcagcgcgcacctctgccctcacctagcccgggcgccggcacccgcccccgcacgcacctctgaggcttccccagcccaagcccgcactgtggaccccagaggtcggaggggagcccggcgacaccgcgccccttctgcagcccacccctggctggagcacccaccactcgtgccttagcacattcctctaaacttgtgaattacctttctgacacttgtaaaagttcaaaacttcaaatcctgcaaaaaactgagtgggtctgtcctcggtggtggattagcgccgcttcgtggcggaaagcgacctctgcgcactcacatttagagaggcagggtcgagattgcgccaaacagaaatacgccccttagaatcttctcacgagttcttagctgccggacttcggtgc

SEQ ID NO: 332609 - DNA, 572 bp, Homo sapiens
  chr5:178594083-178594655
  hyper
cgtccgcaaggagcgccccgctaggctcaggcttggcacacgacacctcgcttccacttcattttcctaccttccggatgacgaactgcgtctcagacaactgaaaggactcgcctgagtcccacagccggaaagaggtcggggtgctgccccccgcgcggggcgggcagaggaagggccgggcccgagcggccaccaggtggcgctgctgccgcgagaacagcggcccgggccggggacgcacccggcgcccagactccgcggccgcacccgggctcccggggccccagcggccccaagacagcctctgggcctcaccctaaatacatcaattatgacctgagcaaaaagttctgttccaatcgttgctctccgacatttccattgtttgctctggaaggagctgaattatctatgctcttccctccttcagtcaaggagacgtgggaggaaaccgggatggggatcagcagcctggaggccgcctccgctggaaccgcgcccgccccgccaggaggctctgcctgctgggcaaggcgcactcagccagccccgcaggccgccacgcgacc

SEQ ID NO: 332610 - DNA, 2353 bp, Homo sapiens
  chr5:178770455-178772808
  hyper
cggacccacccccggatgcaagccagagacctgttcaggcaggcaaaagagagaggcgcacgctcctgcctgctgagccttttggagacccgggcgctccccatgcataaatggccccctgctcagaccagtcaaaacaacctgctttccagccaagcccttcagttggagcacgaggctcactaaagcacgggaagggcgcggaaagtcctcagcgcaggccttgccctcccaagggactcccaggtaacccttttccaaaacccaggcgagagcagcggagagaaaggagctagagaagtgcgtactcaccagcccatcgcagttgctgagcgccacagaggaggcttcggctaggccggccacgtctccgacgtagagacagctcccgagcaggggctccacgcgggtggtgcccttctcgccctgccactccatagtggccccgggcgccacgaggcgggcgttgggccgcagccgcaggtgcaggtctcggccaaagaccgtgacattgtagaagaggtgactgccaggctcctcctcgttgcctccggggaagctcggggtccggaccggggcggccctgcgggctcgtacccctgctctggacgtagctgccgacaccacgtgggacaccaagcggccctgggcgtcagtgcgcacgggcaccgccaggatgcgctccgctccgtgccccaggggcccgcctgcaacgggaaggggcgttagatcggcggagaccacggagccccagtgcctcagagacccgccggcaagccacgcccccccagaccccgccccactgcgaagggaaggggcattccgccaggcgaccccagaagccagcctgcacctccccggctttcctgcaaccgggaaggggcgttaacagggccaccactccggggctccgccactccccagccgttccctcctccggagaccttgcctgccaagagctctgccccctgccccgttcagggttggggctcggtgggaacctccccgtgcccgaagggacgaccccgtcagagagtcccccgacccttgcacctaccgtccttggcaggacgtggagctgctcggaagccattccgggttggcccccttacccgtgtgccacgacccctcggcgggcccctgccgcccgagtgccctcaccgccagcctccggagcggcggagtctcggcttccccgagcacgagcggcctgtcctgcctgtccagctcccgctcagcccgctgccggccccgtctccccgagcgcccgaggactgggaggggtggaacagggtccctccgatctccggggattccctgcggggcgccccaaccaatccttagggcccaaggctacgcgctcggcagccggctcctccggagcgtccccggacgcgagccccggcgccgcctcgccctggctcccccctcggacccgctggggctgactctgcgctcttggccgcggggcttttcccggccctccgtccccaccctccgcgactcaggagccgccagtgctccgaggctcccccggcccaaggcgctcgggggcggtgcggggcgccccctgcgcgaccaacccggccccgaagttggccaacttggccccgggcggggcgcgcggagtttgcccaagtcaggctggacgacgcctggggagggggcggcggggcacgcgggacagggccaggccggcgggggtcccggggagtaggggccgggccgcacctacctggggggtcggcggcggcggcgagcctggcgttcgcgggcggcggcggcggcggcaggagcggcggcggcagcagcagcagcagcagcagcagcgcggggcagagcaggcggcgagcggctcccgccggcggatccatggcagccggactgcagccggggccccgcactcgcagccggcgcgaaagttccccgcgagccgcccagcccacatctgggggcagctggagccgcccgcagctgcagcaccgcagggcgcggggcggaggaggcgaggcgcggaggggcgggcgggggagcgcggagggaaggcggggagagggaaggagcgagcgagcgagggaggcaggcgggagggagggaggcgagcgagggggagggcggggacggcgggcgcctcagcctgcggtgacccggcgcatcttggcgcggccgccgccgccgcccgcttccctcttcgcgccgccgtcgccgcggtgccgggctcgcagcgaagcagagacaccccgaggcggcggcagagaagcgccgcgggccgggccgggggagccccgccgccagccaccccaggggcacaacctccgaggagcggcgccggccgaacgtccccacctagaga

SEQ ID NO: 332611 - DNA, 381 bp, Homo sapiens; identical to SEQ ID NO: 231705
  chr5:178957527-178957908
  hyper

SEQ ID NO: 332612 - DNA, 546 bp, Homo sapiens
  chr5:179243862-179244408
  hyper
cgggtctccggccacccggtgacggagggagggagaggctggcgagggggcggcgccttaggtcccagcgcgacccgcctctcagcccctcccgccggctacagccgcgcgggacggggcagggacctcgagaacaccggggacttgcgggccggtggccccgggcaggccacttctgacgcgggtgcgaggccttccgcgggcgtgcacggttgggccggagccgcgccgggggccgggacacgcctggggtcagcgctggcgtcgccgctcgggtggggtgggccgggttcgggtccagtctcctccccacgggcggcccgcgccccgtcttccagtgacccccacatcccttgcgccccgagctggaacttcggcaggttctgccccgggccgcgcgcgctttctggggaccagggctgtggttcctgctccgcgtcgtgcctttagacaccgccgggcgttcgtcctccatccctccccccttttccccactccgcggttgacgagggccgcccccaagtggccatgtcccccggcatggac

SEQ ID NO: 332613 - DNA, 727 bp, Homo sapiens
  chr5:179245848-179246575
  hyper
cgccgggccctggagggtgggaaggggccagtggacgcggggagcctgcggggtgggactgcatcgggaaaggggaaggagtcagaggcgagaagggggagagtgtctgtctggctccagccgctgcacgctcttcctgctcaggggactcacggtgaccccggagccactccccagcccagcctccaggtaagaggtcactgagatgggtggcagcaggggccggggatccccctattacgacagcggtcatgggacgctgactcactgccggccagaccacctgacctccgcggcgggaggagagggccctgccagggggttcccgccgcgccttgtttacctccgggaggcctcggcctcgcgtgggggcagggcggccgctggggccgcaaggcgtgcggggaagggccagagccgggtgtccaccccagcttcccaaagactccctcttctgtgcttccttctcccctccccgccccccccccagtctcttcacatgcccctagcccccgcggaaacttcccgcgatcccaaacgggccaaatggcgagaaagcaaaggagctccttcttgggggtgagtggggcgccttgagcgcttcctcaaagctatgttcccagagccacaggccttccttgtgtccctcaccctgctcagaccgggccatagccgggggctggggcaggaaagccggccctcggcgggggccacgtggctctcaggc

SEQ ID NO: 332614 - DNA, 1326 bp, Homo sapiens
  chr5:179498011-179499337
  hyper
cggcacgtttttatattagaaaagggccgcatccttccagatctagcgcagccttaagtccgtgatttgaggaacctgccgcttccaaaatacaggctgagacgtcctccccatgaagtagttttgcgctcttgcaccacctcctttgtctacgctgtccctgcaaactcctagctcaatgccctccagcaaacgagctgcctgaacgcaaagatgaccgttccaagtcttttttaaaagaagggaaaaacccagtcacgctcctggagcctggttcccacgggagcaggccgggctgtccacgacggaagcctcgaccctggctggggctgtcggccgggcagcgcgggagagccagggccagagccggggccgggaaccctagtcccgccgcctacgcgggatgcagcgaccaccgcccgccgcccccgggccggcactcacctccgtggaggggcagcggcgccagcacctggccgcggacctcggccttgggggagtcaagcccgtagcgcccgcggtcgatgcgaaacgtgagcggggcgccgcggccgggctcctgcaccgtcacgttgatgagcgccgtgtagtactcctggctcgcgttgtctgcccgtgccggccacaggctgcaggtcagcagggcgagcgcggcgagccgggcagggcccgcccgccccgcgcagctcatcgtccctccggcagccgccgctgctcgcggaccgggctccggggccggcgcctagaggcggggcgggcgcggcccgggcggcggcgggagcgcgcgcgcgcggcctgcgcggggccgagcccgagcgcggccctcctggacgccgcggccccgccgctcgccgccctcacgtccactgcccgcctgtggggacgcgcccatgggccctcggcgagggcggcgtctcaggtcgcacgcgggcgtctcttcggggtcccaggagggttgtagaagcgtgccccctccatccccccgggtcggtcccaccgaatgggaggcgcctcgcaaggacgcggcgggggaggggaagggcggcacgggaggaagcgccccgaggagggtcagcggaacacaaagtccctctcgcgcggctgccgcctgaggcgcgtgtccgccgccgccccgcccccccgctggtctagcggcaacgcgcaggcctaaggcgcagtcccgccccgagcgcatgcgtgccagggcctgtccgctcccgcccgcctgcacgagggcccgggcagccgggtcagccgctggtgctggttgtttctctgtcaggcgtgatagccgcagggcgtggagcccgggagatttgcgaggac

SEQ ID NO: 332615 - DNA, 1466 bp, Homo sapiens
  chr5:179779452-179780918
  hyper
cgctccgggccgcggccgccctccccacggtcccgcagccacgcgggacagcgcgggagcgccgcgggaatcggacgcccggccccgctccccgccccggactccctctcgtggcttcgggccgaggttcgggcagtgactgcctcttccccgcgcaaagaggcggtaacgcggcagcgacccttctagggaccagacgttcctttggggtcgcgaggaggacgcgcaggccctgcctgaggcactgacgcagcgggggcgaccgggcgggctgcggggacggcggggcggggtcgcctctcctctcctcggtgggcgcggcgggctgagtcgggatgggcgccccgcactcgggatgcgccggcctgcgcgtggccgcctttgtgggcgactgggagacgtggaggagagcgacctcggtcggcatggggtggggacccctctgttacggggtccaggccggaccggaccaggtccctcccctccgtggggaccgggcctcggtccccctcactgtgtccgagaccaggagtcgggttgggcatcccccacccacacctccgagacggccactcggggaacgcgggtgaggggcagccaggcccggccgacgacagcccctcggtaggggcccggggcagatcggcgcccccagccaggtcctcggcgcctgcttgcgggcggaggcgcggagaggctgcggcgccgggacccgcggacggcgtggaggaggcggctcgggcgggcgcggcactcaccgcacatcgtggctgcttctcgggctccttcgcggctcgagggggtctgcccgttcggacgctggggctcctccgtgggctcctccgtgggctccgtgggctccgtgggctccgcgggctccagctcccgtccgctcggcctccagcccttataacccggagccctccgagagggcggggaagggggcggggaaggggcggggcttcccccgcccgcctgctcccattggcccccggttgtcgtgacaacgacgggacccggcccccaggagccagggaggggggccgaggggcggctcccaggcgcgggtcgggcgtgtaaggctggggcgccgggcgccagatcccggagcggggcttagggcaaccaacggcccgagttcagaccccgactcaaccagagtaggcgtggaagccgggcagggcccgatcgcgctgtgcctccgctttcccgtctgtgaaacggggctacccagggaagctccctcccacggggtgctgagaagtcagacgggccgcgtaaggggcagagcgaggggtccggcatcactcgcgcgctccggaaacccgcgtgagccgctgttcctgccgcgctcccatctgagtgacaggcttgtttcagagctccgcagacctctaagcctggccctcaccctgcgtggagagaacgcccgggcttggcggagagacgagaaaaccgaggctccc

SEQ ID NO: 332616 - DNA, 149 bp, Homo sapiens
  chr5:179867501-179867650
  hyper
cgcattaaacaacacctcaaggcagcccagatcgggagggagggtccctctgcaggacagaaaccagctcgtgccgcaagccaaccgcgagaagggaagagggggcgctctaggttacaagagaattaagaagcacaacacccagatac

SEQ ID NO: 332617 - DNA, 1348 bp, Homo sapiens
  chr5:180017458-180018806
  hyper
cgggcttctcccagggacagggcttggaggggcaggacgggaaacagccctgacgtagggccgggacacctctggtgcagttttgaggctggccgggaagggatgcccgcgcaggaagggcacccggggtgcccactttaccagcagggccttcagggccttcacggcccccacggcctggggacccagctcagccacacacttctgggagccctctatgaggtggttcacggggatgcccaggctgctcagcaggagcttcagcgggttgagggtgccgagggggttggccagggtcccggccccggcctccgccgccgactccagcgcagcgacaggctgggccacaggcttggccgagcccactaagaaagcagcagctgcaagcgaacagggaggggtcaccgcctgcgcgccggggtccccagaaggcaggtccaggacgcgcccccgcgggaggcgcccaggaaccgtcgcgccctgcccggctccccgaccgcccctccctcctgcgccgaggcctgccaggtgcgagcccccgggacacaggcgggtctggggaggcggccccgccaggagacgctgcagggtcaccggagtggcctgagggtggcggaaggaccggtgaactctgtgcagggtccgggacaggcccccaagggaggggacactcgcgctgcgccttgcaggatgaggagccggtctccagacggggggcagacgggtgtccccaggccaggggcggcctccatcccggcacgaggctggagacagccctgagagggggaggccgcgggctgcaggcgcggggccccggggtggcggagccctctgggcgccgggcgaggctggaaggacctgggatccacgatcggcgcaggcagcggcgggggcgcagcgggcgccgaggcctcaggccccaccgtgcgcgccaggagcccggggcgctcaccggagctgcaggacagggccacgcagagccccaggagggcggcgagcttcatggcgcgggggctcggggcgcgcggggaacctgcggctgcccgggcaaggccacgaggcttcttatacccggtcctcgcccctccagcgccggcctcgcccgcgctcctgagaaagccctgcccgctccgctcacggccgtgccctggccaacttcctgctgcggccggcgggccctgggaagcccgtgcccccttccctgcccgggcctcgaggacttcctcttggcaggcgctggggccctctgagagcaggcaggcccggcctttgtctccgcgaggcccaccccggcccgcaccttcgctttgcggtctgaccccacgcgcccccctgcagggctgggccc

SEQ ID NO: 332618 - DNA, 521 bp, Homo sapiens
  chr5:180046791-180047312
  hyper
gcaggtgagctgtacggggtgagcgtggagacaggtgggcggcgggggagccccgtgcagaggtccaggaggacaggcctggcagcaggaggagcgtggggagccacagcgggaagacaaggagaggtggacaggaggccgcgcatcctcccgggtaggtgtgacagatacaccctgctcagggtggcagcaggtgacctcagggagcctgggaactggggaccctggctgaggttctaggtacccacgcccacagggacaggtcaggccaggcggaacttcctggtgcaagttttgaaaatggagggattcaggcactccggcctgcagcaggtgggtcgggcaggaggtgtgggttgggcaggctggtgctggcctcacccaggtgcagccgctctcgggggaattcccactggctggcatcgtaggacaggtattcgcattgctcctccagaggcacctccccggggtccatgatgatggacaggtagcccgtcttgatgtctgcgtgggccggctgc

SEQ ID NO: 332619 - DNA, 1229 bp, Homo sapiens
  chr5:180075844-180077073
  hyper
ttccgccccttctgcggcgctgacagcccgcgattcgcctcctcaagattcgtctcaagtgccagcgtgcacctgcacccgtccgcctcgggcgcgcggtggtccccggcccctgtccccgccgtcgccggccacggggagggggaagcccgcctcgagcgccctctgggggaccgaccgcgagcggaggcgctgggcgtcgggaagtgcgcacccaagtccggggcccggccgggatggatctccggcgcgcgtgggtcgggacggcgcggcgcggggaccccgcggggaagcgagtaagggcgcgaaggatccgggctcagcgcgcagcccggcagggcccggctccgaggacgcggagccaccgacggagacgcggattcaggggccgggagagctacccctgcgccgaggcgcggcccggccgccctggccctgacccggctgcggtccccgcccgccccttcctcatcccgaggtcccgcgccccaagcgccgtgctcccctcaggcgtccgcgcaccagggccaccgtgtcccccgcccgtacccggcggagcggtctcagcgcccgccccaggtgcgcggtaccccctccccggccagccccacgctcgggcgggtggcccgttcgccgcgctcaccgtccaggagtcccaggcagagccacagtcgcaggcacagcgcggcgccccgctgcatctccggccgctgcgcgtgggtccgacccgagcggccgcggctcggggctgaaagtgtccgcgcgggcgccggctggcctggggcggggcggggcggggcgggggccggaggcgggcccgggattcaggccgctccccgcgcccccctccccccgtccctcccagcccgccgcggggcgtccggtgcacccgagcagtgcgcgctccgcaccacagggtccgggccccctcctgggcggctccgggcgcggggacgcgggtaacgcagacggtctcgcgatgcgctccggaggtgatggagcctggtgggcaaaggggagcaaaatgcggcacgcgctcttttccgtcctttctttccatcggtaaaatctagactaaacaagaaagcaatccttgtaaaaatagtatgttacatctttgaaaatagtggcaccagccggcgtaacatagggagacccagtctcaaaaataaacaagcaaataaataaaataatacgccgagcttggttgtgcgcgcctgtaatcccag

SEQ ID NO: 332620 - DNA, 561 bp, Homo sapiens
  chr5:180257880-180258441
  hyper
cgcagggagggagagacggcgggtgggggttgaacaaagtggagattcacaaaagcagactagggcgggcgacgtgatcagatgacctgtgcgggcggcagcctcctgccctcctccccttcgtgcgccggctggagcgaagagttcttttgacagccgtgagcttccccgccaggaacttactggggctgcatcaccctagaaacgtggctttgggctgtggaaacgctgcctctgtggaagtctctcctcgcgggggtggacgggtcgctgcgcgcccagcgttcttctgcggttctcacagcccgccgccgccgccgcctcggggacctttgcggggaggcctcaggtcagcgccgcccttgcgatggcgggagagcagagcggccccagggcctctgagctccggccccggcacgtcccgccctctcctccgcttgcgggagccggggcgcctcggagggaaaccttccggacacaggccgggagaagaggggccgtggcgccatcgcgcagcttcctggtttcggccatgtttttttttttttgagacggagtttc

SEQ ID NO: 332621 - DNA, 457 bp, Homo sapiens
  chr5:180258503-180258960
  hyper
cgggttgaagggactctccggcctcaggccgcggtgttcttgtaaattagaaccggcctatgcgccaagcgcgggtctcgcggctgcggagagaggcccagcagggggcggggacgccgggaggcggggcctggccgagctgcgcacacccgggtggttctggctacgggtacccggacctgcccaacgaccgttctccattcccgacctccgcaccctacccggtccgcagggcaccttcctcctctctctcaggcacgtcctcgacctcagttgccacgtgcacatgctggtgccttccaggtcggtctttctccaccagactccacctggaactttcttccttttcgtcctgtgctggcctaacccctgctcggcctcggccctcagctgccggctctaacaaagcctctgtctttcccagacccctgtgaccaggtcaggctctgctccctgc

SEQ ID NO: 332622 - DNA, 1486 bp, Homo sapiens
  chr5:180479644-180481130
  hyper
cggcgctgcccccggccacgtcctgcctgcgggcgggtcctccctggggagccgggagggacgtgggagctgcgaggccgcgcgcacgtggttcggttctcacttcttccaaaagcgtggtaagaaccgagggagaagccggatgtttgcaaacaagcgaggagacgacttgcggaccagacggcgcgggtgcgagcaggagctccccggacatccgccgccagccaagcccctgggaccctcccgcctgcggacgcggggcgagggcgggaagacgcggggcgagggcggcgctgcggccgcagaagcctcgagccgggctggggcgcggttccctcccgcacgccccgcggcgcgcccccgccccctccgccgcgcgcgcccccgccccctccgccgcgcgcgctcccgctccacgcccgtttcccaggcggctgcggtggcgcccggagaaggtcccgcgggaggtttcccggcacgcggcgggcaggccggtctcgcctctcggtgctcagcggcgcctggaccgacacggcccccgcgggtgttttccagacgtgttcgtacccggagcctctgcgtggaagagcgcgttcgtcgcgaccctgccgctgctgttggtcctcgcggcgctggcgctgggcgtcctccggaagcagcggagaagccgaggtaccggcgcgggcggcggggcggggaggggcaccggccggtgctgaaccccggggccgcggaggcgcctccccccaggacgcggcgcgggaaggcggcctggaaggggcgggggcgcgcactcagccctctccgctcccgtttcccttcagaaaagctgaggaagcaggcggagaagagacaaggtgagcggggacagggcgttctgcacgcacctgcccaagtgccaaaacccgccgtcatctaaaggctgtgggtcccgttacgagggtttattccagcgcgaggtgtcagggcggccaccggggaacggggatcggtgaccccggtggggaagggggaagatcgttcatatggacaaaagcggaggtgcggaacggctgcattttccacggaggctagtgcacagatgtcagggttgaccggctgctgtcgttacgccctcggagcttcacatcacactgtacagagggagcggtgaccagggtctctgctgccagcgccacctcgtccaggttttcatagcgcacagggagtcgggcggatgcgcaacatctccgcacagggtcaggaagcggcggtcaggcaccgagaaaacagcccagttacgtgaggcagtgtccggggcttaacgtttccgccgagctaatagatttgggaggctccgaccctgattttcacactagcaggagggagggcgctgggtcaccctcctatgcagaagggcagccaagggtgcgcacttccccatcccctgcctggagcctcacttccagcccagcctgggcccgcagaccaccgcgggtgggagtgc

SEQ ID NO: 332623 - DNA, 635 bp, Homo sapiens
  chr5:180630981-180631616
  hyper
cgcccgagcctccccgccccgccctcacccctgcacacaccctcgctgaggctcagcgagaaaatagcaaagaaagggcccccagaatcgacagcgttggcacagtcagacggctctaggtgcgcggcttaacccgggagccccctccctggacatcttggcgaggtcctctcactcagttccacgaggtggggactttgagcagagcccgcttcggggaaagagataagagtgggggcagcggctgcgtggctgtgccggagacttcccgcgggcagagagctgcggagacgcagaccaggctagaggctccgaacagacaggaagaacatcgccaagtccgtgggggacgtcgcgcaggcggcccagtatctggcccagagggaaacgcagtgggggtggggtgggggtattggtgatgttgggggtgacagagaaccgcgctcagcccgggaaccagcgctgggcttcctggaatggagaaagaagggaggggctcacccgggcctcctgatcgacaggctgttctctgcaccccgtgcgcgggagcgcgggaccaagtcagggggtcccggggacccacggggtgggtgggggctgcgctcaccttggcctcctgcaccgcctcgtccagc

SEQ ID NO: 332624 - DNA, 673 bp, Homo sapiens
  chr5:180632796-180633469
  hyper
cgctctcttgtcccccagctgtctccacagccccgcagcagagctgcctgtgttatccgcttccacaccctctctcctcgctcactctggaggccacttggatcaagctttcgcccgcaccctcctcagaaaccgcccttgccaatgtcaccgggaacttcagcaattctcacccaaaggcgaagacctcgcctcacctcatctgcccccggatgctccctccttcccgacttcccttctcagggccttccaggacccagtgtccccgatcttcttgctgttcctgaaccccgtggcctctgcgctggctgttccccttgcgtggacctcttttctcccaccacctgcatgctccctcccacctcattcaggtcttgtttcaaacgtctctgcccacgaagcccgccccgaacgcgcacactgtgtaaagtcgtctcttagcgcgctcccttctcagggccggctctgtgcccgcactctatctcctctggaatgtcagctttcagatggactgtactaggtttgttcacggctgaatcctgtttttagagcagttcttggcaagctcagtaaggttttcttggattaaacttggttcgaaattcaaaagaggagccgcagttcacggtggaaagtaggcccatcgcctgtgtcccagtcctttcttcctccc

SEQ ID NO: 332625 - DNA, 681 bp, Homo sapiens
  chr5:180644001-180644682
  hyper
cgacctagggtagtaactggaactgcaggtatgcaccaccacgctcggctaattaaaaaaatatatatattttttcctagagatggggcggggggcgggggcgggggcggaggggacagtctcactatgttgcctaggctggtctcgaactcttaagcccggtttccgagtcgctggggctacagtagcgcgctgacacgcccgacccttgctttgccacttagatgttgcatttattcgactttcacgtcgggcagaggtgctgggaaagaggcggctggcccctgcgtaagtgtgcgggtgcggtgtgagaaagctggaagcctgttttctaggcggggaagcagcctgcgctgccggggccgcatcatggcacgtgggtttccccgggcttactctcctgccagtagcgctgtcctagggatcccgcccacccctccggcttcttctctgaagcctttgcagcattttccctgagattgctgaagaggcccctggggatcgggctcccaactcacccgccgcgtcccacggcccgaagccgacgagctgcaagtgaggatgggtgcagagggaggccgacggtcacgccttggagaggctgatggtcctcttgaccgccctccaccgccactgcgaacccaaaagccgtgtcagtgctgcaggcccgcccgaagtggc

SEQ ID NO: 332626 - DNA, 2706 bp, Homo sapiens
  chr6:391113-393819
  hyper
cgcagagacagtatttgaatcaagcttaatagctcaagggagctgggccatttcctattttctttttagtgagtgcgatgttctctaaacaccgcggagaggcagggttcccggtgatggccttgccgagggtgctcccgcaacctccacctccagttctctttggaccattcctccgtcttccgttacacgctctgcaaagcgaagtccccttcgcaccagattcccgctactacacgccccccatttcccgccctggccacatcgctgcagtttagtgattgactggcctcctgaggtcctggcgcaaaggcgagattcgcatttcgcacctcgcccttcgcgggaaacggccccagtgacagtccccgaagcggcgcgcgcccggctggaggtgcgctctccgggcgcggcgcgcggagggtcgccaagggcgcgggaaccccaccccggccgcggcagcccccagccttcacgccggccctgaggctcgcccgcccggccggccccggctctcggcttgcaaagtccctctccccagtccaacccccggcccccacaggcctcggcgccccgccccgccccaggccccgccccagagagttctataaagttcctctttcccacctcgcactctcagtttcaccgctcgatcttgggacccaccgctgccctcagctccgagtccagggcgaggtaagggctggagtcgggcaggaggaggggtgtgaggctgataccagagaggacccggagcgcgaaccagaggttcgacctccagggcagcgcagggtaccccggcttcggagcgggaagggagcgcgccccgtcctggagctccgactcccaccccatctgcgctgagccggaggcgctggtttgggctccaaggcccgcctccttggctctgcccgagcctccccgcctgccctccgcgctcctgcgacggggtcgccacaagctggacgggatgagctaaccggactgtcggggccccaggagtggctgaggcggggccgtccaaggcacccacacaagacggcacaactgcctgcgagaaacaggcccggccctgtggaccccaatccgaggctccttcccctgctcttcgttcctaaggggcccaagctcacggcggcctccggcgcggtgctcacccgctggcgcaggaggaggaggagctccacatttgggtcgctccgagccttgcgtgcggtggcctagccggcctggcgcggtccctgcctcccaggctccgcagctgtcgtcgccctctcccgcgccctccccgcctccgctctcccgggcctgctccggggtccggcggacgctctgcgcgcggaatcccccgtactggggctgcagcccccgcgtctgcgccacttgtcgtttgcagagcccacttagtgcgcgctagctgggcagggataggggtcctattcggggcgaagggtctggatgcgagcagagaaagcggagggtggaggaacccggggctgcgcccctggaacgcccggccgcaggcgaggtcctccgcgcgtggaggccgccaggggagtggaaactgacagagtcgcggggaaggggcgagaagcgggttgggagtgagcgaaggcaagcgagagctgcgagtgagtgcggaaggagggccaggaggggtggcggctgggtggggagagagggtgcaagacgagcggcgcgtgtcgggagcctttgggctgcgggtgcgttacaggagagcaggcgggtaggagccttcgcgggggccgagctcggaaggcggacggctgtgcccgcccaggggatgcgcccgggccggccgcgaaggtgccttcttccgggggcccggacgaccctgacacggcacgcgcgcgcttcgcagcctcaaagactccggggcctcgtggtcactggcgcaggggatcggggcggggtgcccggagtgcggtgcctcgtggctgaagggcagctcttctccccgcagtgcagagcagagcgggcggaggaccccgggcgcgggcgcggacggcacgcggggcatgaacctggagggcggcggccgaggcggagagttcggcatgagcgcggtgagctgcggcaacgggaagctccgccagtggctgatcgaccagatcgacagcggcaagtaccccgggctggtgtgggagaacgaggagaagagcatcttccgcatcccctggaagcacgcgggcaagcaggactacaaccgcgaggaggacgccgcgctcttcaaggtctccggcctcgggagccggcgggggcgcgccggggagggcccagagacagagcccggggtccccggcgccgcctccgaggcgagcccaggggaccgcgcggggcggacgggcgggcggcggaggcatcaggtggcgtcgccggagccgcaggaggaggaaaggaggcctcggctctcagcgggaccgcgggggccgggagccgggtcctgggcgcgtggaggctgcagggaaaccgctgaaggcccggccgggcccggggaagggcggccaaaggcttgaggggttttgcgcgttcgtccgtgcgttctcgtttccacgcaagcctcccgcccttcctccgggctcccgtctgccgcctccgtccgtgggtccccctcgccctctccgtgcgtccgcgcctgtgccggcggctgttttcgtctctcaccgcgtctctgtttctcttttc

SEQ ID NO: 332627 - DNA, 791 bp, Homo sapiens
  chr6:710660-711451
  hyper
cgtgctgacggggactggcttttcttcttcttcttgtagtttgaaatggaaacgctgcactgctgagaaaataccacggaaatagaacccactgcattccaggaaaataaataagcaaggccacccaaattttcaatgagtgctcctgcagaatgcaggaaatggcaggagatccgtccgaggcaccccaggccgggtcgtgggtagagagcagggacgagggctgggaggggacgcaggcacagggtgagggtggcccgtctccagggagaactgcgcgctcacaggcggggccggcttcccgcatcagcccggccgggctgcaggttctgagcgagggggcggccgtgcctcactctgggcgggacgcggcctggtgcagggacgctcacttccagtggcatttcccgtcttacacgatgagcttcatccacgttctccataaccccctccccgccacgggaagcgtcagccacctggaacagccctattctgctcggttgtaaaaagcgtcaggcgcttttgatttgaaaagcgttaggcctgggaatcgctgttgctccctcggtgggcacgccctgctgacacgccctagcccaccggggaagccactggccacgagggagcgaggcgcacgggtgtcttccctccccagagtgagtgtcagggaggaagccaggtcttccagggcgctgacaaggcagggccgggctccttccctccgttgtgtttctctgaaatgttcgaatcactggtgtgacgggagcacttaaagccgaaaaaggaaagac

SEQ ID NO: 332628 - DNA, 3151 bp, Homo sapiens
  chr6:1311068-1314219
  hyper
cggctccgtcgctttttgtgcaacaaaggcaggaaaaaggaggaaactcggcgtggcagggcagcgggctggaagtgcaccttcccggggccgaggcgcccgctccctggactaatgacgccgcgtggggatcacgccccgggcgccctggggtgaggaacggtcccccctttcgagattgtccgacactggtgccagtgaggtcacagcaaaagtcccaaaggaatattggaaagaaatggccgtgaaccggtttgttcttgcccccgcccccgggaacacgccctctccgtcgttcctgttgactgtcagatcccgggaaccaagcggcggagctcggcggcatctgaggcttccgcagggacacaagtgcaggcacagcccagcaccctgcgccagacacagccgccccaggggaagaggaggacgctgctgtcctcccgcaggagtcaccagccaggtaaagaaaaaggtaaagtaagacaaagaaaagtgaaagtcggagcccatttagtgagcaagagtaaaggtcatccaaaaaggcgcatacaatttcaagcccaggagtgcattcattaaaacaagaggaaaagacaagatggtccttgaaaggagctcataggaaggggcacagcacaaggctcccgaaagaggtcactgcaagtgtcctgcgcaatttctgttcagcacctctgcagtgacgacaggggtttgctttcgtaagcagcatcgttttcactactacagaagcacatacgccgcgtgcagcttaggcccgagcaaagtccctgctcccctagacccagtcccttcaggtgtccccctaggggaactgtggcgtgtccccccaaccaggcgcactcgcctaaactgcgtccccgaactccagggcgcagggagccctcgcgggctgcccggggctggggcccacacctgaacggaggagccggctggcggagcggccccgcgcgcgcacacacgcacactcacagacacgcgcaaacccacagcggcgcgcgcgctccccattggcgggaggaggaaggcggggccggccgacccaaaacaaacaacctgcgccagcgactttgccgccgcgctgcagtgtggcctccgcctggtgcgcgcccgttggggagctggggaactggggagccgccaccacctcggccacctcgttcccccaccccttgccgtccgcgctcaggccccgcccccgcggagccgccgcagggttatattgggccggcccgaaggtggaggcgagacgcagccgcggcaggccagcggggagatgctgccccggaggctgggagcgggaaggcggctgcgggcgcagcggcctcggggactcgcctccgcgggtgctcaaggctgaaggcgccggaccttcccccacggtggcacgcacatcatccggcaccatttccgtgccccgaagacgcccgcgcgggacctgggaccgccagtgaagaacccctcctgggctctttaacgagcagcagatgcgcatgctgcttctctccggcaggaaagccttctaagcccggcgtgctcgggcacccgagggtggaaccgcggcccctgcacacactcaccccaaagtctcaacgtcgaaccgaaggcgacacccacccaactcctccctctccgccccatagtccacccaacacttgcagcccctccagagaaaaagcccagcggaagaggactccggaaaagtgactatctcggaagaccagggtagagctcccgggagaaaaaggcgaagatccccggccccggatcgccatccccttccctggcaccagcttctctaggctgcgcgaaggaagagggtacgacgccggggagggactgggtgcgcgggcatgaagttggaggtgttcgtccctcgcgcggcccacggggacaagcagggcagtgacctggagggcgcgggcggcagcgacgcgccgtccccgctgtcggcggcgggagacgactccctgggctcagatggggactgcgcggccaacagcccggccgcgggcggcggcgccagagatacgcagggcgacggcgaacagagtgcgggaggcgggccgggcgcggaggaggcgatcccggcagcagctgctgcagcggtggtggcggagggcgcggaggccggggcggcggggccaggcgcgggcggcgcggggagcggcgagggtgcacgcagcaagccatatacgcggcggcccaagcccccctactcgtacatcgcgctcatcgccatggccatccgcgactcggcgggcgggcgcttgacgctggcggagatcaacgagtacctcatgggcaagttcccctttttccgcggcagctacacgggctggcgcaactccgtgcgccacaacctttcgctcaacgactgcttcgtcaaggtgctgcgcgacccctcgcggccctggggcaaggacaactactggatgctcaaccccaacagcgagtacaccttcgccgacggggtcttccgccgccgccgcaagcgcctcagccaccgcgcgccggtccccgcgcccgggctgcggcccgaggaggccccgggcctccccgccgccccgccgcccgcgcccgccgccccggcctcgccccgcatgcgctcgcccgcccgccaggaggagcgcgccagccccgcgggcaagttctccagctccttcgccatcgacagcatcctgcgcaagcccttccgcagccgccgcctcagggacacggcccccgggacgacgcttcagtggggcgccgcgccctgcccgccgctgcccgcgttccccgcgctcctccccgcggcgccctgcagggccctgctgccgctctgcgcgtacggcgcgggcgagccggcgcggctgggcgcgcgcgaggccgaggtgccaccgaccgcgccgcccctcctgcttgcacctctcccggcggcggcccccgccaagccactccgaggcccggcggccggcggcgcgcacctgtactgccccctgcggctgcccgcagccctgcaggcggcctcagtccgccgccctggcccgcacctgccgtacccggtggagacgctcctagcctgagtagcgccgcggggcccgggaacgccgagtgcgcgccgtcggggaggcgggaacgcgggcccgcgcgc

SEQ ID NO: 332629 - DNA, 931 bp, Homo sapiens
  chr6:1381781-1382712
  hyper
cgggcgggtgggatgatttgttgatttgcttgttttccaccaaaccgcagggcacctccaggagctccgggacaacttacaaatgaagacacagagcccccgtcccttgcttcagagaaccaaataacggaactgaatgatcgtttcttcagcaaagcctaaagacgcttgcgtcccgcggagaggtgcccacgcgcgactcggctgccccctcttcttgcgggtccgggtagggtagggcgggaacgcgggacgtgccctaagcgggccagccgagcgcgagacaggcgatgctgcagaagcctgcccgcctgcgggtcacacaccggccggcctcggctgcaggggttgcggggccacgggtcgcggggcgccgggagccgcgagcaggtgacggccgcgccgggcagccccgcgggccgcgattcccgagagcctggcgccaccccgcggaagccggaggaactgcggcttcttcccgctcccgcgcggaggggagagggaggcgcagcgcggaggggagagggaggcgcagcgcggaggggagagggaggcgcagcgcggaggggagagggaggcgcagcccgcaccgcgcaatcccggggctctggcgggagggaaggtgacttgcgtgggacgactccaagaggccaggcccggccttcgcagttcacccacgaggataccgcgaccaagccaccaaagcactctctggccaggccgagaccccttttcccccgggccccaagagaaaaaagcactttctcctaaaacacgaactccccgcggaggggcccggggctgcctggcacggggcagggtgtgcggctgccgtgcgggcgcgggccagagtcacgtggaggcaggcggagagggcgagggggcccccgtaaatcatcctgagggatttttggcccaagtccctgtttcc

SEQ ID NO: 332630 - DNA, 913 bp, Homo sapiens
  chr6:1383727-1384640
  hyper
cgcgaacgagctcccctccccgactgggtcggcctcgggcgcctttcgccttcgcaggccgccggggttccgcggagggcttgtgtccctccctcccgccgccgcagcccgcccgaaggtcaggccgcatccggggcccggggcctttggccaggctgcggggaggggtggggttggggggctccccaaagcagcttctcggaggcggcgtcggggcgccctgaggtccctagtcggcctctgggcgccgagcacgttttatttatccccacagaggatgctggaggacaaaagaaatatttggacgtcagagctgatttatatttttggaagagctacgtttccttttctgaagagaagcgagcgcgccccatatcctgagctcggcggggaggacgagaggggagttttgatgcgccaggaagttcatctatcgcccaggcgctcaggacccggcgccccgccgagttcgccgccctcggaaatatttatttatttgggggaagggagggcagcggggaggagaccagccagacgggagaagaaagccctgcccgggctgggttgggacctccagggcgcttccccgcgcggccgcagccggccagcctctggtctcggttggagggcatcgcaggcgcggcctggcgacctccgggcgcctttggctggtgtcttccgtagccctcggcgcgcaccctcccgcgtgcagtgcccggagtgacctcttcaggccccgcgggcgcctcctgggtgggccccgcggcccctccaaccctgcccagcgtgtgtgcgcggcctagccatctttctccccagcctgggaaggcgggcgggaggaggggatccgaggccgggggccgcggagcaaaaggcacgcggacccctaaacgacccccgagcgttgccacag

SEQ ID NO: 332631 - DNA, 985 bp, Homo sapiens
  chr6:1389802-1390787
  hyper
cgagagacagagcgaggagcgctcctgaagggagacgtcgggctcgtccccggggtccaggccgcggtcccactcgcgggcgcagtcgcccggcgccggccgctcggccccgcggcctgggaggccgttgcgcaaggcagggcccgcggctcggggagggatgcgccgggcgttgcctcccgcccgccgccgccgccgccgccagaagccccagaggagctgagggaggcgacgccgaagcgctggcccggagtggccacggctgcagcccgggcggcgggctagggcgctcgcagggcttctgggccgaccccgctccggcgcctccgcttcccgcccggggcccgccctcgcggcccggcctcgctcccgggtcccagatgaccaccgagggcgggccgccgccggccccgctccgccgcgcgtgcagcccggtccccggcgcgctccaggccgccctgatgagcccgccgcccgccgccgccgccgccgccgccgccgccccggagaccacctcctcctcctcgtcgtcgtcctccgcctcctgcgcctcgtcctcgtcctcctccaattcggccagcgccccctcggctgcctgcaagagcgcgggcggcggcggcgcgggcgccgggagcgggggcgccaagaaggcgagctcggggctgcggcggcccgagaagccgccctactcgtacatcgcgctcatcgtcatggccatccagagctcgcccagcaagcgcctgacgctcagcgagatctaccagttcctgcaggcgcgcttccccttcttccgcggcgcctaccagggctggaagaactcggtgcgccacaatctctcgctcaacgagtgcttcatcaagctgcctaagggcctcgggcggcccggcaagggccactactggaccatcgacccggccagcgagttcatgttcgaggagggctcgttccgccgccggccgcgcggcttcaggcggaagtgccaggc

SEQ ID NO: 332632 - DNA, 226 bp, Homo sapiens
  chr6:1524268-1524494
  hyper
cgaggggtctggtgcggaccagcccccgagccacagagtgcggggcccgagctccggaagcccagcctgggccgcgacggccccaattccagcaacgctagagggcgcccgtgccaagcgcccgctcccggcaagccgcgtgctcccgggtggccgcaaccgcgggccgagggggcggagtcatggaaacacgtgccacggcctggatgaacctgcagggccgaac

SEQ ID NO: 332633 - DNA, 1048 bp, Homo sapiens
  chr6:1624708-1625756
  hyper
cgaaagcgacccggggcttccagttcagcttctgtttcgctttggtgcagtcgccctgcagaaagtcctagggaagaagagggggagacgaagcaggcgtgggtcgtgggggtgggggcagcaggtcccgagccccgggaactcccaccgttccgctccctctgggcgcacaaggctccgggtttccctgctttcggtccctgctgtgcgcgttcagttgcggctctcggcgccgtaaatcactaggtcgcggttaagaatgtgctgtgcggacccgtgaggaccgtgaccgcgatccacccccagctacctccacacctcttctccccaaggcgtcccttgggctcttaatgctttttttttttttttttttttttttttataacatgaagttgtcagggacgctcctatgagaactgtttggaattgctgcacttctctggctaggagggaagtgagtaaatcaccaggcgcccctcccagctgcccgtgtccctgcgccgctcagctcctgccgcagggctggccgcgccaagcgcgcgtcctacccaaagccaccagccccgcggggaagggactcgggctgtggggcgcgaggccccaggactcggggacccctctacctcggcggcagcgtgcgaccctctttctaacgcggccgtggatgtttcttcccgggccgcagccaagcgcggttcttcctgggcggtggctttgggcttttcgtacccacagtcaagtcagttcacgtcgcctcccgcacacacgcgttcataaaacgaaactggagtttcacgaagcaattcttaggcttagcgtccaggaacgctgtagacggtctattctattctacccctattctactcggttcgattctgttcctaagaaaatgccgatctcgacccacttgtacttccacgagcggagctgcagccagcagctctgcaggaccccgcactgcccgccaccgtcccctctggcagtgccttcctcctcccgctttccccaactgctccactcgaggaaacaagggcatttcatctccatc

SEQ ID NO: 332634 - DNA, 856 bp, Homo sapiens
  chr6:2841503-2842359
  hyper
cgatctccactctcagagccctgatttcccccgaggacaggcaaagaagaaccgtgctggctgctcggcatgtaagcacaaagctgatttctccttgttgtgaaatcgtctctagaatcgcacggggttcctcctctctctccctgcagctgcagataggagccgcggcctggccctgggctgcctggaaaccgtcacaaacagctctgggaggaagggaattcagggagaagggacaacattctgatctcaggtttcagtcttgccttccgcctgcatctgtcgtcctccctccctccctccctcgcgggctggcccggcctgtacccaggcgggggcgggggatcagaggtcgtctgtctccgtcggggcgcccggaagggatgggggcgcgaagctggcggggagggcgagcgcagggagctgcgggtctgaggggcctgagcctggggggtggggggtgccgggctggaagctgagcgagggagcctggcctctccccgcgcccgcccccgcgccaccgctccgaggcccggccttacccgacaggccgccgaggcacgctccgggctccgagctgggtgcgaggtcaggaaggaggcaccgagggccgctgctcttatagcaggcggaagcgtcacccgggccagcagccgcgggcggggcggcggcccttcccggtgactgcgtaggagtccgagctcccgaggtcgcctaagtgcaagcagaagtgagcgtggcttccgggcagcgccctcctcaggggcgcggcttctttctcagttcaaagcctttccccgaatctctggcaaggacctgaaaagctttttcttactaaggtgtgaatgactgagac

SEQ ID NO: 332635 - DNA, 681 bp, Homo sapiens; identical to SEQ ID NO: 231763
  chr6:2903032-2903713
  hyper

SEQ ID NO: 332636 - DNA, 1097 bp, Homo sapiens
  chr6:3228121-3229218
  hyper
cgtgcgcattgtctggggctgtggtgggggtctgggtatggggatatgggggaacagtgaagaaaaggagggtgagagggcggcgaggcgagggccaccagcgcgtcctgaccggggtgggggcagagctggcaccggatgggaacgatggaggactggagcatgtggagaagccgtcaggtgctccagtgccggcaggtgggagggctgaggtggcacaggctgctccgccacctcggactgcggctcctactcggccactggccagagtccctccagccaactgcccctggtgagaccaccgtctttttcctcaaccctggaggccagcgactgcccaggcggcgctccgtctcacagaggcctgggggaggacaggtggccccagaaggaagtcgtgcttgatggcaaccgggacacctgcggcccatgaacaccagcgcggcctccgcccccgccccagcgtgggcctgctttctcctttgtctgtcttgggctggtagctcctctcactgcgccgcagcatctaggggtgaagcgacctcggagcccctcagccctgcccgaccctctccgggagtgcataacgcccctgctggtacccaggagccctctgccccgggggttgacttttgttgctcgctagtgatggagtgggagtggccggtggcgctgcactgaccgtccggagggcagaaagagggtggggtcccgggggcggggctgtcggcggaacaaagggctctcagaaacgtgggatacgctgtgtaacccagtatttaaaaccacacgacaggcgccccacccccccaccccgccctcggattcagttcatctattgtcaagtaagagggtgggttccaagggtggcccaagcccgagtaacaaactttcttatcttccatcgcggcgacctggaggtccgaggcttcgtgctgcggttgaagggtggggaatacgactaaaaactgcagcccagcgcgcgcgagacgacccaagacccacgcgcactcgcacgagcgcgtgcacagacttggagcacagaccctcccttcagatccgcagtctctaggtactgaggcaggaactggtctctt

SEQ ID NO: 332637 - DNA, 895 bp, Homo sapiens
  chr6:3229296-3230191
  hyper
cgtgcgtttgagggcgggaggggaaagggtgtcagaaacgttcactgcacaacctgttccctgcaattcgatgactgaagcgcgccgccccacacttcggaagggccgttggcgaggtgacgtgacctctttcatcccctggcgagaaaggccgaatgacccgggcgcacgcggcggagctcagcctgcagctgttgagcgagaccctcccagaactatcagcaagctgtcatcgcctccctttcccgctgtggggtggagggtggggggttcaagtcgattccaatgtacaaagagaagtagcgagaacaaaagcccaggcgcccccaaacatccagggcgcccagactggagctcgccggccggtattccagacccggccggcgtgcccgggtgagggtggggtctaccgagaggcagagagcagcggagggtctgtccacatgccctgctctcccggtaccaaggtctcggggcctgacctccgagtttctaatccagatcctgcagatgccgaaacgtcgagggctagcaattcccaaggtcatacagcaagttgaggacagggctcggactggaatctcgtcttttgggcacaccagacctcagggaaagtgaccgcatctcggccaaaagggctgtggcaggtgtcagcctcgaggtggcggctctggtgggaccaagctgcgccggaaggaacagagctagggcggcacccgcgcggcgagtgtagacacactcggagcggtcaccccctcgctgcgagctcccaggagcaaccctgatgctcagcgctggggggtggggttgggggccgctcagctccatgctgagtaacttgagctggccgcctgcctccttcatctaaccaattcatttctcagcttctgtttcc

SEQ ID NO: 332638 - DNA, 715 bp, Homo sapiens
  chr6:3231615-3232330
  hyper
ccggcggagctgcccggcactgtttagtcgcaggggctgcggggtggcagcctcagagccctgtccttccgcagccgtgggccccgcagggaccagccaagcagggcaaccaaaagctggaaccagcagcgaaaaccccgagcccacgaacgcagcgcagtgcgggaacacttgccctttgttcctcagtaaggccgggtgttttcgcatccccggaggttgtgaatttgagttataatggcctcggtcgggactgagagagccgagcttccacgagagagctttgcctgctttgtcctacaaatcggcggagggagtagcatcctggcttttctagggcgccatttccctgctacaggcaatctcccctcccccacgctgtcaatgatttgtgggattcttaggcaggcggggcaggccgagcccagggaatgcacgctgagtcctagacacagagccaggccgggtggaaaacaaaaagagaagaagtgattatgaaataataagacggaccgtgtgccccttgcaaggtgcggcctgcgaaatcaacagacttataaataaggtctggtggaagcgcaggagcgcacgcgggaggctatggcgggggaacctctgtgagttccgcggcggaggctagaacatcgctgtggctgcgggaccctcacccggcgctgaaaaccctccacatcagctcctgctcggaaatgtctcc

SEQ ID NO: 332639 - DNA, 684 bp, Homo sapiens
  chr6:3457545-3458229
  hyper
cgttgcccgtttcgcgccgggcggggcgggggaggaggagacgcgcgtagcaggggtcgccggccggcgacgggtcccggcaaagtcggcgtgcgctgagaacgtgtgggccgggtcttctctgaggctgggctcccgcagccgcgcgggccccccacccactccgcgcgcgccaggtctccgtgacctctgtctcttcagaggtgcccggcggtcccgctgcccgcgccccgctcccagtcccaagcccgagggtcttcagccttcgggaacaaccctctgcgctttttccaggagcgaataaggttgatttttgtgtccgtggagcagggtcaaggaggcgcctttgccaatttcaggtcgccagtcccccgcagtgtctggccacctgcgacccgccgcacccactcccaaatcgccatttcttcccccactcctaagtgcatgcgatgtaagcacgatgctgggatatatctccaacacaagttataatacacacagtataaacgtgatggcattccccaccccctccctaagatcttgtattcacgtttggaacgccgtgtgcacaggcgcacacatctatactctcacacaagaagacaaacctctccctcctctcctgctccagcgccaaccttgcccagccagcgctgtataaataacaccagccctgcggcaaac

SEQ ID NO: 332640 - DNA, 699 bp, Homo sapiens
  chr6:3750702-3751401
  hyper
cgcaattcttcccgtctcaattccagtccctctctcttgcgtcctcccggcttccaccccctcagcctggcctccaaaagaaagatcgggcagagcggtaggaaaagggaagccaccgcggtttctgaaaacaagaattcccgcgagccaggacggtcacgaggccggggaggaggcggcgcagctgatcaaacgcgaatggggaccagccctggcgggggtgcgggggggccctggctgtccgcggcagccgcgggcggggcggccgctccgaggagggacggaagggctgcgtggcacctcgcgctcgaagaccaggggcgcgccctccgcggggagaactcggggcggcggccagacccgacgcgacccccggctcggaccctgcagttaactgctcccagacgctttcccagtgcgcccgcccgccggccctcgggaggtaccgggcagggggctagggccgggccgaccctgtgagccgctcagccccgggcgcccccgccctcctcggaagtgactcgtcctcagggagagtccggcgcccgccctgccggcctcggcccctttcccgccccatttggctcctccgccgggggcgcccccaggctgggcaggctggctccccgtccccctaaccccgccgcccgggcacccctcgtctgcgggcgcggggtccaagtgtcccctgtccagggc

SEQ ID NO: 332641 - DNA, 608 bp, Homo sapiens
  chr6:4135175-4135783
  hyper
cgtgtttcggttttgttccctatgcacagattcgtgcgggttcccgggaccccagggaggtgcagcgtgcttcttagccgttactctgtacccggccatttcactttatagcatacgtgttctccaagaagcagagtgttaagtccacacgagtgataacggcttgcgtttacctcgcttttagcaagcgacgctttgcaccccagaagcagcccggctgggaagtgcaggcccgggtgctcagctggggcggctcacccgcccggagtccggccccaggaggatgggagcgtgcgcggaggcaggcggagaccttggggactgctgacagggaaccatagccctgacctcccgacgcgcccatcctgaccactccgggcccagcggtgcaggagggcgcgcgtgaggtcgtcactttttagcactacctcaccggaaaaccagcaaagcaaaatcctgttgccacctagacaatagggaaggagggtcttccaacggcggcgaccttcgcctggacagcggtatcctgcgggcgaccatgggccgaacggccgggactccaagcttacctcggacacgaacgccgcgccagtctccaagccaagtac

SEQ ID NO: 332642 - DNA, 1132 bp, Homo sapiens
  chr6:4775131-4776263
  hyper
cggtggggaccgcaggtagaagcaccgcttaaggggaacggcgattcgactcgcagtgacttaagggttggcgtggtgcttgttcctgggcgtggggaggacaggaaaccgcggggtctgtgagacgccccgtggttgttgaaacgctgttggggggcacaaacgaatagggctttaggaagaaaactggtgggaggagccttgtggctccaaggtaggttaggaactggagcgagatggagcacggaggagtgaggcggcccgaaggatgcccggggagacatggaggaactggcgagggcttcccgatgcagggcctgggggagagggtgaactaatgcctctgcagtgccccgtggggaagttccgcatactcggccagagtgatcggagttggcggctgtctgggggagttgggtcaggaagccccttctttcgccaccgatggggcacgtccagggcccggcaggtgtgccctggcagtagatcttccctgggaagtggagcgcgggccagccctcgctgttctgagcgagggcctgtcgtgtagtccacaccgttccgcgaaaggaaccaccattgacagcctcgttcgattagaacccggacctccctggaatccagactcggtcccttcccagctgcgcttcggaggaggcggacgctccgagaggaacccagaggcctggcgtggggggagctgcgggcagagcggaggcagccgcgccctcgcgccgccctccgccgcgcccggctcccgccccccggatcccacccccggcctgccgcggagccagcgtgccagccggagctcgccgggccaccccgcggggcgcgcggcccgggctccgggtcttggcggcggccggtggggcgggcatggggtggggtgggtgctccacctggccacgccgccggcccttcgcgggctggcccggccccggacgggcgggcgcacggaggccgcctcttgggctcctcctggagggaggcgcgcggtagacggcgcggccgctgccgtcggggcggtgggctccagacgcgggccggctcgctcgcatggttccctgccccatctcgggtccgtcgctgcccgtcctggtgtgcacaaccgcgctgcgcctcgaacctc

SEQ ID NO: 332643 - DNA, 465 bp, Homo sapiens
  chr6:4948996-4949461
  hyper
cgaagagcctgcatttcactcggcgtgaattctacactttctgagcagagtatctgacgaagcctctctacagaaagtgaataaacgttgttcagatgacttcgacaactcttgttgaaagtgactatgcagatgatgtaaatgatgtcgttcctttcatgagcctttggtgtacttgagctttcagcagcctgaggcaagactggacaagtgtggttttccccactttgcatgtgcagagctctgccaggaggataagctaaaggaatcacattatcaagataaaaagaatatgcaaatagtgcaggctgtgtggcctctcctttcttacagcaggccctccgctgtaggcgagggctacgtaaatcagccaaggagtctcttccagtttagccttcctggtgcccagtagacattcatggagtgcatggaggatggcacggtctgacgcccacaggctcccac

SEQ ID NO: 332644 - DNA, 1762 bp, Homo sapiens
  chr6:5084683-5086445
  hyper
cgtgccgcgtgggcgccggccccacggggccccctctccgccctccctgcgggatcccggggcgcggactcgcgggcgcgtcgggcgggacagggggaggggcgggacgtgctcccgggcctggcgcgaatggcctccggccgctctcggctgcgggccatggccgctccccggcgcgtccccacacggtccccgccccagtctggccgcagcccaccccgcgccgccactgggcagatgggggcggcggctcctgcctcccggctttcggaagagcagagcggagcgcgcctgaccgagtcaggcttccgagtgggattggaacccggggcgccctgaagtttggggaaagcaggagcagaagggaagggatgcgctccccgctctccggcggcgcggaatgggcctccttccagcctctgcgtaggcaagatttccccagttgcgcgctgcaccggggactccccagcccgtgaggcagccaagaggagagcgctcagtgaccctctgggggcagagccgtcaggccaagttcatgggcaggaagactttgtgcacgtgggggtctctgaaggttgagcgcgagctctgcacccccacttcgaggcactcaagaagcggaacagacgcgagccccgccgggggtgcgggtgagggctgcagggagcccgcgaacgacagaaagtcgccccccgcattccaccggagcactcgggaacacggcttccaggtgtcccagcggccgcgcctccccgcccccggccctcccccgtcgcgggcaggttcaaccgggaggcggcgtggccccggagccggccccaggcccgcatcctcctcccacttcgccctgggcagccgcagctaaaagccggaggctccaaagtggaactacgttgtcttgtcgagcctggggcgactcgcctcggggagggcgagcctgaactgcagccctgcgctccttccacggcccgaggagttagttaagtctccagaggggcccggttcggcccgagcaagtccaggggcgaacggcgtcatggagcccataggggcgcggctaagtttggaggcgccgggaccagcgcccttccgagaggccccgccggccgaggagctgcccgccccggtggtcccctgtgtgcagggtggcggcgacggcggtggcgcttcggagaccccgagtcctgacgctcagctaggggataggcccctgtccccgaaggaagaggccgccccccaggagcaggaggagctgctggaatgccgccgccgctgccgcgcgcgctccttttccttgcccgccgaccccatcttgcaggcggccaagttcctgcagcagcagcagcaacaggcggtggcactgggcggcgagggggcggaggacgcacagctcggcccgggcggctgctgcgccaagtgcaagaagcgggtgcagttcgcggacacgctggggctaagcctggccagcgtgaagcacttcagcgaggcggaggagccgcaggtgccgcccgccgtgctctcgcgcctgcgaagcttccctatgcgtgccgaggacctggagcagctcggggggctgctggccgcggcggcagtggccgcgcccctttcagcgccgccttcccggctccggccgctcttccagctcccggggccgagcgccgcggccgagcgtctgcagcggcagcgcgtgtgcctggagcgcgtgcagtgctcgacggcctcgggcgctgaggtgaagggctccggccgggtgctcagctgc

SEQ ID NO: 332645 - DNA, 583 bp, Homo sapiens
  chr6:5851329-5851912
  hyper
cgggggacattcctctgctgaccccaaagttcagcaggtgcgggagagggaggggcggactcttctgtctgcacagggcttggggaggcatctcctcctcggggctcgcagacagggcttctcgtgccaacgctgcacctcggggcgtgttctcccacccatctgtgctcaggcatcccttccctctcctctggattttgtttaggcctatttgcaatttcttaaaaaaaaaaaaaaatctaataaatagttggagcctgaaagagagctggccaatgaaacgccgcgttggggcattaccgcatcggtgaggccgcccattggctggcgtgccctgaggcgatggctgcgtttccccggcaccgccccgcgccggtgcccacgcgtcccgggcttcaggggagcacctgggaagcgctgggggtcgcgtgcccttggccggaggcctggtcacccgcaggccctgccatcctcggcttggccgctgctgcccgcgcgcctgtggcggagcgagcctgcctccagggcagcctcaccgcctggatcctgggcaggagacctcccaggtaataaccgtgatcac

SEQ ID NO: 332646 - DNA, 1745 bp, Homo sapiens
  chr6:5996316-5998061
  hyper
cgtgctcacgtgagcgtggtcctcggcttgggacagacaagggagccccagacaggacgataaggtttggagattcccagggcgatctgggactccgtggcgtgggggcttggaagcgcgtggaggggctgagagaggggagagggcgcccttcctctagggcggccccgtctgggaagcagttggaacagcagtaggagccaggggttcctagagaagaaccctgttaggagagcagaccagcccgcgctcccagtccccgccccctcgccccttctgccccgcccttagcctgcctcttcctagatcttccaggacattgatttccgagtaggaagcccgcgctgctaggggaggggcgtcctctgtgggtcgtgggggggtttcccttctctccacagtcggagcagaagggcgcctgccttttattttgacaagcaatgggcttagttgtgagcacttgtttgcccccaatatgtagaggaaaagatactgataggaggcggcgtgctacgatggcaaaaatggagaagaccctccctctttatcctggttctcctccttgttaaatagattcgtatttaagataggcacagacattctaatttgaattccaggggttgaactccagttagaatcatcctatttatacgcagaccgaaaataaccattgaaacgaaaccaacaaaatgcaactattttccaaaaccccgagcgtttgctggtgggtgaccaccccgcgcaggtagcgcggatctgctttggttttgactgagaacccgggttttgactgagacctccgtcgggaggaggggactgggtgggagttagcgggcgaaacgattccccggagtggccccgagcggcgcgtgcgtgaacgcgcggccgtaatatatgctgccattaagaatccgtgcagcttccagcgctccgggcgcagggacgcatgtgttgctggaattcaatccgtggggggaatgcagattgggctgcgactcactgggtttgatttatgaactgttacactagcaattgtttacacattgcatttcagagcccgggcccaccctccccgcagcgggcggcgggcttcgtgcgggaacctgctgcagcccccttggtctctctccatcctcctcccttcccccgtcccccccccccggggcccccgcagcttcctcccacagccaccttctccaagaaatcagatttcgatttctctgaacccagagacctgcatgcagttctttctcccccgcctactccaggcctgcagtccccggacccgggtcgcctctgcccatttactccggaatgtttacttctctttaaggccatgcggggcctataaataggagaggtggaatcagccccactgccagatcaatagggcccgtctcctcgccatttcagctgagctgtcttattaattatgaaaggattcacctgatccctgccagggaacacagcctctcggcccctctgctggagcccttaatggcggttccttcgcaagctgcctctggccaccgcacaggaagaggcgaatcgtggttaggccgagcctgcgaggatcgtggttagggctccggcccgcctgaggcgggggcagacggccggccactggcattgtctgcctgtgcgagcaagcccagttcctctaaatctcaaacagaaagaatctctgctttgtaattaatttaaaaacaactttcattttctcttttttaaggaagcacggtttc

SEQ ID NO: 332647 - DNA, 1121 bp, Homo sapiens
  chr6:6003416-6004537
  hyper
ccgagtgagaccctcggatgcaccctctcccgccccgctggaaagagggcagcctggacgtcctgagacctggcgcggatgatgagtggtctggagaggagaaggccagaggccgggcggggtcacggatgagtctgcctgggtcacctccgcaaaggccaaatccacgaacctcgggcctctttctctcctcctcccctgtccgccactcggctccccagacacccttaacaacccacccgcccgccaaaaagcccgcctacactccggacggcagcggggagaggctgttcttctccaggtgccagccctgctgctgaaagtgagctcgccgcggcccggggctcctggccccagctcaggactccctgcagagagcaggcagggataaaagctgagcggcgggaggaggaggaggaggaggaaacacaggccgcacgaaggtccaagccccaagcccccaagcccccggcctctggacggccaaaccccgaggcgcgggactggaaggacaggtaccaggctgcgggcgcgcggctgtggccatctctttccgccctgaggccgacgaacccggctggaagctgagtgcctagcggcccaaagcagcccgggcgccgggagggcgccagagaagcacagcgttagggcggggaagaaagggtgaatctcagaatcgaaatccgcactggcgcccacgaccctgggcgccggcctggtcctcggcagctttctggcggctgcgcttgtgtgtgaatgtgtcccgggaggaccggacacctcaatcccccggcccccaacgcgggcgcctgtccgcgagcgccgggccagacgccgaagaggaaggtgaccgaacccgtagcagcttccgagagcgtacccgtttgcaaattgctgcaggaagagcgaggcgggccttgcgctttttaatccggaacgggaagcactggggaagggaccgaggttaacttcgacctccgctggggcagatacgtaaaccttctcaaacctccgagttcaccttacagcgaacattaaatacccttgcgactacaatactaacaaatcgaacactgacgtaaaatcttaagaataaacgaatctttgttctgatagagctc

SEQ ID NO: 332648 - DNA, 1319 bp, Homo sapiens
  chr6:6007079-6008398
  hyper
cgggagcgacagagactttatgcactgggaaggcagagggaggagagaaagagagggagcgaggaagagacagaaagagagagagagagagaaagagagagagagagagaggctgaggggggggggagagctgggaatggttcactccattagaagggggcggaggaagtacagcctcacgcccacgagcaggcctgacgtgggggatgacacggaatgattttttttttaatatagacaccttggtagagaatcgccatttatagtcatcagaagctggaattaatcagatatctccaattaatgtgcgatctgaacgaaattttgcctcccgggggtgagcactttcctattctagcggtcacccctgcctcttcctcgttccgggggccccccagccccgccgcctccctgcgcagaacaggggctccccctcccttccccgccaggagctggggagtcctggcgcgcccactcgattgtttcaacctgctccccctcctccatcagcaccacagagaatccagcccgctctctacgatgcaggggggtttaaaggagcgggagagggaaaaacagctaagctagctcgattaattcgaaagcgctcctcggccgcccgccccctgcgcttgcctaccctctttttctccaacccagcagctgagctctgggcgcagcctggagcgcgtgagcacgcagcccggccccccgcacgagcacacacacacacacacacacacacacacacaaacgcgcgcgcgcacgcccgccagccgcgccgagcgcccccatgcccgcccgcacacaaggcacgcgagcgcgcgcacacgcccaggccccgggggtttggtttgcacacgtggggccccagaaataaacaccgaatgtcctctgaattttacccacctgcgatgccccagcgggccaaaggccgcttcaagggacacagcgacacctgttttagggggcgagtagggcaccggggaaggagcctctgataagacagttttcggatactagtgatttaccaaccaactctcagcgctttaggaaatttccaaggcaagcgctggtgtgcggacttctttctaatcttgatgcgcctcttgggcttatttgttgggctacacacacacgtacccacacgcacacacgtacatcacgtacgcacacgcacacccggacccacacacacctgcactgtcttttgatgctcaggcacagaccctgtgtaggtgtagcctaccctgcaacaaaatacttctgcagctggctttgtgctaggtgcaagctgctatcgacgacagcttgagtca

SEQ ID NO: 332649 - DNA, 789 bp, Homo sapiens
  chr6:6008843-6009632
  hyper
gtgtctgcaatgtgcggcccctaactcacgtcccgcgggagcctcagactcccatgcagccttcctggccctgggggcggagtcatgtctccccgcccctggttatgtcaccggcctgcgggcggggcggttgggggctcgccttccggtgtccaggggcacggtggcggccccgggtgtttcctttccccgagctcggaggctccgggaagaaccgaaaacgtgggcggacaaggggtggggcgggggctggtggcgagaggggggcgtttctcggaccctcccccgacgtcttccaatggcagggcgggaggctttccgaggggcggggcctcaggggggttgccacgcggcccggcccacggctccgcccctcgctcggggttccgcgtggggccggcccagctttcccggaccaggccaccagctgcgggcccccaacctcgctcagactcgtgcagagcccaggcttgggagtggcttaaggttttttgccctcaacgtccttgccttcctcctgcttatccacctgggatcttcacagcatcattttctgggatcctctccaacccctcccctgtaactctgagcgtggggcgctggggatgtggagtaggcagggctgagggcctcaatgaagcgggtgaacccacgcgcgtgcgcacagccgcccgcgccgcgccccgggccgatccggttcttgcccttgggacgtggctgcgcctcaccgccctaccccgggagggaacccccgctgactttttcctctcttcattttcctccccaggc

SEQ ID NO: 332650 - DNA, 911 bp, Homo sapiens
  chr6:6546401-6547312
  hyper
cgggtccttaacagctcccgccccagaagctgccttcggatgaacagccgggtgaatcgccatgaaaaattaatcagcctccgcctgtccgcggcctagatgggcgcaaagcagatgacctggcaggaaccagccgcagtgaagccaccgcaaccgcagccgcagccgcggaggggaggccgtgcacccgcccgccgggagagccgcgcgcctgagccgggcgcacgtgggaagtgggccacgagactggagtccaccgagatggaggccccggcactcgggctcaggcctttgtgcttagcacgtactgttggaatccagcacgccctgctccggcgggcgcctccgatcctgaagcgcgcacctgggaactcacgcaccgcccagccgcgaggggcttggcctggctgaaagccacattattctcgaaaacaaccgtgggaagcacacgctgagctcccggggcccctagagtatgcaaagaggccggccctgcgagactaaataagtctctccccctaggacctagtcccttgccaccggctcccgcggccaccgcgcagccagagtgcaccgtccctagggctttggcggtggccagagccagcaagtgcggcggcctggagctggggtggtgagggcggatggcaggttggagaaatgcagccgagccgcaggtttctagaggcctctacagcccctgccatctgggcactgcacagacagacgctgcgtgagacctggagctcgccacctccatgcggcgctgccagccactccgctgcgggtgcaggagcgttccatgtcggggactgagggaccagcgccggctccccagtttctctgcattgtgaagtcattttcttaaactcgggctttaaataaccaccgatgacttgcctacgggccac

SEQ ID NO: 332651 - DNA, 757 bp, Homo sapiens
  chr6:7542700-7543457
  hyper
cgtaatcaaagtaaaagaggaaaggagcggggccccggtcctgtctggtggccgagtggtgctcggggctccgcagtctctaccggctcacccccaatccccagtaaccccgagaccacgactgcaacgactcctggactcctcggccacccaaggacgtttgtatcaaggctgcgcgtcccggcggcgcggggtcctgtcccgaggaggcgcttcggcttcccctgtccgggaaacgaaacttccccgccggggcggctgccgggcccgggtctcgaagttcggccgggacgtgcctgttaccttcggtcgtccgcgccgcagcccccgcgggcgagcgcacctggggccctgcctctgagccttttgtttcctcctttttaaaaacaccggatgaaagaccccagtgtgccttggatcgcagagcgccggccgcatgtctgctttgatccagaatgtgtgggcaggggagtgggggggtgggagaggacgacgctgggggcccgccctggcctaggcgccccgggaagaccccccggtgagagggtcagcttctccggatcccagcggaaacagaccgagggcgtcatttgggtgggtggggaagagatcctgtccctgctttgaccgggtctcgggagctggactctagatgcccacgtgagccgtgcgcgttttgcagcccgccccacctccccgccccctgctagttgttcccacgtcgggcttttgggaaagaggccctgagcgccgggac

SEQ ID NO: 332652 - DNA, 2758 bp, Homo sapiens
  chr6:7726066-7728824
  hyper
cggggtattggtcagatcattcttactagcgatgacctcttcgcctttggcacctcgcggctcttcgcatgcctccaagaattcccgggtcttgaaacctacgcgcggcggaggcgacgcctctcgggagagggagggtgaaagaaggggcggggctatttaaatagcccgcgagcttcgcgtccccattggctgccagcctgtcggttaccgcggggcggggagtcccggggctggagtgaggtacctgagccgggcgcgcagcagaaagcccacgttggccgctgcggggagcgcggcgtggagaggcgggagaccgaattccggcgccgccgccgcggccgctgctcggtgcactagcccccttccttcccatcctttctgcgagcgggtttgctgggcagccgggcgaccgccgaacggaaagcaagatcctcgccgcctccgcttgaggaggcgtgcggcgcgcggagattttgagtgggagcgacggtgcccgagagctcaggggcgcggagttcgtgagcgagaaggaagttaaacctcgcggaatagactggcatttcgggacgccttgtcgccgcagcctgggccctgcaacggggtaaacttcatggtggccctgcgatctggggaggggcgtgcgccacggtgatgccgggcatctcccgcagctcgtgagcggccccgctccccgctgccccgggtcccactcagtcgccagggagagcgcggggcagcgcacgtgtgcggccagcgaggcccagagtgaccgcgccgcgactcgcaggagccagggcgcaggctgcagtgcagcccggactcagacgcacctggcctggaccgcgcgcctctagagacctgcgcgaggctgtgaggctccccttcctcccctccaagcggttctcctggtgatcgccccttcgccacctctctagcctgggcaactgggggcgccccggacgaccatgagagataaggactgagggccaggaaggggaagcgagcccgccgagaggtggcggggactgctcacgccaagggccacagcggccgcgctccggcctcgctccgccgctccacgcctcgcgggatccgcgggggcagcccggccgggcggggatgccggggctggggcggagggcgcagtggctgtgctggtggtgggggctgctgtgcagctgctgcgggcccccgccgctgcggccgcccttgcccgctgccgcggccgccgccgccggggggcagctgctgggggacggcgggagccccggccgcacggagcagccgccgccgtcgccgcagtcctcctcgggcttcctgtaccggcggctcaagacgcaggagaagcgggagatgcagaaggagatcttgtcggtgctggggctcccgcaccggccccggcccctgcacggcctccaacagccgcagcccccggcgctccggcagcaggaggagcagcagcagcagcagcagctgcctcgcggagagccccctcccgggcgactgaagtccgcgcccctcttcatgctggatctgtacaacgccctgtccgccgacaacgacgaggacggggcgtcggagggggagaggcagcagtcctggccccacgaagcagccagctcgtcccagcgtcggcagccgcccccgggcgccgcgcacccgctcaaccgcaagagccttctggcccccggatctggcagcggcggcgcgtccccactgaccagcgcgcaggacagcgccttcctcaacgacgcggacatggtcatgagctttgtgaacctgggtaaggatttggggtaacgtaatgacgagaacatttcccccttttcagtgtcccgggcccaggggatggagtgagggggtggaggagctcccggcgcgcgggtcccgcctggtgcgccagagaacgcggggacaggcaggctgtgctcccgccacctgcgcggcggtgggcggcacatgcgctcccccgcgccgcgggcagggctgcgcgccgaggcccccagaggcggctggccggccgggccgcggggctccgggagcgctgtccccagcgggcgtgtatttgcggactccctgagcacgttccgcgctttttttcacttctgcccagctctggccaggttaactcaactgcagcaggagagtccagcccgagtgtggccatcctgggaagagggctcttcagtacgattttcccctctaaactgccgccttttgccccctaacttggagtgcagttttcccaccgagacttttagggaatccgacagcggctgggaactttgaaaacttggcatgagtatgtttagaggtatccacggcactaggggaggttgcagagggaagtcccaaaaggaccgcggaaggcgctcggatcccggccgggcggggctcgcttctgtttggggcgggatgaaagctcaactggggtaatccatcctgtgccccggctcacatgcccttggccattgtccccaaaggctgaacctttgatcaatgcagcccaagctgcacgggcagagaaagggtgcggggtaggggccggggttgggcgctgagctcctctgaaccggttgccaggcaacagaatggaaattcacgggcggctaaatggagctccgccacaaatgttctgtggcaaacccggacccagtcacatcgccctttctcccccctcccaccccactgagttttctcatctgtaaatgagaagggtgcagagaagactcttttcttcggagtcagtgcctcc

SEQ ID NO: 332653 - DNA, 809 bp, Homo sapiens
  chr6:10381544-10382353
  hyper
tgtgccctagagggcgctgggccccgcgcgctttcctggctgtccccgccggctttccaccctccccaaagcccaggtgcccaccgtgggtcgctgcggcctttccccttcttggccaaatccgattacttcgcagcctgcagatggcatcgccggctaagggcagcctgcggcaggtccccgagcctgagcactcctcctatctggggcctgagaggacgctctgggctttttcccaggcccagggtgcgcggcctgctagcgcctttcgaggcacagtcccaagataggctcttgtccttcgacgcccccttggcacaagcgcactggcgccctccgctcaacccaccttgcctttggggcgggcttcaaccctgggaagacaggcctgggggaagcgagaggagaggcccgaatagaggttccggctcaatctttcccagacggaggcctggtgtttccagctcagttgcatcttccagccgcgggctcctggcccaaacagaatgtgtttgctttcacaccgggacggcaagcggagtccgcctcagtgagcagcgagctgcgcagtccggacgggtgtcgcccccagagactcgccagccgcccccagacactcgccagccgtccccatctctaatccaccgtccaggcccgggccctgggaagaccccggggacgcgctggagcccctgaagggggtcagggggaacaatgcccgaaaagggagcctccccgaccgccagtccaaaggaaccggggatgtggcagcgattgcgaggggcctaggttagggacacgctcttctc

SEQ ID NO: 332654 - DNA, 575 bp, Homo sapiens
  chr6:10383584-10384159
  hyper
cgcccgacggagcgtcccctcgcacctccccagagttgcctaactcctaggccctgaaagtgccagaacaaaggccgactcccccggcgcctccctcggggactgagcaccctgggccctgctgacgaagcaaaccccagactcagctcagctacccacgctcccagccacgtcgcgggtggatattcccgcctgggctgggcaccgcggaatcagcaccgcctgctgcgcaggccccgcccagaggctgcaccacccaggccctgcccgccgccctctgcagcctaggcggggtgtgtggcgtcgcggtcagccttaccgagggacacgccgccccgggccgggacggggtggggctgtgggggatcctgggccgaggaaagcgatccattttctctaaccgtttgctccagagctgtcaggttagcgtggcctcctcggccgcccagagaagaatgtgttaaaattctttgcacgggagcctttcccagcccaaatataccacactgtggcgttcctcgtgccgaccgtgggtctctaacctagccaccttctcccgttgaaatatgcacatc

SEQ ID NO: 332655 - DNA, 804 bp, Homo sapiens; identical to SEQ ID NO: 231794
  chr6:10384945-10385749
  hyper

SEQ ID NO: 332656 - DNA, 1193 bp, Homo sapiens
  chr6:10390064-10391257
  hyper
gcttttttgttgttcgtttgcgctcgcgctcgctctcgctctctctctgcatccccctcaccccctttctcggagactgaactaagtgaaaagttgtttcaataatcgcagctctctgctccgccagggccgagggaggcgggcggaacacggagggtgttttgttaaatgctcccgtcgttcgcaggggctgggacttgataaaaggagacagttttctgaaaagatttgattgaaatggcgtgtgccagggctgatgggagccagcgagggacaaagcgccgagaatccatggacactcgagcaattatgcctccacgctgaaggtggattagcgcgctggaaagaagcatatgtttggcccggggcgacacttccccccggctgagcttagagaatgggagcgcggagagcggctggacccggaatatcaactatctgcgaagcccccccttctagcccaactccgccagcctccccgcccccgccggggaaaagtcggagtgcatttttacaaagatgagaggagaagagagggctaggggaggagcgggcagggaggggagtaggtgcctagaggtgcaaatggccctgggatcccccaggagcggccctccaggctctcctctctggcgatcccgagggcgcgtccgtccttgggtgtggaaacccagagggggtcaaataaatgctcccctatggaatttcccactgctaaggtagttcggtccaggatgcccgctcaacgcgtattggaaggtcagccgaattgttgcaatgaaacaaggttttaatgactaaagatgcaagtgcctaaaaggttgcgttgggcaggaggcgcttggagggcagcgcgggttcccagccattccttgggtccaggtcgaggaaggcctcgggagacgagtcccacagtgagatatttgatgaaatgggtcggggctggaaagctcggacaggccgcatgggagagaaagggtgcgggtgcggcagtcggatccccacgcagctctatctgcttagacacccgggcgagggatgctttgggagtttggagccagaaagtttcccagaccctgcctccagtcattaattaaagcgcccttcccgtggaaaaaaaaaaggcccttaaaactctgacctggagcctcccggctcttcctcactgcacccgcaagcgcgctaagggagac

SEQ ID NO: 332657 - DNA, 146 bp, Homo sapiens
  chr6:10392129-10392275
  hyper
cgtgtgtttaggtttgttactggaatttaaaggacgcgatctttattgccatagaaaaatcacgtgcagcaaaagcatagcatgggttgggtcactttttaaagctcccgccctgctgatgaaaatattcccgcccccttaaatgg

SEQ ID NO: 332658 - DNA, 1418 bp, Homo sapiens
  chr6:10409954-10411372
  hyper
cgcaactactttgtgtggttcctcaaaacgtccctcactctccgcctccgaataaaatgtttttataaggaaatactagggagaacccgggcccaccgactgtatgttccaggtatcctttctggggtaggtaagtagggggctgtgttccctcccgcgctggttgcgcggcctcttaccgggacctcctcgatggcgtgaggtaaggagtggatcgagaggtctccgagtcctgagctgagcgcgtgtgggccgtgcaggaggtcctcgtgccgcctgtagtccctgcgaggatccaggcccgacagctggtgaggcagcccccggtgcgtgtgcaggagcccagactcctggctctgcctctggccgggccagcctgggtgctgcggctgcggctgggcgtgcagggggttcaggctgtaggggtcgttgacgtgggagtaaggatcttgcgactgggggtagataggctggtagggtggggggaagtatgggggctggaagtcggcattgggggtgtgggacagcggcggggcgctcgtgtagggagattgacctacagtgcccagctggggcaaccgtgccgtcccgttgctggtgccgtcgtgacggtcctagaagagagcgagaggaaaggtaaagaacaaggaatcaggcgtcgagctacaactatccacacaaaatccacttgacaagtctgcgtgggaaatcgcccgttcccgttggctggccgccgggaaaaaatcagctctaagttcttttcaggaaataccctcaagtgaaacagaccgaacaacgcagagaaactgtatatggagggggcacaagagactatttaggggtttctttcaaagagaggaaaagatagaaaagggtctcctggaacacagcccattaaactgcagcgtgaaatctctcttaagcaaaattaaaattcctcctaaatactaaacagcagaagcggccttttcttttcccccgatttgaacctgtctgccactgcgttattgtttattctcttccatttatttggagagaaaaaaatcataaacgttcaaagactgttaccgtttcatgactacttaaatagaaacatatttcgcagaggggctgtaacaaaaacacacgtttaaattaccagcttaaagaaggttttaactgcaggatcggggtctgtctttttcgcttcctctgttaggagcctttttctcgacagagtcgatttatggtttggatagggaaagggggacgtcaagtcaaggtttaaaatagaaagattcagccttattgggtttaaaagagagaggtgcaccccggggctgtggccccccccccccgccccttccaccccagccccaaagggcagaagaaacgcctgactttaggtttctctattgcaattcccttgcaaaacaagc

SEQ ID NO: 332659 - DNA, 1496 bp, Homo sapiens
  chr6:10411394-10412890
  hyper
cgcgaaccctcggcggttcggccgcaggtcccgagggtagggggcacaccgcgctgcacttttcctgcagacagtttaagcatcaaatgttgagaacatctcggggacaagtgaagactcaaggaaatcaagatgaacgtggggagaaacacgccttgggaagccgcggcgaggtaggtctgcgtgctcggagaggtcgagcgggggctggggtagggggtaatgcactcgatttagggatggaaaagagcgagagaaaggcggaaggtggggtgggggatgcaaatggagagggtgtcctgaaggaaagctgggcgtgaaacccgaggtttcgggcagctccacggcaccaggtttccagaatccaattcctaaagaaacagcaacgggggtggggatgggactcaccatggctgaaaaactgtgaactaacatctgcgaagagtctggggtaacgagtcagggtggaaaaaaacaagcaagcctggagcgcccggctgccccgccgcccgagcgcgccccacacaaaaggcgccgagagccccgcgccacccaggactccagtcacggcgccgacgctccccggagcgcgggagcccggctcggatccatccgaacttgaaccaccgattcgcgcggcgccttcagctggtcgaacccacggtctctatcctgccgcgactggttatgattcaaagttctttaaaaatgaaaaaccccaaaaaaggaaaaaggaaaaagtatgtgtgagtgtgtgggtgcgtgcgtgttccttaatccgtgtctccccctcttttcttagcggcggcttcgcttgagcttctaataaccgcgctgggcagcgttcctggagcctcctaatagcagatattcatgactattaatattacacgaatacttaataagggaagaatgcctggaaatcgagcgtgaagcggagaggcaactcgcgccggagccggctctcaatgcagtccattgacgggagtctcagtgtagcaaatcggagtggggagagggagcgcgagagacaaaaagcgagcgagagagggagcgggcgagcgcgcggggggccgcggcgcggcgtctggcgaatcacagggaaggggcaacattttaaaaggttgcagggcatgcaaaagtgaaagagaaagaggcagagagggagaccgaaggagagagcgcagagagggagaatgtgtctgcgtgcgtgtgtgagaaagaaagtgtgggcgagggagaggagccccgggtggggagaggggagggagggaaggagggagagcccgagaggaggaagggagggaaagagggagggaggaagggagggagggagggggagggggcccagccggagcgcacggagggggaggccgcgggggagggggaaggggagaggaagcgagcgaggacaatcagacctaaaaggctggggcagacctcgggatgcagcgggggtcgtgcgtagcgggtaggagctgcttgggaccgcgtcc

SEQ ID NO: 332660 - DNA, 1347 bp, Homo sapiens
  chr6:10415184-10416531
  hyper
cgtacttgatattatccgtcaatttccaaagcattttcatggatcggcgtgaacggatatgcccctctcggtctcgcacccaagtggagctactctctgggtgagcgcaaagtgctggctgccggcggtgagcgcaggaggaggaggaggagggagaggaggtggaggaggagaaggaggagggagaggaggagggcaaggaggaggaggaggaagaggagggcgaggaggaggaggagggcgaggagaagggcgaggaggaggagagaagggaaagagctcccgtgtgcgctcggagatctccctctaatggtagaaacttttcccttttccagctctttaccaacagcctaatcgcctcattagcatatcaacaatagtccaattgctcgccagtaccacaatctgccgccggccgctccgacacaggtataaaggcctctctacgccgcgaacttgcttctagagcgcactccagcctgcgaactgataaaaccttcctcgagctccgccgcgaggccctgccccaacaccccctctcttaccccaattccgccacattccccttcctttctttctccgcttccttttctccagagatgccttctgcaaagcccggcactgctcaaggtccaagcgccacgcctggggcccagcttctagcacttctcccttaaccctgctaccacgatccgagctgcccttttggccccgtgcaattttattagaaatcattatccctttcgcaattaaacataaccaccaaaccaagaccggcgaagtcactccaggattttttcccaacaagggatcgcctccgctcgaggcagccaccccctcgggccgcagcgccttgggagttttattggctttgagctttcccccaggttggagattctgccaagcggctccggtggctctgctggggtttgcaatcccttaattgcagcgtgtaaaataaaagttgtaccctgaagaggttacttgacagctccaggggttaaacaatttttctcctgtttgtgtgaagctagggccaactgacagttcaaattggtgttcaggctaaggtttcctgggtgcaacgtggacacgaatacagaactcctatggaactgcacacccgcttctgaagttgagcctaaaaacagacgtgtgtgtgcctgcaagtctagataccgtctcgtgcgtgcatcaaaataaatcaccgggaaccgacttttagctgtgttaatctgctctagttttcccaagattcccctttttaattaaagcagggagagttccttcatgatttggtgatgctactaacgcgggcgtgctcgcgaggcagagcccggctgccgc

SEQ ID NO: 332661 - DNA, 872 bp, Homo sapiens; identical to SEQ ID NO: 231802
  chr6:10417194-10418066
  hyper

SEQ ID NO: 332662 - DNA, 1422 bp, Homo sapiens
  chr6:10418940-10420362
  hyper
cgttggttttggcaaattcaccacccccctgcctcctcacccaccattctcacactccctcatccgtagcccaggcggcaaaaacccatttcaggaagtggagtgagttgctagctaaacttcgggcaaactttgtatctcctacagaaacacgctgcctccgcgacccagccatctggacccctttccattcttcacacatcctagatctcccgaaatctgggggtaccaagagagacaggtgcaccagaacctgtccaacactcaaccctggggtctagggcgaggccgcaggcgcagcaggctgaaaaccttcaccgccgcgcaccacaaccccaggccttctccctccccccttccgaattagtcatcctcccaagtttctacttgaggtgggaggggggtgggggaaacggccacagcacaaaccacaagtgacccaccaggccacctgtggagcgtgcgccggacttccccggcgccgggccccgcgggctgcgcgctttgcgcccagcaccgcagtcgctgcctgcgcccgtttttcctgtcttcgctgtctcctgggagctctcctgggcgctgccaggcgcgcctcacctacgactcccctgccctgggccacggcgcttcctctcctcctccccgctccggccccctcccctactccacccctgcccacctcaaccccagccaaggcaaaccccccgtacctgccagtcccccattttggcaagtatggacatcgcggctctgcgctcctggcgactggtccccgccgggcatgggctggagggctcggtcgggccagctccctggaatcgcttaggcaaatcctccttttttacctgctcaccaacatctcacctggtcataaagagctgggttgctacctgccgacgcatgcgcgctggcccaggaattcactccgccagctgcagtcccagcgccgcacagagctgacctgggaagtgatggatttatagccgcggcaatcttgccatcagctccagcttttcccaacagccccaacccgctttcccggtcagtccctggcccgggaaccgaagctgactgactgctggatgtgctgggtgcgatgcgagtgtgagtgtgttttcgcactccagtggtggggcatcgacaagctcgacccatggctagcctcccctcggaactttcgaactgggggagtctccactcccgggtgggggtcgggggttggggaagggctagactgctagaagcgtccagaccccatgatccccgcgcacctggacacagtggggacaggtcgccgtccccgcctccccacccgcccacgaggtgcagggcacggctggccttagcggatctgactctgccaaccccggggccacttcagcgttagattccacatgaaactgttgctcaataggtgaagac

SEQ ID NO: 332663 - DNA, 410 bp, Homo sapiens
  chr6:10420695-10421105
  hyper
cgctgcttctaattagaggggagctttaaaagaagccacgggatttggggctcccggagccgcacctggccaggagggaggtgagggtgaggagattggcctcgggccacactctcccagagacggtgccagtcccattccgcggctatgagatcgaattgtcctgggtctaggcctgggacgcctgggccaggcccagttaccctcccgggctgctgtcgccgggacttggagacgaacaaagaaccagttttaaatcgtcttctctgacatgtcaggcaaatatgtgtaaaaggtcagctccacgctgtggagcagagacctgtcccccaggcaccaaaacctcccctttctaaccgtgcccgagagcctccgacccctgggccctgtccaggcggctttgcacctct

SEQ ID NO: 332664 - DNA, 895 bp, Homo sapiens
  chr6:10421371-10422266
  hyper
cggtggaaatagggcggtgactaacttttcagagtggaagacacgcacgaagggcgcacctgcagctctccgggattcaggcgggggtcgctgtgctctcttaaaagtgagcggcggtttcagcctgccaccgcttcgcctcgccagctcggaggaaactctggctggaggcgacctcgggcccagccggacgggccgggccgagcctaggaggggctggcagacgtgtcccagggccagggtggggcgtagggagcgccgtctccaccctcagtacttttggggtgggggacctgagcgtgcggagagcgggaggcagagctgagagcggggttaagcgcgaagctaaggcgccgcatagggttgggtgggaatggacagggtgagctggaagcgaagcaccccagccaggccttaggagagaggaccgtcggcatctgtgcacatcctagcgggcggatgatgtgggagagaggcggagggaggtgaaatgcgggagctagaatttagctttgcagtgaggtcacttggggtctgcattcagctccgatatatacatgtaggggctgtgtgatcctggggaagttaccgaccttgtctgaactcctgtttcctggtttgtaaagtggctaattggtgggaattcaataggagaatgtgcgcaaaacgcttagcacagcgcctggccaacaatgcgctctcaagaaaggctgctgagccttgtccaggacggtctacaccgccccacgtccaagatgagttcacagcgcccaagacctgttcaatttaagatgatgtaaactgcattgcccttcttagacacgcagcagccaggagctggtcatctgcacctcccgcgatttcctcctcagaaccccagtcctgccagatttgc

SEQ ID NO: 332665 - DNA, 934 bp, Homo sapiens
  chr6:10423471-10424405
  hyper
cgctttcaactgacagcagtgggtacaggcccgaggtgtgcagcaagctgggaagcccagaggccgagaagctaaagatgccctggagactggaggagcgcatcaccggtcagtgcgccccctccaggagcggcctcccggccctctcggccttaggcgacaggtgcagcagctgtctctactgcccgctgtgccagggcggctgccgagcactggtgcggaaccactatcggaacgagtttgcacttctgtttacaaagcaatcctgccatcaaaagaggaacaaaatcaccacttatcacaccctgtcataaagtaatctgccctggagggaaacccttgtggagaactgctgtgtgtgtgtgtgtgtgtgtgtgtgtgtgtgtgtgtgtgtgttgggggaggggggatggaggaaagggggattctcccaactcttctgcagagtaaatcgctggaacgcgtggtgtcccaaccggcctggaaagaccgagagtaccatgagctgtgaagctggggtgtgacagggatgcccgtccagggctggcaagagtgcagaatggctctcttggatctttggaataggcacatctgcagaccccgctccaatgtttactttcctagcgccttcgaagatactcccaagggcccccaaaatagatcagcaaaaagtgttgggggtggggggagtgaaaaagccagttcttgaagactgtaaggtcccctttcgcatctcagcatctggagtgtgcagggaattcctgaccagtggttttgctccctccaatcccttgcctcccccctcccatgttatgcacttgttcttggagagatggacgttaaagaagcgtcaagcagttctcactgcaaataaatggtgcagaaataagagagagaggatgaaagcctaggaagttataagtgatcctgaccc

SEQ ID NO: 332666 - DNA, 1405 bp, Homo sapiens
  chr6:10425538-10426943
  hyper
taaacgtctcaaaccgctctgcattcgaattagccaacttaagaacaagtccaacagcactgctaagcaagagcctaataactcagcgtttcgcgacatctcttggcggcgttgaccgtttgcccgggacactggtttagaagcacggcatagggtgtctctacatcttagaaatcaagacagcctctaggttagaataaagtttactctggactgggcataactccactccacctctgcgattcttcttctcgtttcccgtcttctgtcttttctttcctcccttcccaactcctagcgcgctactttaacgtctcagtctcgttcgctaagcccatgcgcctgggacttgttctttgaatctcaagtccgaaaagccaggaatcctcgatcatggacttcctcctgctaaattagagggagtgaaatttcgctctcctctccatcctacttccccatcccaaactcgctagattaagttcgctgaccaggcgcgcacccaatggcagcaccctctccaacattttccccaccagagaggcaagtgtcctacatttgtacgtaaaggtccctgagtggctaggtggagaggctcggatgtcttttcctggagcgggcctcggggagctgcagcagccccagcctcaggcaccacagccaagcgagcgcgccttgggctcgctgctctgcacgcagctggaggtctgggccgctgaccctctggccacgtagtcaacccgaggatgtgtgccccggggctcggccttgcctcgggtgagaaggctagtcaccattcagggtgcaggtgtcatggcctggaaatggcaatatctgagcaaacaggtgggcgtcgcttcccggcggtgcggtggccgctggctcgcagcgcgctccagctttcggcgccgccgccgcccctttgctctgcggactcagccagttcccgggtggcccagctgggtggctccgaggcctgcccccttgggctgcggcgggaggcggggactgcagtgccgagtgtagggcgccccagccgggctggcggttcacgctgcgctcgggcctctgccgggagggcgccctggcgccaaacccgggcgggcaggggggtggagagccgattgagtttattcccattcagaatttagaggctggtggagacagagagtctcctaaatggatgcaagtctcctgaaagtctgggccggaagcctcgaaactttctgccacgcaaagccccagctagtctccagggctcggtcctggttccctttgtgcaggcccggaagtgtccgcccggttttcccactgcctggaggggcccagggtcgcggatagactcggacaaggctccgtttactttcagtttgtcttagttgactaatggcgggactggttgtaatgc

SEQ ID NO: 332667 - DNA, 1231 bp, Homo sapiens
  chr6:11043624-11044855
  hyper
cggacacgggtgaacacacacacacacacacacacacacacagcttactgtcaggcagttcatcggacacgggtgaacacacacacacacacacacagcttactgccgaggagaaagaagcgttactaatccagagtggaggactggcctgggaaatcgggcagagagaggagttgtcggaaagaacacaccagaagcccctccgagcccagacactgatagaaacccagccgcttcccaagccaatctgcaaacccaggaggcacccacgagtgcacagacacacccccggggtgcaggcgcggtgaagggaggagaggggcaagagcttgaccgttagggcccgaaccccagaactcccgaggcagggtgtgtgccgcgcgcgggaaacgccgttctccgctccaggcgtcggcgggcggtggcgagagcaggttcgggggtccggagggtcggagggtgggctgcgcgcgggaatggccgccgcgaaggaggggcggcttcctcgggcatcccgggcgcccggccccgtgcatgcaacaggggactgggcgcgagcgggcgcctcgaggtgccggggcgggaccggggagaggggaccgagacaaagttcccgagacccgcgggcctcgggccgacccgcgcgcccccggcccaaacgctcagctcccgctccccaggcccgcgcggacccggcccctccgagggtagcgggttccagcggcgaacccgcagcgcccgcgccggcgcccgctcggccctttcccgcccggtgcgtgggtccaggagagaaagaaagcgcggcggtgtcggtggcggcgcgcggccccactcaccatgatccgcagcggctgtggcgcggcgacccgggcgggcggcgatgcgctgtccagggtagccgggtccctctgcccggcgctatctcggcgcccgcgccggttacccccacccacacccacgcccggcgcgcgcacacccgcccgcgcctccccgccccctcgggctcgcgccgccgccgcgcggcgctccgagcctcggggccgtttcgtccccgccccctctcccacaggggcctcgccggccgccgcgccaggagggcgcgcgggggaggggcgcagggcaagtgaggcggcgccccccgcccctgcggcctcgcgcgccccctcctgggcgaccgacctcgccctcgcgtccgcggcgtcccctgccggccgggcggcgatttgcaggt

SEQ ID NO: 332668 - DNA, 517 bp, Homo sapiens
  chr6:12749938-12750455
  hyper
accggcggcccatccggagagtgcgctccaagagcgacacgccgtacctcgcagaggccaggatctcctttaacctgggggcaggtaagaacgcccctggcgccgcgcccccgcccccgccctgctccctccctccccggctgttgagcccccgcccctcccgggcgtcctccccgccgccccccgcagtcgggcgctcagcactcgcgctctttgtgtctccggtgcgcagagggcgtgtgtgcgagctacggggtgggggagggcggcgcgtgcagccccacatccgcccgagtcccacgcgggcttccccggcacggggaggaggaagtgctgtcagtgaccacagtgatcccgggaataacccggagcccgggccgcgcgcccatgcgcaggctgcgggcgcggggtctggcgaggctccccgggcgaggttggctggcgcggctactacggggtggaacttgttggtgacattcagactctgttggctttgacgggttgacgccgccgctgc

SEQ ID NO: 332669 - DNA, 963 bp, Homo sapiens
  chr6:13013504-13014467
  hyper
cgggtcggagaatttctatgggaggtgaaaacatcaattatgttgtaacaggttgtctgctccagtgaaagtcaagggctacgggttggacccgccggagagggtaatttgctgtggccctggaggggagcttgcacccgaggtttcccagtgcagcgctttccgtgtgaaacattttgctttcattcggcagctttaggcgtgaagaaaagggggagggggttggcgttccgccctggagctcttgagagtgaaggtagcttcaaacccagcaggctctcagtagctggtgctgagatttccggaggggtggggctgccagaggaggatgtgcacgtgagaccccgagagaggtgggagtggagcttctcaggtaggacccaggagcgccctgcctaccccctcctccggcttcgggatccggattggctggggcagcgaggtcggcgaggtcaagaccctttcggcgccctccccgacccgccccgccgcggcggtgcttatatagagcggccggcgcgggcggggcgggggcatgctggcgaggccgaggggcgcgagtggcagcgcgcgggggccggagcagcgcccggccccgggcgcccgggggccggatggcggagcccacgcgctcagcgaagccggggaggtttgcgctccgttcgccgcgctgcagggagggcgcggtgccaggcgcgagcgccgagaaacccaaaaagaaagctttttatttgctgaggatgaagcccctgaaggagcccgcccccaacaacaacaacaacgtgtcctttgtgatccactgtcaactaggcaaggagatcaaacacatttgcagcaactgcagtcggggggaggacgcccgggacggtgagtgccggggcccgtcggggcggcggcggcgagcgcgggaggcggggaggtggctcgggctgtctcagtttgggggcaccgccggcgtctgtc

SEQ ID NO: 332670 - DNA, 609 bp, Homo sapiens; identical to SEQ ID NO: 231824
  chr6:13924915-13925524
  hyper

SEQ ID NO: 332671 - DNA, 709 bp, Homo sapiens
  chr6:17101829-17102538
  hyper
tgttggtttctgttcgtgcgaccgtctttctgaggtcgcttttgtgccactgccttctggtgctgtcggggccgcctccacaccgtcctccggccctcaacagccgtctctgcgactggacacctgcctcgcatgccacacgatcaccttcactacagacagtgtctaaaaacaaggatgtggtccaggcaccaggggtaggggcgtgtcacacacaccgtgtcttacaaagaggaaaaataagaggttcccgcaagatgcttgcgactctggtacttttcaaagtaacgcagccaggcagcgggctttcccccggcccctcgctctggatagggctgccatttgcatcctagctgtgatttagacacctccaaccttctagttttcagttacaagagtcccatctccgcccaggtcccaggtctgcatgacgtaatttattgtggcaaccattcctggcgactgcccagaaactcagtgcgtcctgcccggggtttaagcgcgggaagtgggagaggcgggtggcgcccgagcgcagtagcaggggcgtagggcgcagggcgcaggagcgcgggaccaccggcgccggagcgcggcagggagcgctcgcgggggcgcacagcagccaagcccgcggaggaggagcgcgcgcgcgcagcatgggctgtggaccttcccaacctgctgaagaccggagacgtgtacgcgc

SEQ ID NO: 332672 - DNA, 1364 bp, Homo sapiens
  chr6:17281034-17282398
  hyper
cgccggctacagagcgggagccccgagccccagcgccgcgccgcgcggggagagaagcagctgttcccaacagctggggggcggcggcgcccggcgccccaggtgctgccgcggccaatcgcaggcgtccggcccgcccccctccccagccgggcgtcgacccccggcccgcgggggaagggagcagagaggtggagagctgtcctcggcactcgtcttccagatcccacggcgggagggacagaccagagccgaagctgcgcggagttcctcgcccctggccccgccgccgcgccccccgcccgcttcggcgctcggacgctcttcccgcggaccctccccacaccccacccaaggcacctgattcctaaggaagaaaaatctacctctaaagcacccgcttcttcgcttgagaactaccctctcttttcatttttggcctccccgccgggtgagtggaaaccgcttgcacattctatagaacccgattctaatccagacgatccggagaatttgtacggtgaccggcagggggggcgggaggagagagcgaagtcaagtctccagggccgctggcgacttcggaagccgcgcgcccggcgctctcggccgcccccggccgctcgcccccgccgcgccgccgccctcgcccccgggctcgcccttggcccccggcggccgcgaaagggtgcgggagacgcggagccggaggaggaggcgcagccgctgcccgagccgcagccgcagccggagcccgagccgcggggcgggtgcgaagatgcacacgacccagaaggacacgacgtacaccaagatcttcgtcggggggctgccctaccacaccaccgacgccagcctgcgcaagtacttcgaggtcttcggcgagatcgaggaggcggtggtcatcaccgaccggcagacgggcaagtcccggggctatggatttgtaagttgcacggactgggggtgacggggagggacggagtggcggctgaccccggggatcgggagcttggagtgaggggctcggcgtgacccgtgaggagccccgcgggtagagcggcgctgccccttcgctccggggtgaactgaaactttgctaggggagagggtcggcgccagcctcgcggggttcggagaagacccagcgctgtgcgaggtcgggggccgggcagggcagagcaggggtgaaaggagagacctgtaatgacggcgggatttggggtgcggagggttgcgagggaggggccgcaaccctgaacaattgcattcccgggctggatgccggttgttaagcgcgctgttgctttgtaaaaatgcgtgtgttctggtgttttggctggggcagggaggggacaccccac

SEQ ID NO: 332673 - DNA, 57 bp, Homo sapiens; identical to SEQ ID NO: 231838
  chr6:18122951-18123008
  hyper

SEQ ID NO: 332674 - DNA, 1440 bp, Homo sapiens
  chr6:18263786-18265226
  hyper
cgtcaaatgatgaaatgttaacgaacgtttagagcggacgagaagtcggctgcactccaatacatctctaccacgctaacaaatactttaaaaaccggaatacacaaagtcaattctacgccatcgctcaaaacaaaagcagataaattgtgcacacattctcgctgaaaatcactccgacttcacgcctctaaacaccaaaagagcaagaaaactgtttcctgggtgaaaaatacaaaaaaacttcggtctgaaaaattcatcagttgggatgcgactccccccacctttttcctcctcctcctcctcctcgtcgtcctcgtcctcttcctcctcgctctcctctctgggaccgggcatttcgggttctttctcggacgcgggctgggtgggggttccctccccctccgcagcaggggccgaggcggacatgctgtgaacctgcatgcgggaagaaagccggacgtctcggtcctcctactcccgcaggcaggaccgggcggccaccctgaatgatgctacccttcccgcgggacacctgccctgaaagttgcctcctcccatagccgggaccgcagcgctcagtccccaggggcggcttccctcccgctccgccgccgccgtccagggattcccgaggcgggaaaccgcgcccgctgccccgcgtgcgcgcgcgcccgcccggcctgcgctgttcccggcccggcccgagctgccggccctccacgtcccctcccccgccccaggccgccgtccaaatggccgcgtccctcccccgtcggccgcggcaggggcgaccgggcctccggcgtcccgaagcagcccttaccgcggatttcggccgccgcgggcctggcacgcgagggcacgaggaggttctgggaggcggcggcggccgacgccgaggagaaggcgcgcgggccgctgtctggcgtgacgctcgcgccgcgcgctcggctccccagaatcaacaagattttcaaaatggcggttcgggaaggagagcgggaatgcggcgaccaatcagggccgcgagctgggagttggcgggcgcggggcgggggaggcggggcggccgggtgcctccgcgggaagctcgggcgggcgggaccgcgaggggtcgcctcggccgcgggcggagggatgcgcgcgcggggctctccccggctgcgcctggagtgtggtcggcgctcgggccccggagtgcgggcgggctgtgtcccgcggggcgggcgggagcgggaggcgaggcggcctggcagcgcggaacggaaggacgctagggggcctgcgtgtttattgtttccacggtcgcttcctggaaaagatgatgagcagtcccgggccgcggaggggcgcggcgggcgcggtaaagaagtttagagatctccgaagtcgctatcgacagtgttactctgaggcggaggagaattaatcagc

SEQ ID NO: 332675 - DNA, 615 bp, Homo sapiens
  chr6:19804685-19805300
  hyper
cgaacccaaccgccagaatgtctgccgagcctagcatgggatgctgcccagcaaaacagcacccagggagagggcgactgaggaagacagcctgcaagcgcgcttcagaaaggactgggaccagagccctagaaaactacagcgagtggattccctggcaggggaaacccgcgagagcctgggaaaaaaaaaaaaacgagagggagagaaaaaaactcacccgggcgccctgaagcccagcgcaagcaagcgagtgagcgcgcaggctggctgggctgctccagctggaagtcattgtgcgggctggcgtctgcgttgtcagggcgaccgcccggccggcgccagcggagcgggggaggcgggctccgtgaatgggtgacgtcacgcagccggcgccaggcagtctgggcggccgagccaatgaatcagctgtccgggggaggcagcgcagcgcggcgcgcgggagctgggtgcaggaatgcgcctggagccgcgcggcccgggagggcgcgagacgtctccgcccgcctggtcgccccgcggcggccagaggtcccagcgtcccaggctcggccattccggtgccccccacgcccagtctgcggctgtgcccgc

SEQ ID NO: 332676 - DNA, 1871 bp, Homo sapiens
  chr6:19837692-19839563
  hyper
cggagctccgaagggagtgactaggacacccgggtgggctacttttcttccggtgcttttgctttttttttcctttgggctcgggctgagtgtcgcccactgagcaaagattccctcgtaaaacccagagcgaccctcccgtcaattgttgggctcgggagtgtcgcggtgccccgagcgcgccgggcgcggaggcaaagggagcggagccggccgcggacggggcccggagcttgcctgcctccctcgctcgccccagcgggttcgctcgcgtagagcgcagggcgcgcgcgatgaaggcggtgagcccggtgcgcccctcgggccgcaaggcgccgtcgggctgcggcggcggggagctggcgctgcgctgcctggccgagcacggccacagcctgggtggctccgcagccgcggcggcggcggcggcggcagcgcgctgtaaggcggccgaggcggcggccgacgagccggcgctgtgcctgcagtgcgatatgaacgactgctatagccgcctgcggaggctggtgcccaccatcccgcccaacaagaaagtcagcaaagtggagatcctgcagcacgttatcgactacatcctggacctgcagctggcgctggagacgcacccggccctgctgaggcagccaccaccgcccgcgccgccacaccacccggccgggacctgtccagccgcgccgccgcggaccccgctcactgcgctcaacaccgacccggtgagaggccgggcgccggccgtgggcggacgccgcgggggatgggaggttggtggcgtggtggcgggacgcgggcgctcaccgtcctccgggcaggggcgggccaggaatgacagccccctccccctgctcctccgggctcccccgggccgccagcagccggccgggctcggcgagcgcgggtccgggagaacgcgcagggcgggactcggggctgtgggcgccctgggctgtcaagtcccgcctgagcccggaggggcccccccggctacaggctggggtgggggcgtcggcgcgccagcctgatttccgaggacaatccaggaccgtgtcgagcgcgttgtttgcgcctgctaacctttcccttggtgttcggttgctgttccaggccggcgcggtgaacaagcagggcgacagcattctgtgccgctgagccgcgctgtccaggtgagcgcgcatttcccgtctcgggtggccggtcaccagagacgcccgtccccgagggcttccggggccaggcaccgcggtgttctttgcccccagcgtttctgagagcaaactcccaaggaagtaaatcccctctctccctgccacctaagtagcaagtaaacccgtacttagccttagaactcgaggttcagtctcggtggagacgggtcagcccttgtccccgccgtccccgtgttttttctggtggtcagcgggctcttctgccttccctagttcccgagggagggcaccctcgtgggcatgggagctgccccggtgtcctcccgtgcagtctgtcacccacaaagggggacgcgggcagggcgccggagtgggtcccctctccgggcttcccgagggccgcagctgcctgctcggcgcctggcccggccgcgggcgggtgttgtctgacctggtggtttgttttgggttgttgatcaagcatgtcttgagtttggtcggtggcgccagttagtctgcagcgagaaggttcacacaccccctctattcattcctcttccacaggtgtgcggccgcctgagcccgagccaggagcactagagagggagggggaagagcagaagttagagaaaaaaagccaccggaggaaaggaaaaaacatcggccaacctagaaacgttttcattc

SEQ ID NO: 332677 - DNA, 813 bp, Homo sapiens
  chr6:20212279-20213092
  hyper
cggagggacggtggctaacactttcgcccgccccgtgcacgcgatcgctggggagctggggtcgctgcgctcccggcctgcagttacctggtccagcgggatgcccaggagctcgctgagcgggtgcaggtaggtggagcccgtggtgcggtaggaaaggctggacggctgcggctctgctgccatcctgcatcttcgggaggtggctgcccctgtcccagcccgcaacaccccctgctcggcgtcctcccgcccgggtgctcttgggtggttgccccgagaggcgcacggccgcctggttcgcgggggagcgaacgggaggccggggaatgcgaaccggcgcaaactctcgaggcgcaaactctcgaggcgcaaacttggctttggcgctggcgctgcagccacgggcgccgtaggagggccgggcccaaggcgccccgcttcccgctcccttcctctccgcgcccattggcccggccgctcgggacggccccgagaggagggaaggagggaggaaaagtggggactccgagcccggcccccaagcgccgcccggcccgcccagcctggcctgcaccgaggccgaccgggagagggaaagcgacgccagcgggcgccgccgcctggccctgcagctggaggcgggacgcgcctttcctcctcccgggctgaccgtcctagccccccgccagacaaaacgacctcacccagcgggcgccttccactagagagcaccacccaccccgccccaccctgttttggtttcgccgccgcagtcgaagcggctgagtggctgcgtttccctttcaagcc

SEQ ID NO: 332678 - DNA, 2313 bp, Homo sapiens; identical to SEQ ID NO: 231851
  chr6:21664626-21666939
  hyper

SEQ ID NO: 332679 - DNA, 193 bp, Homo sapiens
  chr6:24494665-24494858
  hyper
gcggggtcacacttcgacccctcagagaacgatcgctcccaatcaatactacgtgctcaggagctacaactgaagaagcgtgatcacggccttggcatttagggcaggcaccagcgcatctatggaccgcgcacaaattccggggatgccgaatttgggggatgctaaggggagagagtgggtctctagcagc

SEQ ID NO: 332680 - DNA, 869 bp, Homo sapiens
  chr6:24910934-24911803
  hyper
tgcttagcattcaacgctcattcaagtcgaggacacccctccccacacagacctcaccgcgttgtacgcaaaatcagaagcaaaaaaggagaaatgaaaaggtgaacctacctaacgacgacggctccttgtcatgtcaggggcacactcagggttctctggcatataaaagcctccgcaccaatgcaatgcccggagctgcccgcacctccggctttgcagacagcctgagctggctcacttgggtgaaggggaccccgggaggaagtcgggtggacgcgagctgtccccagcgccggctgccctgccgcgtccgctcgcagcagctgcggcgcgcggggtgaagttgcggggctggcgggcgcgagggtggcggagcgcggagctagagcggcggagcgggcggaggggcgggagccgtgaggagggggaggcgcggcgcgggggccggcggcgtcacttgtgctgggaggggagggcgggtggagacagctgcttgacagctacttcagcccaactccaggaggctgcgcttcggtgcctgcttccagctgatcgccggcacgccaggctcctttgcaagagctggcgcggcagctttggagtgacccgtggaatcgcgccggggagcgagcccggtggatccagcgcgctggagggagagggcagaggaaaggagccgaggcaaggaaaggccctttcagctaaccttttgggatctttcatacaagctgggctgtgcattgaaaaaaatgaggcggtggtgtatggggtgggggcggtgtgagggtgaggttggctgcccacggcaagggttgtgctggaaagccccgctgaagagggctgctttgtagggcactctctctacc

SEQ ID NO: 332681 - DNA, 788 bp, Homo sapiens
  chr6:26033454-26034242
  hyper
cgcctgaatattaggcaaaacgccaccctgcgcgatggtcacacgccccaagagtttattaagctcctcgtcattgcggatggccaattgcaggtggcgcgggatgatgcgggtcttcttgttgtcgcgggccgcattgcccgccagctccaggatctcggcggtcaggtactcaagcaccgccgcgagatacaccggcgcgccagccccgacgcgctcggagtagttgcctttgcggagcaggcggtgcactcggcccacaggaaactgcaaacctgcacgagaagaccgagtcttagccttggcgcgagctttaccgccttgtttgccgcgaccagacataactacttctgataagggaaaatcgccacaagaaaatgtaatgaaactacattagaacgcaaggcagagaagtatttatactgactggaggtaggctgtgaggaattctcccattggctaatgtcaaatacccaatgggaaatcagaatctgcatccttcatttgcatgtaatccttccgtctggtgtaaggtttatgtttgacccaatccccagtctggcttgacgagccttcgacttgaatactaataataattggccgaattaggattttgtcaaaataccttttttaagcatgagtggaggttttgttctggttattttgactttcagccgctcgtgcttttcccggattgtgactcatgtttttggaaaggagtggactccgaccaatttctaaatagatatttaagaggtccttcaaatcgggcgcagtggctcatgccc

SEQ ID NO: 332682 - DNA, 654 bp, Homo sapiens
  chr6:26087606-26088260
  hyper
cgtttccccgccccccaaaagaagcggagatttaacggggacgtgcggccagagctggggaaatgggcccgcgagccaggccggcgcttctcctcctgatgcttttgcagaccgcggtcctgcaggggcgcttgctgcgtgagtccgagggctgcgggcgaactaggggcgcggcgggggtggaaaaatcgaaactagctttttctttgcgcttgggagtttgctaactttggaggacctgctcaaccctatccgcaagcccctctccctactttctgcgtccagaccccgtgagggagtgcctaccactgaactgcagataggggtccctcgccccaggacctgccccctcccccggctgtcccggctctgcggagtgacttttggaaccgcccactcccttcccccaactagaatgcttttaaataaatctcgtagttcctcacttgagctgagctaagcctggggctccttgaacctggaactcgggtttatttccaatgtcagctgtgcagttttttccccagtcatctccaaacaggaagttcttccctgagtgcttgccgagaaggctgagcaaacccacagcaggatccgcacggggtttccacctcagaacgaatgcgttgggcggtgggggcgcgaaagagtggc

SEQ ID NO: 332683 - DNA, 719 bp, Homo sapiens
  chr6:26188711-26189430
  hyper
cgtttgaacccgggaggcggagactgcagattgccgagatcgcgccattgattactccagcatgggcgacacagcaagagtgaaaataaactttaatacactatcctcaccggccagtaagatatgaagccaaggcgtaataagaccatttaacttgaaaaccggagctactaaacacgtgaaactacacttttagcagtgactactactctttctcctgagtggataggtggccctgaaaagggccgttggttttgcggtagtgtactgtagaggtaagctcagccgccgaagccataaagagtgcgtccctggcgcttgagcgcgtacaccacgtccatggctgtgactgtcttgcgtttggcgtgttccgtgtaggtgacagcatcgcggattacattttccaggaaaactttcagcactccgcgagtttcctcataaatgaggccagaaatacgcttgacgccgccgcggcgagccaggcggcggatagcgggcttggtgattccttggatattgtcacgcaataccttacggtgacgcttggcgccacccttacctagaccctttccgcccttaccgcggccagacatcttgaaaccacagctgttaaatctgtaacgcaatacgtctggcagagccacgcagcacttttataatagcatgacggacctgtttgaaaacctcatgagaaggggcgggaaccacagtcagttccc

SEQ ID NO: 332684 - DNA, 521 bp, Homo sapiens
  chr6:26197326-26197847
  hyper
tcgcgcagagccaccgtgccgggccggtaacggtggggcttcttcacgccgccggtggctggagcgctctttcgagcagccttggtggccagctgcttgcgtggcgctttcccacccgtggacttgcgagcagtctgcttggtacgagccattgcgaacttctaaaccctgctaaatgacgaaaaaacgaaagtctagcctttcgtacccgtatatataaagacacccctgttctgattggacaaggcagcctttcccctgcagctcgattggtggagacgcccactccctgacagaacatctcctgcatgtagaccaaatattaaaactttcctccgtccatctttaactgctggtgttttcaaccctttcccctctgtgccatgtttctagcttttatttaaaacgtactttggttttccttggcaaaattgtgtctagctactaggatgacgtgtcttaatttttttttaaatgttggcgctgaaactggctttgatcaacgttttaaaaagacgcgc

SEQ ID NO: 332685 - DNA, 113 bp, Homo sapiens
  chr6:26198488-26198601
  hyper
cgagccgctgcattgatcgatttaaattacatgtgacataaagtctctttgcattttaattagtttgcttttttgggtttttgtttgttttgagacagtctcgctctgtcgcc

SEQ ID NO: 332686 - DNA, 1020 bp, Homo sapiens
  chr6:26198852-26199872
  hyper
ccccgccaatttgcttatgtatttttatggcatctttaaaatggacggttagtttcacgattcagtgttaagaacacccacttataaatggaaaaattattaaagaaaactgcaaaatagctatttacacagaaaatgtgagcccttttaaggaatacatgggtggctctgaaaagagcctttgttaagactgcttccttaaaaagccaatataagagttctcgttttacttgcccttggccttgtggtgactctcagtcttcttggggagcagtacagcctggatgttgggcagaacaccgccctgagcaattgtgactttacccagcaacttgtttagctcctcgtcgttgcggatggccagctgcaggtgtcgggggatgatgcgggtcttcttgttgtcgcgggcggcgttgcccgccagctccaggatctcggcggtcaggtactccaacaccgccgccagatacactggcgcgccggccccgactcgctcggagtagttgcccttgcggagcaagcggtgtacgcggcccacagggaactggagtccggcccgcgaagagcgggtcttagccttagctcgggcctttccgccttgcttgccgcgtccggacattttgaattcttaaaaacgatgttaagcaatgaagacaaaaatgtaaaagtgaattttgttagcaagtgagaaactattatacttggaggtcgaattgtaaataacgctatttgattggctagaacaaccaaccaattgcaaagaaacgctagaatcacctaatttgcataccacagggcacacagagacaattcatccaatcaatgtgtaagcttttaaatgccagtttacgataggagctctacaaatattaccagctgcagagtgaggacacttgcatttctctttaggttgtggacgaagtgtttatttatcatgcctgaacctgctaagtccgctcctgctccaaaaaagggctccaaaaaggcggtgaccaaggcgcagaagaaggatggtaagaa

SEQ ID NO: 332687 - DNA, 1449 bp, Homo sapiens
  chr6:26204318-26205767
  hyper
cgtgtttttctcttcgggaggaaaatccttttggtcagatttcccttggcttggtggtggagagggtgagatcttgcagttttcaaacacttcctaagggggttccgtccccaagagagcaagcagcagaaatgccagaggaaccgtgcctatggggacaaagctgaactcctcatggaaggagattactgcagttccggtcttgtgagccaaagctcctgttcaatcgtcctagagcatcccaagcagcaaatgattttaaacatgttaatgtatttaatctcatttagttgttaaaatatgcctaaatttcctctttgggaacgcaagacttgcagagatgactccatggagagcggactctgccggcgggaactggagtcgttggtgacgtcatcccagtctgatctgtgaagggtagggccagcaggcagcaccaaagttcccgtatgcgcgttttcagtcttcatttaggtccgaattcccggcatataagaatactaccgtcgcttgtttttcagatttttgcggctattttcgttggtgtgttggtcatgtctggtcgcggcaaaggcggaaagggactgggtaaaggaggcgctaagcgtcaccgtaaggtcctgcgagataacatccagggcattaccaagcctgccatccggcgccttgctcgtcgcgggggtgtcaagcgcatttctggtctcatctacgaggagactcgcggggttctgaaggtgtttctggaaaacgtgattcgtgatgctgtgacttacacggagcacgccaaacgcaagacagtgacagcgatggatgtggtctacgcgctgaagagacagggacgcactctttacggcttcggcggctaatgctaccgcttaaacgactcagcatctcgacttcccaaatcaaaggcccttttcagggccgcccacagttttccgcaaaagagctcatgacttgttagacgattggttggtctctttataagttaattgttcctgtcaacaggtacgtatatttttcagccgttttttttttttcgttccaaattacatttggggtttcggcatacgattttttaggctacgatccttttatgtttattgtagtagggccttagattgcactgaaaaggctagggtaatagtgtctgtttaccttaccacttttattttgagtacctaaaaatgcatggttttcgacataagtgggaaaaccgcaagacactgcgtaaccgctcaaaatggcggagagcgaagaacaaagccggtgcctggcaatgggccggacccgcgaattagcgcaaccaatcatcttcctggaaaggagtgtgggccttaaattctagcggcctgttttctattacttaacctaacgaccgagtttaggtgtgtagaagttcctggggtagataagctcacgcaaggagaggttgcaagcattcatttc

SEQ ID NO: 332688 - DNA, 42 bp, Homo sapiens
  chr6:26206006-26206048
  hyper
cgtccttatccctccctgatttcctgttttctcgcccttctc

SEQ ID NO: 332689 - DNA, 255 bp, Homo sapiens
  chr6:26215876-26216131
  hyper
cgtattcacatgttcctgcagtctctagcccgagagtttaagctatcctaccacctcagcctaccgagtaaatgatagtacagacgcaagccgtcacacctggttagcttcatttttttgcagagacgagttctatgttgcccaggcaaatctgttaactcctgagctgaagaaagcctcatgcatcgacctcccaaagtgctaggattacaggatcttgccaacacagaacaggagtatctcctgatcaatttt

SEQ ID NO: 332690 - DNA, 291 bp, Homo sapiens
  chr6:26216380-26216671
  hyper
cggaaaaattattccctagaaaacggtgaaattcaatattaaagctctttatgtgagacttgagtggctctgaaaagagcctttgagttttaaagcacctaagcacacatttacttggagcttgtatacttggtgacagccttggtaccttcggacactgcgtgcttggccagctctccgggaagcagcagacgcacggcggtctggatctccctggaggtaatggtcgagcgcttgttgtagtgggccagacgggaagcctcgcctgcgatgcgttcgaagatgtcgtta

SEQ ID NO: 332691 - DNA, 1085 bp, Homo sapiens
  chr6:26216805-26217890
  hyper
cgccttggtcacagccttcttggaacccttcttcggagcaggagctgacttagctggttcaggcatgctgtcagaaaacaataacagcagtgagaatgaacgcacttaaataaaagctcgtgtctagagtctctccttttataggcctttcatgcaaataaagaattcaaaatatccagctctgattgggcaatgtgttagtgacgcatacatgtaaaatagccttcaccttatttcctttctaattggttggctcgtcaaagaacaattttaaccaatcaaattgcgcctttcacaattctaccgatgactataactagcttcttattcctccatcgagcccattctttttctttattcagtggattgttagttcttctgctgttaggaagccactatgtctggacgtggaaagcaaggcggcaaagctcgggcaaaagctaaaacgcgttcttccagggccggtcttcagtttccagttggccgtgtgcaccgcctcctccgcaaaggcaactactccgaacgagtcggggccggcgctccagtgtacctggcagcggtgctggaatatctgacggccgagatcttagagctagctggcaacgcggctcgcgacaataagaagacccgcatcatcccgcgccacctgcagctagccatccgcaacgacgaggagctaaataagcttctaggtcgcgtgaccatcgcgcagggcggtgtcctgcccaacatccaggccgtattgctgcctaagaagacggagagccaccataaggccaagggcaagtgaaatgattactagtcaaatccgtcagtgatcccgagtcccagaaaccaaaggctcttttcagagccacccaccttttctgtaaagtgctggaatacacatacgatgcctgaaatctcaatgttcactgtcctaatttttaacgaacgcttctgacgttactggtcagttctttattgaaatccttgctcacatttcatgcactaatttatcttactggtgtttctttgcagtaaaaatgcgtttataaaggtatacaagaatagaaaccgaggttgtgacaccaaggtttcactgc

SEQ ID NO: 332692 - DNA, 1598 bp, Homo sapiens
  chr6:26233864-26235462
  hyper
cgtcacgcagtgcagcccccacactatttacaaatacagtacctgagggccgatatcccaaagctaaggcttatcaaaggcctgcgaaaagacagacaccgggcaccaccagcagttggccattctcaacgaccagctgcacaagatcgtgggccggaagcaccttgggcatgccacgtactgctcacaaccaggacgggatgtgctcaggaagtcacctcaacgctaaagtaaactaaagcatttacaccacatccctgtgtcagaaataaaattttttcagggccacttttaagcgccgcgctttaacagaaatcggccggccaatcacacaccaccgcgggaatttgaagaaaaagtaggacctggtggctcaagtagccttagctatccggtgactgtggctgagactgagacggaaggatccttgcgcccaggctgctgggagctgttaataactgacccccaaccagcacgactaggatagaccgtggccgcacaacaccgcagcacccgcacccctctccaccccactcccccctccaaaaagcttcagctcttttgactgagacctgtgggtggctctgaaaagagccgtttaaaattttcaaaggggaacgtcccgccagtttcactttttcttcggagctgccttctttgcctttgtaaccttcggcttccccgacttaggcttggccgccttgggcttaggggctttggccttagctggactcttggcagctttttttggctgaggtgttttcacctttttcgcactcttggccactttcttggtcccagcagcggttgctggcttctttaccttcttaggagtctttttgatgcttttcttcggggtagcggcgccagccaccttcttgggcttcttggctgccccagcaggcttcctaggcttggctgcgccagcctttttggccttgggtttgccttccccggaagccgctttcttgttgagtttgaaggagccagaagcaccggtacctttggtctgcaccagagtacctttgctcaccaagctcttgaggccaagcttgatacggctgttgtttttttctacatcgtagccagcagccgcaagcgctttcttaagcgcggccagagaaacgccgctgcgctccttagaagctgccactgccttggtgataagctcagatactgggggtccggatgctttgcgtttcccagcagttgcgcctgccttcttcgcctttttcttcacaggtgttttttctgcgggtgcaggaatggtaggagcaagtggagcagtctccgacatgtttttgtcttcccagaaaagacaataagtaatctcaaactgtcagaacagcatgtcctctacgagggaggctgagggtttatatagagagacgctgagtgatgattggttccttgctccatgcgcggcgctgctggaaaaggactcctcgtatctaccgcgctgctgtgtttgttgccccttaaaaaagagtaaaaatataagaaatctgggcatgaaataattagagacttgggggaaactgatccgagagagttcgggcttcattcctgcctttgtttctatgcatagttttaaaacc

SEQ ID NO: 332693 - DNA, 746 bp, Homo sapiens
  chr6:26240648-26241394
  hyper
cgatcatgtctggtagaggcaaaggtggtaaaggtttaggaaagggaggcgccaagcgccatcgcaaagtgctgcgtgacaacatacagggcatcacgaagcccgccatccgtcgcttggcccgacgcggcggcgtgaaacgcatttcgggcctcatttatgaggagacccgcggtgttcttaaggtgttcctggagaatgtgatacgggacgccgtaacctacacggagcacgccaagcgtaagacagtcactgcaatggatgttgtctacgcgctcaagcgccagggacgcactctgtacggctttggtggctgagcctcaccccggctttttatttaacagctcacccataaaaggcccttttcagggccacctccttcgtcacacgaagggctgtaactgatgacgacttgggtttcgttttgtaaatttgggattctaactgagttaaaccgagccgtttttagcgatcttcctaagatggcggatgtgctaaggagaaagggaaggcgaaacattagaaacttgttcaggtatttcgatcgcaaacattcacaggaaaagatggtggaaatggtttgggaataccagcagccttttatgacgtatgtgatgtgttttattcccacgtttctgaaatttactcctatgttaggtggctgggacttaactacactagcattacatgtttagtttttgagatggagttgctcttgtccaggctgtagtgcaatgacgcaatct

SEQ ID NO: 332694 - DNA, 167 bp, Homo sapiens
  chr6:26249947-26250114
  hyper
cgctgtcacccatggaggagtggagtggcgcgatctcggcttacttcaacggctgcctcccaggtccaagcgattctccttcctcagcccccgatatagctgggactgcaggagggcgccaccacacccgtatttttgttttttggttttgtacttttagtgaagac

SEQ ID NO: 332695 - DNA, 970 bp, Homo sapiens
  chr6:26250198-26251168
  hyper
gggattacaaggcgtgagccgccactatcggccattttgaagacaatggccaagacacaaaagcctagtttagaagagccaccggccctgcccccatcccctaaccctccaccctccttgttttaggagacattactccctagtgctacggcgctttcaactgaaattgttggtggctctgaaaagagcctttggtttaagttggcgcacaccctcagtacaacttatgccctctctccgcgaatgcggcgagcgagctggatgtccttgggcatgatagtcactcgcttggcgtggatagcacacaggttggtgtcctcaaagagccccaccaggtaagcctcgcaggcctcctgcagcgccatcacagccgagctctggaagcgcaggtcggtcttgaagtcctgcgcgatctcacgtaccagacgctggaatggtagcttgcgaatcagtagctcagtcgatttctgatagcggcggatttcacggagggcgacagtaccaggcctgtagcggtggggcttcttcacgccaccggtggctggcgcgcttttgcgagccgccttagtggccagctgcttgcgcggggctttgccgccagtggacttacgagctgtttgcttcgtgcgtgccataggaatgggtttcaagcaatggtcacaactgaacaaacagttgttcttactcctatttataaaggcaaagtccttctgattggtccgaatcttccagtttcgcgccctgaattatgtagtgtgataggacttgtgatcagctactaggtctcattttagaaaatcttaacctatctaaatgcttttttcccctagttccttacattttattatgttttatgtgcctacctgtattacgtaccttcattgattttattttaatcagtttgtttgggattatgtttgacagacggaaatgaacgttctgcagttccggagcgattcaaaaataccgc

SEQ ID NO: 332696 - DNA, 428 bp, Homo sapiens
  chr6:26251515-26251943
  hyper
cggaagctgcaatttggtaggaaactagaaacataatatccgtctttgtttctgtttaaattctcacctaaggagacagaacttataggtagatgttactggcaaggcattagtttttctaatgttttgaatgaaaaactacgttttttcccccgggaggtgtagaaaaggatttagggtaggtttcgcataaatatccaatcaaaaagtagacttgaatttaacttttttattggctgatttggtccaatcagggattgagaatgattaagcacctatttgcataaaagacctacaaaaacggccagctgtgctgttgagccttcactttggggtgtattcttactcctttatcttgttgcaatgcctgatccagctaagtccgctcccgccccgaagaagggctccaagaaggcggtgaccaaggc

SEQ ID NO: 332697 - DNA, 95 bp, Homo sapiens
  chr6:26252081-26252176
  hyper
cgatatcttcgagcgcatcgccggcgaggcttcccgcctggctcattacaacaagcgttcgaccatcacctccagggagatccagacagccgtgc

SEQ ID NO: 332698 - DNA, 2039 bp, Homo sapiens
  chr6:26271217-26273256
  hyper
cgaatgcggcgagcgagctgaatgtccttgggcatgatagtcactcgcttagcatggatggcacacaggttggtatcctcaaagagccccaccaagtaggcctcgcaggcctcctgcagggccatcaccgcggaactctgaaagcgcagatctgtcttgaagtcctgagcgatttctcgcaccaggcgttggaaaggcaacttgcggatcagcagctcagtcgacttctgatagcggcgaatctcgcgcagagccacggtgccgggacggtagcgatgaggtttcttcacgccgccggtggccggcgcgcttttccgagccgccttagtggccagctgcttgcgcggcgctttgccaccggtggacttgcgtgcagtctgcttggtgcgggccatctcagactacctgaaagaaaaactcagccacttggcagagtggaaactgcccttatatatactcagaaacattctaattggccttgttgattttcaaaagacccgcgcaacaaaaccattggctgaagagtccaacgatgtgattggtgaattactggaaaatctgattggatgaatcacttcatttttgaatcctctcttctcggttagtctgcgatccaagaacgttaacttcttaaagttctaattctgcgcttctcaagctgtagtccgtaaacgactactttaagacttggaagacgctaattctcattcagtagatgtgttgtggggccagattcggaggaccacgttttgagaagtttatcttgtgccgttttcttgagtcacctggactgctgctagctggaaacctttgaccattataaggcaggattcctgggtgatgtacctgggaaatcacgagccaagaagtcaccgacatacaacagtgagcaacaaatgttaactgaattctattttgtcccaaatggtgttttgcttcggttgagaatttttaaggcacaggctaattttaggttttccaacgactcttatcatttacttttcgttgggtcctattgatgatattccaggataccacccccactagcctcttctgcaggataacttgaacactgcagtggccctgtccatctaaactttacaaggttttgtaaacgttactgaacttgcttcttcccgactacattaaagcacttacttgagatattaaacattttctcattagtcctgtttgcctagtcagtcacttgtatagacagggcaacagcacggcctgaatattgggcaggacaccgccctgcgcgatagtaactttgcccaacagcttgttgagcttctcgtcgtggatggcgagctgcaggcgtcggggggtgacgcgggtcttcttgtctcgggccgcgttgcccgccaactccaggatcttggcggtcaggtactccagcaccgcctccaggtacaccggcgcaccggcccggacccgcttggcgtagttgcccttgcggaggaggcggtgcactcggcccacagaaaactggagaccagccctggaagagtgcgttttagccttggcgcgagctttgctgccctgcattccacatccagacgcagtgaagtatttaaatacttgtttagaagaaggaaagtgattgattctagtaaaacgcaagagctaaactcttataatctatattcggcaaagtagactgtgctatctcctgaacacagatttcagccaatcgaaaagcaggtgtttaaaaaaatttaaaaaaaaaaaaaaaaaaaaaaccacttctgacttacatacttatagttgaaaggtcaaattatgcaaggttgagcttctgggagagccgatgagatttaggagttcagaaatggcctatcatatattcagacactaaaagaaccaatgagaaaccgaaactcagccagcctcatttgcatatacacgaggtaaataatgagggcgtttgggctcaccagcattttcctgtggtcatttgacggtatcacttcggctgcgaacatgcctgaaccagctaagtcagctcccgccccgaagaagggctccaagaaggc

SEQ ID NO: 332699 - DNA, 240 bp, Homo sapiens; identical to SEQ ID NO: 231900
  chr6:26273513-26273753
  hyper

SEQ ID NO: 332700 - DNA, 727 bp, Homo sapiens
  chr6:26313163-26313890
  hyper
cgaaactggctgaaagctctccacacctaattagtaggattacagatattgaagcctacaaatgcgcatttccaccaggataccttgtggattcttacacgggtcaggtccgctgacgtttagcacgcctactttaaaacctcttttctgtagggtcctagtcttcaagtaaaatatatgcggccatatagcagaggatggtttcgatccatcgacctctgggttatgggcccagcacgcttccgctgcgccactctgctgtctcgacagtccgctccgccactctgctgtttcaacattactcttgtcaagtatgtattagaggctacaattttcggcatcttcctaattttaaatgatttgttgtcgtttgccaaattatcctggagaatgagaagtgcacactggccatccatatggggctgcacgccacttccaaacaccagcggtttagaattcttcctcgataaattcgaatcagctgaggttgaagttctctaaaacggaagcatgtttcgagttatgggaaaacaaagtgcaggctaattggcataatttataaaggtgaaattataaatgcttgggcaaatttcagccattcctggataccggagggagtcgttattacttccaaacattttttacttgagattttcatcgaaaatgttcacaggaaaaaaaaaattacagttgcagcgaggaggcaacagaacctagaactccgcgc

SEQ ID NO: 332701 - DNA, 300 bp, Homo sapiens; identical to SEQ ID NO: 231904
  chr6:26322363-26322663
  hyper

SEQ ID NO: 332702 - DNA, 147 bp, Homo sapiens
  chr6:26327821-26327968
  hyper
cgtggccgagtggttaaggcgatggactagaaatccattggggtctccccgcgcaggttcgaatcctgccgactacggcagtgggtttttgcatcttcaagcaggtttcatccgaccgatcgatatttcacgtgtaaaaaggctttc

SEQ ID NO: 332703 - DNA, 134 bp, Homo sapiens
  chr6:26328309-26328443
  hyper
cgcggtaatcccaaaacgtttttttctataggtataacgcctgtcttcgttcgtcagagggccagtggcgcaatggataacgcgtctgactacggatcagaagattccaggttcgactcctggctggctcgttc

SEQ ID NO: 332704 - DNA, 124 bp, Homo sapiens
  chr6:26330521-26330645
  hyper
cgctccctagcagaggatggtttcgatccatcgacctctgggttatgggcccagcacgcttccgctgcgccactctgctacgcgagtcacaggtcccagagttaatagtcaccttttttctagc

SEQ ID NO: 332705 - DNA, 893 bp, Homo sapiens
  chr6:26331633-26332526
  hyper
cgccatacagttatctgagccagcgagctaaaaactgttgaccccgacgtgatttgaacacgcaaccttctgatctggagtcagacgcgctaccgttgcgccacgaggtctccgggacacctacgttttatttacctgtcaatctgattcatgaaaataatttcggtactggtgaagaccaggcagctattaacagatacaaaatagtgcctagctgcttccctctcggtaaaattgctgtccgcccaatcactgattttctctgcctctgaattgcttcattttcacctgttcttgtttatatttcattccgtttcttacctagttttccctgtatattccaaatatagacgtcttgggagtttcgttgtttttatctttatagaaatacattctgttgaaggtcagtcgctttggaatggggttgtagagaggaggtagcgaagagggaataatgaggatccttcctctcccaactcctcattaaggaactctgatcaaggtgagttttaaattcgtttccaaagttcactgcaggtcacaaccagtgtttccgttaacgaattcacgcgggggctggcaggttgtttgtgctgcatcttttctgagagataacggcgcctccctgtagcctccgttctcagctgatgagagagttgatttcacaccccgataattcttcaaaatcagatcgctggacctgaaactgaccctaaaaagaacaagaaatcctgtcatcaggagtaagtgggttattctggcactgtgctttgtttggctggttaaagaacctgccttgggtaaccagagatcggagttttctaaagtcagcggggtttgtctggggaccccgaatttacatacagacgatctccgcaaatagtgcaggggcc

SEQ ID NO: 332706 - DNA, 429 bp, Homo sapiens
  chr6:26501790-26502219
  hyper
cgtctgatcccgctcgtttttcggcagctccctttgacgtgattggacccccggagcccatcctggccgttgtgggtgaggacgccgagctgccctgtcgcctgtctccgaacgcgagcgccgagcacttggagctacgctggttccgaaagaaggtttcgccggccgtgctggtgcatagggacgggcgcgagcaggaagccgagcagatgcccgagtaccgcgggcgggcgacgctggtccaggacggcatcgccaaggggcgcgtggccttgaggatccgtggcgtcagagtctctgacgacggggagtacacgtgctttttcagggaggatggaagctacgaagaagccctggtgcatctgaaggtggctggtgagtagacgggttttgactttctccgacgactcccctgctgtatacactttc

SEQ ID NO: 332707 - DNA, 276 bp, Homo sapiens
  chr6:26522013-26522289
  hyper
cggccccgggtcggcgggtgagctagggggcgccccgggacaggccgcgccctctgccctgcagataccggaggcctctgctgtggctgcccactggctgggcccaggccttgaagcggtggcgaacgtctcttccctaccctacctcggtgactgatggcggcggcggcctctcccagtccggaccctgccggccgtcgggtctcccggcccaagcctgccgggcctggacgaaacccccgccgagcagcctggacgcagcgcctttgggtggcg

SEQ ID NO: 332708 - DNA, 333 bp, Homo sapiens
  chr6:26550782-26551115
  hyper
cgtactctggatacccgagggcgcggccccagcgccgcgacgccccgcccctctggctgctccgctctgggatgcacttccgacgccctctaggcttgggagttccgcgcctctcggtgtcgcctggggggcgtgctccggttggcgcactgattcccagttgggtaggggaggcttgactgagctcccacccggaatttcaccttagacctttaaagaccttgctccggcctcccgcgccagcgctaacacctagtcctctttagtggagttccggcggaaggggatggcgggcacccgacggtggtctcctcccagatggcgaatttccgc

SEQ ID NO: 332709 - DNA, 64 bp, Homo sapiens
  chr6:26555496-26555560
  hyper
cggctcgttggtctaggggtatgattctcgcttagggtgcgagaggtcccgggttcaaatcccg

SEQ ID NO: 332710 - DNA, 631 bp, Homo sapiens
  chr6:26577245-26577876
  hyper
aaacccagaaacttccaggacgcacattattttggggattctagagaacgcagaactacgtgtctaaaaaggacagcgttccgtgtccttcgatagctcagttggtagagcggaggactgtaggctcattaagcaaggtatccttaggtcgctggttcgaatccggctcggaggacggtagttttgacctaccaagctaataattccagacaatacggtctttacaaaaaataaggatccaggcaaaaaaaatgtattagatagctctttatgctcaaacatgcacaagtaaaccatttttggttacatgagtaaaaaattttaggaataaactagaaatgtggtagcttcaccgaagggcacctgcgtagatgaaaagcagcgtttccaggaagtctgaggcttcactttttccttgtgaaatttgtacctcgcaacactcttcacctccactccctccctgagtctcctgctggctggctcttggtttctcgatgccattcttatttccggctactgatcgtcaaatgcagtttttattcccacttcccctctccatccccgacccgagctgacgttcgaccagcaaaccacagccaacgcccgcaacacagttcagttaagaaggcgc

SEQ ID NO: 332711 - DNA, 370 bp, Homo sapiens
  chr6:26987782-26988152
  hyper
aaccagcgcagcagcgggacgctagcccgcccacacggcggccacttgaaggtcctccagggaacacctgaggcagtgggagcgtctgccctttcctaagtctccttggaaagaagtattcgctttcgtttccgcaaacaaagcatgctccgcgctttcaggaccggtggctcccgtggagaccgcagcggaacccagtccgccttcgcacgcgtccgggggagaagcggccccaggactaagggcgcgcgcccgaggaaccggtgctgtgacgaccagagcaaacacgccggatgttcctgtgtaggctgtgtaaggagtgaccggaagtagaaactgggtgctccagtggcgcaatcggttagcgcgc

SEQ ID NO: 332712 - DNA, 395 bp, Homo sapiens
  chr6:27059547-27059942
  hyper
cgcttcgggtgtgagaggtcccgggttcaaatcccggacgagcccacttcattttcgcccaataaggtttaaggatatttaaagtatttccccaaatagtcatacccaaaaatatgtactttcaccacatcaacagtagaattgtctaagcaggcgagtactgaatccggacttcttctaagggcagacaccggaatgttgatgcggctgcagctgcgctctcccacctctgtctgtctcttctcaaaccccgaaaggaagaccgtgggcagctcgtgcgcgcgtgcgtgtgcgtgtttaaccgagtgctggaggggaaacgtgagttgcagtcaaccggttatcttcctcttataggaaggaggattttaatttacacttttaactccagcttc

SEQ ID NO: 332713 - DNA, 598 bp, Homo sapiens
  chr6:27064607-27065205
  hyper
cgtgggcttctgaagagaaaccgactccggtgtgaacggttttgggaacctcggtctcctgctggctcccaggtgcgctatccgacgcagcgagacgcggtgagcctacagaagggctgaccaggctcacctgacgccccaggtcgacagcaaaccccgtgcgccccgttggcccggtcacgcccgcagcctgctcaggcgcctcctgcctcgggaccaggaagcggaagaaagggagagaccggcccggcaattacgtttctatcatgtcttgaacatttgtgtgagtcccacgaaagctaagcccgtttattccccctcgaagcgtttccactcagttcttgatcattcatgtgaaaacgagccatctccacgtctcccaaacgtcttcaaaccgtttcctaagtcttgtaaggccgcctgtgggttcctattacaaactctgaaataaaatactcgggaaacgtgggttatcaagacgaggtggccgagtggttaaggcgatggactgctaatccattgtgctctgcacgcgtgggttcgaatcccaccctcgtcgggggaggtcttttaatacgaagaggaggaaacaacaccc

SEQ ID NO: 332714 - DNA, 259 bp, Homo sapiens
  chr6:27094883-27095142
  hyper
cgaaatcataaaacgaaacaaagttttggctacattagcctatccgttattgccataagatggcgacagcccttctcaactcataaaactaaacaaagttttagctacattatcccatccattatcgccacaagatggcgatagcgcttctcaactcgcctgcgggacggaggcagggtgcggcccggagaactcctccctgttccaacagcagctctccagcccgcagcgcttcctgacgttccgttagttcagtctc

SEQ ID NO: 332715 - DNA, 315 bp, Homo sapiens
  chr6:27099585-27099900
  hyper
cgctctatccaacgaaaactaattagaaataaatctccttcccgaaagcgataaaatactaaagaatgagaaactgacagtttactgagtttgtaaggaaggccaaataaaggcggggtttggattcctttggcgcacccaagccgaccgtggacttcctggatacaacaaccaatcaggatgcagaggaagggcgggcgttgcccgggcaaattcaaactgacaaccgctgcaacttggcactgttccaaatcactaaccgacgggggaccgacgagtattttaattggtttctaacgtattttaattggtttc

SEQ ID NO: 332716 - DNA, 988 bp, Homo sapiens
  chr6:27100305-27101293
  hyper
gcgatgcgctcgaaaatgtcgttcacaaacgaattcatgatgcccatggccttggacgaaatgccggtgtcagggtggacctgcttcagaaccttgtacacatagatggaatagctctccttgcggctgcgcttgcgcttcttgccgtctttcttctgcgccttagtcaccgccttcttggagccctttttcggggcgggagcagacttcgctggctctggcatagcactgtgtagctataaagcgccaacgaaaaggaaaaacagcgtgagcagggtatgacaaggcgcttttatatagaatcgcttatgcaaataaggtgaagagttgaagtcttgtgtctgattggtagttattcagggtaacgtcagaggtcaggtctgcccaatcaggattcgcaaatccagaagacgcactactattggttgaaattaaactgcagccctaaccaacaacacgtcttctttttcgcgcccaatagtgtttataaaaagcgccgcctttcccgttcactttgtggttgctcgtagtgagttgcgctcgctatgtctggacgtggcaagcagggaggcaaagcccgcgctaaggccaagactcgctcttctagggccggtctccagttccccgtgggccgagtgcaccgcctgctccgcaaaggcaactatgccgagcgggtcggggccggcgcgccggtgtatctggcagcggtgctggagtacctgaccgccgagatcctggaactggcgggcaacgcggcccgcgacaacaagaagacccgcatcatcccgcgtcatctccaactggccatccgcaacgacgaggagctcaacaagctgctgggcaaagtcaccatcgcacagggcggtgtcctgcccaacattcaggccgtgctactgcccaaaaagactgagagccaccacaaggcgaagggcaagtaactatctgtactagtttgtggcagctcaagtaaaatcgagtccaaaccaac

SEQ ID NO: 332717 - DNA, 224 bp, Homo sapiens
  chr6:27125333-27125557
  hyper
cgagcgccgccggacatttcctgacggctcaggtgggcaggctgagtgcgcgagcgcctcactggcttctcataggtacctgggtcaggacgaagccacatagttcctcgtgatgagaaactcacttctggcacctgtcgagatgccagattccatgccaagcccccgaagattctgactagtttggcaaaaaatgggatctggcaggtccacttcaaagcagc

SEQ ID NO: 332718 - DNA, 217 bp, Homo sapiens
  chr6:27125812-27126029
  hyper
cgaaagactgcaccattctttagatgacaaaaacagacgtttctgggaaataagcaaaggaagagccccacaagcagcggcctctggtggcgtgccgtgatcgtatagtggttagtactctgcgttgtggccgcagcaacctcggttcgaatccgagtcacggcagtaccttgatgtcgcctcaatttctcaacgtactgagcagtaccttgacgtc

SEQ ID NO: 332719 - DNA, 456 bp, Homo sapiens; identical to SEQ ID NO: 231930
  chr6:27173595-27174051
  hyper

SEQ ID NO: 332720 - DNA, 330 bp, Homo sapiens; identical to SEQ ID NO: 231932
  chr6:27205802-27206132
  hyper

SEQ ID NO: 332721 - DNA, 836 bp, Homo sapiens
  chr6:27218591-27219427
  hyper
cgactcctccgggtgggctggggggagggaactcggactccagggccccagtctcagataataggaataccctcccaccacgcccctaccttcctcccgcgcccaaagaattttgcacaagctgtcctcacaagagcccgagattacacagcgagtaagtgacacagaggcagaaagatatgcgattccaacccctcagcccgcaggctgacggcgtctcctcccttagttcccccatctcattttcgcgtcggtcgcctcctccgccccggtgcgggccgtgctggatttctccgagtataatgacgtaaggatggcgggcagcaggtgcgggacggggaggggtcccagcgggcggagtcccttgacacttccggataccttcctctgcggtccgcccacaggtggtatcccgaagcctaatgagcaccgcgatcggcgggtccctggaggtaggaggtggggcctagtccgagggggactgggagggaaaagaggcctcggatgccagggaagaggaggccagagaagggcgaaacctgcaacgtggcggggtctaaggaaggtcggagctcgggggaatacgcaggttttggaagaaggcgggagctgacgaagaggaggggcaccaggaaaagaggcgctccccagagagggcggggtttgggcagggacaatcctatccggaggtgaggctcaaggtggggcggggccacaatggaggacggggcctgcagggaagacccgagaaggagggctgcgaggcaggggattgggggcgggggcctgggggcgggggcctgggccaagagctaggtctgcaccctctgagtccc

SEQ ID NO: 332722 - DNA, 190 bp, Homo sapiens
  chr6:27228187-27228377
  hyper
cgggcgagcgtctccaagagtgaaaaggaatccgcaccccgcgcgagggagccgggtcctgtgaactctgcggtggcttcgtggttgcttccctgatccattcgctgcagtctcagagttggagcagcttggcgtttactcccgggcctttcccggatgggagaaggaacctgcgcgggaacttgaattt

SEQ ID NO: 332723 - DNA, 187 bp, Homo sapiens
  chr6:27242893-27243080
  hyper
cgacgatttgcatcgttaattatccgtagcccttcgctggctgaaaaccgacgagtttctgcagaactgccataaaaaactactggggaaaatacgtggccagtacggggatcgaacccgcgaccttggcgttattagcaccacgctctaaccaactgagctaaccagccgacgctgggtgcagctc

SEQ ID NO: 332724 - DNA, 549 bp, Homo sapiens
  chr6:27255952-27256501
  hyper
cgccgcggttgcggccgcgaccctgttcttaccaccagcaattcctccagggacttggtcagcagcccaacttgatctgcgtctctctgctaaggtgtttccgcaacagggtcaactccaagtctcacctttctaggaatcccgggcgcagcgcgggggtcgggactccgacctgtatttccaggcggaggtttccctgggtcaggcggccactctctgccagagattgtcagttatccaactgtcaatagagccgccgctccagcgagtttaatttaggcacagaaaagtcctgcctgggttgaggtgggcttaggatgagtttacttgagtgtgtgatttagaaatagatctatgggacagacagacacgaaatcgggcattggggccctcgcaggcagggtatctagactggcagctgccggtgcaggatattgccaaggactcggcatccggctcagctcaaggtggggacgaagacgtcctggttgcaaggaggagccctactccccccggaatcagaactgtgcatagcgggctctggatttg

SEQ ID NO: 332725 - DNA, 371 bp, Homo sapiens
  chr6:27300812-27301183
  hyper
cgcttccgctgcgccactctgctaagcggtttctgaagaccactgatcttaatttcaatcatcaaaatcacctttcagtaccgacaaaattttcattgtctaattatttcattttgtatctgatcgtttacactgtccctatctctgccaagcaagtcgaagattcgctacccgataatcagatggcctcaggtcataacctccagatctgtgcttttccaacctgccaaagatcgtctgagcctcttagcaagcactcgtttatcatagcgagcctaggaggagggcgccaagcaaaacactaggtgtagtcttctcgagtagaatccaggcagtcgtggagcgaacgcagctgccaccggagaggaatc

SEQ ID NO: 332726 - DNA, 762 bp, Homo sapiens
  chr6:27356293-27357055
  hyper
cgctatttaaaactctgtgaaccaccggtctaggctatactttgcagtgtattaaggtggtcttcggcacctctcgcagacccccttcctcttgcctctagcgccaacctctcagcctctcgcataccaggggaggggctttgcaaaaccttccacgaaagtgaatcccagcacagccctgctgtagctggctctcaggcgcaagcgcagagctgcgaccgctgctgatacgttgctcagtctcagtgtggtctctgttttgcaactggtcgtccgcgtcaggagacttaggtccaggcgactgcccagacaatgactggtcccgcataccgagcagagcatgatcagcagcagtctgagtggaagagtgcctgtgatcttagggaacctgatgggcgttggagcagcggttcgacgcatgggtttctctttaatccttccgacttccccaagcccagcgcactcaggttccgctccaagtgcgggacccgcccggggtgtgtcgggggtactcggccggaggcggccggtgagtgaggcttacagggccccgggaccaaggtgggtgctcttagaggttctggaaagcggaaacacgggttcttcgaaggaaacgggcgaaagggtcgcgtgtggtttggctgcaggtcgggtcaggaggcacctccacggttgggacgccgcgtggcgtggggtcatgaagcccccagcgctcgtctcactggcgggccagcctagtccctctgcggcagtgacagccag

SEQ ID NO: 332727 - DNA, 277 bp, Homo sapiens; identical to SEQ ID NO: 231949
  chr6:27463097-27463374
  hyper

SEQ ID NO: 332728 - DNA, 41 bp, Homo sapiens
  chr6:27463632-27463673
  hyper
cattggggtctccccgcgcaggttcgaatcctgccgactac

SEQ ID NO: 332729 - DNA, 766 bp, Homo sapiens
  chr6:27470822-27471588
  hyper
cgtggccgagtggttaaggcgatggactagaaatccattggggtctccccgcgcaggttcgaatcctgccgactacgagttcgaggttttagataattaacaacagaaaatttagaagaaagaaatttaagccaactcacgtgttgcgaactgaatttgtttggtacttccccgatcctgaaaccccacaacaatggagggtggaagttactgaatacctactattttcataagattatgggtaccttaattagcagatacctagtcattttcccgttagcggtacctttgtacggttcttggggacgcctctcgtttccctgccttccaaaccctcctgaagcctatacctgttacaagtcttgatagtgctttcctcttcatggaaatttagtcctagtcagaggtccaagtctttggtcaattatcagtttctgtggaatcaatggttcaactgctttggtcacccggtctcgctggttgcaaatgactagaaacactgtcagagatctcgacaccaccacaatcgaaagaccaggctgtcctgacagaccccgtcgttttggcttaggcggcagattaaagtgtaaattcgccaagtataatcaatttagtagaatacaaacttacagacttaaaaaagtgggcaagaatacttaagtttattagaggtagtcaaaactcgctgacgcagagttcttcctcgttagtatagtggtgagtatccccgcctgtcacgcgggagaccggggttcgattccccgac

SEQ ID NO: 332730 - DNA, 35 bp, Homo sapiens; identical to SEQ ID NO: 231953
  chr6:27512539-27512574
  hyper

SEQ ID NO: 332731 - DNA, 728 bp, Homo sapiens; identical to SEQ ID NO: 231954
  chr6:27512834-27513562
  hyper

SEQ ID NO: 332732 - DNA, 124 bp, Homo sapiens
  chr6:27559870-27559994
  hyper
cgaagaaaatcgggctcagaatagagtgggaccccttcggtagtgaataatcccgcagctcattattgcgaacagcagcccttagagatcgtagctggctggtaaaggcggctttagagcggac

SEQ ID NO: 332733 - DNA, 365 bp, Homo sapiens
  chr6:27560506-27560871
  hyper
cggtcactgtaggtcttcagtcattcatgagaggtgttaaagcacctctaacaagtgcaagatgcagtgttttggaggaaaaaaacaggcacctagcagaggatggtttcgatccatcgacctctgggttatgggcccagcacgcttccgctgcgccactctgctgtccccttcagctgttgtgccttatctccaagtaacttaaacatctcctaacaccgctgtccagctgcgtcaatatttttttcttccttatccatttatcttctctagtctctgtctttcatcctcgagttgtctcacgtttccttctcaacatagtcacctacaacttgttgtttgctcctttgcaacttaagaaaacc

SEQ ID NO: 332734 - DNA, 668 bp, Homo sapiens
  chr6:27598659-27599327
  hyper
cgaaagacagcccagagatgctggactgcgaatgcaggcgcgctgcaggcgaggctgggagggccgccaggagcgctgcgggtatcgggagacacgcagagggaggggcaggcggcgggctccgcttcttcgcgtcctggctctgaaagcaaccacaggccagcggggcggtgctaggtgaagctacgaagaagccaaatagctcgcgtcttctacaaaaaccgtgttcttgctagaacgttggcaaggagaagccggagtctctcctttttctcctcggcttttctcgggctttctgaaaagagcacctgcatattcccaggaaattttggctcctgatggcatgggggaggatcacattcatcttccaggagagatggagatatcttgatcaaattgtgttttatgcaagaggcgaggggctgcgaagggaggatctcgggcagctcagcgcgctgccgctccggcgcgaggccggggtcgagcgcttcagtagctcatggctctgtagagtgcgcatggccaagcaaaggaaagcatgctccagtggcgcaatcggttagcgcgcggtacttatacaacagtatatgtgcgggtgatgccgaggttgtgagttcgagcctcacctggagcatgttttcttccaattgcgatttcagacatttcac

SEQ ID NO: 332735 - DNA, 82 bp, Homo sapiens; identical to SEQ ID NO: 231962
  chr6:27635352-27635434
  hyper

SEQ ID NO: 332736 - DNA, 257 bp, Homo sapiens
  chr6:27635798-27636055
  hyper
cgccgattacatcagtgcttatgtttgtgacttcagagacactgagaaggcgcggctctttccctcaaccccattcgccttcctttcggcggcgttgtcttgaaccaacctgaaaataataagtccttaagttacaagtcactaaagggaagtttgcaacttgcgatccagtacactgacatgactctaaaaagagaaggctgccgactctgggcgtactgcctttgaattagccatactccgcaaggagcagtgcc

SEQ ID NO: 332737 - DNA, 304 bp, Homo sapiens
  chr6:27636317-27636621
  hyper
cgaatttatatatggtttcctttaaaacagcagcgcattcgtgtggccggttagctcagtcggctagagcgtggtgctaataacgccaaggtcgcgggttcgatccccgtacgggccactggatgccatagtggggcccttcacttacctgaagggaggccttttaatttaagcctgtcgaatcacaggtgctccgaatcgaatcccaggtgctctgaatccgaaattaagacgccctcttattcgtcaagcgagaaggctatttacgttcgtttccctttattgtgaaaaatgaaaagaacag

SEQ ID NO: 332738 - DNA, 355 bp, Homo sapiens
  chr6:27640044-27640399
  hyper
gggattgcagaagtgagccaccgcgcccggccttcaaatgtacatatttcttgatgtacatttccacaagtgtgcgcgcgctgtaaaagccacagcgatagcactcacaactttctatcctagtgaactaatgaaagctaactgatgaaagtagcaaattggaaatctaaccagaaaatggcgacgctgtgagcaggatttgaacctgcgcggggaacccccattggatttcgagtccaacaccttaaccactcggccatcacagctccgaggacactttttgtttcagaggaagtcgtgttaggctctttgactctctcgctttttaatgttcccacggcaggttaatgcttcc

SEQ ID NO: 332739 - DNA, 322 bp, Homo sapiens; identical to SEQ ID NO: 231966
  chr6:27647779-27648101
  hyper

SEQ ID NO: 332740 - DNA, 1073 bp, Homo sapiens
  chr6:27655169-27656242
  hyper
cgaatccgggcctcgcctcctcctcccttttcagatcataggatttctctcccccgcaaataatggcccttacttcgtaaacacgctggctccgtaatccctattattgttttgggggtttggttctgtccagggaggaggtgagggcagatgctcaagagaggctgtccccaccgtccttttgtctcagcgaaccgcagtccgcgcccgagcgccactagctgtcctgggacgggaactgcagcggcaagtgtgtgactttcttgagcccggagccacaggcctgggaagcgccgctgagacttcagggtcgtagtgacagaggaaccacccgaggctaggcggggagagggtgcagtttccggatcccgaaggcttcgagaagagccgacctgtctggaagggtctccaagaacagagaggactctgcaaccatcactcgggagccgcgtcctttcatccttgagacagctccgtggtccaacggttccccgatccgctggccgagatctcaagcttggatgcaacttcggattcgccccaggcaggaggaaggaagccccgattggaaacgttgacttgaatcttctcggatcagaattagcaggttaagaaaaactgtttccccgtaagaagcagggttctttggtgttcaatgtggagctccgccactcccagcccgggtgaaggaaaactgggaaacagaatgaatgtgattatctattcgaagataaatttccacaaagcatgccgtttgatagtagcttataatgtggaagtaaggcatcctgtcatccggccggttagctcagttggttagagcgtggtgctaataacgccaaggtcgcgggttcgatccccgtactggccaagtattctctgtggcttttatcaccagaatggatagtaacccagacatcgatctaaacgtgtacctgtgtgtttctccaggcttaactttgccccgagaaaacggatctgtgaatttggtgcgccctcgcttactcgacagcggttaatttgaacggggacgtttctttccgctgcctccaaggcatacccacatcctaccc

SEQ ID NO: 332741 - DNA, 562 bp, Homo sapiens
  chr6:27661699-27662261
  hyper
cgtgtgtttagaagggaaggtgaggagagtcaaaggcacatggagcattaacagttggaataaacgacagagacacggaaacctccgaggtttccagagcggacccggaaatgacgccaggggatgcaaacccttctgcccctttttgctacccctgaagcttactgttagtggtcgagtttttctggaagtgggcttccgcgatcgcggggaccaacgccctgagctcttgtgcccaaaggggatcgccaggttttttgatgcggatcgaaagggactggccccggagcctacaacctgacgcaggtgggacttggggaaatgtcgagaaacctaggtctgggacttgagttggcttccagggcacacattcttgttcagaagaaacacattgcaaaaatcgggaggtgacgggcagatgaagtgtcggcgcttcgcctcgggactccagtgcaacctatggggcttttggaaatgaggaagtcgatgactctgcagggactcctctgacccaggagcagatggcgctcgtctgggcactccccaggagaaaaggtgcatc

SEQ ID NO: 332742 - DNA, 503 bp, Homo sapiens
  chr6:27774851-27775354
  hyper
tgggtaaagggggcgccaccgcaagttgctgtgcaacatccagacatcaccagacccaccacctggagcctggcctggcggtgtcaaacgcattctggtctcatctttttagaaacccgtggatgctcaaggaatttccggataacgtgatcccggatgcgcttgactgacttacacggaacgagcaaagcgcaaagcagtccctgctaaggacttagtttatgccctcaagcgcaaaggtcggaccctctatggtgttggtagctatatgcacgtacctcatgtacatttcaccttaaatggctttcaaagagctagattaatttagtggatagatcaaaatgatttatgacccctcgccccccagtgataggaagagcgaaccagctcttctttagataatagtgagtggctctgaaaagagcctttgggttggacaagagcttgagaatttacttggagctggtgtacttggtgacggccttggtgccctccgacaccgc

SEQ ID NO: 332743 - DNA, 441 bp, Homo sapiens
  chr6:27775598-27776039
  hyper
ttcttgccatccttcttctgggccttggtcaccgccttcttggagcccttcttcggggcgggagcagacttggccagctcgggcataatgaaacaatagtggcaaaaccaaaacaagaagtcggtctcctctttttatataatagtttatgcggccgaggtagtgggaaggtctctgctgattggtaattatccgtggatgacgacagatgccagttttgcccaatcaaaataggtatcctgcataatcgagtcctattggtctaaataaaaataaaacgtaagccaatcgcacagcttccttttcgcgcccagtagaggctataaaatgtacgtttttctagtttcacttcagtctttcttgaccgtatagataataggccttttgccatgtctgggcgtggcaagcagggaggcaaagctcgcgccaaggccaagaccc

SEQ ID NO: 332744 - DNA, 910 bp, Homo sapiens
  chr6:27777648-27778558
  hyper
cgaaaatagaaaataaaatatggagaccatgaactgctaagtctgtcagaggaataggtgaacaacaaaaatttgagtccttcgccaatccggttactgttgggtaggccttcagcatacttttgtccaatcagcttcagactctcactataaataagcggctagctttctctttctcctgaagtgaatctagctctgaaggcatggcgcgtacgaagcagactgctcgcaagtccaccggcggcaaggctccgcgcaagcagctggccaccaaggcggctcggaagagcgctccggccaccggcggtgtcaagaagccccatcgctatcggcctggtacagtggctctccgcgagattcgccgctaccagaagtccaccgagctgctgatcagaaagctgccttttcagcgtctggtgcgtgagatcgcgcaggacttcaagaccgacttgcgcttccagagctccgcggtgatggcgctgcaagaggcatgcgaggcctacctggtggggctctttgaggacaccaacctgtgcgccatccacgccaagcgggtgactatcatgcccaaggacatccagctcgcacgtcgtatccgcggcgagagggcttgagtctcaaggactcactgattacatacccaaaggctcttttcagagccacccacatgcgcgctgaaaagatctgtttctctcaggaattcttcctggtacttgttttgcctgtagtagatagggcccatttccagacgttatacaatctgtttcgtaagactcagcctatccctttttgaatgctaattttgggagtcttaacatctaataatgtccggcatttttccgtaagcattgagtgtagccaaaagttccttcgtgtattgctctcccatctccgcagcccggttttgacc

SEQ ID NO: 332745 - DNA, 282 bp, Homo sapiens
  chr6:27782431-27782713
  hyper
gcctacgggaaactgaagcccggcccgagaagagcgggtcttggccttggcgcgagctttgcctccctgcttaccacgcccagacatggcaaaaggtctattacctttacggtcaagaaagactgaaatgaaattggaaaaacgtacattttatagcctctactgggcgcgaaaaggaagctgtgcgattggcttacgttttatttttatttagaccaataggactcgagtatgcaggatacctattttgattgggcaaaactggcatctgacgtcatccac

SEQ ID NO: 332746 - DNA, 436 bp, Homo sapiens
  chr6:27798620-27799056
  hyper
aaactagcctgggaaacacacggagacccggtctttggaaaaataattagccttgcgtggtggtgggcgcgaggttccggctaatcgggaggctacagtgagccatgatgacactgcactacagtctgcgcgacggcccatgtcagtaagctctggagcacctgaaacaagttgtgttgggtattttatttactggagagcgattagtgactgatgcctacttacagcgactagagacgcatgctccgatagcagcacaaactcagcaggcgcgaacaaatggtaaagagaaactgggcaaacaagcatcacggctcctcagctgagaaagtgggggccctaaaaagggccttttgttgatagaaagggacgctcaaccaccgaaaccgtagagggtgcggccctggcgcttgagcgcgtagaccacatccatggc

SEQ ID NO: 332747 - DNA, 697 bp, Homo sapiens
  chr6:27805774-27806471
  hyper
cggcctggatattgggcaggacaccaccctgggcgatggtcactttaccaagcagcttgttgagctcctcgtcgttgcggatggccagctgcaagtggcgcgggatgatgcgggtcttcttgttgtcgcgggccgcgttgccagccagttccaggatctcggcggttaggtactccaacaccgccgccaggtacaccggcgctccggcaccgacccgctcagcgtagttgcccttgcggagcagtcggtgcactcggcccactgggaactgaagacccgcccttgaagaacgggtcttagccttggcgcgagctttgccgccctgcttgccacgtcccgacatgacgtaaaaaattcaatcagtaacgttcctgagactgacgtaacgctaaagctccgctacttatagtcaacagaggcacgaaaactaagctgtgctattggctaacattacagtttcgctttaaccaatgggattgcggttttgaaaaacacttattttgattggacaaagttaatatacgtttccaggactcaccactggttaaacgcacaacttcattctctaccccacttgcgttaagaagcagtgaataagcggtaggttgacagagctaccgtcttcctgtttttttcctccaattttccggcagttactcccagtcatgcccgagccctcaaagtccgctcctgcccc

SEQ ID NO: 332748 - DNA, 433 bp, Homo sapiens
  chr6:27832931-27833364
  hyper
cgattctagatgacgtcatatacacgtttgtccaatccaaagaagcatgtttcataacagcgattccattggttgaaataaaactgtaatttgagccaatggcacagctttattttcgcgcccagtattgactataagtagtggagctctggtgaacttctctcggctgttctcagttcctccatttatcgtttcttcgtcatgtcgggacgcggcaagcagggaggcaaagctcgcgccaaagccaagacccgctcttctcgtgccggtctccagttccccgtgggccgagtgcaccgactgctccgcaagggcaactatgctgagcgggtcggggccggcgcgccggtgtacctggcggcggtgctggagtacctgactgccgagatcctggagctggcgggcaacgccgcccgcgacaacaagaagaccc

SEQ ID NO: 332749 - DNA, 294 bp, Homo sapiens
  chr6:27834106-27834400
  hyper
cggtcatatcaaattggcatgtaatagagaccccatcttgaaacttgctactatattgtcttgtgcgttgatagcatattatattaatgccgaacacattagtgacgccgaagtagctggtgcctaaatggcttaaacgcggaaaaaccacatacagatgatggaacaaaaactggccaatcagattatagagcgggctttttaaaatataagaagcttctttgtagctaggcgtctgacaaaaagcttgacaccaacttaacaaaaaccaacggctggaattcatactctaat

SEQ ID NO: 332750 - DNA, 789 bp, Homo sapiens
  chr6:27834671-27835460
  hyper
ttttgctgctttgggcttagcggctttgggctttgccgccttcggcttaactgccttgggcttggcaggactcttggttgcctttttcggtttggcagcggccttggccttcttagggctcttcgccacctttttgacgccagccgccgcgggcttcttcgccttcttcggagtcttcttcactgcctttttcgcccctgcagccttcttggccttcttaggcgtggcccccgcgggcttcttagctttagcggcgcctgccttcttggctttgggcttggcttccccggaggccgccttcttgttgagtttaaaggagccagaagcaccagtgcccttggtctgcaccagggtgcccttgctcaccaagctcttgaggcccagcttaatgcggctgttattcttctccacgtcgtagccaccggccgctaaggccttcttaagggctgccaaagaaaggccattgcgctccttagaagcagccacagccttggtgatcagctctgagactgggggccccgtcgctttgcgcttagcagcgccggcgccggcagccttcttagttgccttcttcttagccggggatttctccaccggcgctggggtggctgtctcggcaggagcggtttccgacatggtggcaagaaactgctagaagagaataagctcgaaatctaaagagcaggttttgcgttgctgctatgctcgggccccgggcttatataagccggcgctgccctgtgattggtggagcgtccaatccaccgccctctggccgccgccgctcgc

SEQ ID NO: 332751 - DNA, 1667 bp, Homo sapiens
  chr6:27839729-27841396
  hyper
gcataatagtgacgcgtttggcgtgaatggcgcacaggttggtatcctcaaatagccccaccaggtaggcctcgcaagcctcctgcagcgccatcaccgccgagctctggaagcgcagatcggtcttaaagtcctgtgcgatctcccgtaccaagcgctgaaaaggtagcttccggattagcagctcggtcgacttctggtagcggcggatctcgcgcagggccacggtgccggggcggtagcggtggggcttcttgacgccaccggtggccggagcgctcttgcgagccgccttggtggccagctgcttgcgcggcgctttgccgccggtggacttgcgagctgtttgctttgttcgtgccatggctaagtagacgtacctactcaacacaaatgagagaaaaaaactgatcatcccggtatttatagctgccctcgcgttctgattggacagtagactgtgccatgccacgtctcacacacggaattggctcccagtttaatctgctagtgaaagggagacattccgcctctgttttgggtcaagaaacgtaaaatggttttgctagctaaagaaaaacaaaaacggaaacaaaaaaaaatcccccaaaagtctaggatttttcatgcatcaaaatcctgtttaaatataagcttgataaatctaaacttgccttgcactattttaattacgaggtgtcattactgatttgacaaaaagttaaagaacgtaaaggaaaagtgaaactagagtaaatttgtaaatggaggcattgaaggggatatgaaattcgagcgttgtggtatgccagtatttctcaaatttaaacgtacttaatgttttagaagttggccgactttttctgtaaagggcgatattaaaacattttgggcgttgcggaccacagtgtcatagttacacagccctcgcattggtagcggtaaagtaatcgatacaagataaatgagaccggctgtttcattatgacttttgcaaaaaccagagaggcgttatagatttggccgtgtatcagagaagccggcacttttaaccactaagtaatgctgaaaggggcaccgaacctcaaacttcagcgactgcttatgtggaatcgctaatttgccaaaactgccatacgtttaagtgttcttaagaaattaactatctttagtctacagctctttcacagacttcatgggtggccctgagaagggcctttgaggaaccgtgtaagtaagtaaaacactcagccgccaaagccatacagggtgcggccctggcgcttgagcgcgtaaaccacgtccatggctgtgactgtcttgcgtttggcgtgctccgtgtaggtaactgcatcgcggattacattctccaaaaacactttaagaactccgcgtgtctcctcgtatataaggcctgagatgcgcttaacgcctccacgccgtgccaggcgtcggatggcgggcttggtgatgccctgaatgttgtcgcgcagaactttgcggtggcgcttagcgcctcctttgcccagacccttcccgcctttgccgcgcccagacatgtcttgtactaaacaaaatgcaacacggcaagcctcgcagcagtactttatatagtaataaatcggacctgattgggaactctccacaccagctgcatccggtcggcc

SEQ ID NO: 332752 - DNA, 499 bp, Homo sapiens; identical to SEQ ID NO: 231988
  chr6:27858289-27858788
  hyper

SEQ ID NO: 332753 - DNA, 986 bp, Homo sapiens; identical to SEQ ID NO: 231991
  chr6:28175218-28176204
  hyper

SEQ ID NO: 332754 - DNA, 599 bp, Homo sapiens
  chr6:28249105-28249704
  hyper
cgaagacagacatttaccactgtgttggttttcaatcgaaatgatgtacataaatttggggcgtgcttgcaccgtccgaatgggcctggggtccggcggcggagagtgacctgggcggggcaggaggtggcagcgggggtcctcccggctcaccagagagacgagcggccgtgctcctagagaggcagggaacccgccagactccgccactccgctgcgggcgcggcgcagggagaagcttttgtacccgcccagctgctggaggcgccggcagcgcccgccagacccgccagcccagcggcccgggctctggggaaaccggcgctcccgacaggggagcaccgggcctctgagctccctcgggagcctttcacgaggtcagctacgtctttgttgtgcgcgttcctgaacttttggtccattaaccaacaattagacacgccggtattcagtgcctggcgcggtgctagatgctgggtgtaatctcagaaaaatacattcaggggcgcgcctgagggtgctggctgctggcatctcaggtgctttacgtgcattcgtgaagaagcccatcagtatttcttgaataccaggtacgtgcc

SEQ ID NO: 332755 - DNA, 1190 bp, Homo sapiens
  chr6:28303261-28304451
  hyper
cggcaggcgctctactttcctttattaggactataagcccagcttctgtgaatcatcacctcagcccctgattggtccggggccaaactttcacttcggcttctgataggtcctgggccaagctaagcagcagctatgaatcatcatttcagctcctgattggtcccggaccaagctgagtcaagcgttcgccaggacagcccgcagactaagcgcattccctctcctttccagtccataaaaaccccagaacgggccccataatgggtactcccggtcgggaccccttctctgctggcagagagctttttcctttcgcttattaaactttcgctctaacctcacctttgtgtctgcgctcctttatcgtcttggaggcaggacaaagaactccgggcgttatctcagacaaagaaaggctgtttaatcttcaggataaggggcgggacctccacctactccacgggggcttcaggccagtgaatgtgtaggggcgggggtcacgcctgcgcagacgttccctccccgcctactccaaggcacagacctgaaatcttctgggaacctggcgggtcgcgacaaggggccaagactcaccttcggggcaccggcaagctacggaacaggtggcggggctgcagcaccccaatgaccgatcaaccgcaaaggccggaaatgcgtcagccgttctgagcccactggctgaagccaggcaactctttcctttctaggaattccagaggtggctgctgcttggtgactcccttattgcaaaccccggggccaaaaatcccagtcccactgggtgcgaggcggagaaatccggcgaggcatttctatggggagcggcccccagcatttaggagttagatggtcatcgagacccaaaacattagagccggaaggtgttaggaagatataaacgtagagagcgagtaacaggaggcaattccacggccaaacaggtttatttacaggaaaagcctgcgaagagttccagttaggaatctggctgagatcctgatcgcttacaagctgaggcttttataataaagtttctgttggggaggggttggggaagtgctggctagttggaactgtttggacactttccaactggggacagatgtggttagggccgttaggctctgttgcggttagagctgttatgctctgttgaagctatggac

SEQ ID NO: 332756 - DNA, 702 bp, Homo sapiens; identical to SEQ ID NO: 231997
  chr6:28367113-28367815
  hyper

SEQ ID NO: 332757 - DNA, 468 bp, Homo sapiens; identical to SEQ ID NO: 231998
  chr6:28410971-28411439
  hyper

SEQ ID NO: 332758 - DNA, 338 bp, Homo sapiens
  chr6:28414768-28415106
  hyper
cgggatggaggcgcgtcgctttctgtggctggcgctggatccaccctgggtctccagccacggctgcagagagggtagcgcggtttcttaggccagagtggagtgggacaggaggtgcccagagacgactgtggtggcttgagacatggaagcgctgcagcctttgagcccagtatccagcattgcagccgccgcggcggtctaagagctcaaaccctttcaggcgcgcgcaggaggaggagcggcgggggcggcggaacaagacgaccctcacttaacgtggccgctgtcgccgtgggcatgctgggggcgtcctacgctgccgttcccctttatcg

SEQ ID NO: 332759 - DNA, 1357 bp, Homo sapiens
  chr6:28456978-28458335
  hyper
cgaatacacggggaaacgtattcggcagtctacagtgtcaaaggatttttctattaatccaagaaagagcattacagaaagctatacaatacgtgaagacgattaaaaggaatatatctatacataattttaaaaaacctttgaatcttgaaagtcactcacttagggtacgtgaagctgccaaatttatcagagaaggaacaggcatctctcgcatggagccgtgggcctcggcgttaaggcactcttcagctacaggtggcagcccgtttagctcttcttaaggtcttgtgatgtcattttcaagaggccagtaaagttctgtgtcacgtggggcctctcaggaggggtgcggaggtgggggaggggcggggagcaggactccactgctttggcctcaaggagtttggtcgacacttgaagactgaccaagaaaaagtaatttgtcccagttttctcccaccctttgttttcttctgctcctcttgggcttgttttttttttgggggggggggttctttcttttttcttttcttttttttttttttttcccgcagtaagttctgaaaatcgcctcccagaggagataacgcgttctcctctgtaacccgtccttccacgtcccggtggtgggggggggggtcccggttctcattctttcggggacctgcaaggagccccgcccgcaggctttgaaccgatttcggctccgcgtccaggagcaggccctacgtagggccgggggaattcaggtgcgtctgcggggcccagggcacccagggcaggcggggactgagacgactgagggttgagggacaaggaggttgggactggggaggggagacccgggacccgcccagaacgctttcgtggggttggagagggcaggacacagcctctctgggcccggtagtatgcgaagacacgcataacgcaaaaggattcccgtcctggactttgggaattaaggccctgaacacattgagcaaaaagtagatctgtctgtacagacgtttctttccacgtctttcatagtaaggactttattaaaaagcaggcactcgaatcctaggtgggtagatgggaggctggggctggggatggggacgtcctctgttttctggttgtgcacattaaaaataactctctgctgcctactcctaaacgcagccggcaaaaatgagacgtcaactaagcgccgtttcagtcccagagccaggtcgtccatgggggttttcaagcgttttctcgatgactgatttttctagaagcgaatggattttattctcccaggtgtaaaggctacctcctgcttcacacccgggtaacataaaagacagcgctgggaccgaaactc

SEQ ID NO: 332760 - DNA, 248 bp, Homo sapiens
  chr6:33538968-33539216
  hyper
cgttggggggcggtgcaggccaaaactttttgggctgccccacccatgcctttccggttagcgttgcagctccttagacgagtaggctaaccacagcccacccgcctttcttccagcgatgcaacgatctgttcgccgctcaatgccgcatgctgttcaaagcccagaggctggagtgggtgcgccccaaaggccccgcccaaggaagggcacgcttgcgtgctcgcggcggcggccatcttggactc

SEQ ID NO: 332761 - DNA, 1376 bp, Homo sapiens
  chr6:34111735-34113111
  hyper
cgctctgagagacacgtggcttcgggcacccagctaggcaagcccagctcagtcggtgtccggaaaggccgcgttctcccgcgccaggggccggcaatggtgcggagaggggagaaagaagcaaggcgcctcctccgacagggactgaaagtctgagggcgggatgtcactcaaggcctaggggcagggggcgctcgtacgttcgggcctcaggactccctgccgccgccgatgctgctgccccatctcagcacaaacagcctcagaccgccctggtgcgggggcgcctctcgcagtcgaggcctccacctcccggccccgcccccgcgcggggaggagacgcctcccacctgcgagcgccggggaagaccgaccccggagcggggacccccagcacacacgcgcgtacacacatgcacacacagagaccactgccggtccgctcgcccggcggccgcgtagacgcgcaggttcatcacggtcccggggagggacggtcccgagtgtccggagagagcctgaccctgaagtcctggggctgcagggagaccccagaccctagagacccccacaacctgccgaggccacgggcaagcggttgccgggctccggccgctggcgaaggcggcgctggggcgggcacgggagctggacgcggtgcctgggaaaggagccgaggcgcgcgaggctgggtgccctcccgccgggagactgccgggaagaggtgcaaataatgccccgcgcccccgcctgtcccgcctctccgcagaccgggatgcgctaatgccgccgcccccacctgaaagctggcacgaccctccatccggtggaagcccctgtatacagagacagtactttccaccgggcccgcaaaaaagcctctgccccattccctccctcaggggcacccggaaagcctgccttagccccgaggggagaccctctagttcagatcccgcgccctccggcccctagggctccgggggcgccagctctcctcggagcactccaagcgcgggagctcgccggaggccacctccccgagccccgatgtccccgccgcagccctcgccccaggaggccggagggcacggtcccctctgtcggtccccctcgggccacaactcaccgcgcgccagcaaggtttaagccgcggcgaggggtcggctgcgtgccggcctgccccgggggcgcaggcagtcgacggccggaggcacggttctcgcggtgcccagagcccgggccgcggcgggcagcgctgacgctgcggacccagcgcgccgcggagccgcccggagtccgggacgcagcagggatgagctggcggccgcccggccggagccgccgccaagcgcgcggcgttcggctgctgctcc

SEQ ID NO: 332762 - DNA, 558 bp, Homo sapiens; identical to SEQ ID NO: 232009
  chr6:34433450-34434008
  hyper

SEQ ID NO: 332763 - DNA, 829 bp, Homo sapiens; identical to SEQ ID NO: 232011
  chr6:35181395-35182224
  hyper

SEQ ID NO: 332764 - DNA, 1248 bp, Homo sapiens
  chr6:35655519-35656767
  hyper
cggcggccaaacgctgaacacactgtcctgaaccacactgaagggtatctacaattctgcatctccgcttacaacttgaaacttactacgctttcgccaccactgcagaacccgattttagagactacgatggtcctgccggttcgttaatcgaagaaagccactctgcaccctgacgctcgtagtgtctttttggtaatactggtttttgactcttatactgtgaccggtgcacctttttggacgaccaataaggcggaagacgttttcacgtcccagaacagaagagcataaggagccctggcacagcgttcagccgcttcggtatggcctgggagtgacgcggatcacctgttagacggcgctgcgcggactcctccacaagcggccgacagcggcgatgcggttccccaacgcttgtcccgaggcggcaggtgaaggcggggaccgcccgtccacacccggagcgcggccaccccgccaccatccccttcacagccccgccaggtgggcgaatccgccccgcgcccgcggcgtcccggcgctcggctcgccctggggtccggttgtcccggcgcccggacccgaaagcgaagtttggctcccgcccgcagcggtgccggctgagggtccggccgcctgtccggggagagccgggggccagagaccggaggcggagcgggacctgtcatcccgggcgggaaacaaaagcccagtgaggacgggcgggcgcgacccgcctcgcctctgccgggagaggccggcgggggcggagagcggcgcccgcggtcactagtctccgcgcctcccgcggggagcaccggccccgcggcccctggggcgcggcgaggggcgccgcagtggggccgaggcctcccgcgcgctcccctcgaggcttccggaccccgctcccccgcgacacgcggctcctgggctgcgaagccgcgtgggggtgggagctgaggcagcgagtgcgaccgcggcgggacctggaaggagggcgttcggctcccggggcgccgcggccggccgccccatctccgtggccatggcgccggtacctgtcgccgcgggggctcgccgactccgtcactctccgccttgcccgtgctccgctaacccttcagcccgcccagcaggccgcccgcgcgccggacaccgccgcccgagactggcagcgcccgcgagccggcccgaatccccggggcagcgcccggcgccgtcccgccccagccggccgcaggaccc

SEQ ID NO: 332765 - DNA, 456 bp, Homo sapiens
  chr6:35744187-35744643
  hyper
cgtatggaggctcccagggcccctacagtctggaatcccgcccgtgcgagcctgagcgcctttcctccctccttcccttccgcaggcgtcctcgccctccacgtccctcctccgccggggtggcctggggcgccgggtcacgtggccggggaagaggttttatcccgcggcccctcggaaccccgccgctgctctgccgcccaggcccatggccgcagccctggcgctcgtggcgggggtcctgtcgggggcggtgctgcccctctggagcgcgcttccgcaatataaaaaggtgagccggggagcgcgcccagccggccgcgaccgcaggagagggtggccccgccgccggggcactggagcccgaaggcgccgggcagcctgaaagggagaggtgggtccggaaccacacccaggcgggtagcctggggcatcctcagacggacttcaaaagcc

SEQ ID NO: 332766 - DNA, 537 bp, Homo sapiens
  chr6:36098070-36098607
  hyper
cggggtcccgctgggcagccccgaccccgtgcctgggccgcacctgccgcagtggctccgtcgggccgggcggaagcgcgggagcgcagggctggacaggcccgggcgtggcggccccggcgcacctgggcgagccggcaggtgggagcgtagcagcccggggcccccgccctcgcgcgggggaggagcgggcggcgcggggcgggcgcagcgggggtcggggcgctgggagcccgttgggccgcgaacgcagccgccacgctggggccgccgagatcgggtgcccgggatgagcctcatccggaaaaagggcttctacaagcaggacgtcaacaagacagcctgggagctgcccaagacctacgtgtccccgacgcacgtcggcagcggggcctatggctccgtgtggtgagacccctgggccgctggggggcggggggcgggcgccaggctctcccctttccgcccagcccgccctgggctggcccctcgccagcgccaccttgaccgcggacctcaaggcccagcgccctcccc

SEQ ID NO: 332767 - DNA, 183 bp, Homo sapiens; identical to SEQ ID NO: 232021
  chr6:36252988-36253171
  hyper

SEQ ID NO: 332768 - DNA, 1014 bp, Homo sapiens
  chr6:36354750-36355764
  hyper
cgccagccacggagctgctgaggatcagactcctgggtttcagcatggaggccagggaagggtctgataatgggtatgggtcctggcgagaggggagtggagaaaggccttggagtgggacggggcgccagctctgggggcagtctcgaggcacctagaaaaccggcgagtggggagaggctgctaaagaggggctccctgcgagaatgcgttcaccagctgtgaggacctggctggcgcacgaacttccaaagacctcacatctggttggtgtaggggcgaccagtggtaagggggctgcggaaagggcccgcaggggctgtgcgtgatgccttcagagctgtgtatgacaccgagagagtcaggggcggtgacccgcgtctggaggtggaaggggaagtgagtgagggatggatgtgaggtttaggaatgtgttggaaagagagattcccgccaggtaaaaggtctgataaaataggtttggaaatctaggtggtgaggaaaggatgcgggagcaggtggctctgcgtgcgcgctgcgtgttcagccgccaggctcttacctgcattacaggtggaggtgaggaagccaccggctttctgtcttgagcgctcccctggctgtggctgctggggccctaggcccgcgccccgcagtcctcctccgccaaacccctaacctggctccgagaactggaaggtcgcgtgggaggaaatctctttcgagaagcgccaaggcgtgtgcgcccgggtcctccgcaggcgggcaggcgcgcgaggcgctccggtaatcgctatccttccgggaaacgaaaacgaaagagcgggatgcggttccacttgcgccgctgcgggctaggagcagggcagggcagggcaggggccggccccgtgggagcgcagcaccggggcgctgcccgctcgctagcctgggaggcgtgggtcctgcacacagcctccagccggcggacagtccctctggcgacctggccttggctcccactggggcagagcc

SEQ ID NO: 332769 - DNA, 534 bp, Homo sapiens
  chr6:36807979-36808513
  hyper
cgcgcgcatcttcatttgcgcccgccccctctcaccacccctatctcccatcaggggtctccatcctgggggagggggagggttatgggaaccaacgggcgcctttttgagaaaggtctatgcagggttgagagggggcataagtgggagggaggtgtgcaaaaaagatcccctcccaggggcttgggtgtggagggtctctgctgagtgtgcgccctactcgggggcgggtctcagttcagaaacagaccctacatctccttctggggaggtgtgtgggggcgaccccagtgccaggagggactacctcggtttcccagtggcccaggtggggtcggtgcatgggcgcctcccccatccgtggttcccgccagccgcggcctcgccaagtcggctgccgaaaccacgcgccagcgcccttccactcccccgcccgtcgtgaccacacgactgagccagcctccaggtctagaagctcctgccacccagtctggtggcaaccagactgggagatcggcccgagctccctgggct

SEQ ID NO: 332770 - DNA, 1671 bp, Homo sapiens
  chr6:37664032-37665703
  hyper
agaagaagcgaagccgcagcaacagcggggaaggcgagcccgccgcccggccttggtgctgacagccggctcgcccgcaagccgcgcggcaactccggctcatgcatcgcttggcttccactccggaggccgagccaggacgaggtttcggtgcaagtcgctgcaccagtcctagactgggtctgtccgggtctcccgagccgaccgggtgctctcaagggttcctaatcattcccacctctagcagggtgtgggaaagtgggtgcctcctcctgacatcccggcttcccaccagaccctacgaccggcccctgtgttccgaagcagctagctcggtctccacgcgccctggagagggcggggacgcgggcatccactccagagtccgagtcgaggtctccaccaaaccccggcagcgcgcactttgcgcctcttgcaaagtttccgcgcgaggttaagccaaggtggagcgggacgcgggctcttaccgtagactccttgtccccggcagtggaaggggatcagcgccagaagtagaaggcaggtcacctccatcttcacggccggtgcttcatccccgcgaggcggcgcagcccgagaggcggcggggggcgcattcgccggggccccgcgacgcccctatgtccccccctttccctgagaggtgagagagagagcggcgacgaagaccaggagactgaagaggcggaggtggcggcgacccgtgtttctcctccggcggggccgctgcccgcgtggggacgcagggggcgctggcccagccccgggtgcctcggcgcgcccggcacagcagccagcgccccgacccgaggagcccggccgccgagccgccccgggtacccagggccgtccgcgcgggatgctaggcgccggggacctctcggcggcggaggcggcgcttcgatccaacaggccacggacgactgacaaacttgtcgtttccccgcactggggccgcccctcagcggagcggagtcggggaggccggggctccgctcgagttaatcaatctgctgtttccagtcctgcggccgctgccgtgggctcagcggcccgactccagggggccgggctgaaagcactcgcggcggcgaagcagccccgggcccggccctcctgatccggggagcagcgcgggctgggttcggccgagggacgagcgccgcgggtccccgggtccgtgaagttagccgagccgccgataaacccgggggaagaatagcagcccggcgccccgcgggaatctggagagcaattccaggcaagaagggccccagaaaacggggaaaggaggaaagtttgagtcttttgaaaaatattcgcgctctcgcccaggccggggctgcggcgcgggcgccgctcgccgcctccgctcgccgcgctcctctcccgccgtctggccgcggccgtagccctcccgggctccgagctctcgggagagcggggctacgccgcgccccaagttggtcgtccccgcccccgcccggcggccttggcctgcgggggcccagagcgggcggggccgggccgggctccggggcgcggcggccgctcggctccgggccgcgggagcgctccgctcgctcagcaacttgggctttgctgtgctgctttttcgcccctccgagcttttcattccgcgctcctccc

SEQ ID NO: 332771 - DNA, 609 bp, Homo sapiens
  chr6:37666475-37667084
  hyper
cgcgcgagacgggccgcggctgtgggtctgcaaggctgtctgcccggctcgagaggcccccgcccctttccaggcgtctggtgctggggccgggccggagcagctggcggagaggtcgcgctgagagctcctgcccttgccgcggcccacaggttgccaacaggtttgctcgcacgacccctccgccagagcttccctaagtcaccccacattttcctcggctagccactcttcccatcttgcctcccctcgggacctcaggcgcccccaagcgccccgggggcacacctccttccggctgccgaacccgagccccgctccagcggcgggagtccggcactcgggtctcagccgcctcgaaggggccctcgcggagcaggagtgcggagaacgctcctcccaaacgcccgcggggaggggcgtaggctggcaagcgaggctggtggcctcccccgcgcctccgatcccgccccgcgcccaacccgggtcctgctaatctcacctgctccacctgtcgccgttatttatctcagcgtgtgcgcaagaattgttttaggtcggcccgtgggagcgcagacaatcgcagcagctaacaagcggggagactac

SEQ ID NO: 332772 - DNA, 404 bp, Homo sapiens; identical to SEQ ID NO: 232041
  chr6:37673050-37673454
  hyper

SEQ ID NO: 332773 - DNA, 658 bp, Homo sapiens
  chr6:39196879-39197537
  hyper
tccaccatggctcccgagcggccgcctcctagagaaagcctctcctagccccagctgctaccagtccgcccgccctccagcctctgaaaacagctgtttgaatttggagctccgcatgcgcagtgcccggtactcaccccccgcaagcaccgctccccggacagagttgcttggccaagttggcccacggagtgcggggagctgcgtggggccccactcacgcggcccggggtgggcgaacaccagcggggctgaaagggcgccctggaccgcggatgcgtaaggagcgggaagaacacaggacttgactctgggcagacacgtgggccgcttctccacgcgtcgctcctccgcgcgccactagcagtatgcgccgcgcccgcctccgcacgcctctttaaccagcgcccggcgcgctctgcccccttgctccgggctccgaccggggaggagcccaggcgggccccgccccttccccgcacaagcagcccggcgagcgcaggagtgagcgcgaggtgagcgctagaagaggcttggcgctccccgcgctcccagggtcagccgccaggggaggctgcgccgcccgcccagacctgcacgccctgcggtgcccgaggggttgcggtctcagggactcgtgtttgttattaggactggc

SEQ ID NO: 332774 - DNA, 754 bp, Homo sapiens
  chr6:39281374-39282128
  hyper
cgcaaacgtgcgcccgggttccccctctggaagcggccaggtgtggcgtttagctctttgccacgggtgcgggtgcgaccaacccccaagcaggctcaaacgcgccctttcccgggtcaggccgggcggggccggttacgcgcgcgccccctgccgtagtcgtcctcgcccccaaatttggatgtgtccccaggcatctgcctcctcaccgggccagcatgccctctcgcccccaagtaggactcagcccggcttctcgcagtcctctcgctagggcgagggtcttttcctccgaggtcccccaaccctctggtccccgcgcaggaacgcccacccccgttgtgcccgcgtctgcgttcccgacgtttccctgaacaggaaacacctgaccagggcctgaataggccccctcgccctcggcccgtacaccccgcggcccgctaccccatcccgccgcgcccaggccgacgccgctcgcccctgacccggatcagcgagtccagcgccgggcggtccagacacgtgaagttctgcaacagctcccacttgtcgcgctggaagctgcggctggagtcctgcgccgcgcggccctccagcgtccagaacacgccggtgcccagcgccaggtaagccaggtaggcgagcagcaggagcacggtgctgggcaccgcgcagccccggaccctgccctcgggagccgcccgggctcgcggtcggtacatagcgggagaggcggggagccggcgccgggagc

SEQ ID NO: 332775 - DNA, 180 bp, Homo sapiens; identical to SEQ ID NO: 232050
  chr6:39759927-39760107
  hyper

SEQ ID NO: 332776 - DNA, 454 bp, Homo sapiens
  chr6:39901937-39902391
  hyper
tcaagcagataggccgggagctactgggggaaaagggcagtgtgccggggccactcctgccccgggaagctgtggacgcaggcggggtgggctcacctccgaggcagctcgcgcggactccccggggcagggctgggtcaccggagcccctgagctgcagctccgggcgctggacctcagaagccgccgcagcatccgggacagtggccgcgccgccatgaagcctgatacgagcggaaccgcagcccgcttcgggagcacactggccgggcactcgcccccggggtcatcccagcaagggcggggaggggcagggggagggcgggacccgcgcagccaataggcgaggacgcagtcccgcgtggccttgtgggagctgtagtacgctccctgtgcccactttcctgggccggggtagcgctctagggcagaagggtaaactcaggtaaggaac

SEQ ID NO: 332777 - DNA, 851 bp, Homo sapiens
  chr6:40554364-40555215
  hyper
cggttccatccacccgtggctccccgtctctccatccggctctccagtctcacatggacccggctctccccgctccccgccagagtttcacccccactgtaggaaataaagactaaagaaaggaaaggaaatctctcgcgataaggatgggcgaaaagagaagggggtgtccgcatgagcacctaggatgcggggagtcttcaagagaaaaagaaagggatgcaaagttcccggttccctcgggtgcgttcagccccgcgccgagctcccgcggacacccgggatcgcaaagacgcagcgccggcgaccactcacctgggcgaggcagcatctacccccggctgggtggcaccgaggccggctccgcggggcgcccgggctccccggctcggccacgcatccttccccgcccgagacagactcgagctaaaccctccggcggctccggcgaatgcaggcagatggtggcctcggacgtccacgcggggaaagccctgagccgcttattcagttatatccatggcatttagcaagaagaaggggggaaaagcacaacttgttctcttctcttccagattaaagaaaaataataataataatccctccctaggaggatgccggtaggattttccggatcgaagaaccccaggcattcccaggaacctcgggcatcttggaatgtggggtgtcttcaagttcagacgagcctgccgggttgtgtatgtgtgagtgtatgtgtgtctcagcgagagggagccaggcactcacacccacacgcacacacaaacacactcccccgtactccccgcatgcacactgccccccacgcgcgcgcgcatacgcgcgtaccc

SEQ ID NO: 332778 - DNA, 129 bp, Homo sapiens
  chr6:41337039-41337168
  hyper
cggggagccagggagtggaaacgccggaggtcctcaggctggggatcccggagtcctcgctcagattccgattccggagaaggccaattccgggaccctatccatgtcccattccgggcaccttcctca

SEQ ID NO: 332779 - DNA, 1317 bp, Homo sapiens
  chr6:41339070-41340387
  hyper
ggacagcctcctctatgcactgcttcctcttccccagccctgctccctgcatccttccctctggtcctagtgtcctggtgtcttgaagatgctgggtagttagaccgacatccctctccctctctcaccctgggctctgggacgctggccctgcttccccagagagcgatcgccccggacttgtgcctgtgttccggcctagggcagccggaacctcccgatatccccagaggagtctcaggacagcgcacagggaagtactggcttggagctgcgtgttccttgggcggccggcggagggcgaagagcaggaagagcccgggggacgacggtagcagagtgttggggaggccacagacgcggactgcgtggagaaagcacgcacccgggccgcagtagccgggcagggggacggcggaaagcagccctctctggaacattttattctgatccccgcaggactcccccgcgagccccggcttgagcagtcgtgtaacaagtgtgcgattgcgcgtgcgactggtgtgtgcgcgtgggcacttacacgttcccggggaggctgggggcaggagcttcactgttcacacaaagagcgcttagaggaggaacatttaagtttgggggcaaagaaagaaaaaagagttaaaggtttaggagatgggggaggaggatggggcttaaggacgcggtgttgccgcggctcagccatcggggcgggaagctcggggagggagagcgcctgggcccgcttctcgcctattctacgcagaacttttctctcctccttcttccctcgctctgcctctctcggggcggtctccggggactgtctctcacatccattctcctctcctccttgatttatgctgcagagtggaacgaccttccctgacctcattttcatgtcggcgcgagcacacccggagccggctacgcacattccggaggaggcgcgcgctgacacgcacacacacacacacacacactcgagacactgcagggccctgcccatcctcgagttcacaccagccccgccactattatgggcactgccggggctgtggacgctcaaagaatagatcctcattagcatcttgctttgaatatcatttgcattttattcatttcatgtcaaaacgctcagaactctccccagcccgcaccttccccagagcttgggagtcatgggtttccagctcaagccccttctctgtgggccccacgcttgctggctacccccaccccacctaccctgcgccacagcccccacaaaatgaattgacgtctcctaagcacttggcaagttccatctcctgc

SEQ ID NO: 332780 - DNA, 252 bp, Homo sapiens
  chr6:41340935-41341187
  hyper
cgccccagcccccgcgccggagctgcgggtggcagggtcgggccgcggtaacccgagccgccgcgccggctccccgcgcgctgccctccgcctgccccttcgcccctgaccccgcagtcggcgcgctgggcctgcgcccgccatccccagcgccccccaccgggccgggacctccgccagcggtcctcggcgcccttcctgccccctccccccagcggtctcggccccatcccgaaccgccaccctgggatc

SEQ ID NO: 332781 - DNA, 457 bp, Homo sapiens
  chr6:41472031-41472488
  hyper
cgcataggaaaggagggtgctgccgaggtggctgcctgggggcgggccctacaggggtcatttggggcatcccctgcctctaggcaaatccccacggagccccatcccgcaccctcccgcagtgtccagggcgaacccctgtccccaagcccaggcttaggagtgaaatctcgacggctcaggttccttctctacgcagtcccccagccagactaggaatggatcaccgcgcgggtgggctcagttcccggcttcgcccgggtctaggaagaatgataaaaagtgagaatgtaaagggaggaggtactataaaacaaaaggggttagacacccatcaggcagctgcgacccggtggtaaacatgagcgtctcctgtgctcccaccgcctgcgttcttcccggccgcgtccacgttggtttccttctcgttgtcttggtctctcctgattctgttctc

SEQ ID NO: 332782 - DNA, 913 bp, Homo sapiens
  chr6:41605681-41606594
  hyper
cgctgtgggcgggtggcctgggagcccagatccctgtccctggcttaggaccccgggaggagaccgagggggtgggtaaaacgtgactgagaaacttgatcgcgcccatctttggggcaaagagatttggaggccgcaattattcagacagttccacgaagtggttgaggtttctctctttctcctgattttccagaaacttttgcagagtttggacaggcaaaggaaaacgtgcagcccgcggatctccgggcctcagagagcagggagtcggggagactgaggccccgctccgagagcgcggaggaagcgcgcccagccggcttcctgtgggggctcgggcctcgggcgccccgcggacagacgtgtccggctcctggctgggccaagcccggcgcgggggaggggacccgcagaggggcgactgagaaggcgaggagggggcggggagagggtgggccagggaagaggggaggggagaggcgagtaggggaggagcgaggggggctggagggagagaaggaagaaggaaggggcgaacggcgtgagctggcgccgaaatgggagaaagcagcgagtgagaggggaaggggcgccaggcgagcacccgggagccagcgggacctgggcaggggcgcccggagcaggcgcgcatggcgggccccgcgcggggatccggctggaagagagcgtagcacggctcgcacgagtgagtggacgtgggaggcgcgcatctgcgggggaatcgccccttgcccgcctccggcgccgcccgctgagccctgttttccgcaggtccggggccgatgtaccaggtgagcggccagcgcccctctggctgcgacgcgccctatggagcccccagcgcagccccgggcccaggtaggaccgggagtggcgagcgaagctggac

SEQ ID NO: 332783 - DNA, 693 bp, Homo sapiens
  chr6:42109904-42110597
  hyper
cggcggctgctctcggccagtccgcaggttccaacgtgtccctcccctccgcgcctccaggagacagcaccgccggccctgccccagcgccctccgtccccgccccagcgccctccgtccccggagtactcaccgaagcccccggtcccctcctccggggcctcctgggtgaagatccagggcggattggtggcgtagagggaggtgctgggggtcgtggtgtgcttcttcccgaagagtttgctgaaggtgccctgcaccgtctgcttctttttcatgctgccgcagcccgcgcgggcgccagggaaggaccttccctccctcgccctgccctgccccggactgaactcagcacggtttccccaggggactctaccaggccatgtcccccgccgtcctccccgcccgcgcaccgggcaacaggtgctgcgggcgccgccgcttgccgggaaatgcgagctacctggccaggtaaaaggcagccgcttggccgggccccgccccgccgccgcccagctccccaggccgcattccttcccgcctccttctacaacaggccattgttggcacggcccggtgggctggggacctcgcccggcccacgcccagcctgggagacgggccaccccctcccccaggttcctccctgcacgcctccttcaccccacttccccctagtccgggaaaggaggc

SEQ ID NO: 332784 - DNA, 147 bp, Homo sapiens
  chr6:42145871-42146018
  hyper
cgctgcatctccgagggtccgggtctcccctcagcgtctcttggggcttgccgagatgggcggagccttgggttatgatgggcggggcctgaggctggagtgagcggggcccggatgggctcacggcggccgcgcccctcgcccagg

SEQ ID NO: 332785 - DNA, 270 bp, Homo sapiens
  chr6:42928260-42928530
  hyper
gagggtcctctcccgccgtgggattgcacagagggctgggtccgcaggctggctaaaaggacctagcccaggattgcgaggcagcgccctccctgcagctggacagactcgggcgcccggcccaaagcccggcaggggcgtgtccgcgcgctcacctgctattggccaggtggggctgtcggctgccagcagtgcttatgctttaagtgcggagcgggtggctgcggagccaggcgcggcgcaggatggtggacagcgtgtaccggaccc

SEQ ID NO: 332786 - DNA, 155 bp, Homo sapiens
  chr6:42947097-42947252
  hyper
cgctgcggttgcgtagcgtttacccatgcgccatttgaacttgtgcttaagggatttatctttgccttctacggaagtaatgttctcttaactatttttccccgtggcatgaacgtaacagtttattgactgataaatgaacagtcagcatgctc

SEQ ID NO: 332787 - DNA, 157 bp, Homo sapiens
  chr6:43242826-43242983
  hyper
tccctccgtagctgcgcgcacttcgcccactctccggaccctgcactagcggccccggccgggagggcacgaggactgcgcagccggacccccgcaggtccccaagccaggggtcccgtccatccgcccgcccccgcggccagcgccacgaatgtac

SEQ ID NO: 332788 - DNA, 1002 bp, Homo sapiens; identical to SEQ ID NO: 232090
  chr6:43243258-43244260
  hyper

SEQ ID NO: 332789 - DNA, 272 bp, Homo sapiens; identical to SEQ ID NO: 232100
  chr6:43612858-43613130
  hyper

SEQ ID NO: 332790 - DNA, 746 bp, Homo sapiens
  chr6:43969986-43970732
  hyper
cgccttctcccccgccgcccgcgcccacgccctcccccgcggggccgtggcagtgccaccaagggcctctttaagcccctttgaagccgcggagccccgcgccgcaggaggccccgccgctatgccagctatgccagctatgtccctgctgccgccggccgccaccgctcccccattaatgctggctaatctggctaataaataaactcccctcccagccccagccccgcgccgactcctccccgcccccgcagaatcgatgtcagggctcgactagagcaagcgcccgcactccaccccactccctcgagatgtagctgacgttttttcttatggctgccctaggtctgtagcccgtcggggattctcggggagacgtgggatttgggaggtctccgcctagccactgcgtttgccttcctcttttccagtccacctgcgcaccaggggcaggacacgtggctgggtgcagacgctggcccggatgtcgcggaggactcgcgggccggtagagcgcgcggcggcggcggcggcggcggcggcgggaggagacgcaggtcacgcccccttcccaccacctcccgccgccgacggggcgcgcgcgccgaggagcccgggacaggtgactcctagaggactgcgtctgcgcctcccccggcgggagtcccttcttcgcggcctctgccgccccctgcgtcccctcctgggcttccgagagtctgactcagccaagccggcatcgcttc

SEQ ID NO: 332791 - DNA, 346 bp, Homo sapiens
  chr6:44044201-44044547
  hyper
cggggcctgaaggctaacttctggccttcctgcttcgggaaatcattccaataaccgggaaaaaagggggcccgaggacagagcccctgccgggccccagggggagtgtcgtcggctcctttgcgtcgccggccggcggcgtggcggggactctggccggcagcctcccgcgccgtccggagcagctgacccgctggcggtgggccaggtcgcggcggggcctggaggcagcaacgtgcggcgcggcatgtcgcgggcgccgcggcagggaaatgtgggggcgggccggcgcgccccctcccccccgcctacgctggcccattcataaaacctgcaggcgctgccc

SEQ ID NO: 332792 - DNA, 37 bp, Homo sapiens
  chr6:44094355-44094392
  hyper
cgtccgtctcttacggtggcaaagttcatttatcgtc

SEQ ID NO: 332793 - DNA, 569 bp, Homo sapiens
  chr6:44187030-44187599
  hyper
cggggctttctgcctgccacacgccgtccctgctcactaccccatcggtttccttcgggagtcttcaaagccagtgcacgtgctcccaggtctcagggaggcgacccagggggaggggcagagagaagggggtccgagcccttgggcccctaaccccgtccctttccggagcctcgggtgcccaaaggcgccggccgccagtcccaggcccgaagggcccctcccactgagtcggctctggtctccccgcccctgagccgcgaggactggacgcagctggctgcggagctctgggcgggcgctggggtcgcctgttgcagcctctcttccgcccggcggcccacaccggtcaggcccggcgcgggctgcgctctccagctgtggctatggccccagccccgagatgaggagggagagaactaggggcccgcaggcctgggaatttccgtcccccaccaagtccggatgctcactccaaagtctcagcaggtgcgcggggcggggccggggggcctggcggggcggggtggggtgggggcgaggtctgcgccgttctcacgctgccgggc

SEQ ID NO: 332794 - DNA, 1533 bp, Homo sapiens
  chr6:45387325-45388858
  hyper
cgaaagcctggcttcccttcccggatcggccgcctgtgggactcgagagacctgtgcacgcaggggacgcggcggtgcccggggttagagctctcccctgtgaccgaaaagataattaaaaatcgcacgcgcaggagccagctcagctcctggctgcgcttccagttggtccggtctggctaaatgggttctcgcaccctggcggcgcccgggctgggaggccagtaggccgggcgcgaagagtaggttggggaccaggtgtcatagccggtggcgcagaatcgcttctcggagtcaccgagggtggcagtggcaggcggcggctgtggggcgggaggggcgcggcttggggctagtgtctgtggagggatttggggaagaggcaggaacgtggagagaaacgtgggaaagggaaagaccgacgagggaggcgtggagcagtgcatggaggaagggcaggtaaaaataaagccccaattaggaaggacagagtagtatcccctgaactccatccttacccctcgagagcgcacacctggctaccccgcacccccacctctgctcccgcggtctggcagaccctcagtcccccgcgcatctcttcagcggggcgatcccgagtcacgcaaccacagccccccaagctcatcttgtactcgaaagggctccagagtccgcgactggcaccaggcccccatcttccgtgcccctcatgctctcagagcccttccaggccccttctagggcgcagacccgggcgtgggctcagcgagtgggagcaaagctctaaaaccagacagggagggtcgtggcaggtcgctacgagggtgagggaggcgtttgcactgagcaataaaaacacccagtaatgggtatgtgaattgctttaaataagatgggagggcgtgagagatgacccaaccatctttcttccttgatgcttcgagggggaggcattctaattcttcatttattttataaaatcacttgttactgtgtcagctactccactaggaatctttgaaactttggcaactgatgatttttttcgcaaacacgttttcaagctttggaaggctttaaagagtttggtaataagcaagaaacgtagtagtacacaacgccgagggtaaaacggccctgtgcccccttcttggggtgtaatagcctcaagcggatttcccggcttctgcgggcgcagcacattgttttatttgttttgaaggctcagagtttgaggctggtcgtagacacccacgtgctctgactctcatcagcgtaatgatcgacttagccagagtcgtgtctatataaaccacaaaaacctaatcattagaaatcccagcctccaaaaaccacattttaggtaaaaagtgccgctttttttccgcgctccttcatcctctcgaccacaactttttgggggatccaaagtcgctttttaaacccacactaggaaataaatacataaataaacagccacggaagcattttgaattttttagttcgtatttttaatttttccccgtgagc

SEQ ID NO: 332795 - DNA, 997 bp, Homo sapiens
  chr6:45390544-45391541
  hyper
cggttgcggccgccccacgacaaccgcaccatggtggagatcatcgccgaccacccggccgaactcgtccgcaccgacagccccaacttcctgtgctcggtgctgccctcgcactggcgctgcaacaagaccctgcccgtggccttcaaggtaagaggctacaccgccccccgcccccggccgggagcggcggaacctgcccgccggtgtcttcctgcccacggggctgggccccggacgtcctccaagacctcctgccttggcggctctaaccccagaaacccccggccgggcctccctccggatgccctggcgggctcggggctcagtccctccgcgcaaatccctccctctcccacctgtgcccgctgccaccccgacttcagccctagtccccctgacccgttcagcactcctcatgcctcctgcctggccttgattctcactcactccttcgcgccgtctccctttcccccaggatccccaaagtacccactcttgcactgcgagcggacttgctccaccccgcccctttcccgggggcgaggatccccggcattgtcccctggggctcccgcgtccttccgggacatcccggcctggccgcattgcgggctgcccgcgcagcctctctttggggctccgcgcgctctcacccgcttccctcacagccaaacgcctctcctcaggtctcggcgtccccttccccgacccgcagagttcagcggtcctggtccctcccgggctcccgtgccgggattcgtggggtgccggtgccgggcattagtgcccggggctgggcgtggggtgctgactgaggcgcgcgggctgcgctaccagtgcccgggagggtcctggacaaacctagggtctccagaggagggggtgtcagggcgggggcgtttgctctgttcgctgacccgcgccagatcccgttaccgggaggaaggcggggccgctggggcgtccgcaagccccgaagcgggggcgttcaggg

SEQ ID NO: 332796 - DNA, 525 bp, Homo sapiens
  chr6:45631099-45631624
  hyper
gccccgcgtctggtcgactggctccccggttgcccttcgaccatctctcccagcacacgcggggatgacaaggagcggccgccgcccgtcctggcaccggccgagggcccggaaaggagccgcgccccgcgccccagcactgcgggcagggaggagggcaccgtggacgcgggtacatccccgccgccccgagcccggcccgccgctgcggcgagcttggaggcccacgtcggggacatcctggtggagctgcggaccatgaacggccacctggacagcatagcgcgggccctcaccaaactggcttcgtccctggggccccagcctgagcccctgccagatgtttcggatgccaactaatggagctcggcgaggctgggccgccccggggccgagggatcgcttgcaccaggcatccctgcctgtccctccccagcagcgaagcgcgcccagcggaggagcggttgctctgcgcagctgcctagcggaaagcacggccctagcgtttcagcgtgaaacagaccc

SEQ ID NO: 332797 - DNA, 939 bp, Homo sapiens
  chr6:45982741-45983680
  hyper
cgaaagagagaaagagaattttaagaaatgtcattttcgctttgccaaagatcattgtgtcaataacgtttctctcccattcctccccctcctcccgttttaaaggaaaggttcacgggtccagccaggtttctgccgcatcccgacacctggagacgtctttcaggaccagcctgaatcgcgtccgggctgggctctggactcggactcgcagcggtgacagcggaggcggggacgggggtggacaaactgcggatcaactctccgagaagacggccacctgccggaacctgccttcctccattccgcccaggagcctcgcagcggggcgctggcctgcggaaaggccacgggggagcacagggctccgcgccgccctcctgggagggtccggagtccagcgcaccccgagccctggtgggtgagcccggcgggaggcgcggcaggtgcggcgggagactggaccccgacctaccttcacaaagagctcgatctcggggtccctgtcgtccccgttagctgtcgccgagtctgtcatgccgttggcgcccggggctaccgtcccgggccggggaggcgccacctctgcagcacctgggccagcactctgcgctcctgccgctgcccagcggggctcctcttcagggcggtgtttaatttttcacaaaaccatctattctccagcccgagcagcggggtctgagagatcagtgtcccagatgctcacatgaaaaggagcgaagccgggaggaggcggggggccacggggaaagccgggttaagggaatgacaacaggtcgtgggagcaacaagtgccgggctgcccggaggtgtcacaggatccgcgactgtcagcgatcccgccgccgccaacgcgcccaaaatagccggcggctgcagggcggggtcagccgggcggggacgcggcggggacacccc

SEQ ID NO: 332798 - DNA, 965 bp, Homo sapiens
  chr6:46097250-46098215
  hyper
cggtaaaggtgctcgcttatccagtaagacggacagacgtctatggtagatccacgtttcatttatcccaactcactggaactggctgaagcttctccagacttgtgccggaccttggtgcagccaaagttgctttctccgcggccacctaagctgccaggtgcacattaactaagtggcagaaggccatcggcttggcaattgcctgaggcctttccgggactcgctggtttttaggttccatgaagggcatccagatctaggatgatacgaaaagtgcgtggtgggagagtggaatcaacctctactcttaggtccgatacaacccctccaagcacctgtctaaccaatcggaaagaaagttacattcaacgctggttctagcatccaatccaaggacgtgtttcagactctgctgcccggtcccagccagccctgagctggcgccttagacgctcgcctggcagctgcgcacactcggagcgccccgagcggcgcagatagggacgttggggctgtgccccgcggcgcggcgcctgccactgcgcaggcgcctcaggaagagctcggcatcgcccctcttcctccaggtcccccttccccgcaacttcccacgagtgccaggtgccgcgagcgccgagttccgcgcattggaaagaagcgaccgcggcggctggtgagtacgcgcctcgcgcgctcggcgttctggggggcaatgtcaccccctctccagtcccctaggggctttgaaaatagagatggtgagaccagaccctatgacccactctcccccactacacgcacatcccctggggcgcggcggggacgtccacgaagggactcaaagagccagggaggtggcgggccgaggcggaggccaggaagggaagaggaaagaaaaattagcaggtgctggggaaggcaacctgtggtgttaagtgtgaagggagggaagtcagccgaac

SEQ ID NO: 332799 - DNA, 696 bp, Homo sapiens
  chr6:46138267-46138963
  hyper
gggcaccgattaaacggaagagggaaagtgcagaaggagtaggtttgtgtagctcgggtagacgtcaagggcgggggtgtccatcttctccaccaggattccatcctagccacccagaatggtcgcggcgtaggttatgttcccaattcccagtcatcccgcccaccgaggcctgggcttcttagatgtgcagtggcaaggaggggacgttgctttagggacccagaggagcagtgtgggttcccgggagggaagccacccacgcccctggactcaccctcgcagcgatccgttcagtccgtattagtttggagcaacgggagggagggtctggaggagactccctcgggcgcgccgcgggtaacggcgggagggtgactggaggaacgcccccggaacgcgcaggagctcacctgcgctcaactctggagcggagcacctgaccgcgccgcttccccgccccgcctcctggcttctattggctgctgcagagatagtcacttctgcctgggttgcccccgaaagccaggctcccaggagtagctgcacggcctgtcaatcagcgggggcaggggcgggcgctgcctgggtttggagggtggagggggaggggactcccgggggcagggacccatctggtagggcgaaggcgtgggatggccaattgcttggtcacacacaaaaccttccggcaac

SEQ ID NO: 332800 - DNA, 779 bp, Homo sapiens
  chr6:46702682-46703461
  hyper
cgggaaaaggtttggaagaactggtgtctaataccgtcatcctctccctctccccgcaaggatcctagcgctgtttccgagggctgcagggactgtgagcccaggaccggccagcagagcgggtgcgactcagcgagcccaccccggccggtcgccgctccggggtcccgacctccagcgcggcgaccgtgcccttcctcccactcccgcctcgcccccggggcccctcctcactcaggcgcggcgcggagctgctcgcgggaactggggtccctgggcgcgttccaccgcgcaccaacgcgacccaagcgctccaaacccgactgcttctcgccgacagcactgcgagcctccgaccagccgctgtccccctggctgcgggccgagcagctctggcaggcggcgggcgggtgggctgcgcgcgggctgtgtcctgggtccgcctagcgcggccttgtggccccgaccctctcctcccctggtgatgctggaggaggtaccggggaggagcgtgtgtggccccggcctctcactagcagcggcggctcccgacgctagcctgctcgagcgcacccagcaccctccccaagaccatggcccgcacctggacccgcggttaacttagcccgccgcggagagagccaggcaatgcctgggtggtgtcgtgctcaccagctcctttccgcagacctgatgccgatcagatttactccctgctgaattcaccccccagtcaggccggttttccttgtttcaccgtgttctctgaatacactgaa

SEQ ID NO: 332801 - DNA, 99 bp, Homo sapiens
  chr6:47382546-47382645
  hyper
cgcccgaggcatcagaagaatttatgtgaccccaagatcaccttgaaaccatattaccggtttatggtttcctaaaagctttttgtgtgattaggtttc

SEQ ID NO: 332802 - DNA, 1133 bp, Homo sapiens
  chr6:49518143-49519276
  hyper
cgcctcagctccggagaaaaacgaaaggtgggtgggaaactaggatagaggtgaaaagtaagaggggactgaatcagcgaatgacaaagggagcagggctccggacaggggtaggaggaagaagaggagtgactggggcttgtgtcaagcttcttctgaatggctagacagccgccaggtgggagaggcggagggtgaagaggcgggttccgcacgcggttagcctggggctgatctagtcttcagctttcaccggctgggagtccggagctgcagcagaggccacacccagggcttggtggtcccgcgctttccggagctcagcaggcgcttgctgcttgaaccggtcaaagaaggaacgaatgaatgacccttttgccaggatggagacccgggggcctcagggagctgcgaatcccatggactcctcccgcagcctgggggacctcgggccttttccgcgggaggtagggcgcggggctccgctagctccgggcgcccggaatcccgcgacggcaggggcgagccgaagccagggcggcggccacgaggacagaacggcagatcgggccctcggacctcgggccggggaggaattggaccgtgagtcctgggtcagagagaaagtgctctttctcctgcacccagagaggtggttagggactcgaggggaccctgcacgggaagaggtggccggtgcagaggaccttcctcatgcgggtggagaggaccacggcgaggagcccaactacccttctgtctttcaacgacaaaagcgaatttctggcaggcgtgtagccccgccgcgggacgcagcagacccacccaaatacgtgcttgtgcgggtggaggattatcaggtaacacaagaagtgttgcagacctcctgggccaagggtcgcatgaccacgaggactgaggagcacttcgtgaccgcgctcacttttcgcagcagtagagagggacagcctggggaacgctggggccctgctgaatcccgggctctccaggcacgaacaggggcatcccgcgtccacgccgcggggaggagggtttcaccgtctccagggacttggctcgaggaaattaaactctaatgagtagctcgagaaatgttccgggatggtggatga

SEQ ID NO: 332803 - DNA, 450 bp, Homo sapiens
  chr6:50674341-50674791
  hyper
cggctcaattcgtgcaacctcagttaccagggggtcccggggccagcgcggaattcgcggaattcaccaagccgcagctgcctgccgctgaatgcgaagagggcgcaggagactggcaggtacagctggtggtcccttcggcctgatttccctgctgagtgccacagcgtccgagatccacgactggccaggtggagccaccgactctgaagagaaccagaggcggaccagccaggggagagggcaaccctgggagcactgcacccttgtcggtcccctggaaagctagcggtaagatccgggaggctgaatttgaggccgcggtagtccaggcgacttcccctggaaggtgtgacgatgacttgtactgcaaaagaagcctagaccaggcctccgtctgggtgttttcttttaggcgtttggagagggatggagatggtgggtgggggc

SEQ ID NO: 332804 - DNA, 308 bp, Homo sapiens; identical to SEQ ID NO: 232122
  chr6:50681730-50682038
  hyper

SEQ ID NO: 332805 - DNA, 219 bp, Homo sapiens
  chr6:50682266-50682485
  hyper
gggagcaagttgaacgatttgcacagactggattttttaaaatatatggacaatgattttgagcagcccgggccgaacatctcggcatagacaggcgcagaatttcgatgctggggtctagttagagtggcaaggcgccccgggccagcgctcttttcgggtggactcgttcctctgctacccgcggccccggagtcagttgcaaacctggatcccaac

SEQ ID NO: 332806 - DNA, 517 bp, Homo sapiens
  chr6:50690662-50691179
  hyper
acgcgaagagggagcggacccggccatgggcaggcaggagcgctttcctgattgcccgtggctacacaaaatacaaactactttgaatcaaaacattttggaggaattaatatgatctgaactctgcacgttttaagagagtttgagtttgtcagagcgcttagaggtgactggcacgccaaggcaaaggcatttacgccgcggtacaaacattgtcagatctgatttaatttctttaaaaaaaaaattccttgaaatggaaccttagcttcaattgctcagtctgcccataacagagtagaaggacctgatcgcttttccctttagccggcctcaaggccggcagcaggctgcttggcaggaggaagcgatttcctctgcttctctgggtttcaggaaggcccagagccttggaatccgggatggagaaagccgtggattctttcagcagctcctgaaggagtacaattggaggagcgtgggaagccttgctcttcttcctttgtcagtactcttc

SEQ ID NO: 332807 - DNA, 685 bp, Homo sapiens
  chr6:50691924-50692609
  hyper
cgcagaaatgcaaccgcagaacaaacagggacaggaaactcttgtaatcgcttacacatttttaatgtgtcagaaaaaaaagagcgatcactggagatgaagaaggggagaagaaaaatccctgccgtttgtatttctttcatttgaattgtaaacatctgtttggctgtaaggcgaacagatcatttattttgctctcaagatttggtctaattatgtcaacaccgacgctacgacgagtggggcggcgctgtggctttggagaggatgcgcgcaccggcccagcgcccggaagcccgctaggaagtattgatcgcacctggagagcgcgcgggacctctcgccacagctgggtgcgttctgagacgggggaggcgcggaggccgtgagtatggctcagaggcagatttagaggctccagggacccgcggctccttggagacagccgccgctgtttcctctgccccagtagcctgggatgagaagagaaaaagctcacccaggctccggcgcttgtctttcccatccagttgcagcacagacggtggcggggtgtgtgtgtgtgtgtgtcggcggggggacctgtcttgtcctaccccgcagttcacaccctgcaacggggtagttgtttttttaaaaaaaagtggcggggttgggtggcctataatcaggttgccgagcgtgc

SEQ ID NO: 332808 - DNA, 1148 bp, Homo sapiens
  chr6:50787266-50788414
  hyper
tgcttccttgagggtcactgcgtccgaacagaaatcgcagccgcctcctgtgtgggcatctttcacggaaatttctgcccacgttcaatgcgtacgggtctctagcactgaggctagctcaactcttcggggcaggagaagttgcgcccagccaggaggacgccagccgcctccggggcccggaccgcgctcgccaaagcccttttccggctcgggcgagggctgacgcggccagacggctccgctactcgcgggcgaggcggactaggcggacgaggcggccgaggcgggcgaggtgggagaggcgggcgaggtgggagaggcggccgaggcgggcgaggcgcggggcgcgcggcgggccaggctggggaccgggaagcccgcggagcctcgcttttaagcggaatggtctgggacagccccaggtggttgccaggggaagggaggaagggaaggttctgctgagacgtcgaggttggaaataaaaacttcggaaaggcgaagcggatttagaaaaggagggaagtcgaggcgggcgaagcgggccatggagattgctaagaggaaaagttggagagaaaaggaaggaagagaagcagactcccgggtggcgggcgcgggccgctaggtcagacgaaaggtggagggatgcagaggctccccaaagagccgagaaagacacgcgacccctccggatcgggacagctcctgaaagcccggcgcagagccgcctcgaagatcctaagagtgggcgactcacaggcgcggccggcaagctcctgggggactcgggctcggacgagcgcccacaggcagcgcctggcgcccacacctcctgcccccccccgaatcctaatgttggggtgtgtgtatgtgtggaggtatgtaggagagaggaggaggagataagagaggagagggagaaaagcaggagagagcgcgagagagcagagaggagagagattggtcttgttgctgaatgatgcttggggttttccttttctctttgtggttgtgtatcgactgtaacgaagagccgcgcctacgcgcctggtggggattgtttcggttcggcctccttttctttccttaacaggcgggataatggtaaagtccaaggcgctagaactgtcctaaagaatattagc

SEQ ID NO: 332809 - DNA, 248 bp, Homo sapiens
  chr6:50789353-50789601
  hyper
cgtctgattacatctagtaattctccactgaatgaacgtcatttacaatagtaggggagctctgcgctcgctgctgcttcacgctccatttgtcctctattctccctttaaagtactcgtgtaatattaatagtcatgaatatcaattattatgaggcggtgtaggcaagcggagggaggaaggggcggccgagcagtctgagcccagcttcgggtgaaagaggactgcatctggagccccgaagaac

SEQ ID NO: 332810 - DNA, 441 bp, Homo sapiens; identical to SEQ ID NO: 232132
  chr6:50791124-50791565
  hyper

SEQ ID NO: 332811 - DNA, 209 bp, Homo sapiens
  chr6:50794602-50794811
  hyper
cgagtctgagttgtttttctgcgcttccgcatgcagtcctaattaaatctttacgatcctccctgtgacgattaagcgccagcatgctgcgtgaatatcctgtacaaaaacccagcaggcggccgtaattagatagaaaatcagacaagagccttctcattaactaccacaactaccccacgtcgctgatgaggcgtttatacatattt

SEQ ID NO: 332812 - DNA, 477 bp, Homo sapiens
  chr6:50803791-50804268
  hyper
cggtgacttctctaatgatgaataaagacggcttcctgggaggcatgtctgtcaacaccggcgaggtgttttgctccgtcccaggccgtttgtctctgctcagttcaacttcgaagtacaaagtaactgtgggagaagttcagagacggctgtcgccccctgaatgcctcaatgcatctctcctcggcggagtcctcagaaggtaaccccaccacgaaaaacaaaaacaaaaacaaaaaaacaaacaaaaacccaccagtttttatttattggacagtgaggagaaggttccagcaaaacccaatctgcagtctgacgcagttgcctagcaaccgggtggccggagcattgctttcgcgcagcgcttgggaggatccgcggccgccacctgctcgcccacaaactctagtgtccttgcatccaggcctgcccgcgccgcgcaagtcctaccgcagattttgccgccctgggaacctt

SEQ ID NO: 332813 - DNA, 159 bp, Homo sapiens
  chr6:50805695-50805854
  hyper
cgaaaaatggggggagatctttgcgagaaaggctagaaaaaatcggtttgaatttacccgcgggcaggcgcaaagcagcaaatgtcacgttactcacctccctggtggaaggtaagcaagacgtgtggccatttcacgaagtggctgagcttaactgtc

SEQ ID NO: 332814 - DNA, 375 bp, Homo sapiens
  chr6:50808438-50808813
  hyper
cgtttccaacgttgctgtttgtcatcttccacagacttgtaaaatttactacaactccagaggggaaaatagtaaatctctggctaaatttaggtctagagctcatttgaacttttacagtgggttttctatttatttgatttactcctgtctttggcttcggtgtcatattgttggtgttttatggccggctcaggcctgcagtgggcggcgctgcgtgcgcccgcacgtttctcttgcaggcgcggcccaaacagccgcgctcatttatttagtgttggaggacgcggtttgtcccgttgacagcgtaatttaaagaaatatatggaaggctgaaaaatcatttgctcaaatttgtccagatgtttttgagac

SEQ ID NO: 332815 - DNA, 493 bp, Homo sapiens; identical to SEQ ID NO: 232139
  chr6:50810509-50811002
  hyper

SEQ ID NO: 332816 - DNA, 526 bp, Homo sapiens; identical to SEQ ID NO: 232140
  chr6:50811325-50811851
  hyper

SEQ ID NO: 332817 - DNA, 934 bp, Homo sapiens
  chr6:50813318-50814252
  hyper
ttcgtccgagagctcggccgatcgcattagatgtgttctgattgcacaaggccaggagagaccacactgaaaacgatcgtctcctttccttgcagggcaacgcgccccacgcgtgtgacgtgcgagagacgcgatggacgcgccttgctcttactgtgcaggtcctgagagcgtgtgggccacaggcgcccagtcgtgttgaggacatagaatcagccgctggaggggctgccgactgcgcgggcccttcccgctctcggtctcaccctaagggctaaggcgaccgagaaagccccattctccagtaggtaatggggcggcgcccggtgggctgcaggtggggagggctcccagcgccgccagcggccacccggggcgccggctcctggagggagagtggcctagaaatatccaaggaatccgaagcttcccctcctccacctctgccagtacggaaacaccccaccgtcacaatcctaaagcggggagatgggatgggaattgtcttacttggcaaggcagggtaccttcattgccagacgccctcatttgtgtgttcctccttgctccagcgagatagaaccttttgcgcccccaaccccgtttcgtggagtgagcccactaccccttctccctccctcacttctcctttcatgtaggacccccgcccccttgctttccttagccaggcccgctacatttatctgataattgagttattaaaagatttggtttccttgggcctataaatcaataaacagtaggattaacgcaatagtttgccttttaagtcaagggagacgtttaaggcaagcccctttgagctttgttttcaaaccaaacaggtgagttgcagctctccccccggcccctgcactcttcagacatttggtccctgcccactcctaaacgctcagtcccaaaacaaaatagc

SEQ ID NO: 332818 - DNA, 340 bp, Homo sapiens
  chr6:50817110-50817450
  hyper
tagaacctctaggtcgttgaccggcccagcgcagggaccctgagaccgccagatccggtgggcggcttacagtggcccagaacgcacccgccggctcgtgttagcgggttaagggcttgattaaaaatagtgctggaaggaagacccgattatttttttatgaagccacattccttttcttcatttgcaaataacagttccgtagggtcccttcccagggaccctgggcgccgaagttaggggccacctgagagttgttggcccggtgggaagtgtcccttcctgagggcgctctcggcttctcagggcaagctgccttccacgcttggactttgagggc

SEQ ID NO: 332819 - DNA, 814 bp, Homo sapiens
  chr6:50818180-50818994
  hyper
cgctccgggcacagggaccgcgggccaacgaaccgcgcgtgcgccgcgccagcctgcgtcgagccgtcgcacacggctccgggagcccgcgtctaggcacgctctccaggttgccaagcagggtgtcaacaagtgcgcacgcgcggacgcccacgcaggcgcacgcgccgtggcgcccccgggcgtaaccccagctgctgtgacgggccagggctcgcagctcgcctgctagagtttgtggcgcgccctcgggatcagggcactggggtttgaaggggctgcagcgtgggaagccttcaattttttttttttgtaagctgcgtgtgctcagattgaggaagcagttttgtcacacatgttcaacacgttccacgctggtcacaagctagcaaggtcaggtagtttttcgcccacttgttcgaaaacctattagttcctgcccaccctgctcttcgcttttcctcctctctcctaagggctgcagccttctggagctgactcaggcgagaggcgtccagagcccaaataggggtcacacctgctgtcgagagagtcctctgcataaaaatgctctttaaaatttttaaaatcagcataatggccaatggacttaacaaagcgtgacttgcccaggctgcacggagggcaactctggcagtcatctgtaactcgaccagttaacgtcccgaacgtgcctgttcgcggagatattagcaaacgtttcaaggatgtggctgtcagatgtcattagccaacgcttgctcacccaaccatttgcctaactgggaggagggcatggccacggcgtataggc

SEQ ID NO: 332820 - DNA, 908 bp, Homo sapiens
  chr6:52227115-52228023
  hyper
cggggcccgagctcgggaggcggggacgtcaggatcgcggcgttggggagtcctcgcaccccgagctcagaggggaggtccagagtcgcagcgttgggaacctgaggccaggggccggagtttagggccccgatgttgagtctccgaatccaagcccggaaggggggacgacgggttaggatgctggggagccctggagctctgaacggctgtagtggggtggccaggactgcgatgctggggagtcatggagcctgagcctggagagctggcgggggtgtggggaccgcgatgttgggaaggctgagcccggagggcgggagattcaggaccaagacgtgggggagtccgacagggcagaacgaggggcgtcctgtccgcatttgtggggcgccctccgcagggcggaggggaacggaacctgggaggggagtgcggaggagaggaagcccggggcggtagggagagcccgaggaagggcagcccgaggtaggggaaccccggaaagagtagggtgggtctaggcatgtgctttcgccggggaaagatggagggggcttctctgagagggtgggcgcgaggagcggagttgtgatgggaaccgccggcagctggctaatgggcggatgctggggcttggctggatgggaacgccgcggtggggtgtcggaggtggctggtggggctggaacgctgggaacgtctgtctaggctatgagaacgcagcgccctcggtggaacagggtcgtagataactcgagagggaatctagtctagggagcaagaccgggcatccccagacggaggcgggtggggacctcgcactcagcgcgcttggggaatattcggagcctgggtttgggggctgctgcaccttgccgacccggtgcggggacctggaggtagcc

SEQ ID NO: 332821 - DNA, 1839 bp, Homo sapiens
  chr6:53212372-53214211
  hyper
cgtacaattctatgaagcacttcctgccacgggtcccgctatttaaaacaaattaggctgctcgctccccacaaatcccatctagcacctctcggttcctcagtctagctaataaaccatgcactggattcttccgaaagagaccccccgcccccgaccccgccacctccgccactttgcataactggccaaatgcattctccaaatttgcaatcaaggagcttaattcacaattgtggatggggcggggggaaccgccaagtgcaagaacacggaacggttgcaagacgcagttcagcaagaacaactcttgctctaggcattgctccgtcgacccgaggtggtggggtgggagagtcttaccggcgtggaaacagtaaaaaggcacttttccttacaactcgcaagacaacacacactctagctcccccggcgcagagcacaaccgcccccccgccgcgcgcctccctcgcagccaaccgctcccgcctctccagggatcaggctcccagaaagggccgccccggtcgcccccgagtccccgccctctcgctttcccaccagcctcatccctccctgagtaccaagggctgccgttgtctggtttcaataaaaactgaagcggtcccgagctagcaggcttccctccgaggggcggacggaaggtccgcagggttaacggaagcggagagaacaggacaaaaaggaaaggccggagagtccccccagcggcgcccggtgcccgcagaccctcgcacaggctcttcgaactcacccgggtttcgccgactccaaagaaagcgcgctccctccgagagcgctcccccggctctcccgccgcgcgctccggcccgcagggcgggaggacccaggcggacagatccatccctccgcgtctggtgtgggcacggtgtcgtgccccgcggcgcctgtcagcgcgcacaggtgggaccgcagcacagagaacgctcccgagcgccctgcctcagcctcggcgtggggcgagccgcccgcgcccgcacccgcacccctttccccgcgcccgaggagccgggctgtaccccggagccggcggagctggaggccgcgggcggagcgcgggttgccccggcagctctttctcggcaccaggtccgagacctaacggcagttctctctgaccgcttcccggccgcgcgctcgcgcgggtgtcatggccgagcggcggcccccgacgaagtttcccggagctgacggctttaccttttagcccaaggggcggcagcagctttgagcagcagcaaggcggcggcggcggagggagcgcgggtggcagccggcgcagaggcggatgtagaaggagacaccggtggctaggacccgcgcgatgggaagaggaaggcgccggctatctacaatcagaacgtgggctgaccgtgacgtcacaatggcgcggccagccaatcgggacccgaaggatgaatcaagcgctatgatgtcatgcggcccgggagccaatcgcgggacaatagaactttcgtgatcgtaaattccagaatccgatgcggtggagagcctaggccggggttggcccctcggttccacgtgtctctgggaaatttttttcccctttcttcctaataagcctgcgtggaacgcagagcctgcgcaatagccccggtgaagttgtcgatgccctgaactctggtttttttactgccaggcgtggcaggagtctgtggccgcatttgggtggcagaagcccaccctcgttacggtctcctctatgagttatgtcatgctgaaggggatccacttcatcgttaaagctgaaagggttaaatgcccacggagaccgcc

SEQ ID NO: 332822 - DNA, 391 bp, Homo sapiens
  chr6:56112188-56112579
  hyper
cgcagtgtccaggctcggggttgccgtcgcagccagctgagtgttgcgccagggggacaggtatgttccaggcagtggcaagcccaacccgagcaagacctgcgctgaaacggattggctgccctccgcccggagtccgttctccctgcagcggccagtgcagagctcagaggctcagaaactcgctctcagccccctggaggcggagcccgggagataaggttcgcgctccccacccgccccctttccttggccgaagaccagagggtggattttggatctggatcttgaagggcgaactgctagtgtcgccctggtggaaacactcagttcaaatcctgctagcatcagaaaatgcacgattgaggattgaaaacgagggtgaaggagg

SEQ ID NO: 332823 - DNA, 680 bp, Homo sapiens
  chr6:56716204-56716884
  hyper
aagcactgccctctcggcagggtccagcactgagcccccttgaatctttcttttcgatctctcatgtttaggcaaattccagggtaaggtgtctcccggagctggggatgcggagccagatttctggctgaaatcatcctcatcggaaaaatccgcagaggaagacatagagcagcgataggacgcgttcccggaactctacagagaatgacacagaaaaagcattaacagcaaaatactcacatatgctcaatgatttaaacatctcccccaccaaccaccgccgccctccctgcccccaaactgggtctggcatatcctgcaccatcctcggagctgagggaatatgcagaaaccaaaaaaataaaacccggagctcaccatcttttcttggccaagtctccaatcgtaaaaacaatacacaggcagtttcaatacatgaagatttgcacggaagaagtgtgtggcctgtggtccggccaccagctcacaaatgactggcccaacaatgaagccagaatcaacagccttcctgttacaaacctatagtatttggctcccccaccaggacagtagaaatattttccattactagcctgctgcttaattcatcaatgcaactaactcgaagtttcgaaaacaaagcacaaatgcaggatgttgagtcccaactcctttcc

SEQ ID NO: 332824 - DNA, 1731 bp, Homo sapiens
  chr6:56818408-56820139
  hyper
cgttcgctgggcactaatatgaaatcacttaaaaggaaacatgccactttcggctaggggacagcatgttcgtcattcagtgtcctactggtttcttaacacgcatataattaatattggtactcaggaaagagaacttcttctgaccttgagcgtgcgcgctaaataaattacctcagaacgaaagtggtgcgatctcaaaacagcatctggggagaaaagagataaatgagacttcatttaactccttgttcttcacctaccgagtgactcatgacttacctgggagaccagggttgggaaagcacatcgcagactcctggaattcggtgggacatcctgggggagggaggaggagtcctggggccatcggtctctacgtgatttctccgcgagaagtttgcatgaaagttctgggggagttggggagccccgaagtttccatgccttactttcttacccctacgctccagcgaaggatgcgtgaaggcgaggctggcgcagccccggactacgctcaaattacccttaaggctttagcaaactgactaaaaatttgagttctttcctcccctccctgccctcggcatcgccgtggttattcaaacctgggagactggagggcggaggtgacggcaaaaagggcaaggggcgttaaagaaacgcactcagcctggggagtgggcaatgatggggctaggggcagccgaggagaagggagcgagccgcgcttcactctccaaatcggcttaattgttcctggtagcccgcagaaacccgtcgcggcgtgtcttacctcggcttcttgaacgacccgagaagaccgatttcatcggatgcctccctttctggagcttgcggtgccagcagcagaagaagacgatggtggcgatggtgcccagcagaagcaacaagaggaagagggcacattggatgctgtagggtctcagcaagacgaggaaagccgcggcgatcatggtgcgggcgaggcgagggcgactcgacggcggggctggagggcggcggcacaggcacccgcgctgggcgcacgccgggacggcgggcacgggtgagcgcggctcagcgcgtcatgcctggcgctcgcggccccgcgcccagcccaatggctgcgcaccccgcgccagccgcgctacgcgagtgatccagggctgcggggagcgcttgccatgactcagcagacagcgacgaggctgcgactcggcggctgggatcctctcccctccctccccaggcgcccccgcccccgtccgtgcgcagcccccgggcgcagccccgccggggacgcggcgagtggggaggagcagcgccgccgccgcggccgcccgggccccgcgcatcgtcctgcggccgccgccgacctcagcatcccagaagccgggcgcacgtgggtcggggcggggacgcggcgctcaggctgcagccgcggcagcctgcggggggcgggaatggggcgccgcggcgggggctcggctgatgacatcacggccaggctgcggcagcgcgggcgcgcggacatggctgcggcggtttcggcggcgtccgcgggctgcacccgggcctgagagcccagcgccctcccgcggggccgcccgccagtccgcgccgtccgcgggtgcattggccgggtgcctctagcttcccggacacccggagcttccgcctatccagcctccctcggccaaattgctgcggagcccgtcgtcagggggc

SEQ ID NO: 332825 - DNA, 200 bp, Homo sapiens
  chr6:56820686-56820886
  hyper
cgtttcttcataaccagcaaaaagtatatggcagttggtggccaggggatttaacactgatgcaatgccagcacggaaggtatagcgagagcgctgcagtgtgcctttctgcggacggccacggccacctggccaggaagcggctgctgcagcagtcattctgcggcatcttgcggccttggcgggcggtgctgtgccgc

SEQ ID NO: 332826 - DNA, 620 bp, Homo sapiens
  chr6:57036954-57037574
  hyper
cgaagccgtcactgagcaatacacccacagcccgtcgaccgataggaaccttcgcgtggggggagttggttacttttaggttgcatgaagaggcggggcctcgcggggcggagctgggggtggtctgtgggtccgcgcgggcttcgggtagttcctgggtccggggagcagacgatccgctagccacattaggcgctcggtctctgcgtccgcccctcccgtgcctcagagacttgcgctccccaggcccgagcccctgtcggcccatcctcgagcccgtgtggctcgcgaacctctaactccagccgctgcagccccctcccaggcccggcgtccccgagccccgcgggcgccgcgcctgcccttctttggctacgctgcagccgcggtgtcggcgagtcctcccgggttgcccccgcgggcgtcagagggagggcgggcgcccgcgtggtgacggcgacgcctgcagcccaaggagcgctccactcgctgccgccggaggggccggtgacctcttggctaccccgcgtcggaggcttagatggctcaggcgaagatcaacgctaaagccaacgaggggcgcttctgccgctcctcctccatggctgaccgctccagcc

SEQ ID NO: 332827 - DNA, 58 bp, Homo sapiens; identical to SEQ ID NO: 232170
  chr6:58147837-58147895
  hyper

SEQ ID NO: 332828 - DNA, 1074 bp, Homo sapiens
  chr6:62995456-62996530
  hyper
atgtccctgtagaccgcgttacatacactttatggtttctctatcaatgatcctaacaggtcacatcgccactgccattagatctccgtagctttggtcttctccaaattaagacgtggagaaggagcactgctgtccgccccaagaacggggtctgtccgcccgagctctaaggcgagcatcttcagggggacagtttctgcgaaggcggggagaggagtccctccccaacttcactcccctaatcaagccgcgggtgagataggcagccggcggtttgtgcccatctgtgggggcaagtcctaccttctgccaaaaggcgcgacgcatgcacaaaagatggatccaggctatctttctctgccatcagctcaggcaaatatttctcctcttccatagcgcggacttcggattgtccccgggcgaagcgcgaggttccgctcgctcggacgcaggcagggtcttggggcagcgcctggctcccgcgctgctcctcctccgcgcggcgagggatctctgtgcgtcctcactggcccatgcacccagcacctgcgactcccgccgtcgggctgcgtggccccgcgcccacacctgcccgtcccttccgtcgtccctcgctcgcgcagagccccggctcacaccagcggccttaactggagaggcgggaacaggacgcggcccacctccgccaaccactcattggtggtggtgccaggagaggcggggcgctggcagaaggccgcgggctctcattgggcggtagcgcaagtcgggtggcctgactggcaggaggcagctgcagaggggaagggagctcggaagatgcaaacgctttcttcttgcgcccaagccttccctggctattaggcatgcccagttttgtggagttctctgtgtcttcagctaaggcgcagaggagagagagcgcgggaaaagcgcaggttaaagagagaggtctgagtacaagtggacaggggagatggagatgagaagtgagccacccgagagggtggaaaagcgccagggaaagtctcaggaaggtagatgggacttcacctgcgtccctaaggcaca

SEQ ID NO: 332829 - DNA, 1998 bp, Homo sapiens
  chr6:69344116-69346114
  hyper
cgtcagccaactgtccaggaggcaaaatgactatctatgatgatagatagacagacagatagatagttagattaaaaggtggggaaacatcccttttccctttttcctttctatataatctggttttttctcttcaccccttttctcgcttcttcccaccccgtccccaaacctgttactagggaaacttgaaaaagaatcagatacattaagactacaaaacgaaacaaaagtttagaccccgaaaccatgattccattgccaagcacaaagcaatgcaagagcccaacgtcggtcgccgcaccgcgatcctgacaaagcctgtatggagccagaacaaataagatgttaattgcagcctcgcagagaaaaaaatactattgttccagccagagacactcagcagctcggtagctgggatgtgccccctccgctgcggactggatcaattctgaatcccggtactgaaatgacagctctctggctgcgacaggtctgcgctgaaagaaagagaaagacgatcaagtccagcattcacttcccacccttcagagtcgccttcccatcctccgcacccccctgcctcgcctcccagtgagtttctcttacagttggtcgccgccagccccagcggtgggaactgaggatgcaaaaacctcccagacgcagaaaataccgctttcgggacgtgcttgggtttgagtagccgtgacgtgcaggcgaaccgcggccctggctggagctccgtggagcccccctcccgccagcctctcccccgccctcccgccgggactccctcctctcccaccccgcggctcccttcgccttctctctcacacacccgcccgcgcccccggcaggcagaactccaggaagtcgcagcggccgcgccgcgcgagccgagcctctggcgggcggcggggcgcaccgcagctgtgcataagaagggcgcgcggcacccgggacgcgcgcgcacacgagcacgcgggaggccgccgcgcggacgcgctcccgggacacgcgcaccccccgcgcgcgcgcccaagggagagcgagcactgcgcgccggcgcgcacacccgagacagagctttactatctcgctccctctcgcgcctccctcctcgctgggcattcaaacagctttccgacatcaccagccaaggatttttttccccgctctccttagtcgccgtccgtccatcagtacctgcaggggggaggaggaggagggaggaaagcggaaagaggaaaaagcataagcttgagccttccgatccgaccacgaatactcctgtaataaacccaccgccccaacaaatctgccatagcagccgccgccgccgccggtcacttctcgtctcagcgctttctttgcttcttggtttgttgggggtagcttttatgaaacaaatctttgctattaagccacttacattttggggggttccttagagtctcccttgggggggcttctccctccctttagcccccctcggtttggaggttggattcagttggatacggcgcaaggttctgggctcctgctggcttttttttcctctctctcatcgacccccctttggttcccaccccccaccttttgcttttcgtatgtatgcatttttaaaaataaatcctgattttggaagctgagccggggaaaatgggcaacggtgattgggaccgaaggggagtctctccgtcactgttgctgggacgcgtgcctgtgctggtgtcttagagcaagagcctccctgagctttcggagtggaaggtaaggaagggggtccaggggtcaccttttctctgccgggggtcgccaccgtggagctttgggcttaatgtttgagaagggaggaaaatgaaaggaaaggctgttgctggcggatggggaggctgtgagcagatccgactgtctgcatttacttaaacgccgcagttgaaaagttagagaagtctggttttcaagagatgtgctgggtcagaaggaataagc

SEQ ID NO: 332830 - DNA, 427 bp, Homo sapiens
  chr6:69942728-69943155
  hyper
cgcattttaaaagccagcatttatggtccaaaatatgggacgggaatcagagctggtagaaaaatatgaaaagcctctttacaccctgagtatttgaaacaatccgatgagcataggaagtggctgccaacgctctggcggctgctcgtgctgccgccgctgccgctgctgttcctcgcatagggctggacagagctagtcccggtttcagcacctccggcgctggacagctctctgcacgccgcaccgccgcctgcttgctttttcccactctcgctttgcattactggagatgcatctaaattacatcctgttcaacaacaagtagatttttttttcctgtacaggaattacagtagacgactctctcaattaaactgcattttcttctttacggatttggctatcaggcgtatttatcccgatt

SEQ ID NO: 332831 - DNA, 1235 bp, Homo sapiens
  chr6:70576385-70577620
  hyper
cgcggagtgggagggtcacactgggagagactaataagggcagagatgcgtcccccttccccactcgcagggagctcactcctcggcggtgccgcagccctgtccggactccactgcgcctctgaggggctcaaatacgaattcaaggtaagctgcgcggctttgcgaccggctctgcacttgccctctcacacatgcccgggctatgtcatctgctcgtgttcctagttatctgtgtgcatctgcttttcaagaaaatgtaaaaactgtgctacacatggaaatatgtttaggtggataaataatgcacacctgcatacgtttccataggggccttaaggatgggaccaaaaacgtttggcaggagacggccactctcatgtggtacataccatgtagttcgtgttcctatgttcacatgatgcaggcttcatgcgttacacctaagttctaggtggtttttctggctatgtgtgtctgtgaagcggaactatggagcactgctgatgcgggtagggacagacatcaaatacattacaaaaaaaatggggggttaaaggagtaaaacaaactcactatcaattcatgccgttagagcgctttttttttttttttttgacggtgttagccctggaagcgaggcagccagttaagcggcgtaagctaagagacgcggggttccggtgcggtgccctccggcccggggttacctactccacatgtgggtgtttttcccaagtgcggcttctggggggcggcgcgggcgcgggcggggattcccggactccagccccaccacgttccggagcgtccggccctgttccttaattaccctgcagcatgcgcagcgcggtcggccacagcgccgccgccgtccccgcagtcctccctgcagccaccgccgccgccgccggaacgtcccagtcgcggcgcgaggaagacgcggccccagcctctgccgcctccgctgtcagagtcccgaggccaccgccgagagcgcgccggcgccgcagccacagcggccgagaaccaggaggcggcgccgggcggcccagctagggcgctgcagggtcgcgaggaagtttgttggcccggaaccaagcacgccgtcgggcacgctagctccccgagagcaggcgggcgcgtaagcgaacccccttagaggttacggagggagcgggaagccggcaagagggtgggcagaggagctgggggacaggcgggtgccacaggag

SEQ ID NO: 332832 - DNA, 1040 bp, Homo sapiens; identical to SEQ ID NO: 232180
  chr6:70992020-70993060
  hyper

SEQ ID NO: 332833 - DNA, 897 bp, Homo sapiens
  chr6:71123138-71124035
  hyper
cggggacctgttgatcgcaggtatagccggctggcccgggctccctcgggactggggcgactgcgcatgctcgctggccgcgctgggccagtagccgagccgcggtgacgaaccggctccgcggttgcggtgtttgcggttgctgtgatggcgatgtgagggggcccggggcgggatggtgctgacccgggtcgggccgtcttcttgcagctggacaacgagctcctccgttcgacaggcgggggaagaggccgagccgggcgagaggtaacccccttactgtcccctctggctcccccggctcccgacacccacgacccctccctccgtccctcttgcccaggggccaggaaggaagcggcctcctcttcgtccgccgttcgcccgccgcggcccctcacccgactgctggcggtcggagcctggccccggccccgttgaaggtcggtggggacggcggtgcggagcgctctgagggaggcgaggggccgcggcgcgctgctctcccggtgcccgcggccgcccctgcccctgcgcgcgtccctcgacccgttcttcctgaacctcgcgcctagcgtgtttgcccttcacccctgctccatcttcgtcgctctgtccctcctttacccgctttcgtggttctgctttttcatcccgcgcctcccacgtgtctttttgcccgggtggtccctccttgggaagcagcgtatctctgtgcttccatcccttgcctggctcttccctgtccggagctccttaccctggccgaccaggtttctcactcttgttacctccataatttcttccttggttttattttcctctcatccacctcctttcggtacttcctcctggttccctttttgttagttgccgattgtgttttgctttagcatc

SEQ ID NO: 332834 - DNA, 1679 bp, Homo sapiens
  chr6:71665452-71667131
  hyper
cggagtgcaaggggcgtgtgactgcagcccggccggcccggaggcccactcccgccctcgcccacccagcggggcaggctggcctttacctcctggaagagctccagactataggtgttgtcgtcgtcagcgaagaagagcacgccgggctgcgcgcgctggtgctggtgcctctggcgcagccaggcgaggcccgcgttgcgctgctcagtggcgcgcggcagcccgggccgcttgtagcgccgcggcgtgggcacgtgcaggtgagtgctgggcagcccggcccgcgccaggaagcggctcaccagctcgctgcgcgccgccgcgtcctccaccaggatccagtgcagctgcgccacctggcggaacgtgttggccaggcgggtcagctccgctttctgcaccgggcggctgtaggtgggcgtgatggcatagatggtgggcagctgcggctccggctgtggctgcggccgagactggttgcgcttttgggtcccgtgagccgggccgcccctgcggagcgggagtcgggcgcccccgcggcccaccgcgtagggagagaagtaggggcgcggggtgagcgggggcactggcctgcgcgtgtccacgtcgagcatgatgatgacaattaggatccagggcaggaggataaagaagcgggtgaaaagcgcggacttcatggtgcacgctccctggcctctcggacaccccagagaggggcgagccgagggaccccagtgcgcagcttggacagcggcggcgccagcacttagggagtggtgatgggtgcgctgtccatggggccgagggcgctgcagagacctggagccgcggggctcactacctgggcgtggaggagcggcaggttcgcgcaagctagagcgacaaggggtgcaggcgggcgggcaggggctgcccccgactccaggtgagctggcgggaagcgggactcggtccagccgcgcgccgccggtcccggagttgtgccgagtgcgggaaaggcgctgatccccaccgcgctctttctgaagagtggaagccgagaagcggcacccggtgcgcctcgccgctccagtccggcggtgctgcgggcacaagggctccagccgcgggcccccaggacgctctctgggacgccttcgagggcgggcggcggcgctgggggctttccttcctcacattcccgccggggtggcgaggagcgggtggagacgctgggggttgtgtcccggctgtgttcgcgcgccgcagcggaagcctgctctcagtcccttgctcttgtcttctcagaacctctccggatccagcagcaagatcccaaagcaaggaaagaaagaaaaagcgagggggcgggggcgctgcagaatccagcgtcctcccaagtcctcctgtgggaagacagcagcgctgctactggtggagaggggctgcgagagggaggcgcggagggaccccttggctctccgccgggtctggcgctaacggccccgcgagcaagctcgggaggcggccgctgcaccgcgggtggaggagcgggaggagcgtccccgcggggctgcacgacctcctggagggggtgatgctcgttcacctctcttcagctttgtgaaataccgcaaggtctttggagatgagccaggaaaatccattcacgtgcggaaatttgccgggctacgcgc

SEQ ID NO: 332835 - DNA, 973 bp, Homo sapiens
  chr6:71998106-71999079
  hyper
cgcctgctgacggtgacacctcttcgacaccacgtccacgccagtcctcagctccaggagctgggcgggatccctcatcccgctcagctgggagatgccccgggagggcgtcccccggctccgggcggcgagggtagtagccgaccccaatccactccgggggccgccgggggccgcgtgaaggcaggtgttccggggagaaacgtggaagggaggcgcggcctggggccggtggcgctcggctgggggccgcagttggctcccctgggggctctgggcggcggcagctcccgcctgtggggaggagaaggagccggatgggcgggttcaggcgcgcgcggcggcggtcccggggccgccggctcctccccgcgagggtgcctgtccgccgctcgccgcgctgaggcagtgcggggcgggcgcgcctaggctgccgcccagcgccctcgccgcggccatgcccgggccctagagcgcctgccgcagcttgcgccccgcagccccgcagccccgcgcccgccgccgcctcttcaatgggcaacctgctcggcggggtcagcttccgcgagcccaccaccgtggaggactgcgactccacctggcagaccgactcggagcccgagcccgaagaaccagggccgggcggcggcagcgagggcccggggcaggagtccgagcagcccgcgcagcccccggagcaagccggcgggcggcccggcgccagccccgcgccggacgaggacgccgaggcggcgggcgccgagcaggtacgcggcccagcggtggcctcgggtcgggctggggcgccccgacaccccagaggggcaagtgccaagccgccctcgcgctcggaggccaggggcgccaggtggctgctcgccgctgcgacccgacccctccgcgccgcggctgacctgtctcccggtggagcccgggggcctgcaggagcccaaagcgccggaccctcccactg

SEQ ID NO: 332836 - DNA, 1130 bp, Homo sapiens
  chr6:72129577-72130707
  hyper
cgcgccggcacccgaagagttcccacggatacggttcccaagtcagtggcatgtcagtgcccttcaagctaccgcaattttatttgttctccccgccagctccataaagtattaaaggctctctccacgacttcttcccaagcccaggtgccctaaaccacttgagcccacggcgcctaaagccgactcacccgcagcccgaggtgcgggagccctcggacggactccggcccgccccgcagtccccaccggccgcgctgcggccccggctgacgacgagtcgagaaagtcacccgcgatgaccgcggacgcgaggggcgggccgcgtcgcgccgccccgcggaggcgccgcaaacttttcccggttcgcaagttgccgggatctgcggccgcggaccgacttccttcgccggccaccggagggagggggcgcccctaccccgggagggggctgggcgagccgggagacggtcaagttggggtcgggggagcgcgggcgctccgcactctggggcacgcggggacgagcccggccgcattgtctgcgcggcctcggaacaagcacggccggcggtggcaccggcgggcgcggggaggagttgccgtcccctttcgccgccgccgcccaccgcgttctttgtgtgtctctcgccgccctccagccgcttcgccgctcgcctgacagctgatgggctcaccgcgccgggtcccgcgtcctctcggccgcagccggcggagcccggcccggcaggaggaggaggggagaagaggagcgttgacagatgctgtcttggagcgggcaccgccgggggaaaagtctggactgcctcggcgagaagcggccggtaggcaaccggccccagcctcgcattcgcctcaaagaccccaattggctaggagcccttccctccgcagcggctcgcgcagctccgctcttgcgccccgcgcccggctcagcggacggactagcgcgcccggtcaagaatcctggggaacccgctccgccccctggctccagcgccctccaatgatgtcggcgtacagagggctgttccgcccaatcaggtgtcggaaagcccagccagtccccgggagtgtagccaatagaaggcgactccggcaacacaccc

SEQ ID NO: 332837 - DNA, 995 bp, Homo sapiens
  chr6:72596036-72597031
  hyper
cgaggtgctgtgcacgttggcgactgtaggggtagcggccggggcacgcgtggctcggacccggggagtgggcgggtgggtgcccgtgggcggagcggcgccgggactgagtggctggcagctatgtctgcgagagcagcggcatcaccctggatggaagcctctgagactccgcctaactgacacccaaactctccctctccctcccgcagccccaaattggaggcagcagagcctgggagcagcctccacggcggcagcggccgccccagtcccagccccagccccagccccagccccgcccccgccccgcgccccgccggagacgcccggatcggcggagcctggcgcgagccctcgccccctcgcctctcccgccgcgcctccgcctgcccgcccccgccggccgaggctgggctgcgggaggcggccgggcggccccgagcttcgctagggcgaccaaaacaaaggcagcatccggggctgggtggatgcaaacaaccatgaaagactgggttctcgctctccccggctctgctgctgctgctgctgccgccgccgccgctgctcctcctcctgccgccgccgctagggctccgctgtgagggggaagcaggggcgcagctgctgggcgtgcatccgaaaggtgagagccagagagcgagcagagggggcgggcaggccacgaaaatgtcctcggccgtggggccccgcggtcctcgcccacccacggtgcctccccccatgcaagagctgcccgacctgagccacctgaccgaagaggagaggaacattatcatggcagtgatggaccggcagaaggaagaggaggaaaaagaagaagccatgctcaagtaagccagccccagccgcgccatccatgcctccgtgcctccatccgtccattcaccactcactcccctagtcctcgcggctgagtgtggggaaggggctgccagggtgctgggtgcggacggaggcgcccgccttgggcc

SEQ ID NO: 332838 - DNA, 587 bp, Homo sapiens
  chr6:73329621-73330208
  hyper
cgtgtccctgtgtcctgccttcctgagacttcttgcctgcacgcggggcccagccgcgccagagagatggaagtgactttacctacccagcgaaagtagcagtctgcaacaaggaaaacagctaagttaagaggaagtggttttcattttactgcttgcagaaaggccaagattttgacgtttaaagcgggcacacgagtcattttaagtctctagatctttcaccctgaaagtccctgcacagaaactccatagggagtctaaatatagcaacagcaccccctcccgccccctccgccttcagtcagggtcccgcgcagctctaggattggagagcttactccagggcgctctctgcatctgcctcgaatagcaccgcacggagcaacctctctcgcacctccacagtgcgtgggtgtgaagtgtattaggggaaagctagagagtgactctgggtgatggtgctcggctcacagtcacatggcgtcgccgccagctgcacagagctcccagctagcttctgctgcccagaggcttggggggaaggagggagggaagcaggctcctgctggtgaccaggagcaggc

SEQ ID NO: 332839 - DNA, 2326 bp, Homo sapiens
  chr6:73330782-73333108
  hyper
gaaccccgaaaagccggcgtcctggacaccccatcctccaggtgttctttcccagacactgggtcctcgccgccgctgctgaacttctcaatcatatgactttctcggacttaaatggaaatttcttgacggagggaactgggtttgttctcccaggcttcgcgctgcagtcaggcagagccccggggcagctcgctcaccgcggaggagccactttggagttttacgccctttccacaccccacccatggactggaaaggatgttcagttactcgcgagcttgtctgatactgggatggaaagtcacagtccgcaggctggagtgaggcgcgggaagatgcctggtccttgcctcgcggacttggcagccgcgtcctgcgggtctgtccactgaactgctgaggactcgcccgtgtgcggggacccgagtgccacttcccggagcgttaccttgcgctccagcctccaggctagataatacctggaaggcagggcagggctgttcccgctctcaccccttgcggaaggatggcaggatccggcgcagcgacgtagcagcgggagggcacagcgacctgcatctccagtttctcctcaggacacaaggctgacttcaccttccggacagctgcaaagcccctgccagaaccaaaccgaactcgcgcctcggagaggggcttctggggccgtttcgctgcagggcgtggggagtggagagagggaaggggaagcctggggctgggtgtgcgcgcgtgggagcgcgcctcggagcgccccgcactcccccactctatccccgggggcagtttgggaaggagggagtggtagtcgcgggaatgagggagcaagagaaaccctctcaaagtgacgccccaaacaggtccggatttagaattcgaagctaaaggctgttagaaattgggactcctcggcctcctctgcagcccctcctttcccgccccgaagcccgggcggtttgctggctgcctgcttccccgcccccggctcagaggtctctggctggcgggcgccccgtcggccgccggcttcctccttgaaacccgccggcgcacatgaggccgctgcccccgccgcaggcgctggcggccccctcgcggtgcccgtggtgatgccatgccccgccaccacgcgggaggagaggagggcggcgccgccgggctctgggtgaagagcggcgcagcggcggcggcggcgggcggggggcgcttgggcagcggcatgaaggatgtggagtccggccggggcagggtgctgctgaactcggcagccgccaggggcgacggcctgctactgctgggcacccgcgcggccacgctcggtggcggcggcggtggcctgagggagagccgccggggcaagcagggggcccggatgagcctgctggggaagccgctctcttacacgagtagccagagctgccggcgcaacgtcaagtaccggcgggtgcagaactacctgtacaacgtgctggagagaccccgcggctgggcgttcatctaccacgctttcgtgtgagtacccgcgccccctgctatgcccgctgcaggggaccactgtccctggccccctggggcgtgctccgcgctcgcgcccttgggcccccgcgcgcgtgcacacgtggtggcttttatttcttcgcacgtgttcgtggtcttccttctggagcctctcccctcccccagccccacttctctcatctctacagcttgaaccttttccccgaggacacccaatgaactgcccggtagcttcaggctcccggggcgagagccaggcagacgcgggacttaggctgcgcggataattgggagcaattaggtcccaagatacgtaaacttcaaccgaacggggcgcccgggagctagggaatgcaaagggaggacaggcgcccgtgtgaggcttgagagtatactggagaggttaggaggtgatggcggggtaggacggggagaagtgagggggcatcgagggctaggtcctcagtcctaggggcggagtaggggaagctgctacttggagagagctgctaggttttaagcgcgcccggaaacacgcctcgccaccacccagccaccaccaacggaaaatctgtcagtgcatgtagcccttcctgccacggagaaggtggccaaggtctagaggaggccagcaggccaggcgaagcaacgctcccgcgctgcagggggcggggaggcagcggggaacctggggcgcaggaacgcgggcggaggtgcgatagcagaagcgcaaatgggtcgcctctgacagagatcgggcagtgggttaagtccccgtttgtggcgc

SEQ ID NO: 332840 - DNA, 481 bp, Homo sapiens
  chr6:73972647-73973128
  hyper
cggactaaccgagttcgagaccacaggggggtcaggtagccaaggctgggctttgacggtaggaatgaaggaggtgagggtggcgcgccgcaggcctgggccactccctgagtagggcggcggcggcggcggcggcggcggcggcagcggcggcagcggctgcaggcctggccgattgtgaggagacagcggtacctcctgggccgcgcacccgacccttccaggggtcccggctcgcgccgcggccgcgcgaggcgcgctcgagcggaagtggcggcgaccccgccggaagcgcgcggctgcggcgcgggaagcaacccagagccctcctcccgcctgctctgtgtaggagacagcctgcggagcccactgccggcgcgcagagagcccagcagctcttgagtccaggaagcaagggtgggaggagggacgagccagtggcaatgacccagacccggacgacccccattgctgagccagc

SEQ ID NO: 332841 - DNA, 823 bp, Homo sapiens
  chr6:74019373-74020196
  hyper
cgtattctgagactgtttcaatcacaaataagactcggaacagcctctggaaggccgacagcatttcgcgtttctggcctgggaaagtaagggtgcgctaaggcacgagtagtacagctcctcccgccaccgcagagcccgccggcgggaagagaccagacaccgacggagaagcgaagttcaggacgcgaaggaaagggccacttcgggtcggggtcaacccagactggaccaatgcacagtctaggtggattaacgcgccaccgcgagaagtgggcacgggaccacatgcggctggcaagacgtcccagggctcaagctccaggctcggtcaccaaacaacggtgataacatccacaacgccacgtaaaccatctttgggccttgatcgttttccaataaccgactgaactgagggcgtgaccaaacgacaagaaccggaggagaggacccggagaacggagcagcatcccgccgcccgcctccaggaaagcccgaggcactgtagcaggagggtctgggctccgcgccttaattacaccgccctggacccgcctcttccgccgctcgctcctctgaccggcacccgaaggtgctgtcccgcccacggactcgctcacactccgtttcttcgatcctttagacgactttttaccgttcagggatgctctccgttaccgcctctgccatttggttgccctccctgcggtccaagggcctggaacactccccagggctgccaggccagcgctttccaggggctccagcctacagcgccgccacctggggctggagccagaaacgcaggggccgggggctcacc

SEQ ID NO: 332842 - DNA, 1016 bp, Homo sapiens
  chr6:74161047-74162063
  hyper
cggttggttgtctgatcgttggatgtgtagatgaataaacgaacggtttgtcgttttacttagactaggctaccgaaaaacatgcaaaagtctaagttacttccgaagggaagtgaggggcgcgacccggggaaggtagggactgcggattgcggaaggccgagcagcggggctcggcgggagggcgccaagcagctcaccttcacgtgctcatagtagctcccggtgttcagcagcccgacgcctctgaacgcggagtcgcacttcagtctgagcagcaggtggtccacaacccctttcaccatccccgccgccgtggagatatcatcgcggctgagcttcaacttctccaaaaccgcccggagcttcgaggccccaggcgccgcatccctccgtacgagaatgggggccgagaccggcaggccggggctgggcacgtcccagggcccgggcggaggtcttggcttcgtggagcagcgcgcgcccctctggcggcaagaaccagccctggaaagagccggctcccgagccgcaggaggctccagcccctctgccccaggggcgctggtggcgtcagacggctgcgtgtcctgggcgcgctgaggggcctttttggcgcgggccccagttgcgcggacgggcggcctctcctgggtgtccggggcgctctttttctgccgggatcccgacttcctggcggggccgaactttcccgccttaggcagggcggcctcgggggcagccggagactcggtgggatccatcggggcgcccctggcattccgtgcggaagccttgggggcagtggctccggcctcggaagctctctgcatggcctttccgtgccaaggctgcatggctggcgctttctgttccccgaaagaagaatccgtttcaggaaaaggccgcaagaggaagagccagcagcagctgttggaaaccaagcactactggcgggcacacaagagtctgcgacccgaaggggaaccccaggctgggaagtcgctgggagccac

SEQ ID NO: 332843 - DNA, 589 bp, Homo sapiens
  chr6:74405600-74406189
  hyper
cggtgggccggggaagtgggcgcgctctgttctccgcggccagctgggacgccgggccaggtggggccgcctgcgtttagcaactgctttctcaccccctggatttgcgatgtttgccacagcagcgagaagcgccattgtaatggggatgggaggggtggagcctccaagtcctgtctcaatttagatctctcactctgctgttaggcgcgcccatttcagattactaaactcgaattaagagggaaaaaaaatcagggaggaggtggcaagccacaccccacggtgcccgcgaacttccccggcagcggactgtagcccaggcagacgccgtcgagatgcagggcccaccgctcctgaccgccgcccacctcctctgcgtgtgcaccgccgcgctggccgtggctcccgggtaggaacgtgggcgcgcggggggcgcgcgggcgcgcgggcctgggccgctctgcggctctgggccagggcttcggggaggtggcggctgctgtgcagcagcgggtgggaaatgccctcgcggctgcagtccccagcctggtactggcctggaggtttgaccatatgtagcttcagc

SEQ ID NO: 332844 - DNA, 872 bp, Homo sapiens
  chr6:75915498-75916370
  hyper
cggcggcaacagggagaggtagcggcggcgacagcggcttcccggcgtcggagaagctggtgctcggtgtggcccccacacgccccggcgataggcgctgcactccaggagcacctggcggccgccgaggcgtgggcagctgcggggaagtccaggaggaggaggagaatcccaggaggagaggcgggcgcggcaggaagactggagatggcctgagcctgcagctgccggcgcgcggacgcgtctggggcggttcgccttagccaagtggaaagagactccgcgccgcgggctacttaatagagggctgttcccagctctcagtttactcggttacgaaacgcctgagaaggtggacggctgccacggggtgatgtatgctcctccggcggtgaaggaggtctacttttgggaacgtgtgcatacttcgagcattccttcggcgtgaggtggcgatcgccgtagtagcagtgccccgctggggggcggggagaagggagggagcgtagagggggacagccgcagccgggttccctgccaagggaagccgcgtactccgccacttggggcggactgggatttctttaatgaagctcgggtttccctatccctgagatttctttaatgaatttttctacattaagaacaatggggaggggaccgactcccattttcggaaatgcaaggatgcgtaacccattcacccccgctcctgcggatctccatccttcatctgatatcaccacctccatcttcctccccctctgtcctgggtgcacttaaaaccgatttacaggatttccattaactaactgtctgtacacgcggcgcgccttctgtctttttcaatctccaagcgcgattggaaaccc

SEQ ID NO: 332845 - DNA, 499 bp, Homo sapiens
  chr6:79620238-79620737
  hyper
cgaattatacaacgtagacctaggtcgtgcgatagctacaaaatacctaaggaaatggactaggtcgtaacaagaaaaagtgatatcaagcccgggcagaagggcgcattctcggcgcggagggcggagcctttcctggagtggcggcggatgacccgggctcccgctcctcacctcggcgtggggcgcaggcggcggccgcaaggaccgcggatgcttgaatcgcgcttctcgccggctgggactgccccagacacgcacaccctcccgacctccgccctgtcgcagttccagggcgctccgcgctgtcatgattgctgggtgcgcgctccgtgctgggacagccgcgcaccaacagcggagggcgttagcaccccaagacgctgctgcaggggtctgaaccgctccttggcctactggcaccgggtcctggacgaaatctaccgcggtccaactgagctttatcttgtgcggtgacgcccatgcctaggtcttgaca

SEQ ID NO: 332846 - DNA, 390 bp, Homo sapiens
  chr6:80487617-80488007
  hyper
cgagaaacaaaaaacccaagagagatttcatttttcactaggatgccaggtataaaatagcacatctcttttaatattcagaatagccggagtctccatttcgttattacaataatgtctttatcccttcccaggttctccccttccattctctacctctttgcgatcaaactgagcacccgggggtttcccaaacccagggttaccggatcctgagcatgcgcggaggagggacagggagccgcccacgccgggctccgcggctgcagttgctgttgtggccacaaggtggcactaagtctttggcggccgctggccttcccgaccgtggaaagtcggggccggtggggctaggtaggaagagcacactcctgtgaggttgccgggggc

SEQ ID NO: 332847 - DNA, 1112 bp, Homo sapiens
  chr6:80656571-80657683
  hyper
agcacagggtggggcggctcctgcgaggagctcctggctgcacaggctccatctgatatgtcagctcccgcatccgagagctgatgagagatggagggagctcagaagaaaaccctgcgagtgtcgggggaggggaggccttaacattcggatcagattaaccagtgctcaaccgcagtgcccgcgccggcccctccgctgatccgcagcatccgaaagccgcagggcgcgggggcctgtggggccgggcccgggagctgcgagaccaggggccggtgaccccccgcgggggaccgagcgaggatggggaagtcagcggctttacctgcgatggaccaggtccagcggtagaactctaccgtgtcgttgagtgccgtggacactacgtttaggacactacccggctccgagtccaggagccccatcgcggcgatgagcgggcgctggcggcaggagaaagcggagacccagagagagggctgaccccggaggcggtggcggccgacggggcgagcggcggccgggaacccctctaacggcggcggcccggctgcgtcttctcctgctcctcaaggcgccgcggcggcggggatgcggcagaaggcagggccaagcggaaggcgtcgtcaaggttcccgggagaaagacgaggaggtggaggaggcccagccgccagcacagtgcgctgcaccagtctgcagcctcgcgcagccgcccctccaatctcctcagccggcgtcacgtggccgcgcgcgggggcggggggccggccgcccctcctccctccctccctccctagtattgggactcgctggcgtagggatgctgcgctcaagggtgcgacgccaactgggctcgcgcaggcgcgcgccgtcgagcgggagcgggacacctgggctcctccttggcccctccccgcacaagtcgcctcattagccttccccgcccctgtcccgggcatcggcccctgcggaggagttcaccgcctccccacgggtgatttcttatccgccccggatacgtcctgggaaacaggacacgggaagaatgggtgttctgtgggcaaagatgaggtaggcgtggtgctttggtccttacctgacactcacctc

SEQ ID NO: 332848 - DNA, 1851 bp, Homo sapiens
  chr6:83073044-83074895
  hyper
cggcctcaagtaccactttgatggggagagcttctgaagcttccatacaacctgccgtgcctttgctgctgccgcagtagattttcagctcatttctttctgctgctgcttcgcgctgctctgtcatgcctaaatctatctcgtcactgccaaaggtgcctgaatcagggtgaattccacgagattcaccagcggttttgctccagtccaaggtaaatacagtatgcaaaatgaggaaccacccaaggatgtcggggaggggggagagaaagggattccctcaccttttccggcacattcctcgttaatttccaccaggaggaggcgcgcagcccagctcccctagtctctcttcttaaatccccctacctacggctgccgaggttggccgcgcgtcgggaatctccccgacagtcctggccctcccccgccccccgggttggtttttcccagctgcggaggttgggaggttgggccaggggctggggtgcgaagagagtcggcgcccgcaacgcggagccgggaagtcgtcgctactctggtggaactcagagttggttctggaggcggcggacgcggaggtgagcagtgggagcccgcggcctgggagagacccgggaggcgtcgttggggcccctccccatcctcgggtggagagtagggttggttcgggttgccactgtaccccgagtcccactgctgctttgttcccagactctcccctcctctttggagatgacttgaacccctttgagatccgaggggctggcggggcgcgggctggggggcgacagttgtagctccacttcctgctaatgcgagaaggtacaaaaagagatcaaaaagtcctgtaacctgaaacttccctcgcatcctaaccgggacctggtggagaggtctgggcgggggcggagacacccggaggccgaccttccgccgaggcggtgcaggaaggaacgggagagggagaagtttggtagggaaggaattggggattaagcggtaagttagacgcgggagacgagtctcctcgggaaaggcggagggcgggaggccggtcgggtttatttagtgtgggccagggaagaaggaagactttgcggtctgggtgtcggatgcgcgtccccctccggagtaaaagtgaccggaggggttggggaggcgaggccggggcgggcttttggaaggaggtctctgggacagactggagacgactagactcgaaaaggccggtttttgcactccggaagccgcggcagccaccgctgttcacgcctctctcctgcttgtcccaggtccctcagaggatccagcgaggggcgccaacaagaggcgaagaggtggcaccagggcggcggcaggaagaggagcgggagcaggagcgcggagcggagcgtcccgacccgccgtgcgtactttctggagggaaggggcgggggaatcggcccctgagggaagcgcccggtggcgagggggttagccaagttccggctgcggcgccactccctcggttccacgagaggaaagttttttttttccagacgcttccgccggctcgcgccctccgggcccagcctcccgagccttcggagcgggcgccgtcccagcccagctccggggaaacgcgagccgcgatgcctggggggtgctcccggggccccgccgccggggacgggcgtctgcggctggcgcgactagcgctggtactcctgggctgggtctcctcgtcttctcccacctcctcggcatcctccttctcctcctcggcgccgttcctggcttccgccgtgtccgcccagcccccgctgccggaccagtgccccgcgctgtgcgagtgctccgaggcagcgc

SEQ ID NO: 332849 - DNA, 988 bp, Homo sapiens
  chr6:84417712-84418700
  hyper
cgcagaccctaccctccaagcacccaggccttgcctcctccagccgcgcggcggctctctcctcctccatccccaccctggcaccacctctcggagccagcaacgcgccaagccccgctcctgcgatgcggtccagggagtcttggccgtgagtagggccgtcacggaaccccagcgtgggctccagtcgcagcatcgtgacaccgtccccattctcccccggcccccacatagggccagactcaccccctggggacccccctgtcaatcagcactttccccgcaacctgacccgcgggtgctggactagccacaacgtgcgttggggttattccctgggcgccgcacccaccggtgcccatctcccacctcagcagactttcctcctagcagcccgcaggcttcggggaatgcatcggatacccaagccctggctgcctccctcctcctcctcgcgctgctgcagcaaagggctcgtcctccctcagtcgcgaaggagattatcctagcgttgcgccatgttatgccctcgcctccccttccttcctcgccgccggctccaaagcctcgccgaggcccatcgcccgggccccttccccccggttccaaatccctgccgcaggggccgcccgggagctctgcggaggcgccggagtcttggggcgcctcacccttcctggctttggagaggagccgggctgacagcgaagcccagtcccccgcccgccctggagcgctccgcggagctgtcactcggccgctgcccttctccgcaccctgggattatcctctgcggatccccgcgagaccctggcgcggggagggggccgagtacggccgcgggtactcaccccgcccctgagcggcgccgcccgccgcaggatgagcggagcccgggccgccgagggaagccgcgccggtggatgtgtgcgaccgcgcgtagccccggtgcccccgggcgcaaagtctccagccctggccgggcccc

SEQ ID NO: 332850 - DNA, 484 bp, Homo sapiens; identical to SEQ ID NO: 232231
  chr6:85478297-85478781
  hyper

SEQ ID NO: 332851 - DNA, 1124 bp, Homo sapiens
  chr6:85483040-85484164
  hyper
gggaagctctacaacgcggcttcttggagttctgaggccgcctgcgcattcactttccagtgtaagcccccgctccggaatcccggctccagcccagcccgcgcccccttccctggaaagacctggccggccgcgcccccgaacccccgaggcgtgggtgtcaggctaagcggggctggtccgaccggtcgcttccagctctctccacctgttggaaagcccaggcccaagaaccgcgccagcggcggcagcacgtcactcggcggccacggggagtcagggagcgcggaacgcgggtttctgttgataagtgcaaagtacggccctctcggtgctaagtgcacagtaagtgcgaagaataaatacatcatctcccggggcggctgtctcgaaaacgcctctcagctgcctgcgtttcagagcccgtcaagggttatagcttagtgtgggcgtccgcgccgcgcctgcgcctccgagcgccggccgagaagggcgcgcagccacagccaccacatgccactagccccgcaaggcgcctgactcctctaaggggaactcgtaatgctcaccaaaagcctcagaaaccctggaacctataagaccgcaccaccgcgcaaacggtgtcccgggctgcgctcccgcactgcaccggcagcctatgaggcgaggccaacccggagactgcgcgcgacgggcgtgcgtgcgtgcgcccgcagattcgcttcaggcggtaggtgtggagtacctgggcagctccggcgggaatggtgttggggagaaggagctgtcattcatagtcttctacatatctgaataaagaattgctttttaaaaataggttcagagcctagtgagtgaaaacttaaaagtccccgcgaggagctctagttcccgggcggcgcggccccgactttctcgtcggtagcgctctggccttgggcgcccgccgctttggctatggaggtacagtggccgcgtcccggggagcctgggcctccttgcggctccgagcctccgcggcgcccgcgccccgactctccggtcccggctctctccaggcccggctgtctccggtccctcactgacttcgccagccgcaccacccacctctttctcccgcagac

SEQ ID NO: 332852 - DNA, 1299 bp, Homo sapiens
  chr6:86159095-86160394
  hyper
cgcgcgtcgcctctgttttatcactaaggttttaattgtgaataaacaaggaactggattcgaatgatttcttagtttctgagatttttttgtctaagcatcgtagacttcgtgcgttctcaacccaacaggaagcgtcacatctcagtgagcttcggctctcacagcccgaaactgcaaggagctcctctgcccggcctctctttactcctcctctctgcccctcagctcgctcatctttcttcccgccccctctcttttccttctttggttctttgaagtgatgagctagcgcaaccacaaaccatacattccttttgtagaaaaacccgtgcctcgaatgaggcgagactcagagaggacccaggcgcggggcggacccctccaattccttcctcgcgcccccgaaagagcggcgcaccagcagccgaactgccggcgcccaggctccctggtccggccgggatgcggccggtacccgctccccgccgggaacaacctctccactcttcctgcagggagctggtgccagccgacagccgcgccagggccgctccgggtaccagggtcggatcgggtgacgtcgcgaacttgcgcctggccgccaagccggcctccaggctgaagaaggacccgccccggccttgacccgggccccgcccctccagccggggcaccgagccccggccctagctgctcgcccctactcgccggcactcgcccggctcgcccgctttcgcacccagttcacgcgccacagctatgtgtccccgagccgcgcgggcgcccgcgacgctactcctcgccctgggcgcggtgctgtggcctgcggctggcgcctgggagcttacgattttgcacaccaacgacgtgcacagccggctggagcagaccagcgaggactccagcaagtgcgtcaacgccagccgctgcatgggtggcgtggctcggctcttcaccaaggttcagcagatccgccgcgccgaacccaacgtgctgctgctggacgccggcgaccagtaccagggcactatctggttcaccgtgtacaagggcgccgaggtggcgcacttcatgaacgccctgcgctacgatgccatggtaagacccgagcccgcgcccgggatagtagtcccggactgagagaggagccgggctggaaaagcagcggatggcagagtgtggcaagcctaggtccagggcgcggagagatgtggggataaagtgagactccggccagtgtgccagctggatgcatagaagtcccttggacgattcgtcttaaacggacgttattgc

SEQ ID NO: 332853 - DNA, 829 bp, Homo sapiens
  chr6:87646737-87647566
  hyper
cgcgtagagaaagcgtgcaaacccgtcaactgctcccgccgttcctctccctcctcaacccaggctcgctacagaagaagggagtagggtctgcccccttgttgtatctattttccccttctccgccagggctgtggccggcaaggggctcaggaggtgagtcccttgcccacacctccaaccccgctggcccggtttataacatggacagccctgccctctagtgtctgcaaccgggagccctaaggcgccatcagctccagaatttctcttttataacctaagcaagacctggagtacctcggagctgcgacctccagttcacaataccacctgcctcacacccgggctcatcttttcatcccacacccaccacccccctctccgttcacggtgtcccgggaggctgcgacctgcgtagatgatttagcagactgcccctgcccatgctcctgctcctgctcctcctcctcctcttccccgctctctccctctcgcctcctcttccagtccaggcgcccagactcggcgaagcgcagcgcctgccaccagcggtgcctcgggctgcccggcgcgccgcgctcccaggttctgtctcgccgcaccccggcgggcactggcgcgggcaaggacgctggcggggagaacgccctgggctcaacgtactccagaatcgaatgttgagagaagcagtgctctgatccagctcaggagaaaaaggagcgggttccgagtgagacttctggagccagctggacgtgccggtttgcccagtgcggcgcggctgcacgcaccgtccacaaggtgaggggcgcacaccttccgggac

SEQ ID NO: 332854 - DNA, 789 bp, Homo sapiens
  chr6:87861506-87862295
  hyper
cgaaatcaggcagcagtgcccgcgccacggcctctgcaggacagactccagcatccccggggtgggtttccggaggccccgctccccgccgcgccctggaaaggctccagaatctctcggcctggaggcccctggcggcctctgctcccaagcggggagtcgcagccaggctacagcgggcttgatcctcagtgctgggtggaaaaaccgcggcggcaaacgccgggcctgcaactgctgggtgtcggcgttgctggttcgcgggcggcggcggcggcggctccgcgacaacagaggacgcgagcaaccggcgcagcgcccagcagggccttggcggggtggaggggcgcaggctgggttagcggagcagagcggaccgatctggtgccctccgtggcccgaggcctgcggaccttctccgttctccggcccagggcgagagcggggcaagagacagcgccccgatagtggcgcacgctctccgccatccccgggcctcgcgctttcacctcgcgtgctggggcgagggcggggctgcggggtgtactgggtcgggggtaggaaggacctgccaggccttagccctgagctatccgtcatccgctaacgccgcgctccctgcatccctggcttggcccccaggctctgcgccgcttgtctgtagcagacacaactcagctcccttactgtcctcaggcccggctatttcaagaattccagaaaaagagtgcaccggcgtgtgcgggccggtgctgcccggaaaacccgtgaagcaggcacgcacggccc

SEQ ID NO: 332855 - DNA, 280 bp, Homo sapiens
  chr6:88678327-88678607
  hyper
cgtgtgcttaacttgtaaatgtagttttcagtgctggtaagaatatttttgttttgaataacaatcgcgttcttttccacagcgcgaggctctctgctgagtagcaaggagcccctcccagccggaaggcttttgcggtgctagcagcgcctgtctcagagcccttctttatcaacactgggctgcagggccggtttctgaagtacgtagtaaacataattgttctcacattaaaaagaagaggaaaacaaacaaggcgcagatatgttccgcagttttc

SEQ ID NO: 332856 - DNA, 2035 bp, Homo sapiens
  chr6:88875397-88877432
  hyper
cgacgcacgattcgctcacacggaataagaactccacgaaggacacttggggaccacactggtcgtacccgagggggcgggaggcggaaaaagtatttccaaacgcaactctgccaggtcttacccttcgcatcccctggtcctcgggacagaagctcccttggcacctctcgcccagctcaggggctggttgtccgctagaacgaaatatcccccactgactacggagagctctgcagggagccgaggcccccgcccgggccaagggaaggcgctggcgccgcgggagacaagaagaggcggaggcggaaaagaagtggagaaggaaggggtggcagagggagtagcgtgcgggaggcggcgccggcgccgggctgctggcgaggcggggtggggtggagtggggtgtgcctccggcgggcggtcagcaagtcagtccgtccgagcgccggcgtcccggtctccagcgcccgcccgcgacagcgaccgggactggcgccccgctgctccgaccgccggcgagcctcgccccttcccaggctcttcactgggtcctcccgcgagccccgcctggcccggcgtggggccgcccgtctccgccagcccgggcgcccgtcgcctcgtcccgctcgcgcagtccctgccgctccctccgctcgcgctgtctctggctccctctcgctccagtcccatttatgaagcgcggtcccatcacgtgttaatgagcctttgtcctgccctggcagcggcggcggcacagaccccgccgagggaactgcgcggggagggacctgagcgcagcgcccgtagccccaaactttgcttggggcgggggacccgccgcggcgccagccctggggccagaggggacaagcctcttcggcccgcgtcacctacttctcctcttcctcctcctcctccgccgccgcgctcccggaggcccccgctgccatgacctcgctgtgctcccggataccctcacaccctgaccaggccaagaaggggctggtgcatgcgccgcccacgacctcggggccattaatcacacgctcccgggcagcgcgcatcgccaacaccttccgcgggggtcacgtctggggcagcgggctgagccggaaggggaaggggagcgggagcccagaggccgaggcgcgccgggcccgggggtgcggtctcgcgccccctccctccgcgcaaggccgctcccgtggcaggcggcagcgagctgggcccggggccgggctgagctttgggaccgcgctgcgcagcccccgagccgttcgctacctggctgcggtcgcgcggccacctgtcctccgccctcggggcgccgcccagcttcgcgccaggcgccttctccagcgcccgccgccctttcccggcgagaccactcgggcgcgccccgcccgccggtccccgatgcaaacagttgggctccgtaggcggctggctccgcgcctcccggcccggcgcgccccctccccggccacccggggccccgctcctcgcaccttttcgctggaggaggacgccccactccagggccggactgggggctctgggactcgggggcggcagcggcgggcgcctggggagccgcggtgtgctcagcagccgcggcaggaattaggggacatgctcgttaattgtttccactatcagccgccgtctgcctcctgtgtgcacggatcaaaccttaattggtctttacatttatcatggtgaattgcgaacctccaaacaagcctgggccgccgcttctgccgaggaggcgctcccctcccctccgcccccggggccctgcagggtgtgcggcggcggtcgtggttatttagacatctttatctctcgtgagttggatcgggagaggatcgcacggtttccacctgacggagccacgtcacgtcggccacaagggccccgtgctgggcgctgggttcggttcccggccgtcctcttgtggccgccttggcgttcattttatgacaccttgccggtgttcccagacatcatcccgcaccgctccgttttaccg

SEQ ID NO: 332857 - DNA, 776 bp, Homo sapiens
  chr6:89855504-89856280
  hyper
cgttctcattctgctgctgtgggaaataagcaacaacggaaaagtaatcgataatcttagagcataactcaaaggccagagcagccaaggaggtggaagagtcccgagccctgccttctccacagcacccccaaaaccccacggcggggcagagcgcctggtagggtacgagcggccgccagcgtttcccgcgcggcgccgggggcggccccgggactgggggtggtgccctgggagctgtgtggccgcgtgcgcgctccgccggggtcctggaggcctctgggcgcgtgcgcgggcggtcgctacctgcggccgagccagggagcgagagggcgcagagggcagcgggcttgggcagcatgaggcccggaggggagcggcccgtggaagggggcgcgtgcaatggccgctccgagctggagctactgaagctgcgctcggcggagtgcatcgacgaggcggccgagcggctgggggccctgagccgcgcgatctggagccagcccgagctggcctacgaggagcaccatgcccaccgcgtgctgacgcacttcttcgagcgggagccgcccgcggcctcctgggcagtgcagccgcactaccagctgcccacggccttccgcgccgagtgggagccgccggaggcccgggcaccgagcgccacgccacgcccgctgcacctgggcttcctctgcgagtacgacgcgctgcccggcatcggccacgcctgcggccacaacctcatcgctgaggtcggggcggcggccgcgctgggc

SEQ ID NO: 332858 - DNA, 1561 bp, Homo sapiens
  chr6:90120936-90122497
  hyper
aggtgtcctgacaacggtgtttgcgtggatcccgggaaatctgcggcctctcggagactcccacaacagcttggcgagcatccccccgccgccccgcgggtctccccagccactacctgggtgggcccctcccgcggcgacgcggggcgagactgacacccgcagctgccgacgaccctgccagtcacgccgccgccggctgcctttttttagccacgacatctgaccctggcttcaacagcaccgttctgggagagaggtcccagggcgcgcccgcggtcccctcccctccccaaccgccagacgctgcggagagcttggggtgaggggcgcgggaggcaccggctctgaaaggggcagaagcgcgcgctcctccagcccagacgcttactccctccttccccttttccaccgatcctggttgcccctccgccaccagcaccgcgctccctcatttggcagctcgaggtcgggcttttggcgtccctccccaccccaaaccctcaactggacccgctcccctggaccccctccaagtcggtggctcgcgcacggccgggctgggggcgggaaggcgccaaggggaggaaaggggcgcgagccgaggacgcgggggccgggcgctcacctccctcctctgtgccgctgtccggatcggcgtcggaggagtcgggcccgtctccgtagtccgctagccccaccagctcatcctcctcctcctcctcctccgcgtcgtcctcgtcctgcggctgcggcttccccagcacctggctcatcgtgcccaccggccggccggcccggggacggcgggggtcccggggtgggggccaagcctcctagccggccgcccgcagcctatttctgaagcggaggtttgtctagagctcagcggggcccggcggaagcgggggccgcgcgtcccccggcgggcggcgcccaggtccgggtcccgcggttcccagcgcgcccgaagccccctcccccgccccgcccgccggcggaggagtcagccggagcgcggcagttcctcccggaggagggagagagagagagactgcgtgacccgagtcacctgacacacactgtcacatactcacatacacaccccgcacgggcgcgcgcgcgctcgcccggccgcgggcaccactcggcggggcgctgggccgaggacacacatgcacacgcacacgcacacgcacgaggagaccggggaggcgcggggcccctgcaccctcccagactcacaccgacacacgccccgtacacggggcccccgggacgccggccgtcacccaccgcggctgcgcgccaggggcccccacgcgcctctccttcacgtggtccccgcacaggcaggggagggggcgccgcacaccctcaatgtcccccccgccgtcccactcccacacgcccgcagagcgtctaccgtgggcggatgcctcctgcttacagtcctgagctagggtcccaagcgggtggcctcccaacactgtggcgcccagatcccccaccccagagcagcgtgcccaggacaccctgtggacgctcaagagccccaggc

SEQ ID NO: 332859 - DNA, 1067 bp, Homo sapiens
  chr6:90142647-90143714
  hyper
cgcggaaaacctcaccctactataggcccccttcctcccactcttcagaaggcggtggccccacccaggagagggctgcagatcggggccagccccagggcctccgcggtgccacctctctctcgcgagggtccctgccgtgccccggctcgccgctgggaggcgctgcggcaccggcgtaggagccgccggcaggggtggggcggggccggcgggacggggcagagggccctgcggcggcggacgcggcgggctcggccacaggtaacccgcaggagccgagagcgctgcctggcgcgcgggcggctggaggcacggcgctgggcggcgccgaggccctggggccgccggagccagcgggagccagtccccgtcttcgcccctcgccccccaccgtgtcgccggccttggtccctgcggcgcggacgtccggcgcgggagagaaaggtaccaggcgacctcgccggctccctgggacccccgcttacaccggggtgggcgcctcaggtcggggaggacgctgtcgggggaagggggcgctgctccctcggcaccccaggatcgccgactgcccgcggaggagacccggacaccgcgcctcgccccctggcctgcggcctccgaaaacgcccggcgcgagggggtccccccggggcgcctccctcttcgcctggcatcagttgcctccctggaatatggaacttcgggcgagggaggtggagaactttcttctggggctcgtccctcgttctcctgctcgcttgcagtttgaaggaagggcggtgggggcgggggtccgagtaccccgcggtctgcggcgcgtaggagggtaggtccctggcctgcggccgcctccgaatgaccccgtccctccccgccctggacgacagcactagggtgcagtcgcaggagaggggccgatacccctcaggagccccatcggcgaagcctcagcaagtggcatctcccggggtccagagagtcggcgtgctgtctggtttgggtccagacatcagctcacccaagcttatcttgggcttttaagtgtgttgcttccggtagatctc

SEQ ID NO: 332860 - DNA, 2100 bp, Homo sapiens
  chr6:91004776-91006876
  hyper
cgaaggtgaaaaccaggaacgccgcgtctcgccgcccgcgggcccgccgggagactgcgggtccgtctcgcgggtggggcgccccggtccctctcgtttcctggaggccacaggtcacggcgacggcggtgaccgggagagcaggctgcgaggcgcgcctcatcgggccacagacaaaccaccccggcagcggccgcgccggaacttccctcaagttaccaaactcgcctacgcgcgggagagtgctggggatgccccatgcgcccgcgaccccagaagccaggagtgtgccaccccttcacacactcactcccggccctgcacgcttcccctcacggtccgagttcctgcaaatgcttggccagaccgaggtcgccgagatgctcgctccagtctctcccctcgtgggcacctagggtagcccgtgagcgccgcccgccgccgtctccagcggcgccgggctcccgaacacccgccgggtgagcgaagcacagcggggccacggagcgcctcgacgcggggacggggagggcagtgtccccttcataaaccagtctcctgggtgaagcttctggggcttggagactggagtgtagggtgtgtgtgtgtgtgtgtgtgtgtgtgtgttgcaccttgacttcatggaggatctgtgggagaggaggtgcaaggtttccctctcagaagcctggcgcccttaggtcttagctacgcgggacgctttccgacaacccgatctttcgctaggagagattcgatccaggtctgcgccgcgaggcccccagctcgcctcttcctgcgaccctaaacttgggctttgattccccgccggtcgcggtggtccgggccacccggcggcggctgacagctgagcgcaaaggcgccgcggccaaggtcctcgcggagcagcccgggatgcgcacgccgagggttaaggaggaggccgcccggcctggagctgggatcgcaggctgggggccgggacacccgggcctcgccgggccgggggcagggccgcgggtctgacagctgctgcggctcgcgcggacgcgcgcctcctgcagcccgccctccccatgcctgacttattactctctgctcctcctccctctgctgttccaaaacacccttcgacgccagcaaaatacaatgcgcctcggccgccgtaaacagccgggagggagagcacacattcggcgcggcgcggccgccggctcggctcccacccccttcccgttcctagaaaatgccataaaagcgggcagggcgcggggagggcggctgcgcgcccggcggccggggctcccttcccgcgccgtttccccacgcctccccgcccgccccgcgcgcccgctccccccgcaaacttgccccgccaccccgcccagcggcggggcccggggcccggggcccgggactcacctcgccggagaactttgcgtccttttccgcctcctcttccccgcgtcttcccggctcgcagccccctcccggcagccggcgaggtgggcagttcgtgggtcaccgaaagctcgcggaggggacgcgcatcacatggcagctcgttcccagccccccgagtgcgccgggaagggggaggggaaggggcgaggggaggccggggggaaagcgagagcggggcggcggcgggagtgggcaggcggggtggcgagggcggcggccgctcacgttagcgctgtgcgaccgcagcccgggcgtgcacggccgctgctgccgctgctgctgctgctgctgctgctgaggcggcggcggctcggcgctgtttgctccgcgccgcgcggcttgcgctctccccggaacgcccacactctcaatcgctacattgttgacattcggcgctgacgtcacccgctccccattcacaataactttacgggagccgggcagcgcacctccccggccgctggggcgcggtacgcccggcgactagcgtaagccgctccgcgaatggcgctccgggggctggggcggggggcgggggacgggggcgggcgcgcgcgctccgctggctcgcgggagggggcgcgcctcatgccgccgcagcagcagatctccccgctttgtgcggccgcgcggccc

SEQ ID NO: 332861 - DNA, 1033 bp, Homo sapiens
  chr6:91320248-91321281
  hyper
tttgtgtagtaagccgagttctttcttgactgtctgtttatttgggatagcccggcgagggggcgctggagattatgggggtgggggcggtttcttggggaggcctgggtctatggagtggaaaccaatctttgatgaatttggtcacaataacgaacacgggagaaaaaggagaattgaaaggaaatggattctgcgagagactggggagacaaaaccaagaggaaaaacacagaatcaaaaacgacaggaaacactagagaagagtaggcagaaaatagagaagaggaagaaacgagtcggacggagacggggccgggcactgggagcttgaggctgggtctccatccttcctttcatcctctcgggagcccgcagagacggcggcttcagtctcgctttacgggtgggaaagcagcgaccttgagaggttaggtgactgctcaaggtcaccgagctaagtgccagagccaggattctcaccgctcctcaccccagatcggggctccggccagaccacgctggccgccgggggagaggacgcgcggggcgggcagagcgcggccgggggccgggaaggagccggcgccaggcgcgcgcggaggaggcggccgggcggggagccatttcctccccaagcaacggcgcttttcaggggcgcgaccgggaagcctctcttggcgtcccttccccagccgcagtttgggcaggggagcgagggccgggaggcgtctaggctgtggcgaggggagaagcatcccccatccctccgctccccgtctcgctcaagctcttcctgcgccacgggcaggtctcccagcctcgccatcgcggggcgtccccgtcccggcccacacctctttcctctccagccacaccggcgcgccccgagggttgcaggcgggggctgcaccgggttgaagcccagtcaaccacacgtcccagggcttaggcgccgggcggggacaacgtgtctgcctgggctcagacgctgctagggggcatccctgtcggtgagaccagactcagacac

SEQ ID NO: 332862 - DNA, 1352 bp, Homo sapiens
  chr6:94126140-94127492
  hyper
cgagattactgtttattgccattctgctacccctcagctcagcctgggggtggaagcaagggacctaagcagacagcagtgatggccaagttaagagagaaacaaactaacaaattaaaacaaaacagaacccggcccgagaacgtttaatcggaagccgctctcaagtgatccgtgcgtctctcttctgctcggtccgctctctggttaaaccctcaaaagagcgcgtatcccttcccgctcggagcagagtgccgacctccctttgcgcccgcggaggcgcagtccctcggctcacccggacgctgggggccaggcctaggactccagggctccgcgccccggagtcctgtgggccaacaggtgatgggagaggggctagactgggggcgcgccctgacagacccaggcaacgaccgcgcgggcaaaggctggcgtcccggggctggggcggggccgtcggaggggcggggcgggggctgccagacgggcgcgccagccgcgccaagcatccattacgcctctgccagacctgggcactccagggagccggtggcgccctcgctcgagaaggagtcgggaagaggagagtggctttcgggaagaggagagtggctttcgggaagcatctcctctgaggaagaggcggcggcggcggcggcatttacggagagaaaaagtaagcagctgcactttgccttcaagcgtcagactctgacacgcgctccctgtagcgatgataactgaccaacccgagagaacgtgcacaaggaaagtgagggaagggggtttcttatcttcctctagccacccccaaatgccccaggaggcccggcacctgcttcaagcggttcccagcgctagcccttgggtactgcgggccgcctcggggcttgtgaactcctagaacgccagctcttggtcgccgctgcgccctagaggcgtcgccgcctagaagccgggcgcactcgccgcccgccagccacagatcaccaccctccctcccatcacccccgcgccttttatacatcacacttctgcatctaaagaattcaggctcttagaatcagaatcctcttcacgtagcttgcacccagaagagcaaagagaactagacattctggctgcaggaacctctccccctagtgatgcagttatttatagcccaaactccagcccgagtctgcgtgtgttcgcgcgcggggtttcgccgcggcggtgcaaacttttcctctggtccgctattccagaggaatcacagtatgccagggctgaaggtttctgatcgctaacgtcaggggagtagaaatgtggttttggaggggatgagcgtgcgtttctagcagatgtcc

SEQ ID NO: 332863 - DNA, 826 bp, Homo sapiens
  chr6:99272781-99273607
  hyper
ggacagtgtctccccgtcccgaaccccttcccgccacctcctccaccccccgccccgcattccccccggggcgaccctccctccacctgcggactgccccaaggaatggaaaacctgcactcagaagccaccccccaccccgcctctgccgtatctgctaactttgctaacactccccttcccctgccttgtaagtcactatttacgaccgcgtcgactcgcgctcacgcacgcctgcccttttctccagaagcctgaaagtggctgaattcaaacactgacacgtgaaaactctattctgagtgacttagaatctcccgctttgaggttttaatcttgatccgccggtcctgcccaaagttcagagcagctgtccgaaaggtccccgcatttgctgtccctaggaaaggtgaggctaggaggaagggggaggcaacgcagggaatgtgagaggactggggccacactgtgtatctaggaggaaactctgaatcctaatctcaagaatgtaagtctttgcgcagtttccaaatcgagtccatttagcagctttcttcggagcccgggtaccccaagtggcaacttaggaactgggagaaggaacgtgccaccaccgaccacctatcctggtgggaggaggtactgctcccccctactcctcccttttccctgctccctctccatcagcaacaggttgtcaagttgaggagacatcccctccaaactctctcactccccacttgtggccgaggcctgccctgtgttcatcccagacagtcaggcagacgctgagctgtccgcgtcggcgtgggcgcctgtggccagc

SEQ ID NO: 332864 - DNA, 1058 bp, Homo sapiens
  chr6:99276279-99277337
  hyper
cgaactgagctccgtgcctattcattattctctccctctgacctagggcgttaatatgatcaggcctatgactcggccgtgttctgttttcctattttgcatttaatgctgggacccggctgccctagattaccatcgaaaactctcagaaaagacaagaggagccaggaggtctccctgctccaatctgcctaaggcttcctcttcctgcctcctcttccggccaacgtctgcccctatgttcccaggacccaaattctggaaacctgtctttaaaaatacaatcatctctaactttatgatgtccaaaagctgtctagaatgacagattcgaaactctgagacctagcagaagattttggcccacagttattacgactgtggttaactgctctccagaaaagcatctctcccgcccgtgcaccacctgctcccctccccgcccacccccccatccccccccaaccgccgtcctcccggacactaacgacacaattgttaagtgcacttgtacacttcagaaggatttgcattcgtgctgtgtgcaggcagaataagagaactgaagtccaacttcaaccaaatacgcctgtttatcccagggctggagcaacagccctagcccttgaaaatggcttcagtgaaatagctgagtacaccctcctcccacttccccagtccgcctctgtgcgcaggtgtatgttagtgcactcgtccctagcttgccttcctcttcgaaaattgctccagaggatgagagaagccaggagctctagcaagagcttcatcccagtacatttccaaatgctttagagctaaggaggtttctgttgaaatcactttaatttatcaaagagttgtcatcccctactggtggccagccatccacctgctttaaggctagggggagaaaatgcgagcgtgcctgtgtgtgcgtgtgcgcgcacacacacgcgcgcgcacacacacacacagacacctttaggctccattgttaagaggtcatttaactgttagtcctttgaaagtgaaattgcgggaagcaaactggaagccac

SEQ ID NO: 332865 - DNA, 547 bp, Homo sapiens
  chr6:99291279-99291826
  hyper
cgggagaccctctgggcaccccggcatctcaagccagagctgagggcccggaaagtgaggggccgcgcctcagtactggaggcctagagtccatctccgcgaactgggggctctcagggcccgcagaaatcccccttagccctccgaggcccctggaaggagtcgccccgggagaggaaatcactcagctctgaaaagcgtcgcaaacgggcggtgggagagttctaaagcggcctttcgcctctcggaggaggtgaggccgagctggggatgtgcgggtttggggcccagaactgcaccgcagggccgcagaggcgggaagctggccggagaggagtgggaaggcgaccaagggcagcagcaggggctcctgcggggcgcaggtctgtgctggcgccgggcctggcctctgcaggctcggcggagcctcccgattgctcccgccgcacccgcccgcggccactcacccggccccgcggccagcccgggcggggtcgcacgcaaacaaggatgcttctatttactcgcctctgcctgtagatttcta

SEQ ID NO: 332866 - DNA, 487 bp, Homo sapiens
  chr6:99292143-99292630
  hyper
cgctgacccaaatgcagtgaactgcacggcccttgtggggccccaactttgatgtgggcctcggcttggaagaggcgtctgttatttattatttccctcccaccagcgtagcctggtctcccagcgccgtgcccgccgcccccgccccatcctgcgccccagatgcgcgccccgcttggaccagtccgagcagaggggggttccgaaatctgctcggacgcagcatcgctggccgcctgccccgctagttccccgagtgcgattactttttaaaggctcctttaagcatatttccgtgaatctgtttcttgtgctttaatgttactattaattgataagatcagctcatcaaacatactatttcgatagggaattgtaattaaaaccttaatcctgtttgagactttcttctctctctaaattcctttttcttatgaaaggggtgcaaagttcactacaaaaagtactataacagggagattaattc

SEQ ID NO: 332867 - DNA, 327 bp, Homo sapiens
  chr6:99873227-99873554
  hyper
cgtttgtcatctgaagccataccatctctcatccaggtttgtgaacacgtgattgtgcggattgacatgtttcggcgccattttttttgtgggcaaaaccatctctactctggtcaacaccgggcaactgaaccattcctgcacgttactttttaacgtagctggcgccattcccgacccatctttatagtggccagaaagccaagaacgtaagtgttctacacatagggcgccttcaaattttttactttagcaacgtgatcttcctttaaggggaagtatgttccctcctagaaacactcccgccttggagaaggggttgagttc

SEQ ID NO: 332868 - DNA, 650 bp, Homo sapiens
  chr6:100036494-100037144
  hyper
cgactacactgcgcttcctttggagagagacactggagaactaaaaccgacccaagcgctaagcgatctgcctaatagagggaacgccagctgagaccagcgcaaggcgggcgctgggtggcgtgcgcgactgcaaagtctggcatgcccaggttctgctccttgggctcctgctgcgtgagccgatctgcagatccagcaaaagacccgagagcggcttgaacgccagatgattcctccctgaggatgcgccccaggcgttctgccctggctcccagccgcctcccggtgctccggggttcggcctcacacacctgtcgaccgcgtcggcccagctgcggcccaagcctgtgggactccggggagcgaggcgccccctgctccaggctgggaaccagaaatgcagcagggcctcaaaaagaaacaaaattctttccctcggggttgctgctgccgcacaaccttacccagcccgctctgcggatgggtcgtagattccggctggaagccggaggaagtgcatagagggcagcttcaaaagccaaggctgcgctgctttgcgcggggcttcttccctcgcgtgcccgcgccgggtgccggagcagcctccgcaagctgctttcatctcggtctgccggggcagggtcgaa

SEQ ID NO: 332869 - DNA, 283 bp, Homo sapiens
  chr6:100039288-100039571
  hyper
agtcttctggctcccgggaaagcagcgtggcgccgccccagcccccagtccccagactagggattgggacgtcagtcattggctgcaggttactggtctgggctgggcccgcagagatcccaagcgctcctctgtcggtgcttcctcagcgtctgcgtttccgcagatgcccgaggtcagacagtttcgcaagggggctgaagagccaaatggggaaactgatggagcctcacaagtttattcctttcccacgtctgtgtttgtctaagggtgctttctgtgc

SEQ ID NO: 332870 - DNA, 1244 bp, Homo sapiens
  chr6:100050769-100052013
  hyper
cgaattgagtgcgggctcattcggcagcggccggcagagaagcgctgaatgtggaggtgccccgagacattgcaattcagcaacacgctcgctgacttttctttgcaccatgtcaaccgaaagaaccaagaaataagttggagaactccggttaaaaggcaacttgagagggattctgaatacttttattgagccgtttccaacggaggacttaaaaaacaacaaaaaaggcaccacaaaacccaccagcggcgtccgggctgcgtcctggctgccactttggagcctcccggccgccgcgcatccaccggccatgcaattaaggggaaaatggcctcatcgccggcgtgtcatctggtggcgttcccagagcccatcgccgccgccctattcagacccggccttaatgtcccacccgcgcctcgggggccgcgcagctggtccaagctgacccgcccgcccggccagcgcggacaccctcggggggtgcagcccaggccacctcaggccaaaattcggctactgaaagcggggcttgcaggactctctctgctttccctaacctccttcgcctcgggtctctgaccccgcgcggctctctgcatccccgggttcaggactcctccggccccagttttgggattccgcgttgacctaggagggaggggtgtttggtgagtcaccagcaccagggtctccaaggctgagcccgcctccccaacccccgggacaactccctcggtccccgtggggacctgaaactcaaggcctttgagcgacggtgacgagcagccccggagaagtgtggtctgaaagaagccgctcatctcagcctcaaagtcttaaggggctcctttcctctaggcggagccgagtcaggtcacacgtgctcggcgccggccgcattcccagctcttcgctcattcgcgactatgcgccaggcggggccgccccctaacgctgccgggttcgaaagccgcccgcgggtgggacttagctctccgtagcctgcctctcggagggccggcggctgctggtgagcattccagcctcgttagggcaacctgttaccggagagggagccttgcccgaacggttctactgtgggcagggagcaggaccgcccctaaaccgcctttccccgcacctcggtgtaggagagatttcgctttaacggagactctggacgcccatttcaagtcgataaaaaaaaaaaaaaagccgagtggaatgttttgattgag

SEQ ID NO: 332871 - DNA, 1483 bp, Homo sapiens
  chr6:100061279-100062762
  hyper
cgtgccctggacatgagcggagccgcccgaggacaagggcacttcctcggcatcgtgggcggctcctcggcgggggtcggcagcctggctttctaccccggcgtgcgctcagctttcaagcccgccggcctagcgagggcggcggcggccgctcacggcgacccctaccgggaggagagcagcagcaagcaaggagccggcctcgctttgggcaggctgctgggcgggggccgggcgtgcgggcgccccgggagcggggagaactcggcggcgggcggcgcgggtcaccaccatcaccaccacgcgcaccaccaccaccatcccaagtgcctgctcgctggggacccgccgccgccgccgccgcctggcctgccctgctctggggccctgcgcggcttccctctgctctccgtccccccggaagaggcgtccgccttcaagcacgtggagcgcgccccgcccgcagccgccgcgctgccaggagcgcgttatgcgcagctgccccctgcgccggggttgcccctcgagcgctgcgcgctgccgcccctcgacccgggcggtctcaaagcctatccgggtggtgagtgcagccacctgcccgccgtcatgccggcctttacagtctacaacggggagctgctctacggctcaccggccaccaccgcttattacccgctcaaattgcacttcggcgggctgctgaagtatccggagtccatctcctacttcagcgggcctgcagcggccgccctaagccccgccgagctggggtcgctggccagcatcgaccgagagatcgccatgcacaatcagcagctgtccgagatggctgccgggaagggtcgcggacgcctggactcggggacgttgccaccggccgtcgcggcggcgggaggcaccgggggcggcggcagcggaggcagcggcgcaggtaagcccaagaccggccacctgtgcctctactgtggcaagctgtactcgcgcaagtatgggctcaagatccacatgcggacgcacacgggctacaagccactcaagtgcaaagtctgtctgcggcccttcggcgaccccagcaatctcaacaagcacatccggctgcacgccgagggcaatacgccctaccgctgcgagttctgcggcaaggtacttgtgcgccgccgggacctggagcgacatgtcaagtcccgccaccctggccagagtctgctcgccaaagcgggcgacggcccgggtgccgagcccggctatcccccggagcctggggatcccaagagcgacgacagtgacgtggacgtctgcttcacagacgaccagagcgaccccgaggttgggggcggcggggagcgcgacttgtaacgagtcttcccgggaaggggcggggtgaggacagagaggagtcgagggtttattctcgcagtagaggaactcctggtggtgggaagagggacccaatggacaaaaccgtttttgtttttgagagggc

SEQ ID NO: 332872 - DNA, 585 bp, Homo sapiens; identical to SEQ ID NO: 232298
  chr6:100441463-100442048
  hyper

SEQ ID NO: 332873 - DNA, 226 bp, Homo sapiens; identical to SEQ ID NO: 232300
  chr6:100729532-100729758
  hyper

SEQ ID NO: 332874 - DNA, 706 bp, Homo sapiens; identical to SEQ ID NO: 232303
  chr6:100903676-100904382
  hyper

SEQ ID NO: 332875 - DNA, 48 bp, Homo sapiens
  chr6:100912071-100912119
  hyper
cgcaagggatcttccgccgcggatccccgagtccgcgcccaggccggg

SEQ ID NO: 332876 - DNA, 955 bp, Homo sapiens
  chr6:100912357-100913312
  hyper
gttaacaggtggcgcgctcgcgacagcccctcgcaggctcccccgggggtgggaggcgccgcggcctctcccacaccaccgcggagctgcggggctgctgggcgggcgcggggcgtcttctgcttcacctaccttcagtccccacaagcggcagaggtttcgggggcgcccatctcttaactgttctcatgcctaccgtccaacccagcgacaccgccggcctctccgcttcccaccggcagagaggagcagagcattcccggctcccttttctggatcatgaattggaggaggggtgcgtggcagaaagaggaggatgcaagctttgggacgagtgaggtgattttagaatcctggtcctccgtagttgctacgaagccagttcactattattcctaattggaagccgaaaactgccccccgtaacttctttatagcttaagggtttagcttcaacttcactccggggccgcctctctcccgccctccctcaatgccactcacaagccccctcgcctcccattggcctggcgcggccaggggcgaggcgctcattggccaatagggctgagtgacacgagtcggccccgagccgccctccgcgcgcccaggctccgggctctgaatcttactacccgcgggaccgctggactcctaatgagctcagggtgccgggtcggcgctgtccggttgccgccgctgctcgcggcctcctgggccttcccgacgtcgtgcgcgacccgcgctcctcgagctccctggggtcgggtggttgagcgctcagtccagcgcggcggcccagcagaaccgggaacgtccggaggcagcggaggtcgggcctgcgggttaggtctaccggcggaggaggcagggttcgcccaaaggcccatcccgctggcagtcgctggccgacggcgtgcgcgaggccggtttggggagttattttctctttctc

SEQ ID NO: 332877 - DNA, 449 bp, Homo sapiens; identical to SEQ ID NO: 232308
  chr6:100914902-100915351
  hyper

SEQ ID NO: 332878 - DNA, 816 bp, Homo sapiens
  chr6:105388953-105389769
  hyper
cgctcgcggtcccgagtctggcacgtgagcaacgtcgaggggagctccgtgctgaggagcaggaagaaaagaggaggcgcgagcgccagggaggggcgaggactgggcaccgcggggaagtgacaggtctcgcagcaagttgcggttcggaagccggcgcgccgcgtctttccttcgccggccctgatttattgccccggtgctgccgctaagacgcgggcagtcgatgtacttccgggttcacacctttctctccccgctcggtgctgctgggtcggcgcccggtgtgggcactgcgttgccacagcggccgcccaggctcgccgctgcggttgctgccgggcggccaaagccggcttggagcgggagggcggggcggggcagggcgggggcgcaggccacgcgggggcgcagggcgcgagggtgcggcgcaggctggggtcccggcggcgggtcctcgcggccggtgccggctcgtctgggacgcacggggccgcgccgccagagggcgtgcgcacctccctttcgcgctccgcaagccgaactgctttgtaccgggcaggcgtcggggatcgtttttgctttggtatcggtgatgtaaattcatgaattaaaattaaggattttgaaaagaacggggaagaacgcacttggatttaggttgtttttgaaaaggaaaaaccaaagaggaaatgatacgtttgcaggagcattaactgactactgactggaacattggatgcgggtgctttgtgaagatttgtactccaaaaactttttttaaaaattgcacgttggtaaatattgagtgttttc

SEQ ID NO: 332879 - DNA, 205 bp, Homo sapiens
  chr6:105405567-105405772
  hyper
cgatttctctttcctcctcgtgcccgccggagagaatagtttcgctgaaaatttctctttgtcaatgggatcagtattaaatcagcaatatacaagtaaagtatcgcatgctgtaatgtaaaatgtggctgaaaaatggagttaaatgaataagtacacgtatgtatagaaacgtggaagttggtgtgatcgatagaacagtgtg

SEQ ID NO: 332880 - DNA, 44 bp, Homo sapiens; identical to SEQ ID NO: 232322
  chr6:105406225-105406269
  hyper

SEQ ID NO: 332881 - DNA, 1413 bp, Homo sapiens
  chr6:105584128-105585541
  hyper
gacttgtctggccaacaacccgttcccaaaggctcggggaaggaggttgcgggtgggtggcgcggacctcgggtccccagccatcggcgctctcccggggccctctgacctcgctccttaaaggaggagggtccgtggcaacggtcctcctcggccaggcgctctcgggacgcgggggtgaggagtgagcgccgtggcccaccctactctccgagcggggacggagtgggcgacaccgcgcgcccggctgcacgcaggctctgcgcggctcgaggcggccctacagggggcgaggaggaaccccggagactcggcggagagagcagagacggagctcaccaaggggcttgccgccgcagagcgcgggagccggcactcggtggggccgagggcccggggacgctggggctgcctgacctgagcggcggccgctgaccgttgagggtctctgtggccgcagcgcccagacccggggagaagggcggcctccaagggccgggagcccctcgagggcgcggccagcgaggagggacagagggcggcgcccccggctgcccgggcgcgtagaacaagcagctgccgccagggccgacaaagttgctccccgaggggctgagatccaactttcgcttcccgatttagccaggggagcgcgaggccgcacacaacccggcgcggggggaaagccggctgcagctgcgcctcccatccttacccggctggtccctggcggggagcctgggcagcgccgaccaaagttcggagcggcagcttcggggcgcgggacgcggggcacacgggctcagctgctcgacgggagcccgacgcgcgctcctcggcgggtcggcgggtccggaagctccgctgcccgggccgggtccccaagcccgcagccgctttgactaaaataggcatcgcgacggcggcggcaggcggcggcagccagggctggggccgcaccgcgcacgcgcatgcgcccgccgccccgcgccccccggcgggcggagcccggcgccgcggccaggatttcccacctcgctcccgcgactccgctgcgggtctgcacacccgaggactcggtttgaaacgcccgcttatttattttcttgtcgcctcgctacaagattctatccttgtttgggcatgagtggggggcggcagtctcgtgggaccggcggcattcgtcgttcctccttacggggataattcgagaagtgcggtccgggtagggagagaaatcaggagagaaaatgagaaagagaatcctcgtttcccctcaaagttggacgacccactcgtatatctcctttttgggagattcgcccataactcagcacaaacagggaatagcccggaaagcgcgcgagttcccgtccgattgtggcgggggaggctgaacgtttggtccacacg

SEQ ID NO: 332882 - DNA, 975 bp, Homo sapiens
  chr6:105627242-105628217
  hyper
cggcgctggcatgacttccccaggactgacaagggcccctaggaacggcttttctcccttgcaaaactggcctgtttatttcggctccagggtgcctggggccagagtaggacctgcaggaaaagatctgggaggaatattcgcccagaagcctctagggcatacgactcgcgttcttcaggggtcggcgcggataggaaccgcagcaaaggatcccctagacctccgagctgtgagcggcgacacagccgggaccccagaccccggaccccagggcgcggagttgaccggagccgggaagggagcggcgcgggcagcgcggggcagcgagacgcaagcgctcgcaggggtcggcggcccagcagaagccgcgcccgctaagttgcccgaagcggccgcgaggtgcgagggtgcggacagcaccggaaggcggcggacgcagcgcccccgggctcaccttcttacctttccttcccagccctgcccggagcttcagcccggcgcccgcagaagtttcccggcggagcgcgcttgacccgggtggcccgcgcggaagccctcagcgtccccctcgtgagtgcctcgccgcccaccctgcggcgccgggcgcagcgtgaccgcagcgggctccggagcggcgcggcggcgcgggcgggtgccgggcacgggcgcgcgccccggggcgcagccgggtgggcgggcgcggcggctgcgtctgggccggggcaggcggttcggccaccggggtgcggggctgcggagaatcctagcggccgctacggaccgaagtttccaaagatgcggttccccgagtgtacaccgctcccggttgtaacatacacctagtattcacagtcacactaggcaggagcgatgggctggctgctgaaccaaggcaactgcacgcctgctctctcacccccgctccacacacaccgtaaacaaaatgaagaggtaaatcaccatagtggggac

SEQ ID NO: 332883 - DNA, 479 bp, Homo sapiens; identical to SEQ ID NO: 232326
  chr6:106429097-106429576
  hyper

SEQ ID NO: 332884 - DNA, 1353 bp, Homo sapiens
  chr6:106441828-106443181
  hyper
cggatacagctaatttgggggaatgtaagctggatgtcttttcctaatttatgaaacgtgaacgggggtaaggtatttatttgtacgctagttgaagtggggcaggagcactgattcctggacagtcactcaaaagctgcgcccaaagttttaaaaagcgcggggacggtggagagggaggcgaagagcccgcgctgctgggctgggctcgggtgccgcgctggggacgccgcatctactgagcggtcgccgaagacgccgggaggcgaggggcgaggtaagacgccgcctaaagaggcccgggctctcccccggggtcgttgttggaaaagcaaattccacggtgaactctaccaagctcagcgcgtacacagctagcggctctggattggactgcattcgcctaaattgcgtaattaaaaaaaaaaaatacaccactgccaccctacagcgacgcttccgctggaagacgagcggggacgcgtgacagcgcggggatagcttttctattacgtttcttgttctccgagctcgagcccccttttaaaaagtcgctcaccaaaaacggggtgggggatggaggtggggacgagaagtttccgaatgctgagttcatttggacgaggtgaggagaactagggtcctaacagcaggtccagaggactctcgagataggtttagagcccgtccttttgtctggagtgtcgcgggactccagaagtgggttgtgcaagacaaacttccagataaatctttgcccggatcctcctgcggtcaaagcatcagtcctgcccgtaacttcctaacgacatcttcttggagcagattccgcggcggggatggctgggtgtgcaaaccgaaaacagtttgtcagccctccagtcccgccgcgtcgggaatgcgagcccggccacgcggtccgaccgggtccggggacggcgcgcttgtcgcgggagcctcccggcttgcggagggcttgagttttttggcggagacagaggaaagcctctggtcgagaggattagagcgcgcgttttctccgccgagcacgctgcccgacgccgtcgcagccgcgcacttcccggttttgaaagccagagagatgagtcaagcgcaaaagctccggagtgacaatgcgagcttttggccagcctcatcctcctccccattcccttgccttcttttaggtcttcggttcgtgacaagtgcataggttaggcttgcacggaagagggtcggggcaggtgccagctcagggcacctacccggcgttgtcacgttccctttgggatcaatgatctttcataactaggctgggcatgttcgtgcagccctctgggcactctgggggac

SEQ ID NO: 332885 - DNA, 769 bp, Homo sapiens
  chr6:106533694-106534463
  hyper
gttagcaggagaaacggaatgttacaacttttggggcggggggcggggaaacgtgcgttacatacacaacagcttgaggaccagacagctccactgtattacactagctgcaaaaacaatttaacttgctcttttgaagtaagatttgtgtcttttgtacctggggatttgagctgagaaatcagaaactgtgtaggtaaattttaagtttccttaatttaaggaacgtgcgccccctaattctgccgcgccaggaaggagggcgatctggagtgtttagaatacaatagagcccaagtaagcgttgaggttaagtgccttcaaagggaagtaagaagattccaagtcaatgttgaaatacacatgcgaagagaggaagctctcggcggctgtgctagcaatctgggggaaagccctgggctcggccaggtggtgttggccacgttggccacgcccccacttcgcgcagccgagtggctaaggaaatcttaagcagggaggggaagccagacggttaacacagacaaagtgctgccgtgacactcggccctccagtgttgcggagaggcaagagcagcgaccgcggcacctgtccgcccggagctgggacgcgggcgcccgggcggccggacgaagcgaggagggaccgccgaggtgcgcgtctgtgcggctcagcctggcgggggacgcggggagaatgtggactgggtagagatgaacgagacttttctcagatgttggatatttgcttggaaaaacgtgtgggtac

SEQ ID NO: 332886 - DNA, 687 bp, Homo sapiens
  chr6:106808610-106809297
  hyper
tgggtgctggttctgcaacccgcggccgtccccccgcatccgcgacgagggggcggggtcccacggcgcgctgagaaaggcgggcgagctggcgctcaggtgtgttcttccatagggcccgggcggcagagaggaccgcgtcccggcagtcggagcgggaggaggacaagacgatgccgctgtccccgccagcccagggcgaccccggggagcccagcccgtgcaggccccctaagaagcacaccaccttccacctctggcgctccaaaaagaagcagcagccggcgccgcctgactgtggggtgttcgttccgcacccgctcccggcgcctgccggagaggccaggtgagctcctcgcccgagccctccagtcccacctcctcctcctcctccttctcctgctgcgctagcccttggactcctgaccccacttggaggaggggaaagccccggggtctgtttcagtccgcaggagggtacccgggtccggaggggagcgatcgtagccgctggggttgacgaggttcctcgcggcttttggttcagaccaagcaccggcgagaggaacttgtgcccacgcatgtggcctttagtatgactgcaaagttttcatgcaggagcctcccgcatcagcctgctaaccagagcggcggggagtgagggttgttaccgtcctaaatgatggc

SEQ ID NO: 332887 - DNA, 605 bp, Homo sapiens
  chr6:106958136-106958741
  hyper
cgccgcccctgctcccccgctttcccaggctcgcctcctcctcttcctgcccacctctatgccccgcacctacccagtccccactctggcaaaccccggagcgccaccgcgcccattggcgggtttgcttttattggtttgttctgcgctccctcccgccttctggcgcgggcactggatgctagccgttttgctccaggagatataagaagcccaggttttcccccttcctgggagcgctgcggatcattcgcaggcggcccggcaccctcgcataggtgggccggcccctggggctccagccgtgcgaccccggaaccacacgtgtggcgaggaacgggtcccggggcggagtaggcagagtcccaagcgcatccttcagccacacctcctcggctctagggggcggtgagcaaaggcggtcacccctgcaacctcgcccgctacccccacgcactcctccgtgttcacatggtaggaactcccacaggcaaaagcctttccgatgcgctctgcagccgcgggatcactcgggtgtttgaacgctcgcgcgctcctcccattggagctccggctaaggcggggcccaggtgcttgcttcctcc

SEQ ID NO: 332888 - DNA, 1654 bp, Homo sapiens
  chr6:106959524-106961178
  hyper
cggacacaagcgaggagggctccccgcgggagaatccccgagaggcagagggcgagctccccgagagcggtggccccgcagccccccctgacgccgagctgtcacctcgctggagcagcagtgcagcggctgtggctgtgcagcagtgccatgaaaatgattcaccccaattagaacctctggaggcagagggagagcctttcccagatgccaccaccactgccaagcagctgcattcctcgccgggaaattcctccaggcaagagaacgcagagacgcccgcccgcagtccgggggaggacgcttcaccaggtgctggccacgaacaggaggctttcctgggtgtgaggggtgcgccagggtcgcccacccaggagcggcccgcgggaggactaggcgaggcccctaacggagcccccagtgtgtgtgccgaagaaggctccctggggccccgcaacgcccgcagccagccccccaagggcgcgtctgatttgccaggtgagcctccggccgagggcgcagcgcacacggccagctccgcgcaggcagactgcacagcccgccccaagggtcacgcccaccctgctaaggtgctaactttggacatctacttgagtaagactgagggggcacaagtggacgagccggtcgtgattactcccagagcggaagattgcggtgactgggacgacatggagaagaggtccagcggccgtaggtcggggaggcggagggggtcgcagaaatccaccgactcccccggcgcggacgccgagctccctgagagcgctgccagggacgacgcggtgttcgacgacgaggtggcgccaaacgcggccagcgataacgcctcggcggaaaagaaagtgaaatctccgcgggcagccctcgacgggggcgttgcctccgctgcgagcccagagtccaagcccagccccggtaccaaagggcagctccgaggggagtcggaccggagcaaacagccacccccggcttcgtcccccacgaagaggaagggcaggagccgtgccctcgaggccgtgcccgccccgcccgccagcggcccccgggctcccgccaaggagtccccacccaagagggtgcccgatcccagcccagtcaccaagggcactgcggccgagagcggggaggaggcggcgcgggccatcccccgcgagctcccggtcaagagcagctcgctgctgccggagatcaagcccgagcacaagaggggcccgctccccaaccacttcaacggccgggcagagggaggtcgaagcagagagctgggcagagcggccggagcgcctggagcttctgacgccgacggcttgaagcccaggaaccatttcggcgtgggcaggtcgacagtgaccactaaagtgaccctgtaagtagccgcgcaagtcccggccgagttgctgtccgcacacgtgctgggggtccgctctgagaggctcggggtatctgcattgtggaagaaacgtctggtcactgaactttcccctccatgctgaacttaagatagtgaagggccagtttacacagtcaagatttaagatgacacctgtggcagcctcctcagttaattccctttttaacacaagatttaagtttaacgaatgtaaaaataggatatccgttgaagctcaac

SEQ ID NO: 332889 - DNA, 1077 bp, Homo sapiens
  chr6:107810018-107811095
  hyper
aacaatggacacccccatatcgcattgtgtcaggtaattatgaagtgtcgaggcgcgggaaggagaagccgggaacgtcaatgtgtcctctgcaacgtgtgggagcgctcagagccgcgcgtatcacagaaacatcatccagtcgtcacccccaatgcctcaacccagggacagggacagactcaatcagacctcggccccaggcgtggcaggagagggccaaagaggggacttgtgagcgcagagggagcgagcaccgctccatggagggcaggcgctagctgggaagtcgggaggagaaagtgcaaccaggcggggaggggaggatcccaccggggcgtggcgagggcgttcggggtccgggtgagcgggaccctacgcgggaccgtgcgctcccagaagctcccactcagcccaaccttttgggcgaaacccaggacacccagataagggtgcaggcggggtcacgcgtaaagctgttactttgaagcagggcataagtgagagagagataaagagagaaggaccaaggggaaaaagaaatgaaggggctgaaggccgagatgtcctacttctaagtagttctttgagaggcaaaagcttcattgccattgcagtccgaggcagcgccgcgtggaggaccggccgggcggggcgcggggacctctccaaggggtctccagcctccgcgcactctgcggtggcccccggagggggaaactattctggcagctcagtggggggaagctcgtccgggctgtggtttcctttccccgagaccccagcgttgcacccccgaggcggcaggctcagtcaaccctccccgggggacggcggccctctagccaggcgacctcaggtctcgcgacctcccgccgcccaaccttctcctttcacccccattcatttttcctcagcggctcctaggacgggctcaaaaaccaactccacacgcaacccagcccacctcgcggagctgagaagcagggctgggttccgagcgggcgccggcgcccctggcgtgtggcggggaggtggcggccgcggggggcgccgcgagccgcccgtgcccgccgc

SEQ ID NO: 332890 - DNA, 838 bp, Homo sapiens
  chr6:108435964-108436802
  hyper
cggtttagtcatcattcctaataacaaggatgttgctaagaacagaaattttacatgattttcatacattcagcccttccccccacgtgtcattaaaaaaaaaaaaaaggcttagcctgcctgcgatttccaacttctctttccacggatcgaccgcggccttggcaaggacttgagtctgcgttccagccccttccgctcccagcgcgcacgcagcctctcgcctttgcgtcggcgggttgctggttgccggtacccgctcagcagctaggagccttggggaaccctagctcttagcttccccgtctggcgaggccagagggccaagttgctcactgggctgtgctgagggataaggggagaaaagaacggaaatcgcagctacgagggctagagggacggcgcggctgcttgaggacgggtcgcctagcggtgggcgagtagggctgtgcgtaaaaggatctagacagacagtcgtgcgcccgcagggttgcaggacaggggcaggccgagttgtggcgcgtgtgtgtttgtgtgtgctcgcctccgggttgcgcgctttcagggctttggatgccggggattttgaggacccattcaaagctccgagggggcggaggctcaagcaagccagggaaaaggtcccctaagcctcagagcctgggctgcgccccagacaaagtgcctaatgcagagtaggctcttaataggtttgcattggatctaaacgaaagctagtgaaattcgtacatgattctaatgagagatgacggccaggtgttctcagcagcccctggccctcacggggcgacctgaaagttcccactctacccgagac

SEQ ID NO: 332891 - DNA, 63 bp, Homo sapiens
  chr6:108439510-108439573
  hyper
cgaggcccccgtccataatcgcaggtgtcggcgtggaaaggagccacgcgtgcacactcatgg

SEQ ID NO: 332892 - DNA, 1158 bp, Homo sapiens; identical to SEQ ID NO: 232342
  chr6:108439796-108440954
  hyper

SEQ ID NO: 332893 - DNA, 163 bp, Homo sapiens
  chr6:108455187-108455350
  hyper
cgcagcttcccccagaggccggcgctattaactcccggggcctcctgcggcggcgaggcggtggcacggctcctcccgctccctcggcctccaggttcaataaggattacatcatggagcaagtatgcggggcagcctgagaatcaaagccgtcagcaccggc

SEQ ID NO: 332894 - DNA, 1232 bp, Homo sapiens; identical to SEQ ID NO: 232343
  chr6:108478326-108479558
  hyper

SEQ ID NO: 332895 - DNA, 354 bp, Homo sapiens
  chr6:108484828-108485182
  hyper
cgccttaaatccgaggtcccccgtggcctgcagcagctttgcctgagtagaaggcagcccgcactaaggctccaggcttatttgggacctggtgggcgacggggcctcagcccctcccgcctaccctggagcttgttgccgccgttaccactgaaccagtcatgccagaaagtcatcacgatgatttcagaactgtattgtgatttatgcaaagcgcgccgataattacagccgggcgcacagaacacaggatgcatatgctgcgggtgtgtgcgcgcagtgttgtgcctttcgccagggctgaatggggtgtgtgtgtattccgtaggcatcttcttgacaccatgcttgatc

SEQ ID NO: 332896 - DNA, 849 bp, Homo sapiens
  chr6:108487794-108488643
  hyper
cgaattctgagcgcccagggagcagcgcagcgcgcgactgacacccacctgtcccgcccaggagccttgcaggctggagggcagctggagagcggcggcgcccggcggcgaggcgggcgctgccggccgggactcgggcagcgcccaccaaccgctccgccccgggacagccagcatgagcaagccagccggatcaacaagtgggtacctctcgggccgccgtggggcctaggcgcgcagcctggggcgagcgagcggggaggctgggggaggtcctgcctggagcgctgcgaatctgagcccctgagagggattccagcgggcgtgtgcgttcggcccagacctgtagaccgtgagttggagcatttcgtggagaggggagagccgtttcgttgcctctggattgcttgatcccccctgtctggtgcggtgagaaggttacgacccgcgcagcccaccagtcggatgagttgtctccatttagccgccaggtgctggatgggggggccatgggggcgggaactgggccgcagctccaggcggtagcacaataacacactcgctcaaaactccgagctccagcgcgcaaaagcaactctgtgcaaagcggattttgaatggaatgctttgcaccccgtttctagctatttcaaataatcctgcaaactgggaagcagaaacaatttaaaagtcacattttccttaatcctaaatccgcgtaggtcataactggggaatttaaagtatggcgaaccactctagcaaagagaggaccaaatccctaatcccaaggacttttcgagccggagcccagcagaggcaggagtgcgcggcctgctccctccgtgc

SEQ ID NO: 332897 - DNA, 1162 bp, Homo sapiens; identical to SEQ ID NO: 232347
  chr6:108489390-108490552
  hyper

SEQ ID NO: 332898 - DNA, 309 bp, Homo sapiens
  chr6:108490821-108491130
  hyper
tgagtgcagtgcagcggagctccagacccggttcctgagcgaccaggaactcccttgggcgcagtgacaggcccgaaggagtggaggacaagacccgctgtgcccttgcctggccctctccagcccctccctcccacagcacaatctcccctcccgccctgtgggaggggggcgccgagccggtggccgccgcgccgcgcgcctcccctgcccgcctttgtcgccgtccgaattcccatgctactctttttgacgggtcactggtggctctataggcaggtgctgccgcggggttgtaattacccggcc

SEQ ID NO: 332899 - DNA, 274 bp, Homo sapiens; identical to SEQ ID NO: 232351
  chr6:108495725-108495999
  hyper

SEQ ID NO: 332900 - DNA, 1246 bp, Homo sapiens
  chr6:108496290-108497536
  hyper
gcaggagccgctggcgacccctagaattccccagggcaagacccatgcccacatcaggaacttgcgccccacagtcatctccacacaggcagcgcttggggggaccccactctccaggggaccggcgcgcattttctgcctccggtcctaatccctctttgcagcccttcgtggccacccttaagcctgctagcctgccccaggatcttaaaatctggatagtctcacggggaggagatcatacaggctggaagttcgcggtgtgttgaaaaagggagggcagagacgcgaaaacgcggaatttccagcccgtgtgcaaattctccaagatgccaaaatcagtacggccattgggccgatgtgagtccagggccttctctctgttctacagaaaagagggaaagggggctggagaggcagggtaacgcccgtgggtgcctcggacacccagctctcccaaggctcttaagcgcgcaacagcaagaaccaggacgtcagagtgcttcctgggcctggagcacggtccgagctgcgtcccccgctgcagcctgtcgagggcgccccaggcccaggcagggggcgagggtaatgggctggaggacaccgtggggcctgggaacagggtgcgagtgggttttgctgtgaggcggcccgggccgggtggcagctccaggaggagagagagccccttcctctgcggcgcaggaagccggagggagcgtccaacctgttgaacttgtgtattgacaagttgtcaagctcggcaggccgaagattgccctgaattaatttgtttgtttaaactgttggtggtaattgtcacatctcccctgcctttctccagcatactcggagacgggttctccctcgttccattccctagcaatcccggggctcgggtcctttcctcctgcggccctcggaggccaaaagctatttctgtgggggcggggcctgcgggtagggaggcttgttcttggacggagctggaaaagtctgcgcagaaacgaggtgtctggcgtgcgcgacgctccctctcttttggatgggggcgaggatacctggctactccagcccagagggtctctggtttccctgcgaacccccttccctggtggggaggagccctggaccgaaggagaacacacctggtcttacttgaggctctgccattatcgtggcactttgagcacgggcccctcttctaagcctcagcttccgaatctattcagtgtagtggttagac

SEQ ID NO: 332901 - DNA, 116 bp, Homo sapiens
  chr6:108882931-108883047
  hyper
cggacaaacggctcactctgtcccagatctacgagtggatggtgcgttgcgtgccctacttcaaggataagggcgacagcaacagctctgccggctggaaggtgcgtacccacccc

SEQ ID NO: 332902 - DNA, 451 bp, Homo sapiens
  chr6:109330991-109331442
  hyper
cgcgaggtgagcgtgcactgtcaggaaggtgcagcacgagtcttcgggcttcagggacaggggaatctgccccctacacccctgctcggccatttacctagaaccaaacagcagccaacctcgagactgattctgacagcaccaggagtaatgaagttctctaaattcgataaactattgaaatttcccttcttcctttcccataatgcccaaacgacgctgaatcggcagcagaatgcaggactttggcctataatcaatgcaaaattcattttgctaagctacgtaaaagctataaatatcactcccctacacagataataaaccttggtagcctatctctgaatcgtcttttttcctctcaagtatattcgaaggctttacaatttctaatattccttcataagcgccctccctgggttataaagacagaatttcaatctctgaaatc

SEQ ID NO: 332903 - DNA, 1114 bp, Homo sapiens
  chr6:111408744-111409858
  hyper
cgatccccgaggtgttcgcgcgcgccagctgtcctcgcggccgcctgcgcgctggccgcctgcgcgctgccagcccgcccgcccgccaggggctccgccgccctcgcctcggcctcgttagcccgccaggagccccgcagctcctccgggagcccgctggtaactcgcgtccctcgcgcttctccggcgcctgaggggcccgcctcgggccatggtgctctcccaggaggagccggactccgcgcggggcacgagcgaggcgcagccgctcggccccgcgcccacgggggccgctccgccgcccggcccgggaccctcggacagccccgaggcggctgtcgagaaggtggaggtggagctggcggggccggcgaccgcggagccccatgagccccccgaaccccccgagggcggctggggctggctggtgatgctggcggccatgtggtgcaacgggtcggtgttcggcatccagaacgcttgcggggtgctcttcgtgtccatgctggaaaccttcggctccaaagacgatgacaagatggtctttaagacaggtgaggcgcggcgcccgccgaggccagcctgggcgacccgcgtggggcccccgagcgcatcccgcgtgtgggctgtgtctgcctccgagtgtgcatgtcggtgggtccctgtgccagagggtgcgagcaggggggtctttcgagttgcagacagagcctgccgcttctggggcctcggggtgcccgtctttatatggaatccagctgcagagctgtgtgtttgcaagcaggtcgcagaacttacttgccgagatcgtcctcctttcccctcagcagagcagacgctaacagtccacaggagcccttccttttattgtttgaaaacaaacagaaccccagaaccttcaaccccagtcatcgccctgtcatttttgtggtctctttcgtgactatgccagttatgtagttcttcacctgcctccctgggccgcagaggggtgtgcgtatgttggcggggcggggggtggagtttggaggaatgaaagagatttgtacgaaggtcactggagttccaaagggggccctgcaagagtcacggttccgtgcgttcccgtcccccc

SEQ ID NO: 332904 - DNA, 943 bp, Homo sapiens
  chr6:112193858-112194801
  hyper
cgggggcggagtctgggccagcctcgcccccaagccaattcccattttcacccggcgcccgcttgcgggcgaggaaatggggtccccatccccgcgctgcctcggggccgcaccccgcaggggtgtcctccggtgcaaccgcgggaagaccccaagcaccgactccccggcagccccgcggagcgccctggcggccaagggaccgcagcaccgggccctgcggcgggggcggcgtgcgcgggggcgccggcggccgggcttctccgcagcatccccgaggcctcccgcgacgcatccccgccgcctgcttacctgcgcggcgctgaggctccggagcccactcacatggtcctctccccgccctcctccggcgcggccgaggcggctccggggggtccccggcgggcccgggagccggtgggccttccgagagcaccgagggggcggcgccggggtgtccccggcccggcggccgaatccctccctggcgcgggcggcggccgccgggcggtgcggcgcgggcggcggctttgtgtgcgcccgggcggtcctcggtgcgctgggagaagcgcggcgcgcccgggcgggagaggacgcgccgctcgcacaacaacctcgcctctactctcgccgccgggcggcgggcgggtctcgaaggccttcggctcgcggcgacccctcctcctcgcccgcggcagccccctcctcgccggctccgctcctgacagatggcgcaactgcaacgacgcgccgccgccaccagcgcggctgctcgctgctactcttgctgatgctctgcccctccagctccggaggggagcgaggagggggcggggcgcgcctcgagagtgacaggcccggctgccctatcaaagagccccttgggagctgcgagccgcaaccattggcgcctggggcgtgggcgggacggcagtaggtgggg

SEQ ID NO: 332905 - DNA, 737 bp, Homo sapiens
  chr6:114176491-114177228
  hyper
cgataccaggcaaataggcgtaccagaaagaaaaggggggaaagctacacggcagcctggtaacaaaggagcaataaaagcagcccccaaatggagggctaaggacgcgtctgggagaaaatctgaaagcgagctagcagtcaccccaatttaaaataggagggggatgcggaggaaggggcatgattcacgttgggggtggggggaaatcaagagccttaaatgggcttttgggaatcgcctggatggtggtgtcggatcagcccagttggcttttcaagttggaactgctaatacaagggatttgcgtccatcctggcggctggggtcgtgggccaggccagcgggctctcttaagggtaataacacgtttgctggcaagatgcatttctacggaaacgtctttacatcagctctggggaatatgaccatggtcgaataatgcatctgaaggaactggacagtgagaagacgaagcttcacgtaacaatgttcagcttggtgatttttaaagcaacgcttgaacaaagagttactggcttgaaccaaccgtctttttcactcagagtgtgacctatttccctacaatgagcagaaaataaaactgtttgagaattcagagccagcaccaggagaaatgaaccattccctcgactgcttctcaccttcataagcgaaagattattccttgcaagatcaccaaatgtaaacgagaaaaggtggtctgattttgccac

SEQ ID NO: 332906 - DNA, 72 bp, Homo sapiens
  chr6:116691827-116691899
  hyper
cgggcgggggtgcgggtggagtccgggccgggtggcgtggaaggccgagcacagctgcgagcggcgagtccc

SEQ ID NO: 332907 - DNA, 1208 bp, Homo sapiens
  chr6:117586022-117587230
  hyper
cgaactttagaggggcagaagggcacggcccaagagagcagaattggggtgtgggacaggcggcgggaggaccaggttagagggagcgaaaggaagtggattagaggacagcggttacaggtttcagccactgccatttccccgcagaggtagctcttctgcgccctggaggggtacccggactcccacatcctgtctgccacgacccggactccctaggggattccaagggacagcaccgtcctccccatacatcatcaggaaccgaaagcagagaatttgccccacctcggcacttctggaagcacccactcaactacagtatgagacaagggctttcctaagagacctttctccaactttctttctctgcgtgtatgagcccggatcccttcgtccccgcctccttctctctctctctttctctctctctcctattttgtcctgggagattcctactcgcggtgcgaagcctcggatccgctgggaaccgcatagtctccggcacccttggccgcatgcttgtcagaggtgggccccgggaaacacactcgctgcccctccaacaagcgtccctcgctccccattggccccccggtccccgccccccaccgccccctcccgctccgcagcccccgagtggcgtcagcacgcccgccgggcatgggctttaaatgcccactagcgggagctcaggcgcttctgccctggagcgcggtcgggagtaaaatcgcaggagtgggagggtagcgagccagctggattccgagccgcggagcgcgctggctttgctccgcctgatgactccagagcgcgggtccaagcgccgcccatgcagcacccctgagctccggggaaggagagttaatgaaaaaacacttaaccgtctccgctgcggagagtcatgagctgtctggatgttatgtaccaagtctatggtcctccgcagccctacttcgcagccgcctacaccccctaccaccaggtacgtgtctcctctggggactttgggaaggagtgcgcgccccccgtttgcggcggcatggcctgtacgccaaggtctgctgtgcctccgcgcgtctcgggcgtccgaccacgaccggcgcagccgggatgcggggattgccggagccgcccccagttggtagtgcaattagctaacccctttagctcgcctgtttgctctcgggaagcagctaagccctgct

SEQ ID NO: 332908 - DNA, 899 bp, Homo sapiens
  chr6:118228010-118228909
  hyper
cgaatgtagtaggagcaacatctaggattctccgtttgggtttctaatccggggccggcacctgtctcggcgtcctgccgctgtcccaggccggtggtgctggattccgcggcgcttgggcagaaacgaggaatccccgccaactccacagggaggatctattcccagcccccttatccccctaaaaaacacccaaaccaaaacaatcaccacaacctagaccgtgggcctctgcggacggggcagtagagggtcgggggcaacaaggcacctcggcagcgccctctggcgagaggagagcgcgcaggtcccccgcccgcgccccgctctgccgccgccgccgccgccgccgccgccgccgccggcgcccccgcccggctctccgggttcaccctcggtctctcactccgtgagacacagacggtagctttccgaccgagcggggcacaggctgaggcggcgccagcacaactgccgccgcgcgccccgaggagacccgggcacgaggaaacaaggagaaatcaggactccttccccggaaccgaccggcagctccgcgcccccgcgcgacacccttcgcagccacttcgcggggcgggccaggacttggggacgcggctcgggaagagccggggcgggcggcggcggcggcggcacgggcgcgagggtgcgcgcactgggactggagaggagtgagtggcgggctgggcggcggcggccgtagccgcgggtgcctccccgcctcaccgcttcgcaggcagcaccgcctcccgggccgcggccgcccggccgggtcctctgcgcgttcccgggcccggaaccggcacacgatgcacccggctgcgttctgatcgccgccgcgcctcagcctctgccgcgatgatcccccctgagcagcc

SEQ ID NO: 332909 - DNA, 534 bp, Homo sapiens
  chr6:118241125-118241659
  hyper
acagaggcaggcagcgggatggatagagcggctcagagggaagggacagagccgctttaatgtgctaatgaggggaagcccagatgccagcgggctcagtggagctctttgtgacgccgggttcccggggctggctggagtctctgtacctatctggatcctgctgcaggccggggaaacactgcgctcttagagaggggccctgtcctccacagatagccccgcagaccctcggaacgcgggtggacggggagggcgtgcgcgagcctcggggcttgggtggtggctggaaaagggagaaccaggaggcgggggaggggcgctcggactacagaggaccggacgggggcgagtgttccgcggggtgtgtggagtaagagctgggacggacctttgtagctttgcgaaattaaccgtttttcctccacaactgccagctcggcgaatggccttcaagcccatccaacaggagataatctgtccttggaactagtgcaagtcagtttttaactacttgcggagaaagtctgaaac

SEQ ID NO: 332910 - DNA, 182 bp, Homo sapiens
  chr6:119030565-119030747
  hyper
ctggcatttctcagcgcatgcggctccccactcggctttctggagctctgccttttggcgacagagcagctagagctcctctcccctcccccatttcctctcataaagataaccagtaacaacaattggcgtgtgtgtgtgtgtgtgtgtgtgtgagagagagagagagagagagagagagc

SEQ ID NO: 332911 - DNA, 600 bp, Homo sapiens
  chr6:122931153-122931753
  hyper
cgcgtacaaccggagggacagaaaacacgatgcgacgtcggaaagcaggaagggaattgaaattcccgcagtcacgtcacagaaatcttagcagaacctcatcatcgcccaagggaactgggagtggcgggcggggaggacgcgggttgtgtgacgatcaccgataattagttggtggttaacgcacaagtaggataaaagagctcgccccaggctgccagcagaaaaaagctaccgtggcacgtgccccggggagtgatgcggtggcccggtttgcacggagagcgggacaccgcctggggagccgcgctcgtagcctgggggcgggacgcggcggccgctccctccgcccccgagtagctgccaccgcctggctgcgccccagcccagtagctcagacgcggccgcatcccggtggactgtagaggcggcagcgagctagagcccgagtcgcagctccgggccgcagagcgctgggcgagcgcgagcgccagggcaccggcagggcaggcagctgcgcgcggctggtacgtacctggtggagcgggcgcgtgagtgggtgtccctatgcgaggagggaggagtgggacttgggaagtc

SEQ ID NO: 332912 - DNA, 479 bp, Homo sapiens
  chr6:122932019-122932498
  hyper
cggctctcgcgccagcaatgccaagtctttcccctgggcggtgcttaccaagccccgggtagtcacgagcggccgcggggttagcagagacccgagtactaacccgctcggccagcgtccggctgtgtggctttagccaagtcacctcacctcactggcctccgtccattctttggataaaatatggaggtgggtagaccgagtaaactcaagggtcgcccgtagctattggattttccctgctcctaggaccccggcaggccgcagggagggacacgagtgccaggtggtcgcgggctgagggagcggagggcctgtgttccggttggtgctgatgctagccccttggggaaattcctgaaggtgcatttcggagccaaatgaccctgccttgcagcaggtcccttccaagggagctgagagggccaggtcagaccggtcttcgtagagctccccggggaacgcagccaacggaactc

SEQ ID NO: 332913 - DNA, 917 bp, Homo sapiens
  chr6:124124391-124125308
  hyper
cgagcgcgcgcgcacacacacactcggttcgctcccgcggagtggctctgggagcacgaccgacttcagctcagcaaaccgcggtcatgccgcccagactcctcgccccgaggccccggtccccgccgccgccgctttcgcgccgctcctttccgcctagacaccgccgcctgcggccgcctgggcggcagcccctgcggtcctcaaagttggccccctgggagggggcggcagggagcaggatgaaggatttgttgtaggaggaggattcacacatctgggcgaagggaggggcagcgccgctgctgggacgcggcgcggacccgcatcattgcgcgcagcagccgctgcagcagccgccggggaccgcggagccgggacgcccccgctcggcccgcgccccgctccccgccccacccccgcccgccgggcccagcaacgcagggtgcctaggagccgcgggctgcgcagggaggcgggcagcggccctcgcgcgcttctgccgcccccggagccggcgcgcggcgagcgcagggcgagcgcgcgtcgggcggcggccgcgctggggggcgtgaggcgagcggcgcggagagcggcaggggcgaaacttcgcgggccagatgcccgagggcgcggcggcgctgccaggctgccgctgctgcccctgcgggccccgagcgcgcctccgcaggcggcactgcccgcggcgcggcgtgtgcaccgagcgagtgaaggtatgtgtggcgggcgcggctggagctgccgccgccgccgccgccgcgccagcaggtcctaatgcctgtcacttcccaggacgctggcagcagcagcagcccggagcccccgagccctcggcaggtttgcgtgtccttccccgcgatctgattggataaagtgggggctcgacggtggccgac

SEQ ID NO: 332914 - DNA, 1375 bp, Homo sapiens
  chr6:126068722-126070097
  hyper
cgtttggacgcgcccgctaattgcccgtgtggcaaacatgagttgcacctgcaggcatttgaattcagaaaaacgtgcagccctcacggaaagttgtgacggtcgagcttgagcctggcgggccgcggagcgttcacctgcggccgggaggtactggcccagggcgctcggggcgggaggtggcaggcgaccggcgcgcgtcaggctcgtcacccgctggattgcggggccggagcggggacggggtctgggtcctggcccgccctcgtgcagccgatcggaggccccgaaccccgcgccgacccagccatccgccctgaggccgacaggggagctggggttcaccgacccccgcggccccgccgtcgggcgcggaccccatccagccccacctggccccgccgagtgtgtgctttgcctggggttaagtttcagaagccaagatggaacgattcgggtttctattcacaaggttattgaaggcatggcggtggggaccgcgcaaaagagatgagagtgtggggggaaaggggtttctgttctaataagggcttagcacgctggccgcaggtcctccgcgccgaccgggctccttcccgctctcccccgggccaaaccccgccagggtcccgtctttcccagtcgcgtcctttcctcttctccccgccccgcgccgggcttgtgtggacagagaacggagtgtcaaagggacgccctgggccgatccccaggaagctatgaatccctccgtgacggaggggtctggggatcgatagacggccctttctcagaggctctctccactactgaccaagcggccctgccaacgtgtggtttccggctggaccccaacccagccgccgccagtctcccggcgcccctggctgggtctcgctcagtccctgccctcgcagacgcacagcggggtggccagttcaaaagtcctacataacttggagagaaccagcagctagaaaacctgttttaaacacacagcttgagttttatacaacccacgttgtccaaggcacgaactgttggacacgaattcatactttagaaaccaaatctaatttccaagcgccaatcttcacctcccggactctaactctgcggctgcgagtgcatacaccagggggactggaggagactggaggcaattatctggataatccaagcccgaaaaactcgaacttgaaaatatacgattatgtcctgaaatgcccgcgtcattgatctagtctttcctaccatcagagctgacacagctccagtccacgggcttctccgcggggtctaggatccacagtccctgggggctgaagacccaatggaagtaactgatggatcgcaaattggaaatcgtaacgtggcc

SEQ ID NO: 332915 - DNA, 315 bp, Homo sapiens
  chr6:126071152-126071467
  hyper
cgctcgcagagcgtgagttgggatggggcaagggatgtggattttcaccgtaggggtggagtagccaggatgggagacgccactgaaaggcagagcgcaggagttggcgagggagggtcctggctgtcacagttggacgcgcgaacggcagcgtctgggcgacaggcgatgtcccagccactgaaaccgtatttgggggcactttcaaaatagatcaggagaaaataaaaacaatttgatttttgatttttagagataccaaaatcacaacttgatttttggaggaattaaagcaacctgcgatgtcaaggctac

SEQ ID NO: 332916 - DNA, 1894 bp, Homo sapiens
  chr6:127439825-127441719
  hyper
ctcctgctcgcgcacgccagaagcagctcggggtctctccgccgccccttggccatggccgctgtgccgacggcgcccgctcccctgcgctccaggggcccccgccgctgcagccgcagccgccgcagcttctgagcccaaggggccgccgctgcagccgccgccgccgccgctcgcccgcccggatcccgcctgcggcagttgccgcacaacatgctacctgcggccgccccggcggctcctggaaccccggttcgcggcgatgccagccaccccagcgaagccgccgcagttcagtgcttggataatttgaaagtacaatagttggtttccctgtccacccgccccacttcgcttgccatcacagcacgcctatcggatgtgagaggagaagtcccgctgctcgggcactgtctatatacgcctaacacctacatatattttaaaaacattaaatataattaacaatcaaaagaaagaggagaaaggaagggaagcattactgggttactatgcacttgcgactgatttcttggctttttatcattttgaactttatggaatacatcggcagccaaaacgcctcccggggaaggcgccagcgaagaagtaagtgcagggttttttacgcgtttgctccctcccgccgcgttcacctgtcgggtcgctttgcctgtccggagccggctcccaactgcagcggtcctcccgccctgcgcctcgcagaggagatgcaggttcgggctttgggggtatggacggcgtctttcacccttgcctctcggcgcccctgccttccgcagcatcctagccggtgcgaggggcgggcggacgcggcgctaaggtggctcccgccccatggtaacttcaggttcgcgggaaagttcggtcctgggttagactcgcacccgggatttgtgctttccttttgaggatcggacaggggcacccagccgaaggcacttgggactcccagacgcaggatgcctctgaccgctgagtaaatgacaagggaggcgcggccgcggtacccgctcacctagcgcaaccgcctcgcgcggggagacctcggctgggcccttaggctggactccggtagccgaacgcccgctacccggccaggaagccagggagcgagcgcctgcgcggccgcatccccgacacgcaccagcggagccaaagggcgcgcgaggcgatggggttcgcgtgtctgcgcgtttgcagagctgccggacgtcccccgcccgagggttgaagacagcaaaaccccagctgtggggagccggaggtgcggagtttccaggttctctcttgtcacatgtgagcgtctgtaccatctctggccctttcaagtgtgtcccctgggacacacacgtacagagagtggggtctccctaaagattcgcctcctcgctgcccttaatgctgttatttggagggttggattgtgatggcttcttaagacggtgtcctagctggaattaagcggacaccaccacggcagcctcaacctgggttggtctgtctgaaaggtagaatcttcccaagatgaagggacagatgcgaaggtgtcacctctcctcgctccagggtagcctggcgccctcgctgctctagtgtctgtgttcccatggggagtcctttcgcagatctcagagcaggggcgaccctggctctatggttgggggcgctggtggagagagggaggaggaaacttctcctggagctcgcgaggggcaggaagcgatgctgctgctctgggctctcgcacctccgcggcgtgcagcccaggcccagcggccccacctggtttcccaaggggatccctctcccagcgtcccgcccgggaagcctttcggggcagacgtcggggcagcgcggaggacacaacacc

SEQ ID NO: 332917 - DNA, 757 bp, Homo sapiens
  chr6:127441979-127442736
  hyper
tattcttggcctccgaatggtgtgtactctggtaactccccacccactctttcattccggcccggacgcggaaggggaggcctggggttcagcggtgtccacgcgcctggcggtccccgcctcctctcctcccagggtctggcctggggaattgagtctcagggtcagtgggcatagggagcccgggctggagcgcaacccactctgctttccatccgctcttccagcccgtgcccattgggcgtcccagagcacgctctctcctttacccccaccgaggacccccgggctgggagccacacacttgtcaaggagggacagggtactgagtgtcagaggcgtctcgctttgcagttttggggcccctgattctgaaggaagacacaggaaagaaagcttgtagtccttttgtgcccacctcccccagcgaggaccacggcgcaggaagctttccccgggcgctgcctcagggagctgtgggatgatgcacctctaggttgggccgagaggagtcaaaaggcaaactgcttttcgacctgccttaatcatctcaaggccaagtcaaaggagacctctgtttgtgttgaggggatgaaagaaggaatagtggaactgggttgcaattccaatttttctgtgggagtgggactgggagacagcacccacagcgatgctcttgctccttcgcacttgagtctgcgtttgcggcttggtttgctggtgcaatcctggtagaggggcgaccccttgcgtcctc

SEQ ID NO: 332918 - DNA, 1750 bp, Homo sapiens
  chr6:127836030-127837780
  hyper
gagccttttgcgctcggctttgcggaggcggtactgcaggatccggcagtttttgttggctctctccaactcgtggcgcatttcctgcagttgacaggcatcctcctcgaagaaagtgtccctcatctcgtccatctcggttctcagctcatcgatctcgttctgaggcggtgacaggccgcgtgtcaaaatcaaactcgcttccagcccttccgacacacaccgtacacaccccattccaattccaaattctcagctttaattgccctctctctccacgagacaggagtgacaaggagctgagtacagaagaggaaactgggggaaaaaggcccactttaggccctctctcgttctcttactctacctctctccaggaagaagtgtgacaaaccattataattagagaaacggaggcccagatttgaatttaaatgaaaacctcgcgttactgagagcagattcaaattccggcaaggcctaggaaaccccctccctcctttcttgttctcctccctcttcaaggctccctaacaggttagcagcctctgatccctgccggtacacgccctaatcctcccaggcccactcttcccatcccccagccgggtccccccaccctcctcaccttgagagtctcgttttcctctcgcagcttctccatctcctcttgcatttcttcctgctcttggagctgctgcgggtgcggctgcgacgaagggggcgctgccgcctgcatgcccccgccgctcgcgctgccctctgcgctctgctgggggccctccgccgccgccgccattggggaggcggaggcgacggccagggtctcgcaaacggcaggggggccagacaccggggagctgcggctactgctgccgccgccgttcttagcgtgcatctgagccgcggccgccgccgctgccgcccgctccttcttgagatggaactggatgagctcagactgcagacatccttctttccagtagctccctccaccaccgctgccgccccccgcaacgccgcttccggagtttctgctgccggttcctggggttttgcccgcagaagaggaggatggagaaggggaggccccctccccgccgctgccgcccctctgctgagcgcgtacgcctttccctcgccagcccctgggcggcggcggctgcggagcgcccccctccctttccccggagccgccgccggctcctcctccttccccgccccctcctcccccttctccgagcggagggggttccccgagtttcgagggcacggactctagctcccgaggcggctcctcgggcggtccgggcctcctgccgcccaaagcggccagggtcgcggcgggggccgcttcagcaccagccacaggctggacagctcccggagcggcccctttgggcgccaggggcgtcgccttctcggccccacctccgcctcctcggatgctggcgggcggccccgtgcggctcccggtcttgttaccctgctgttgctgctgctgcagctgctgctgccgaacagaattgagtttagtgccggcccccactggggaccgggtggccgcgattgtctgtcgcagcgaactgtccctcggtctagcgggtgactgagctcgctgctgctttctgctgctgccctccgggtgcagacgagcctcagtggctgcagcggcgggagaagctgctgctgtggcaggggcagcgcccccgattggtggctgactcatggctatgaacctaccagatgc

SEQ ID NO: 332919 - DNA, 1884 bp, Homo sapiens
  chr6:128840521-128842405
  hyper
cgagacgctccacttgtctccttttgggttctccggcagaaggcagacatttacagtccgcttccagccccaggccggatccggggagcgcggggccagagccccaggccggatccggggagcgcggggccagcctggcggtggttttgcccgaggagcgggctcccacgcgcgagtcaggcttcctccaccaggcgcccagacctcgatgcccatgaacgctcagagtgggtccttagaaccgcatttcaacacatcttacagggctccgccaacacacacacagaacatgctccaagcagtgcccgagcgcacagggcaagcccgggagcaacccagagctgggggaggagaaaaggggactccgggagggacggggaagtagttagacaatagtcaggggaggttattcccgggacaaaaagcacctggcaaagcgcgccgaggtcagtcccttcgaatctccacatttctgacaatggcttcccagggaatttgtttaaacacccaagtggcagacagcaacaaacccgcaccacaagcaacagagtgccgtcacgggagtcgtaactactttttctttctctcttccccactagcccggcgcaggccacgcgagacgccgaagccagcaggtccccacactctccggctagaccgtgccagcctgagccccgagcaagcttcggagaggaacaatgggtgccccgcgtcccacctggcacgaactctggggacagccctccctctaccctgtgttccccacccccggacagagagagctccccacgatccttgtccccagccctagcggggacctggctcacccctcgtgagcccaggactccaggcgttcgtcggggacgccccccggccactcacctgcggagaactggccttgggccgatcccaggagaggccaaggagagaggagcaagagcgccacaaaagcaggcagcgccgccgccgcagtcgtatccatgccgagtttgggagaagtttcaagcagctttgcaaagagctgccggggggatcgccgcgaaatccacgacggaggagcgggccgggcctcgcggggtgaggacggtgagaggacagccgcccgcccgccctttttccttcttcgcggtcgccaaactacctcaggggcgaaagcgtcgccagcgtcgccggccggccgcggcggcagctctccatgctcggcggaggctgctcctgttagtcaagagttactttgctcggggagggacgggggcggagccgggggtgacgtcgccccgcgggctccgggcgcttctgaggaatgcgggctcgggcgcggcgccgccaccgcctcctgccggagagacgcgcgccagccccggccgcgcgccccgcgccgcctttgttcgcagcctgggccccgccgccagccgctgctcggagggagcgagcgagaaaggggagccggcgcagctcgctgccctgttccagaactcagaatttgagaggcgagagttcggtaagccgtgcgaccagacgaccgaggacgcgcgcagagaaacccccgccgtccgaggagaggcgtcctggggttccgtcccaaggtggaggtccccccgagcggttgctgattgaaaggggagtgtggaagcgccctgaggaaacacccgcctgccttgaaaactccccgttccttattcttgtaataaggaataagacaccccacccccatcgaaaacttgtcccttattcatagaataaataaaacttgaaccagaataaacgatcagtaactttccagcgtgaacagctggcgtgtctcctttctggtttatttgtcattggccaagtatttggatttactctgcttcactgactttgcttgttgctctgaaaccctcc

SEQ ID NO: 332920 - DNA, 451 bp, Homo sapiens
  chr6:130088306-130088757
  hyper
ctataaccatcttccgcaagtggagagcagggaacgccagggtcccaagaagtgacgaaaagcgataattagatctcctgcaagaatcttccctaagcactttcttccgtgacacacctactttgtggcatctacgcgctcttcacggctaaccacaatcctgtcatttcggcttattcatccagcagctgccggaaggaccgggctgaagcgtggccacgaggagggggatacccgtgcgagcgctgagccggcagagcggctgcagcccacgggctcctcggacccccgctgctgcgccgctgcagctgaccgtgcgaaagccgcatgttattgggtagagatcagctttccaggaacaggcatcagctgtgcacgagcccggcagcatctcgagacaagtgctagccggtgttggtgcaaaccaaagcttgctatgtgctcagaaagc

SEQ ID NO: 332921 - DNA, 1357 bp, Homo sapiens
  chr6:130686392-130687749
  hyper
cgttggctttgatgtttggagtcgaacatccgcactgctcatcgaagacccccgtgcttcagttccctctgtcttccatttcccccgcccatggttctcgcccccccaagccgttctccggaaccccttgccgggccggcgggaagcgtggaccgagcgggccttggccgcgtcttttccggccaggtttggtttagctcgcgcagcgcccgcgcagcccgccagggggaccccggcccgccgggcggcatctgaggagaaagcgtccgaggggcgtggagccagggtcctgcggtgcctgctccgggaatactgcgagtcggctggagctccccagccgctccggagaactgggggagccgggtccctggctcggtaaccggtggtcccgcggtagctagaggcgggccccacgggtgggtgtgtccgtttccgcacgccagccttccagcccgggaagagcgcctgcaagcgggtactttgttcccaaagatgggttttgtctgcgggtgatttgggctctcgaagtgcaactttgtggccgggacgcggatcggccggcctgggctcctgcagagcagatcctgtctgcgtcctccaggaggagtgggtggcaggactggggtttcccacaggttttggggcggcggcgagattggcacggtccggggtcgcaggcgcgcagccacgcccctggaagtccgccccggcccccgcccccaacccgcctcttcggggctttatggcgtgaggtttggggctgggatccatctggagccgagcagaaaacttttcccctcccgttcccggtcccttttgtctttcttggacgcggtggcggcgccgcctgagcggcgactccctctcccctgcccggcttgctgcgcccggtgccctccgagggcaggcgcgcctggactctgcgcccggatggcggcggccctctgtgagcaccggcagcggcgcatcccctgccccgaggcctccggtgcccccccggcgcgggcataggggcgcccccaccctccgtccgcttgcaccccttgccacccgccccctcgcctgactcatccgcccgcggtggccgcccgagccctgggatggggagggagaccgcggctgcccgcggcggccgagattcccgctgacgcccccgaccctgccgccttcttcgtccgcctccagaggcgcccgacgtcccgacagctcctggagtgagaccaggactgagaacagggagaggcgacccgacccccagggcccggtgctcaggacaggtgaggggaaggaaagggtgctgacgggagtggggaggtgggtgggcggccaccgcagccgaaaccgggcacttcttcag

SEQ ID NO: 332922 - DNA, 365 bp, Homo sapiens
  chr6:131383375-131383740
  hyper
cgatctagagaagcataactgatgtcccaccacagacctcaggctgctgggggcagcgtctgcgcctggggatggcgtccccagacgccgacttcaaccctgtcgcgctcctttaggttctcctcgcccttccccgctgctcacctaaaaatgctcccaaccctcggcccccaggcgcaggaggagaaaaaacaagccatctgtggtgagatggcctgggtgtgggaattgtaaggatcggagcacgaaacacgcgtccctctccgcagctcccagacggcgcaggcggcagctgggggcgcggacgcgagcctacagcgggcccgacccgcaccgcgcgtggggctggcgcgccgccctcgccc

SEQ ID NO: 332923 - DNA, 705 bp, Homo sapiens
  chr6:132722209-132722914
  hyper
cgggccccggggacgacccgcacctgcgccctctctggggtccggacgggaccgggctcggccgggcgggctccgggaggagacgcgcttacctggaggtagggccgcccgtgggccaccccgcccacgacgatgtcggcggacgccatggccccggtgggcgagaagccgaagcccacgtagcctgcagtgcgcacctggaggcggaaggcgatctggctgccccgctggctccagcccagccagtacttgccctccgagtccaggagggtccggtgcggataggttcggcccgagccccccgccgccgtcccggggagcagcccccacagcaggagcagcggccagcagcacatcctcgggcgcctcctgcccgccggtaccggcctccagccgctggggagtgaggagcagaacgaggagcggcagcggcggcgagcgggagcccagggaccgcccctcgggccggccgcgcgcccgcccgggaggggcaggacccgctctccccgccccgggccgcctgcagggcgcgccgcgtcccgtccggtcccgtcccgttccgtcccgtcgggtcccagccccgccaactctcaccctgcccggcccttccagcggatccacttgcagcccccgacccctgacttggtccccgaggtcggggctcggtgggaaggaaagcgaggggcttcccggaaagaaagggag

SEQ ID NO: 332924 - DNA, 2534 bp, Homo sapiens
  chr6:133561662-133564196
  hyper
agaaggcttagacacgaaatgtcatttcagcaatgtgcctagagaagctctgacgccgccttggaagtaagtcgttgctgcctgacctttgggcgtctgggacggatgcctatacctgcacccagcagcactggaaggggcccaggcccttcgcagcacagcctatccccagaccgcttagtccttcataacatatatctccacggaaaagggtatttcctcccgtcagaaaaagcgccccagtctggtctgggttggtttttatttcacgttgttgcaagtaggcgaagtcccttctgtctcctcccttggggtaagtggaaaggagtccggcagggggcccgcagtggcctgcacaggggaactgggtagcgagagagttccaggcaattccgggggctgccccacagaagcaggtggggatcgacagtggctctccggcccagggaggagagcgcggtcgcgggtccctcccctcagcctggaggctgcagccgctcgagtcggcccgggtgggggcggggtgggggcggcgcggagggcacggagattacggcggcgccacccgggacatccagggccccgaggccctgggcggtccccacgcgagatcgcaaaccatgacaataggcagtcacccgaggtcaaataaaaacggagtgggtcccccgcgcgccgccgccccccgcgtccctggcggcctcccccgaggcccccggcggcctcacgagcccgcagtagccggtggcgacgtcgcccccgccccacctccctgcgcaagtgcgaggctgccggcagcgcggcgcacgctccggccgttcccggcttccgcgcaaaacttccatcctgtccacgtgaagttgtcgctgccttagagagggggaaagagctgcgggaaaagccggggagtgacgactgcggcggctgggcgcgctctctcattttcttttcttctcctttcccccctgtcgcagtccggagttttggctcctctcctttcctcctccccctcggagccggcttctccctccgccccgcttctcccccgcttgtgtacgctatttgttgtggggtggccgaaggggatgtcctgttttcaccagaggcacagcgcgaaggggaaacttcgacactggaaggaacgagaataaatacttaattacggacgcactgaaccgcggctgggacagacacttcgggaacccgaggcggaccgggcgacgaggtgagtgaccccttcttccaacccccgccccagggctcccgggggagcctgagttgagagaacccccaaactttccgggaaagtgcgcgaggctccgccggggacgccgagcgctgggtactgaggacgcgcagctggacggtgcgtgggcgcctgcgtccccggggggcgcttggaggccgggtgccccacgcctgagggcccgggccgctcggaccgcagcggtgctctctgccctagaagacgtccccaagccccaagggtcccttccgagcctgcctgtcccttccggggtcggcgcggagcctgcgcgtaacggagttcatccagcagtccagcgcgcggcttctacctgcaccccgcctccacctggcagaggcgcgagcatcggggtctcccccacatctttcttatgacgtgtattactttctgatgaccccctagatggtccaggcgcgaggatgctgacccagagtccttcggagggtcacaggcgcctgggctttcccggtgccgggtgcgtgtgtactttaaaggctcgcgttctaatctccaggcactgatcgggcttttcaactgcggcgatcccactttaatagtttttatgtggcgtggactgaatgtctcctgcagtttgccagggtcggtgaaattagaggcgccttgtcagagcagtcgcgttcattggctcgagtagcgggtgccatggaaggcttataacttctccaaaggaagggacctggctgggtagagcaggtttttctctccttccaagcctgctgggtctggggaggcagtggaacttgaaatggctcggatttttagcgtggtgaagcgaggtttggaagtagacgtgtgtgtgcttgttttattctgcgccgcacagcaacccgaactttcgtttggtagcacttgaaagagttttctccctttgtttgcgagattctgaacagctcggagcgattagggaatttgcggaccgagtccggtggcagagctggggcgaaagcagagagcgcaatttaatttttgtcatctcttccctgcttgggaggatagtgtttcccttcaccaccacccctctttctccttcctatgaagacaacggatttgcgcctggggtgagagtgtgtgcgggagagtggtgtggagactgtcctctctcaccgcgtctcctgcgcctctccccgccatcccgagcgggcctagagagtcattcatgaatcttaacctgagggcaggggaggaaggtgcaggtccctctgccctttctgccaaggtgcagaatagcgcccgggcgtgtgttttg

SEQ ID NO: 332925 - DNA, 1037 bp, Homo sapiens
  chr6:134210316-134211353
  hyper
gctgcagaagtcctcggggttccttctcacaactctgcgaaggggaaagggttgtgagacccaaccagaccccaactccagctcccagcaggaggtggctgcgccacactcgggaggcctcttggtttcagggtctctctgtctctctctcaccctcttcctcgctttctctgtctctctgtctctctctctctctctccctcgtccactcccccaaacatgtccaccggctccctcagcgatgtggaggaccttcaagaggtggagatgttggaatgtgacgggttgaaaatggattcgaacaaggaatttgtgacttccaacgagagcaccgaggagagctccaactgcgagaatgggtctccccagaagggccgcggcggcctgggcaagaggaggaaggcgcccaccaagaagagccccctgagcggggtcagccaggaggggaagcaggtccagcgcaacgccgccaacgcgcgagagcgggcccgcatgcgagtgctgagcaaggccttctccagactcaagaccaccctgccctgggtgccccccgacaccaagctctccaagctggacacgctcaggctggcgtccagctacatcgcccacttgaggcagatcctggctaacgacaaatacgagaacgggtacattcacccggtcaacctggtgagtgctcccggggctgcagctgcagtccaggcgcgcccgcactcccgcctgcggtgggcgcgagtgcgcgcggggctgggagtgggggtgtgggcgcggcggtgacttacacatctcgaccaccgcgggcctagagcctccagggaccggaggcgggcggtctagacacggccctcgctctctgccctaccagcccccggagcgggagtgatttatgcgagggtttgacgtggcagcccaattaaaagtttgcaagtgtgttgagctggcacagaggagggatcccccgctcccgctccatcgccatcctccctggggtgcagtggctgctgcggaactgagaacactgacaagacgctgcgagc

SEQ ID NO: 332926 - DNA, 440 bp, Homo sapiens
  chr6:134213962-134214402
  hyper
gtgcgtttagctcccgccacgacttccggcggactgggtttaatttaaacattttccaggctacggaacagctcctaagggaagattaagttgagataaacagagaagcaaggccgaggagcctgcgacccgggtccctcactgccccagcgcagcccgcggcggccgatgcgccagatgccaccggggctgtttaatgttcggggttatgaccgcagtgtttacaagacgtcttcggttatttatactgttattcctcgcagagagccttgaaacttccgcttcatttgctctttcttttcgattttttacccttttttctcggcttagtttggtacctggagcgagagcttctccgcccttccaccaaccccacaggccgcttcgcgggtggagccctctgcctggccatggaggaaggatcccgctaggctggtccc

SEQ ID NO: 332927 - DNA, 381 bp, Homo sapiens
  chr6:134499457-134499838
  hyper
cggatacgtgatgggtggagcaggcgccccctgttctgtcccagcaacctactaagacttccgaacaggaaggtgacacacggcggaggggtgcttgaggggagggggagacgggggagctgtgtgtgacgcgcgcctgttaacactgcacaggcattaggttgccctgtagctgctattcaaactcttgatctgttcttccttcctgtcgccagcctctttctttggtccagatagtcctcctactgggaggaatccggcccctttcctcatactccctggtggcgaagtggtccgagtagcctcccgaactgtttgtaaatgcaacctagagggcgatcgagttctctgggagaacttgctccatatacgcgtatacgc

SEQ ID NO: 332928 - DNA, 436 bp, Homo sapiens
  chr6:134638727-134639163
  hyper
ctcagttcttcactcgcgcattctgcagcaccagctactgcagcaacctctccccactttcagttgccaccgacagcggcttttctccttccatcattgctccgaaacatatgcatcaccgctgcaggaccctgggggccggacggtgggatacggccaatctccggggagatgctgtggctcttaccgagcgggagaagggtacgcctccccgcccccagctacctggctgctcttccgcggccggcgcggggagcgagtcgctcttctccaggtgatgcgctcctggaggcggcttgagagaggagagttgtttttgattgtgcaagttccagtgggagctgtagttaagcagctgagagaaggagtaagaaagagcagaagccagagggagggagggagaacagcgccagaaaggcagagggagcgagaaggc

SEQ ID NO: 332929 - DNA, 392 bp, Homo sapiens
  chr6:137112609-137113001
  hyper
cgctgggcggtgggtggatccataggtctatcgcacaagtacacacagactcttgcacaagcacacacgctctctccggagcggcgagcgacaggagcagtcacgcagcggcgctcgctgcccccaaagtggggcaagaagtaaatgcttcccgcccagaaaaatgaaatgccccgaagaccgccagattaaacgcgggtcccgaccgcgcgggatgggaaaggggtcacacacgcacctgcattgtaaaagcggtccagcacggtggtttctccaaagtcgagtttcccaaaatgcagggtttccagggtggcgcccactgtctcgcacgcctcccgcaagctctgcagggcctcgctctcggccaccaccagttgcccttggctcgcttc

SEQ ID NO: 332930 - DNA, 2362 bp, Homo sapiens
  chr6:137241797-137244159
  hyper
cggtaaatcacgacttcagcactttggctgaagtgtcgcgttcagcacagaggtggaagtaagaggcagaaaacagaagaaccacgagagaaatggatcctgtctattaaggcaacgtgatgcagcgctaaaaggttaggaggttacgattcccggggctaagagaaataaactgctggtggtgaacgaaaggggtgctggagcgcagcgatctcgaacctttcccttatagccaaaccctggccaaggccacaaatttcaaatcgcctgaaaaccaaactgtctggcgcttaacggttacctcggctgagcgaaacccttggctgctgctgatttaactacaggtccgcgcgagttactttccagggaactgaattcagaacaaagagttaccgaagccttactccctctccaaaattagaattccctttttctcttagtcatataggaaacacacagttcacaagtcctgtggtgcaaaggtgtgaaccctggcccagggaggtggtgactctccccgccctccgcctgccggttgtcctgcttccgaaagcaacccacgacggtcccgcagggtgagggttccctgggatcagttccctgggatccggagaacgccacgcggagtctccctgcagggtgaggggccccgggttcccgccccctccccctctactctcccattctgcgagcgcagccagcctcccctcccacgcttcgggaagcgtcgcccccgagctcctcggttcctggtggtggctactcgtgttagtgacttcgtttctgcgcgtttgcttattttcatctttgcctcagttcgaatgtgtccccgccaccaggccccgctgctgggcgagaccactgaaccccctgaaagcttccccggagccgcgcgcataatcccgggaccctctctggaaggcgtgcggagagcggtgcgcgtggcctggcaccggaaggagccagcttccgggctccgaggcaccccctggacagcgccccgggccgcgggttcctcctccgatgcccgggcgtcgtcgccgggatcgggagcttcgggggcccgccggcaccgacggttttcgcttccctggcgggcagctggacgaggtcccgccgctgcaccgggagggacagtgggtggaaaaagccgctgcagcgccggggcgagggggctgggggcgccgtcacttgttgcgaccaataaacggcgctcgatcctgatgcgctgtttctaaaatctttagctgtgtcccgatccctccaacccaagcccctcggccaggaggaaggggcaagcgagagccgctggctctgtggggggagaggggcgccgcgccccaagagcccccgtcccgccctgcggcagccgccccggggcgcccagccgcccgcttccctccgcagagcgtcttccctgacggtgaaaccgcgcgggacacaacccaccgcggctcatcacccacttacaaatagctgtcgctaggattcccgccactcctctcagaccggcccccccgccacctctgccacttttcggagtcccccgccctcgtcactgcctccccggagctgcggggcagtcggacgcagagctgcctaaccgcaagaacgcctggccggagctgccctctgcagccgagccggcgccccctgcccttcgccgccgcgctgggcgggcgcccccgccgccctcactccgctgctcccggctcctcgcgcgcaggtcgcggagctccgccaccgctgggtgcggcgaggccggcgcgatgcggcagctgtgccggggccgcgtgctgggcatctcggtggccatcgcgcacggggtcttctcgggctccctcaacatcttgctcaagttcctcatcagccgctaccagttctccttcctgaccctggtgcagtgcctgaccagctccaccgcggcgctgagcctggagctgctgcggcgcctcgggctcatcgccgtgccccccttcggtctgagcctggcgcgctccttcgcgggggtcgcggtgctctccacgctgcagtccagcctcacgctctggtccctgcgcggcctcagcctgcccatgtacgtggtcttcaagcgctgcctgcccctggtcaccatgctcatcggcgtcctggtgctcaagaacggcgcgccctcgccaggggtgctggcggcggtgctcatcaccacctgcggcgccgccctggcaggtgagcgggcccccgcgccgacccccagccgaccccacccaccccgctccgtcgggcagagaccgcggggatcactgagttcaacgacctcacttccagatggggagactgaggcagagagagccggagagctttgagagtggtcgctcagctc

SEQ ID NO: 332931 - DNA, 852 bp, Homo sapiens
  chr6:137244173-137245025
  hyper
cgagacccagagagctccccagcgccccaccaagtccccctgccccctaatgtcctggcttccgaccctcgcccatgcttcacccggcatcgcccttcctgtcgccccctctcctggtcttcccctgtcaccccattctccgggagaggtgggagggccgcctgagcctgggagctggagtcctccaagcctggaccaagccggaaggagggggccgtgaacttccttgggtcacgaggggctggaatggaggtgggggatgggggcgaagctgagggttcccggggctactgcggggtgtctcgtgctgcgcagggggctgcggccctggggcagacgacccaggtgctgagcgagacgagagcctgggcagggggaagcttcactgggggccagaacaggcgttctcccccgcgcctggcccgctccgggttgcaggccactggctggggctccctctccctttggtgccccacggggcaggggctccggggtgcaggtaccacgcgcccaagtgacctcggtgccagctcggggaagccacagcacctgccccgagggcatctgcgctctccggggcctttgtcttggacagaggaagatggagtgacccggggatatggcgggaaggcgctctgagcactgagtttggctgtcgcatttgacacgggtggccgagggacggcgggcgtctgtcactcaggaatccggtgggcagagctggggcgcgaacccagtctcctttcctacccgacgcgttttccccgtgggtccccgcccacgccaacctgctgtcttctctctttttccttcccgcccgggctcggccgtcctcctcgtgcgccgcaggag

SEQ ID NO: 332932 - DNA, 498 bp, Homo sapiens
  chr6:137310868-137311366
  hyper
cgcagtcagtccaaagccaccccgggaaagatgtggcccgcagcctggcaggctgaggacgtgtagggggctgcaccaggcgcagcgagtaaccctactccgtttctgaacgcacgcgggggcgctgccaatgtaaggctccctgttaggaacgggtcctagccctcagcggagggtcacaaagaaatgagactttcctggcaagactgtggaatcagatcgagccatttttaactgtaaatgtctggctttgcctgcagcatttcaaggaagacttgactgctgtgcgttgccgccctccgccccgctcccctgcacttacccacccacctcgcctgcgctgatccgcagacgcgcgcggggaaaggcacgcgcgatgctttcccactcgctcagcgggcgccgctcactggaaactcgctccggattccgaacccgagagcagagcagagggaagcccctttgctgagcagctccttagtggagggcaatgaacgc

SEQ ID NO: 332933 - DNA, 259 bp, Homo sapiens
  chr6:137365631-137365890
  hyper
cggcctccgcgcacctcgtcctctgcccgcccgaaagcgaaacctggccggcgggcaggaggggagagctcggcctcgagctctgcctggcggggccccggcctggaggcatccccgacccgcacctggcggcgcgacccacctacctgcccgtccccaaggcgccgccaggagcaacagcagcagcggcggcagcggcagcggccgcagggccgggcggccgggagcccgcatgggcggcggggctgggtcacatgtc

SEQ ID NO: 332934 - DNA, 2608 bp, Homo sapiens
  chr6:137808706-137811314
  hyper
cggagtagacggaagggaggcgagatggtgggaggctgaataaccaggaggagaaaggagtcgccataaaatgcacccgcgccaccctccatgtcccccagtggaattgaggatcttgcttgtggcaaaagtgcgttcttggcaccacagccccgcagctggggaggggggcctcagtacccggcttccgcaattttccaggcgtggaggtgaggggtgcttgcgtgtaaactgtggcaacccccagaatcaggccctggctcctgcactttcggaggtgtctgttgcagaccacgaggaaaagaggggtcttactcaagtcagggccggacagaactccaaaacttacgaggacagctatccaacactgcctcacagacccttaggcgctgccccctctttgcccctgtcctcctgcggtgcgagaaacccgaccactctgcttctacccgaaccccaggacgcaacagtaaaatcaaggcccgtcgttgaactcccaggtctgcgcatccctccctcctggctccctggggtcttggccccagcaggtccagtacccatccccagagggacccactaccctgggcgtcccagggtgccaggcacgatggcctgcaatgggggctgcaatttaaccgaggcgagttaaattccttttgccggtgcctggctgcgaggacaaacgtccgtactttcgttcgggagccacgggcagtccaggggcttgggttagaagcaacggctctcttccaggggctgtgatccgggtcggccagggagagcgaggccccggggtcctctgtgaggtccccagcgaagagacgcagctggggaaggcgccgcccccgggccccctgcgccaccctaaccgggcctctccttagcaaagttgacaaattcttgagagtgtcagcccagggctgcgcgtgagggcgctgggaccggggaggaaagagcacctgccgcgctcagcccgactttgaatttgtttgttgttaccgtttttgtttttcctcccagtttccataaacgcttagtatttcgaggcactttgcaggtgttggcgcaggtgatgatgggcctcgttggactctgcctcccacgcatccttttgttttctgcgcgccagcctgtctgactgtgtcctgcggggaccccgagacagtccggggtcagggcgtagagactcatgcttgccacttgacccatccgcaacccggggaccccctagcccgtcgcggagctggagtttgggcttccggctcccagctctccgccctggatacaggaagagggcgggagaggtcgcgcacccgcgccgctcggcggggatcgctcacaggggctccggggccaccgcgagcgcggactgcggctgctggcgggctccttcgtcgtccaacgcaccccatcctctcccgccccgcagtgtcccagggaaggcttcactgaaaacagacgctcgacggaaaactgactctgcaggcccgagctttcggagtttgatttctgtgggccccttaaacgggcactgggtacaggagaggccccaactctctgcagggacggggagggaagggcactcactctcccgcaagttttcctagaggcgagctgaagatgcaggccacctccctcccgcacggcccctcccttggcctagttctgtccaaagacacttcccagccctcgagcggcggctcctccactcgattcctgcctacacgtgaagagcttggacccagcggggctgcactcgggaggacaggcccagatcctgcacggccgggaggacacctggccccgctgtcttctcttcacagctcccctttctcggcttcggcctggagcggtgcagggaggggtggacctggggtggccttaagatatctagcctgggtgcggagacttgggagcccacccttagcagtcactcctcctccccagtggagggtgagaaaaggggaacagagggccccggagtctctggaagggacgtggaacgcgaagttaaatgttggtgtctgagcgatgtgctggtggggcagagggggttccagcgtcctcccagagtgaggaggcttttgcaatttctgctgaatgcgtcagtggaggcacaaaaccttgcttgacctagcagctgggaaaaaaagaagttcgaggggacacaaggccccctgctgctggagcgaggaaaccctgggcttggccagctcgggccgcttctccctgcccgtttgcgggctgtcggcctcagcggtcccagaaacaaagatctagtgagcccagccgacgccggcctcattttccctttctaagggtcactttcttccgccctctaaattaggtcatcgcctgggaaagcgccgagaggtttctagtgtgggcttctcaaggtgtctccgcccaggaggatttcgccatccatttaaacgtaaggcggggtttaatctggaatgaaaggatcgtcgtggtgtttccagattgaatgaaaaactaaacttgcaaaatttcgagaaagtgacaagtttacaacgaaaaaaaatcccggccgaaacccattttcacctttgcggtcatgaaatcttttttctggcgtcgataattc

SEQ ID NO: 332935 - DNA, 682 bp, Homo sapiens
  chr6:137814511-137815193
  hyper
cggccgacagccgggccatgttggctgtggagagagcggacaggtgcggcggcggcggcatctggcagatggtgcaggggcagggcagaccagcccagtgctggaagccgctgcccagctgcagcgcgggcggcgtggagggcgccttgagtagcgagtggggaggccggatggtgccgatggcgggaagtgaggcggcggacagcggtgacgaggcgttgccagatgagagcgcgccgcccaagatggggtgcaccgggtgcacggagttggccgcgtgcgcggggtggccggccgagtggcccacggtcccgcagtgaaaggccgagtggtggcccccatagatctcgccaaccagcctcttcatctcctccagggagctggtgagcatgaggatgtagtttctggcgagcaggagtgtggcgatcttggagagcttgcgcaccgacggcccatgcgcgtagggcatgacttcgcgcagcccgtccatggctaggttcaggtcgtgcatccgcttgcgttcgcgtccgttgatcttcagcctcaactgctgtaggtcctgctccgacagctgcttcttgattttgtacttgctgctctctcccgcggccttggcgccagcccgcgagaggctttccccgggcatcttctgcatcatatcgccctgcgtggacgagaccga

SEQ ID NO: 332936 - DNA, 73 bp, Homo sapiens
  chr6:137815402-137815475
  hyper
aacccacttctccgcggcaagacgtgagaagaaaagcggagacgctgcttttccccgcctctctccctcccac

SEQ ID NO: 332937 - DNA, 768 bp, Homo sapiens
  chr6:137816492-137817260
  hyper
ggacggtccgcgcccgaagctccgccgggcctcctctggccgctgtgctgacgtgccccgagctccgggaactcagcggcaccccggcctgcgcgggtgggtccaccaggctggggccgccgtacggcgtcggacagggaaatcagaagctcataataaactatctgatgtcggggtggtggggcgggggggtggggtgcgtgggcaaagaagcacgggggaagggaaacaacgaaaggacctagaaagccccttgtgcgtgcccgggcactgcggttcagcgcagagtcgtttctgggaataaagaggaggtcggagtttggagccttcggtgcgagtgcggaggtgggcgtagatctttcttcccccttgctgtgtttttgtgatcaagactttagctcagcagcacgaggggcgggaaggcagaaatcccgggaagggagagagccccaggagtggtctctagaagaacccggacaccgcccctctcccggcttggtggaacgggaaacaaacgctagctagtgactgagagtctcggtggaagtgtgaaatcgaatcaatcgcggaacctcgggcacttggggcctcttgcgccgctgagtcacttcgaagaacaggatgcccccctttcccttgactcaaaccgagcggtcagtgggagagggatgcgcgcccaggtccggagtttgcacgctctgaggctgtgccccactgacagtcacgctgcgaaggcagctctggccaataccagaaggatgggcaaac

SEQ ID NO: 332938 - DNA, 946 bp, Homo sapiens
  chr6:137818497-137819443
  hyper
cgttgcggggcttgacaactagacgaggggagtgagtaaaggtgccacaactttgcttaccgtaaaatgggttaatactcgccggggcccaaaaggctgagtcgccccgcacgtcttgcttcgtggagtctcttttcgacccccgccaccgcagctcagttcctcggattgagccctgaacccgagaaggagcaggcccggagctcaggagggcaggcacacggatttctttctgagggctgactaccaacgcccaccccagacttgtacggaaggagagagtaaaggagtcgccgcctggccaaggctgcagcagcctacagaggctcagccggagacgcaccatgaccttggccctggccgagacccctttcggagggctcagaccggcgaggagccggagcgagcgaccctgctgcggtggctcgggctgcgctctctcgggccacaccccgcgccctcgcggctggggcgggctgcgccgcggaggcggggatcgttctccggcaacaggtgcgtcccaaggcaggcaggctacttccctccaagcctgtcttggctctgagaagagcctggagtttctcagccttcctacaacatatgaaaacagcgggtcggcgcgtggaccggggcagaagagccgtcctgctgtacccgcgcgcccagggcgctccgcggggaccgcgcactcgggaagctgtgctgtgctcaacacccccctgtgcctcccagatcaccagggatcgtctcttacctgacacccagtgcgcgccgctcggtgcccgacgcccactgctccgcagccttagccaccgagttcctctccagcagctgccggctctgcctgaggccgcggcgattttggctcaggagcgaacccccacccccacccccgcaagagtccagtagcaaatgtcgctagctgacctgccgaagagctactgtg

SEQ ID NO: 332939 - DNA, 120 bp, Homo sapiens
  chr6:138132663-138132783
  hyper
cgttcagtctactctggactttcccatctgtcgtcaggtgacttcctgctctgttagctgaccgtgagtcacgtcgttgctgcacagcacgttcagtgaggctgcctctgcgtgtgaggc

SEQ ID NO: 332940 - DNA, 499 bp, Homo sapiens
  chr6:138428812-138429311
  hyper
cgcgtgttttgtcttcctggcgcaccaacatatacacttgtttatctgcacagcgccagcctaatatctgacccctgatgtcgcatcgtggggcggtggtcagcagtgccatatctgagttttcagcagtgtgagatgggtgttctaattgcacctgtggataaaggctgcactcctttggacgcgtgcacccaaacccagaagcccgtccctgacccctgctgacacaggtgatcccttcctcctaggctccgcctttgcaccttggaccgtggctccccgggtactcttatctctttgcatgctgttctttcctgctgggttgccagattttggaaagcggaggcgatgctgaatttatctgtgtatccttagtgtccggcaccgtgtttggatctcaaggggagctcagtgaatttgatgaatgaacatgtaatttaacaaatgctcgcttcctttcggaaaggcttcatctggcttccccagataatttcatgtc

SEQ ID NO: 332941 - DNA, 249 bp, Homo sapiens
  chr6:138724531-138724780
  hyper
cggctgcctcttctgttcacaggggcctactccccttcacccttgggggatgtcaccattgcttttcacgtggccaccctcctgtccgttggctttcgcgtggggagtgcctgctgcctctgcggcggtcacgtcgccccggagagcctcggagctctggctgcccacgatgggagtcctctggggggcgccggagccgtgccgggtccccgccgcaggggacagtaacgcggagtcggcctggccggc

SEQ ID NO: 332942 - DNA, 251 bp, Homo sapiens; identical to SEQ ID NO: 232493
  chr6:139694251-139694502
  hyper

SEQ ID NO: 332943 - DNA, 162 bp, Homo sapiens
  chr6:142410084-142410246
  hyper
agtggtttgttctcgcggttatctagcggaaaacagcctttcaggaacaaggagctgtcccttggggatcagtagaagcacctgccggactcttcgcccagagaagcagaagtcatcctggcgctgtccagcgggccgcagctgaaatcccgggaactaggc

SEQ ID NO: 332944 - DNA, 865 bp, Homo sapiens
  chr6:142622583-142623448
  hyper
cgggagcgtggcggggggacccgcgcggggactcgggtaggctgcaaacgctggggagatgccacaggagcgcctgccttcccagcttctcctttctctcgccgagggtctctggggttcagcgctcccggcgtttcggcgacctccgggtccgccctgtcccctcccagctggggagctgagcccggctctgcgcccatcgccgaccccggccactctcccttcgctgctcgctccaaaagcgcctgtcccgccccgcggggcgacttctccctttcggccctggggttgaagatcctgtgtggggcagctgcgccttcgggacagccccagccgcggagcgcccagaccagggcagccggagtcgggtcatacgccgcacgccgccggggccgccgcacctgagcccagctccagtcacgccggaagcgcgggcggagcgcacgggtccggggagagtcgcctgcgcccgcgagggggacccaagtacctagggtggtggccgagtcccgcctcccgccagcgggggcgaggacctgcgacgcgcacccctgcctggcccggtctcctcagcaccagccccacgcacaccctacttcctcagcttctcgccctcaccctgccaacttccctgcgaggagggacctgccgccagcctgcttcctcgtccgcaggccctgcgctgaacgctgccgcgcccagggttcaccttgcgccgtcgggaaagcccatgaactctccagaaacggcgtaaaggagggtcccgccgcggcgcagggctggggcgcctgggttccccctgggtggagcagcggcagcagagcgggaaagtggtggaggatgatcttgcggccaaaggggacct

SEQ ID NO: 332945 - DNA, 1003 bp, Homo sapiens
  chr6:143247656-143248659
  hyper
cgtatattctatccgggcaatgacaaacggactcaggcctcctgaggtcagcgctcctgggcaccatcaggccccacttcgggagcccccggtgctccgggcccacctgactgggcgtcctctgagtcagggaggtgccagtgctgtggtccccgcgagcccaactgtcccctgacccccgggcttttccgcaccgtggagtcccccgacacgctggggccagtgaacccgggccggggcgcgcgttctccctcccggaccagctcccggcgctgggcccgcggccgagaaactaggtctgggccggccctgcggcggccgccgggcgcggcgagccccactttctcccggcaggaaggggggaggccgagagcatttcctgttgtgcagctgagccctgcggagacgtcattgcattcatgctccctcgggtgtcagcggacggggggccaaagttcaagccgcgtccagggcaggcagcgcgcggcggcgcggcggcgcggggcgggcggccagggctcccctctcccgctggcgctcccggcgcctccgtccccggccggcccagcgctgctaccggaggccagccctggggctccgcggggaagagctgctcttcctcccggaggaaaccgagctcgcaagcccagcgctcccagccgcagactgcaggctgccctcctccaccgcctggatttcccacggggaggaaaaggcgtgcgtttccaggtgtttggaggacgcactggccgggcgcactttcctcagcgtaattttgaacgcagtttccctaaagatgactcttttttccactaggattatttccaagtcatcaaaagtgaaaaatcacgtaagtgttgttgcagttgttttcccctcgttttctatctcctttccaattgtgaattccgtaaataactgtcagacataaaacaggaaaaggaacatttcttcactgcagagctccagtaaggtgaaagtaggcaagaaggccccctgagac

SEQ ID NO: 332946 - DNA, 370 bp, Homo sapiens
  chr6:143268770-143269140
  hyper
cgcgacccggctttctggccggggttccccctgagcaggtgactccgtgggaggggtggaaatgagtctctggaattccgggccaaagacaataactgtggttctgcttttaaagcaggtatttcaccagcaactgcggaatgttttgtgtctccagtttcaaatttcgcggaaagggaccaaatgtgaggacatataaaatatccccttctcttttcattaaaaatgagtgcattacaaaggaagggcagccccttaatgcctgcgagaatagcgctgctggtttcgtttttgttttgttttgttttgtttttcattctgacccacaatcagtgtatttttgaggtccctatgcaatggcgacggtgcc

SEQ ID NO: 332947 - DNA, 761 bp, Homo sapiens
  chr6:146136035-146136796
  hyper
cgcagcgtcgtggctagagtagggtctggagagagctcccactgtggcgagtcctgtcgttggattcccgcggcgccccgtaaggctccgccccggcggtgctaccaaaccctgttcgattttagaatcgtacattcccagagggaatcctagacccctcattttacagttgaggaaacaggcccaagtagcatgacttgttcgcgccgctagtcgaaggagcagcagccccgatcccttgactctggggcactgctttccctttagctcatttttggaggaaatgggtgcgcccttgctcgacctttggtgattgccgccacaggccttcccgccggctaactcagcgtgcccaagtcccgtgacttagtgccaggacggtgctgtgacccgttatcccctgtcgggttttacctccccccgggagagctcagccctggatcccggcgggcggcggagcctctctggagcccggacgggacagcccaccagggtctgcttctgtgaggggccgaggcgtcattccgcgaaggtaattagctggggaggggacttgaagccgcttttgcagtgtaccttacatatgactggggagtaaagaaatcccacagggctgtatcaaagaatggatggatgtccacgcccccgctaccaccaccaagccttggtctacggccgagggacagtgattccgagctctgggtgttgggagccgctcacccgcccccacccctctgtcggggactcctgcccaccccgtc

SEQ ID NO: 332948 - DNA, 227 bp, Homo sapiens
  chr6:146349455-146349682
  hyper
cgggtcagggaattgcaactcactggtcaaagcgtcccttgcaggccctgccagggaatgtctggctggaccgagcactgtccagggtcctgaaggcggcagggctcaggctgccgcggcgagagcaacccggaagctcccctccgttccctttctagcaactatgcaaaccccaaagcaagcgcaggaccccccctaacccgtccacccaccgcgggaaacaagtt

SEQ ID NO: 332949 - DNA, 992 bp, Homo sapiens
  chr6:148663352-148664344
  hyper
cgtgcccaagctttcacacttgttttgcagagaagtcttggctggcagaggcaggatttgtaattccttgggtcgcttgacttcacgaggggcgaggtatgcattgtagcgacacggactacttgtgaagcctttgggcgggagtcgcttaaagattaactttctcgggtttccgttaccaaaagcgtttccgtgaatagcgtgattggaaacttgtgcgggccggagaccgcggcgcggctgctctttcaacaggcgatttgttctcctgtccgaggctcatttccatgcaaagagcctgacatcagagcaccttttgttgctaaacgctttctttagcctcgagggagagagtcatgtggagctggaagagctcattttgaagagaggggtcccggggagctccctccaagatctagaggctccgcggccacccctgccgggtcctgccaagacttgctagaaggaacgagtcgcgtgccttagttagttggttcccgtcacaggaagaaacgcctttgcagtgggtttaattgcttctgggccgagcgaattccccgccgtacaactcagtggtgcggactttgcctcctgctaccctgttgctgcgccgagcggggtgggaaagtttctggagttgtcagtcgcgcagcccgtggccacctagacccgaggtgcgggcgcctgcgaagggcccccgcggggtggccggggccgccggggcatgcagcgcgggggcgcggctcggtgacgccgcgggcggggacccggcatccgggcaggctgcgcgcgggtgcggggcgagggcgccgcggggactgggacgcacggcccgcgcgcgggacacggccatggaggacgcgggagcagctggcccggggccggagcctgagcccgagcccgagccggagcccgagcccgcgccggagccggaaccggagcccaagccgggtgctggcacatccgaggcgttctcccgactctggaccgac

SEQ ID NO: 332950 - DNA, 1059 bp, Homo sapiens
  chr6:149068769-149069828
  hyper
cgggggaccccctcgcttcctgctcgacctgcggcagtacttgggtaaggaagctgggcaggcgctagggcggcgccgacagcgcaaagttgtgcggcggggagagggtcgcggcggggacttctcgcgctgccaccgcgcgccgccgccgccccgggtctctccaggtgctaagcccgtgagcatctgtgccgcggtcgggagcgccttcttcctcccgcgcgtccgactgtcctcaccgaggcgggggcgccgctgggttgcgctgccggcaggtaccccggggcgaggcaccgctcaccttccccccgccccacctccgccacccggatccggactggggcggagtggatgggtgtgtggggtgtgccggagtgtgtgtatcttcaggcctggcggcgcggggagtggcgaagggaagggaaggtcctcttcgttgcattgttagtgaccgcagttcagtcccgtcccgcgccccggggagtgtgggtgggtttagccctttgccaccgtccgctctgagaattctgtcccgcagatcccccgcctgcccgccggccctagtggctccgcgctgtccccgggctggcttgtcccttggctgccgctgcccaccccgccgcccgcagctagcctggcgcggggaacgggttgcatccaggggtttggggatgcccgagggcgctggtcagcctggccagcagtgtcgcccccagtaacccgaggatcctcggcgctgtgtgcgtctcaagctcaagtcaaaacttgtgtgtgtgtgtgtgtgtgtgtgtgtgtgtgtgtgtgtgtgtgtgtgtgtgtggtttattaggagagaggccgcctgtctttagcagaagtaaggaaggggtttgacgggagggaaagagccgctccagcgagaaggcgtgaccccgcagctccctcgtctcggctgcgggagccaggggtgccagggacaggcgagcgcaagcccaggtcgcaaggacgatgctggcactcgcgttcgagccaagggaggatgcagatccctcccaagtctgtggccagaagaggtcgtgc

SEQ ID NO: 332951 - DNA, 450 bp, Homo sapiens
  chr6:150246806-150247256
  hyper
gggtgccccgctcccggacgatgcccctgggcttccagatccagagcctcgggacgaaactgtttcaggaagacccggaaggactcgccggtcgcggcaagggacaggcggttcctgagacaggaggagccaggaaatgcggggcctggtggggtgaggagcacggggttcctccttcatcctcgcggggactttgccaccggctcagtgtggaggcctcaccgtcccgcccggatccgtggggctccgacagtgtggcccctgcgaggaccccccccatcctcctcgccctggggctgctgcgggagggcgcccgggcagcactaggtcctgagtgtccagggtccggcaggggcttcccgttgtcgcctccctgaccccgccgcttgcggtccagggctgctggtttctccgctggtctgggaggccctagcatggacgtcgtgaggc

SEQ ID NO: 332952 - DNA, 603 bp, Homo sapiens
  chr6:150284566-150285169
  hyper
cggtagccctctagggctttctttcttttctttttttttttttccagaagtcataaagggatatagaatatactcaaagaccacctcatgcttttagtggagaggcaaaaaaggttcgctccggaatggggaagcggctgcgccctggacggagaggggcggggacttcgcgactgcaggcggagggagggcgggtgtcgctggcgcaggcggtgacagggagacaccgccgccactgagtattcctatgcaagtttcttcatcttcctgtgcatcagtgtttacactggggtaatgataaatgctgtgttgaaaaattatttgatggggccatggaaggaacggaaggaacggcgtcctggcccgctcggggcccgcgcacgccgccaccaagccgcgggggcgggtcggaggggagagttgcgtcagccaggccgctgtcagatgacgagcccggggcgtgacggggtggagcatccccaaaaaagtgcatgcctaggatcccgcccagtgtatccctgcgcgcggcgggccgggctgggcagctttataaacagccgtggtgtgagcctcgaagggaaccatcagcgcctcctgtccacg

SEQ ID NO: 332953 - DNA, 1127 bp, Homo sapiens; identical to SEQ ID NO: 232535
  chr6:150285392-150286519
  hyper

SEQ ID NO: 332954 - DNA, 579 bp, Homo sapiens
  chr6:150311809-150312388
  hyper
gtgtctgtgggtgatgaaatcgggtcggagtcgctctaaagtcatttttgtctcttgcgcgcctcagggaggatattaaaggcttttgtggatttcaaccgctaaagcctttcctcaaagttcattgcgaggggtttcagttccgcccggcagcatccctcagggttctgcgcgctcccgtggcaccgtctgcgcccgagctccggtcccgtcccgattgcctgatgccccgcagggagcgcccagcggccgccgatgtcccaccagcaggcaccgggcgcctagcgggacccgcgggcggaactgcctttggaagacgcgtgagaactccaccccatcgcggcaggggacagttattatctccgagcttgaggtgaggggaaatcagaggcggctgatggtttcctcctacagcctggtgctgggcgcggggaggactttacacccagctcctgccgagacgtgaccttacagctggggtccttggggctccaaaagtgcggcttccgcgcggatcccattcctgcttgctttgaggctgctggtgagcggcgcctgcgcaggggaagttgtgtgccc

SEQ ID NO: 332955 - DNA, 752 bp, Homo sapiens
  chr6:150921277-150922029
  hyper
cgccggccccctgcgcgcccctccgcagtggggacggagggccttggggggcgccgagcggtggggacagagggcgccgggggcaccgcgcggtggggacggagggcgctggggggcgccgcgtctcgggggtcggagtcgggtcggggatgctgcccgccgccgccccgcttggggttccgcgcccccaagttcccggtgctcccgcccctcgccccagcggctgcaacatcagcgcgcagaggagtttctgcgagcacccgggagttgtagccaccgcttccccacccccgactcagcaggacagccccagaacgggaccccacagccagtcagctgggtcagctccccagcagcgaagccgggagcccgaggacccggggacgcgcggtgggggcggcggccgagctgctgcggcgctcagggcttgggggcgcccccgttctgcagatgcgcttttcagggggtggggagtcaagagcctgtggctcttccgtcacggggtaaacggtaacacctgggcggccgcgactctgcgagcgttctggcctcggcgggcggcggggaaccgcagtgatgcccgagctcgccccttttgtgtcctcgcggtgagccccgttccgaagccggaagcttgggaacgctctaactgggagaacggcgctcggctggtcaattcattccgctcctcggaaacaatgagctggatccttgacttgaatgtgctggcggagcggggtttgtaagccggc

SEQ ID NO: 332956 - DNA, 42 bp, Homo sapiens
  chr6:150962790-150962832
  hyper
cgtgtggatgaataaatcactgtttggtagtaagtgtaaaac

SEQ ID NO: 332957 - DNA, 1443 bp, Homo sapiens
  chr6:151561222-151562665
  hyper
aatccagtgtccccggcaggctttttgctcccctgctctcttgccttctgaggccctgggtcgtccccgcagctctagtcgccctgttagaaacgggaggcgcccgagggccgggtgggcggctgcctggacctgggctggcgcgtcgcagcgcctctggtcccggcagcctgggggcagatgctgctgcagggcgtgtctggggctgtgctcatgtgatgaagcgagggaaaaaccggggggaggggggcggaggctaagaggtggcctttttttttttttccttttcttttaaggagtttgccgcgagcgcgtctccttcattcgcaggctgggcgcgttcgcagtcggctggcggcgaaggaaggcgctctcgggacctcgcgggcgcgcgtcttttggctcttgcccctgtccctgcggcttggggaaggcgtaacccggcggctaggcgcgggagaagtgcggaggagccatgggcgccgggagctccaccgagcagcgcagcccggagcagccgcccgaggggagctccacgccggctgagcccgagcccagcggcggcggcccctcggccgaggcggcgccagacaccaccgcggaccccgccatcgctgcctcggaccccgccaccaaggtacgggcgtgccgggccacctgcgccgggaggcgcgggtctttgggggtgggggtgggggtgggggggtccctccgatttccgccgagagaacttcccagcccatccagccgcatctgcaaactcaggagtgcgaacccctctttggaggcttttcagggtctttcgcgccggggcggggccagagcagcggcgagcgcggcggggggcttgcatctttgtcgcgggtctccaggggaggcgactgcgccatgcgcaataataaaacccgcgccctgcccacggcggctgagcctttctgcgcactcttccggtgggagccatgcagcccgaggcggaggagctgcgcggagggggatccgtggagaatggaccccgggccgggcctccggagctccgagatgcggaaagtcagctgtgaggccaggactcgtggtggagcccgccggggagcccagccaccctcgggttccccgtcgcgtaccgccctggatgccagcggtgcctggagcgagcgggtttggtacccagtcctcctgcggcagcggcccgagcaggcaccgccttcccgaggcagagaaagcctggggtgtagctcgctcagagccaggaaaaacctgggcaggcgctgcgtttccagaaggaatgacaggtttcgcaaaccagccagcgccctcgcgttcgctcagcgctttgcctgcagactcagttggccaaacacacgctagagtggctagaagttctcaaaggatggggtcagtgtaacgagcattccgggtactcttccctggacgcagtgctgaaac

SEQ ID NO: 332958 - DNA, 997 bp, Homo sapiens; identical to SEQ ID NO: 232547
  chr6:151814960-151815957
  hyper

SEQ ID NO: 332959 - DNA, 776 bp, Homo sapiens
  chr6:152622733-152623509
  hyper
cgaaattataaacaaatacagggtagacctctgacatgttaagtaattcagctgtctcgagcacatagtttcattttaactgtcattgtttacagtgtcaaagattggcccggcccaacggtagtcaaagagacttaaggaatctgttcctccctctgaatctgcaagatcgaaggctggtccctgaaatcagccacggagagggaacatggagccactcgccaggctccagtcaaagagcaaagccgcggggacccactggatccttaccatgaccacagaggggtgggccgaaggcgtggggaggagctccccatccaggtcctctgtcccttccgccagcccctcgacctcggtcaccgtcagcagcatggtggcgtgcttggctttcatcgtcagcatcttgcacttggaattcaaagaagcgatctgctcctggtagcccttaattttctgcgccagctcctgaggaaacatttcccccaccggggtgtcagagcagcatcaaaaggaaacagaagtagtagcgttcatcttcctgcagggcgagccaatgagcgcgcagagccgcgcgggcccgggaggcaggatgtgtaggcggcgagtcctcctgcatctcgctaccgagccagaccgcaggctgcgcggcgcggcgcaggcacagccaaagtgcccgagcccgcgtccccgcgtcggtacaaaaggagaaatgaggggatgaggccgaatgagtggtttctaatcgcgagaggccccatatggaatcatgaacttcc

SEQ ID NO: 332960 - DNA, 962 bp, Homo sapiens
  chr6:152957527-152958489
  hyper
gatattaatagggacatctacgtacgagatgcaaagaggctccccaacctcctagtctccttatctatgagtatcgcacacgtacacacatcactgccaccaccccctcccatcaagcacgcagagccccagcgtgcaggcacaaacttgctgacaatttgtctgcaatgtgttcgtcttgcacctctctctcctctccctgtctctgtctctccctgtctcccagtctctgtctttccttttaccttctctctcggcctcgttcagtttcccagcagcaaggcgaagcgagcgaacgcttcctcccggctctctgcgcccaggctcggcgggaccccggggatgcgcggctgtccgcccgccctgtcgccgggatcgggcgcggtctgcaggactgcgggagcccagccgccctggtgacagaggacaacaatctcagcccgctgcggccggcggccgcggcccggcgcccgcgctcaccctggctggctcgcccacactcactcccgcgccgggctgctcagccgcgctccccgccctccgcgaccggttcctcctcccggctgctcgctggggggtgaggcctcccccttcgccctcccccacgcatctactgctcctgtcgggaaggaaggtcgcccaggccggttcagcctctgggcagggtccctgcaccgccctggcccgccacaccccctccccggctccgtgccccgcgccccgcgcccggctccgggatgcgccggtgcctggaagagctgggggcggggacccggaggctcgcaggcttccctacctcctggagatgcacggccttgggcgtttctccgcagctgcaaagctgtgctgtgacccacccgctcagcgagcctttataccgggaccacctcccgggggtcgaggtgggaaggaaatgtccctgagagccgggacgcgctgcctccgctgcctggaggagctgc

SEQ ID NO: 332961 - DNA, 1109 bp, Homo sapiens
  chr6:153451760-153452869
  hyper
cagcacccaaggtgatcagtcgattggacactgttgatggcacattctcctcgttcccaaccaaccgcacaaaacccgcaacacctcgcgtccccgcggggtctcccgcgcccctggcccggccctcccggccgcccccagcaggcgccccgctctccgcgggaactctgggacctggccgagcgttccccggcgggcaggacactcgcccggttccctgcagcagctgagggcggcgagcggaccgcgtccaggcagcgacgcgggattcaacttcccggacccgcggcgcggcccccgctcccgctcagggcgccgcggccacagctgagaccccagcgccgcgcagccgcccccgccggggcatgggcggtcgcgctctccgccccctccttccttcacctcccccctaccttgaaaaaaatccatccattggtgcaaagcagacattttgatgtcatttacttagcaccgcttgttttggaggcagcgtcttacccggtcgcctggaggtgtgggcagcgcgccgatgggtccgggggagcggggctgggcggctcggtcctctagcggagccggtttgctgccatccgcccaacttcagcacccagcgggcgaggagagagggagagcggcgaggatgcagaggagggggagggggaggagggagcggtgggcggggagggagcgagagccgctcggcagcgcgcatgcgcctcgcgggccggcgcagcccctcgcccggcgcggccggaggggcagcttcccagcccctgcgcgcggccgcgagagtcccggccccgccccctccccgggcggcccccggccccgcccgacctcgcgcgctcgcctgggcgcggcgcccaccgtgcggaggggctcggccgggactctcggcttcggtgacgcccgtccggagcttcgcgggaggcccggagtcccgagagcttccctgggtgacagcggctctccgcccgggcccctgcaactccactcgcccgtagcccgcgcgctgctgtcctgggctgcgcgggagccttgcacccaggagccggcctgccaggcacagcagcctgcctgctccgggtcccggaggaagcattccctgc

SEQ ID NO: 332962 - DNA, 1128 bp, Homo sapiens; identical to SEQ ID NO: 222960
  chr6:155316128-155317256
  hyper

SEQ ID NO: 332963 - DNA, 1187 bp, Homo sapiens
  chr6:157556779-157557966
  hyper
cgcttggaacttgcgagctgatggcttttggtggagcccaggaggggcgctgtggggcacagacgtgtgcggggccggcagctgcggagagagcagcgcaccccagccttcaattccccgccgaagatgggactctgcccagagccgaggcccctggctgctgccccgctcccttgcggccgcagtgacactcagagccagattcctcagacaatcttcactcctccgtggtggctgccttgggaggcgttgcggggtgaaggaagtcgcagctggtcccaagcagtggggagggcaggacagggagtaagacaccgccttcctggggtgcacacggaggaggggcgctgcccaggagcggaggggaggggagcggagcgcggagaggagaccggtgccagacttcacccgcctagctctcggaacccccgggggccgcgctcggctccgcctgggggctaccggttctgggccaggagaagaagtggcatccgcggggcagggcgggcggtgacggccggctcaggtggcggccccaccccagcgcccttcagcaggcctgggtcggtcggcctcggaccccgtaggcgccggcggagctggcggcagggacccgacagctctgccgcggactccgcaggggacatcccccaccctggcggcccacccaggcggagcgcggcggggaccgtgcatctagcgcgccctggtgacctgcgggccgaggcgggctgtggggcttggccccgcgactcagccttccgggcccacagcggccctgacccgggaagtgcggaggtttggccgccttcaacagcacctgccaggccactgggagcagcgggggagaagtgggctcgcacaccgacggcctcccgggttcggcggggacgacccgagctaggagcccgcgggggccgtgggagctgctccgccgaggtggacccggggcgcccgcacccctcaccttctttccgtggggtccggggccagggacgcagcgggggacggcgggcatcagccgggcagcgcccgagccgtccctggccgggtccccacacctgcgtgctcgggcatccccagggtcgggggcgcggtgaatcgtggtccccgcagcccggggcccgccaggcccgcggagtcagcccaccctggcgaggggcccaggcacccgcatttaaccagtc

SEQ ID NO: 332964 - DNA, 518 bp, Homo sapiens
  chr6:158402115-158402633
  hyper
tacacgcgcggacacgtgccggtgtccagagccggtgggagaggcgctgtcaccatctgacaggagaggaaggtggagcgcagagaagtcagggtcacgtggtaagtgggggtcgtggtctggggatcacggctccaggtctcttcgcgacaacgcaccgttgacccccaacacctctccctggcggggtcggtgaccgcaacagcctccgggatagaacgctagtgaaaggtaacctttctccagcccgctccacgcgctccgcacccgctaagcgcctccgcgaattaactcaggcctccgcgccgaagtaggcgcagttatgaccccgcttccccgcagggagaccgaggcacgcagggtcgaaaggactcgtccagggtcgcaggagccgaccacacagggaggcgcagcgcccccggcgggaacagtcagcgggtccagcctggcggactcccgggccgggctgcccatataaggctgcgggcggccggcatcgcagccaggctcccggggtc

SEQ ID NO: 332965 - DNA, 125 bp, Homo sapiens
  chr6:158430551-158430676
  hyper
cgaggaagggggctgaggaggtagaagggagggctttcctcaaaaggccagaaattcgtggccagccaaaggggaagcaaagacattctcgtgtaggaaaacttacaggaaatgcaactaaaagc

SEQ ID NO: 332966 - DNA, 869 bp, Homo sapiens
  chr6:158957708-158958577
  hyper
cgcaggcggcgacacaaagggtggagcggcgggaccgggacccgggaggctgcgcggcatggacgccgagtaccctgcctttgagcccccgctctgcagcgagctcaagcacctgtgccggcggctgcgggaagcgtaccgcgagctcaaggaggacctcacgcccttcaaggatgaccgctactacaggtgggcgcggcgcgggcagcggcggggcggccggaggcttccgggccgcagtcccctccgggaccccggcgcgccccggccttggcctggtcccgccgacggccgcctccgccggccgggcgcggagcctacggatggggacggggtcggggcggggatctgggagggaccaggaaggggacggggagcagggatactggcagcggcgggcaggttcctggattcagggcagcccggcgcccccgggcgaagggccgatttccgttcagctgaaacccaagccgaggctcccgcctccccggaaaggagctgcgggttgtggctcctccctgcgccccgcgtcgttctccccccgcgcccgcctcgccgcccccgctcgggcctcacgcggcgcagtctggggaggcgaccgcgcgcgctgcggcgtcgggaggagggtcttggccgcagctctgagcgccctaggctttgcaggacgcctcggaggcgggggcgccgccaagggctgggggcggatgggcgcggcggggaagacgcggcggggcgccatgcggggacacggcgcctgggagcggctgtgtggaacttgtttgcgttcatctctgtctccctcttcagcggcctaggggagagcggtggggactgcagaccctggcgccggcccccgcccccttcctctc

SEQ ID NO: 332967 - DNA, 1632 bp, Homo sapiens
  chr6:159589686-159591318
  hyper
ggcggacagcagcacgcggcgtccaggacccggccttcctagagcttaggtcactgtagcctccaggggcgctccgagtccatctggagggccgcgaggcttccaggctggaaggaggaatagggagaaggaggaatagggagacctggggcagtgttacaattacagaaaagggagaggcgaggtccgctgagtccttggcctgggcaacaaggcacactgaaaactgggttccttttcgacccgcatcgtgcgcgccctagaaatgacagccagacggagcagggtctaaggacgctgaaaacccctgacgtgggcgcgccgggtgcgggtagggacgtggaaggactgggctagccacaggaactacagcgctgcggaccgggtgaggggtcccggcccgagtccccacttggggcgcagaggtgtttctgtaaggggacaaagggcactcctcggcgcgatgggcgacttccccagccagaaaatgagagggttagacgaggggaggaacttcctcagccacttggcccggcacagcgaccgccccaagttcagaaccgctaagtcagtccggggcgctccggccccttcgtcccgcgccccgcccgcctccagcccgggccccgccgcccccgtcgcccctgtcgcccgggtcgcccccgccggccctggccccggccccgcacaccggcagggggcgcccgagcgcagctaaaaggctcggcgggaggtcggcggcctcagtggcggagcgcggctgccggtgtgcggccgggagcgatcgccgcggggcaggggcgcggcgggcaccgcgcagagcgcgcagaacagacggacggcggcggggacccgacggcggcgcctcggcactccccagactccggccagcgcccccctgccagccgcaagcacccagccccggcccaccccgggctctcgatggcccccgaggccggggcgaccctgcgcgcgccgcgccggctgtcctgggcggcgctgctgctcttggccgcgctgctccccgtcgcctcctcggcggcggcctcaggtacgcgccgcgcccgggcccccggcgctcctcagctccccgcgcaccctcctgcgctcgggccccgtcgtcccgctcagtgctggctacgggtcgtgtcactagcctgtgcgtcctcgtcactcgcgggtcggggcacttggcgccctgtgtgggtggcgggagcggggacgcctcggtgcccggggaccgcagcgcgctggcgtttaactttgccgtcgcccgccttggagtcgggaggctccagccgtctaagtgtcccgggagattcaggcacagcggggaaaaaaggaaaagaaaggcgactttcagcgtgcggactggggtaatgcctttctttgcccagaatttctcgggagcgtaggtggtcatcctactttctccgcgttcacctctcgcgaggcaggatgacgggcgcactcgggagaccggagggaggcagagcagggctgttctagaaggtcgtgggggaaaggctgcgagctgccgcagggcgtcgggtgcctctgcgctccagaggagaagcgctccagtgccagctcggctccaggcggcaggaggcccgcgcgcccggggggaac

SEQ ID NO: 332968 - DNA, 679 bp, Homo sapiens
  chr6:159654657-159655336
  hyper
cgggcggccccgccccacgtcgcagggccgctcccactcctcctcggacccttacacggcgagctccagagggatgctccccacggccctccagaaccaggacgaggatgcccagggcagctacgacgacgacagcacagaagtcgaggcccaggatgtgcgggcccccgcgcacgccgcgcgcgccaaggaggcagctgcgtcccttcccaagcaccagcaggtggagtctcccacaggcgcaggggcaggtggcgaccacaggtcccagcgcggacatgcggcctcccccgccaggcccagccgacccggcggcccccagtcccgcgcccgggtacccagcagggcagcgccggggaagtcggagcctccttccaagcggcccctgtcctccaagtcccagcagtcggtctcagccgaggacgacgaggaggaggacgcgggattttttaaaggcgggaaagaagaccttctgtcttcctctgtgccaaagtggccctcttcctccactcccaggggcggcaaagacgccgatgggagcctcgccaaggaagagagggagcctgccatcgcgcttgcccctcgcggagggagcctggctcctgtgaagcgacctctccccccacctccaggcagctcccccagggcctcccacgtcccttcccgactgccgcctcgc

SEQ ID NO: 332969 - DNA, 554 bp, Homo sapiens
  chr6:161188084-161188638
  hyper
cggcgggtggacggagcgagatcgcgccctggaacacggagctggcgagaaggagaaaagcccagctggcggcgtaggggcgagggtcctgcctttcccggcggcctcgccctggccatcctggccctgcgggaaggggtcagcccacccgagcctcgtccacccctcgtccacccctccgcctcccgccccggcaccacgccgcgcccgcgtccccgcccagtgcccgcgcctttgcgggccccggtcctgcggggcccctcgcgcactccagaagcatcagtatcctccgggcggccacgggccagctgcggctcccaccctggcgaccctggattgctctccccattctcagcctcaccccccactccttccaccccatattttgccgcctcgaaggacatgaaccatctgctggctgaaggcgcttggacctgaaaccagcgacaggttttggcagctgcacgctcactcccagggaggcgagggcgcccggcgaagtgtggggtctgccgccccctgccggcttggctgacgttcgcttctgtttccac

SEQ ID NO: 332970 - DNA, 3633 bp, Homo sapiens
  chr6:163834161-163837794
  hyper
gatttagggactgccgacttctatagatcaaggacttcattggtgcagctgaggaaattcttccaaacaagtctaaatgttggaaatccaccaaactgcagagaaagacctcttgcctccgtattctttcttcatctgtaaaaatgttgacttctgcttttcagactacgcgcacagcctctttatttcctactgcggcttcattccctcacggaacactgacgccatcgcgaaggaagcatttcgagcacgactgacgctccccttattatttgctaagccgctgcgctcgggtctggctacgatttgctttcagaataacgggaaggtgcaacaagatcgcttccctagaggcgcgtcgcccgcgtggcccggaccccccacgcccgcccgccgccccgtgggtgcgcacgcgtgtccgcgcaggcttcccgcctggcgagtgcaaggctcctctccgccgtgctgctttccagcctctcagcaaatcacgaacaccgaaagaagccacggcggcgacgggaggggcgtcgcgcgtgcttccctcggcgacaaagcgggagccgggcgcgccggccgagggcgcccggcgcagagtcccgcagaggcggacgccgcggcacgcgcctcgaaaagcctcaaactcttatcctcggctctcccgccccacctccgccccgcagccaagacccgcgccgtggcgggcccgacggccaaggaaagcccaccagccctccgcaccgtgggcgacgggccaagacccggccctaaacggccagacccagcccctagtcggctgccgcccccgccccacgcaggcgcgctccggggccctcccctcccccaccgcgcgctcgcggggcccgacgggggcggagcgaccctcggaaggggcgtggcgaccgggctcgacgcgcgcacgcgctctggagccccacggctacgtgtcgggccacgtgatgcccaccccgaaagtcccccgtgaagcaacaggacgttaaaaaaaaatttctcttctgcggggtggataagaggttctgaaaaaactatagtaacgggaggcgaggcggaggcagcgctggcgcgtcccgctggaattcctctcgcctgccgcgccagccccgaccgcgcccgcagccccacccgccccgtgccgtggaaagccccgcgccccccccgcggccgtcggccccgcagcccacacccacccgccccgggcgccccgcacggcggcgacccagtccttgcgcccaggcccgccgagcgccgcagtccgtcacactcccgttgcccccgtcgcccgccccgccggggaggcagggaggagggggcgcggcgccggcggctgccccggtcgcggggcggcgggcagcaggcagcgggagcgcgccggccgggacccgctaacggccgccctgcgcggccccgcccgccgcccgcccccggccctccccgcgccgctgcccctccccccgccgccgccgctgctgccgccgccgctggcagcgccgcctgaactgaggcgaactccgccgccaagtgagtgaggaggaggaggaggagaaggaggaggaggaagaggaggagcgcagtcggagcgcggcggcagcggcagaggcgccgcggcggggaccagcccagagagaccccccgagcccgcggcacaggcggcggcggcgctgagcgggctcgaccagccgagcgagcggcggccccggctcctcctcgtccggcgccagcagcccgcgccccgcgcccgcactcggccagccgagacccgcctcccgcccgcccgccggcctcgtgagggacgcgccgagccgggcggccgagagcggcggcggctgggagcgcgtcgggcccgggcggaaagtgcctgcggggggcgggcgagcgcgcggtgccggccgccccggggctcggcgcgggagccagagcgggagccggcgcggagcgggacgccgggtcccgagcggcccgcggccggggctcgcccccgcccctccctcctctccggcggcggcggcggcggcggcgggcggagtgagctgcggagcctggaatatggtcggggaaatggaaacgaaggagaagccgaagcccaccccagattacctgatgcagctgatgaacgacaagaagctcatgagcagcctgcccaacttctgcgggatcttcaaccacctcgagcggctgctggacgaaggtgagcgtctccagggccccggccccggcccgacccccgccggggcggcccctttccccgcttgggatggtggggagggcgggaaggtcacggccgggcgggaccgagcgccggggggactgggaggccaggagggcgcacaaaggaggtgccgggccgggcttgcggcgggcgggcgggccggggtggacccgccggtgccggacgccccctgcccggccgggaccccgcgccgctggcgtccaagttggcgcgttgcggagggctgcggggtgagccctgcggcccctctagcttcggcggtcacatttccgagaggtcggcgggggctgcgcggactcggtggtcctcgccgagccctcccgagagcaggcccacgccgcgccgccggcctggaggacgcgtgtgcccggcgcgggccccgctcctccgctcggcctcccgagcctgctctgcgcggacccccaccgccccgcgttcgggagctctcccctcccgtgaggactaaagcggggtttcgtggttggggagttggtgcagctgttcaatactaagtggaagtcagtgtggggctcgttagtttaaagaaattccgtaggagaccgaaattatgctggcgtagccgacaaggaggactaagtgacggcgaaaagcacttttttcccttttgtttggggaagcgagaactgttagggagttgaacttcacttttcgggggtggggggggggggggtggagtgcgaaataacgcgatgacagatcggagcgcagcctgagttagaagaacttgggcggagggtttgctcccggggacgcagccgcctgagtttgtaggacagggtttcgagacgtttggaaagggcgaaataaaattgagccaaagtttccaaaaagctgtatggagcgctgtggggagtgaagaatgacaagaagattaatgttgaccaactttggaatttccttaagaagttctcatagcagtacctgaagtattaatttctagtagctgtgggtttctgtggacgcctagagaaaaaaaagaccacaaaaaaagtctgtttcgaaaatcgactggccaggagtttgtttgtttttttttcctgcttagaggcaccaccggaggactgtgtaaaggaaactgaaaactacaggttgaagagatgaacaatggagtttagatttttcgcaagaatttcgagattttaaaaatagagtcggggaacaggagtttgaagcttggggagttggaatgtcactagagaacaaaaggccggaaatgtttccatgataaaaaatggttaaagaaaaatcccaggagttctgttgtcttgaaagtcatagaaacaacttaaaagtagaaaatggttaggtgttacggctttctcgtcgttttgcttccgtatgttaaacatacagcactcaccaac

SEQ ID NO: 332971 - DNA, 920 bp, Homo sapiens
  chr6:166076011-166076931
  hyper
ggccgcgacccagccgcagccgccgccgcgcgcagagagggcgccggggcccccagcggggctggggcggcctgcggaggagaggggcgggcgcgggggcgcggcgcgctccgcccggccacggccaggccactcgggggccgggcccgggcccgccgcgctccccccgccggccgcgctgagccggggttccgggcggagtttgccggggccgcagcccggctcgtccccggccgctggcaggggaccctgggggcggggagcaagaggctcctcgaggctggccatggttcctccccgggccgcggaggggcaggccgcgggcgggaggggcgcggcgggccggggctcggtgggctccgcccccgcaggacctgcccacccctgccggccgcccgaaccgctgcctggtcctcctctccggtcttcggcttccctcccagtctagtcttcacattgtgctcggcttgggttgcgggaggacccgggcctgggggccaggccccggcgacggcgcctggctaccctcaggcgcgcacaatcggcgtcctcccgggccggggctagggacggcggagaccctccctgcaggcgtggcgtggtgtgtgcgcgctccggcggctgagcctcggcggcttctcgaaagcagcggagaaaagcgccgcagtgccgctgcccgtggaggcggtggtggcggcggcggcagaagacgcccactggcggagcaggcgctccccacgccgccgccgccgccgccgccttccgcgcccacgtagcgcgccccgcgggactcggcccctgcgccaggctcccgcacccgagtgatcctctgtgcgccgcctgcacccggggccggggcgggcggacagagcaaccgctgcgtctctgccctgccttgtcacatctgggtccggtgtttc

SEQ ID NO: 332972 - DNA, 989 bp, Homo sapiens
  chr6:166076970-166077959
  hyper
cgctgctgggcgagccacgtcggcctgcccgttgcccgagccagggaatcctcctggtagcgggccagcagctccgacccagctgtgctcagtcagagttcccgggagagagttccaactcggacctttggttggagtttaaatcaactcgcagtgtttcccataaactagggtttgaaatacggttcctccccaggactccctttcgcatactcactttaaaacgaacttcgtgtgcacaagcccagtttgccttggttggggttagagaacggaaagggcaaactgtggccaaaaatgagcaagactgtgcgatcattgccccaaaccctgagaccgccttgccatatgcggctctcttggacacccccacccccttccgtagccatgaatccaggcagttgccactgaagggaaatgagccgcccaatgggcgctcagaactaggagccgccagaagtttggggaagttggagcgcaagagcgcacacagatgcacaggtgtccgcgttcgggcaggcacgcgcggcggggccaccatggcgcgctgggtccgaggaggggcggtggctgtgctgttccacggtggcacgggctgtccggactgcctggacgaggtcaccttccccggagtggagcacacgcgccaaagctcagctttcacgaagggcaaaacggtcacccaagcgccaggcgtgcgctacagtgcagcaactgggttgacccagggccctgggctcccggtgtgccccgggtcccggggccatttctcgccctccacgttttcttctttctatccagtttcacatgtttattttgaagcgtgctccagattcctcactagtcgatgctttccccgactcccatccaaactccccccaatggaaaataacacttttgtatttgcaccaagctgagcagttgggatgcaaaggacatgctggggctcccctcccccagtaaagtccacagacgtctccgcgattgcc

SEQ ID NO: 332973 - DNA, 700 bp, Homo sapiens
  chr6:166267537-166268237
  hyper
ctgcgctggacccagacagacgcgcggggtcctagggaagagcccaggcagggggaagcccgtgggcggtgagaccctcccgtgccacgggcgcagcgcagcgctggctggggccgacggggcgcaccggcggacggtgatgaacccggagacccggcagccaggctgggctgcagcagcctttgcctggacgtcagggtggagcccgggaatcgcccctgcgccgggtgacggaggagaaaggggcccgcaggaggcaggagggagcgcctggcacagggacccagggactcgagcaggtggtccctggggaacggggagtgaggccggaaggagagaaagccaagaccaggtgcgttttggaaattgctgctgtgagccgcaagacgttcgcaggctctgctgcgagcccccaggacgtcccccggtgtccacctccgggcggctctcgcggccagacaaggagccctgaggggcggcctcaaggagcgcccaggccgctgagctcccagggcggcacagagggagcccgggggtccccagctctggcctcgccgtcttgtcttgctggaggtgaggggagcgggtggcgaaggtgcaggagcgggcttggctccagccatctctgaggagcgtaggccaagccgagcccgcagaagccccagaggcctggcctgagcccgggagggacgcggggtcc

SEQ ID NO: 332974 - DNA, 186 bp, Homo sapiens
  chr6:166298476-166298662
  hyper
cgcctagactgcggtgcggccttcatgtgcacgcccctgccgccgtttaccgccaggtggcagcgtagaccaagtaaggaagccggcccacccagagctgggaactacaggggtgtgctttgtggctttcagactcacaaagattccagatgaacatgatgtctctttttaaaatcgatttgaaac

SEQ ID NO: 332975 - DNA, 211 bp, Homo sapiens
  chr6:166419580-166419791
  hyper
cgcaggagctgccggccctcgcgcgcccctcgcgggccccccgggccccccgcccgcccgcggctgctgccgtcagagctgcctgcgtcaatgctgcttggtgacacacacagctttttttcttctgctcctttttctcaatgagaggagcctaatgggattcttattatcagactcataaatcaaaccgttaggccgtcacgtctggcac

SEQ ID NO: 332976 - DNA, 449 bp, Homo sapiens
  chr6:166421892-166422341
  hyper
gggaggccaggtcccgttttgaggagaggagatgcgcccaagcgggggcggaggagcgggtcgcgccgctgacattcgccaaggacaggatggggtgggcgcccgccggtggccgactccgccccgcctctcaggggtgcgagtcatcagcgcagcggcggatcctggcccagggagccaccggcccaccctcgcgcccaggagccggactcggagacgtccacctggtggagagacgcgagggagccatgcagacaggggctgctccgtggagagcccgggaagcctgcggggcgccggaggggtgggtcccgggacagaccagtgaccatccgcctcctgcgtagcgctgcccccaggagaggaaaacccatcggaggttgtgctgtgtgcgttctccaagagggaagctcagtatgagcactcccttcgtccccttaaggaggacc

SEQ ID NO: 332977 - DNA, 2300 bp, Homo sapiens
  chr6:166579761-166582061
  hyper
tttaaatttaaatgcgactttgccatcaaggctgatatcttttccacccccaggagagtttagggctagacaacggaagttccccaaaagctccagtccttcaaaggggagtgctcccgctccccgttcgccaggcgtggatgttatcagcttagtataaacagcgctaaaggccttattagagaaggctgtggcagtttctccagggcagacgtcgcctcccgttcaagcagcgtcccttcccacaacccccgtgcagaaggcgcagcgcggccccctcctcgctggtcccagacctggcgggctcctcacacctacctggccccctccgttgagcttgttggtgagcttgactttgctgaaggagacgggagccttcatccagtgggccccgaagttgggcgagtcggggtggatgtagacgcagctgggcgcctgcggctccggcttgccccccggcacccattccccgttcacgtacttccagcggtggttgtccgccgccacgaagtccagcaggaaggagtacatggcgttggggtccaggccagacacgttcaccttcagcaccggaaacatcctcctggaaaacacggggcgggcgcaggaggaccccgacactgaccaggtaggccggaggcagaagctgggcacagaggcctcagttatttcggggcacagaggagccccctggggaacgtccgagggtgactcccaagctcccccttccccgagccctgccaggtccaggtggcctcctcaccatctccacggcctcgggagggaggggaggagaggacctggcgaagggtttcagtgcaggaggccacatcccgcggggacaggcggggaccagggcgcgcctcgcgggtcccgggatgcctccgaggtcgggacaccgaagtgcgcgttcctcctccccaagcttccgcggagaaagccccagaagaggggcttgtagaaatgcactcgagggagttaaccagagcgggaacaaacacaaagccctcctccaggagaaaaagggttcgacctccgggaacttgccaggtcccccaggctgcccaggcgctggagagcgcggcgcgcgcgggctccggacgcgcacccacctgccgttcttggtcacgatcatctcattggtgagctccttgaagcgcagccacagctcgctctcctccaggcccacgcgcagttcgcgctctgtggggtcgcccttctcgctgcccgcctgcagctcattctccacggcgctcagcaggtggtccactcggtactgcaggctctttcccgcgctctcggtgccaggggagctcatcctcccgtccggctcccctccccgccgtccccgaagcccagactcgctacctgagatccaccttccctgctcttggccgccgcccttccgagaaaaggggccccttggaccgagacctgcgacggctcccgggtcccgggtcccggcacagacccgggaggagggcgcggaccaagacttggggggaggggacgggggcagaggggtggggagaagttattccacttgaactccccaaggctctactagtgtaggtctctggggaccgaaattcagtgccctccccataaatagagccgcggcggcagcgctggggtgctcggcggattgggccgcgcacgctttgaagtgccgggcagcctcccattggccgagagcggccatatcagacccagccgggcgggtctgggaggccgggggccaacaatgggctcccgcacgcctgtttcatgtaaatccggggccccagccctgcgagccccggcccagcccctacacccccgcccttctccaaatgtttgcacctccatcaaagcggcggggcaagccccggaggaaggtaagctggacgccccggcctgccccagcccgccccagcccgccccagcccgcacttccgcgaggggctgcccggcagcctgcgatgctccctgattcccgcgcggggtcctcctcgctttcccagcgcgcccggatcccgcagccgcgccaggctggaacgttcgcgcggcctcacctgtccccgctccaggcgcgcctccctcccctcccagggacgagcgcatttggccgggctttgggatgcgccgcgctcgtctcgccgcagtagtagtgctgttctcgcgcctccgatgcctcaactctccagtctggcagtttccggtgcacctgtccccacacgtccctcgcccacggagccccaggcggcgttacgcacacccaggatcgtggatcagcctgccccggcgtcgggtgtccccgc

SEQ ID NO: 332978 - DNA, 1333 bp, Homo sapiens
  chr6:166582089-166583422
  hyper
cgcgcgcagagagggaaatggacggaaataagcaaaagcaaaacaaccccttctgagaagtgtcctcctcgctctcttataaaaacaggacttgttgccgaggtcagcgcgcgcatcgagtgtgccaggcgtgtgcgtggtttctgctgtgtcattgctttcacggaaggtgggagaaggtcggggctggcggggtggtccggactagtgggactcggggcgctttccccgcccggcccagcgccaagcggtgtcggcagcggttgttttattacctttcggtgagaacttacgcgaggagagcgaaggagaggtgacaatgagcaggaaatagttcagtggggtctctttaaacagtaacattcctcctaaaacgggagcccaggaagggggaaggaggcagaagctcccccttccaaggcctggctttgcgcttctgcacacctcgcccattcgctggacgagggcctgcctcgggtagcagcctctgtttcccggtctcctgagcgggcaccccagccccaacccctctagagaaagcctgcgcatcgggtggggcagcgagttcagaggagtcttgcgccctagcaagggggctttcccgcggacatggtatctgcgccccgcgctaagtctcccctgccccctgccccctgcccctcgcccctcgcccagccgggctcgctccggggtcgggaattgctggggaagccgaaggagggatccccgcccgggactcgagggatcgacccgcctcgcggtatgcggagggctgccaggagccagtcccggggaagggtgcctgccgcccgtgggggacagggctccttctctcccttctccaacttacaccgacgagtcaggaagccggagcgtctagtccctgtccgcatttctcagtgtcttttgatgtctgggatgcatggatattcccagggggctgacccgaggtggggaagtttccttctagaaagaggcaccaaaaggacctcatttgctcctgacgccggaccctcctgacacgccttcactggctcatcgggtcctgggctttgggggagagcgtggtgcgtgttactctccttactccgggtattaaaatgtctaagaggtcatcgctttggcccaaggcctcccgaggataagataaaagggaaaagtggaggggaggtgaaggaggaacgagggtgggtcccaggcaattgagggcctcggaaccctaggcacgggagcgaaacctctcctgcggcttcagggcaaaggagtcccgaaggctggatccctcccctgcgctcggacggcgtcgcggccgcttttcccacagtcgggaagc

SEQ ID NO: 332979 - DNA, 860 bp, Homo sapiens
  chr6:166666751-166667611
  hyper
aaagaaaaccagaacgagaaagtgcggccagcccgggctcaggagctgggtgggaaacaaagccgccagaaaatgacaagtaaacacgcagccgcgggaagccactgggcggagcgggcgctaatgagcgcgcagcggggccgccacgcccgcgcggacacggagcagcggcgcctttccctgcgactggctgtgtcgcctggagcccggcggccgccaccccagggagaaagctccggtgaggggagcagacgctgggacccgtggtctcgccctctgctctttcctggctggggacgggggtagctcccaggcaaaggccctccggggtctccgcccggggggccccacctgccttgtgacggctgagatgtgcgcgtcccacccactttccaaggcgcctttgaagtcgtttctcattaaaaaacaagctttttgaataaccaaatgttcctttggcgccctccaattttattttactgtaatctattgagttgtatttgtttttctgaatccgcttcctaggaaagcgccccctcccattttaaaccgttctcaggtggttttttctggaagcagcagtggtttgtccagcaaggattaactctttgccttttcccgtctaaacttctgaagacacctgacagctcgttttaactctgcaaacgacagttcatcctccggggtgtggattcgggctcccacggctgccgcctggggcaagtgcgtctccccgggcgcctacgcggccccgcgcgctcctggcagcgtcgcccccaagccagccccgcctacccagagagggccagtcctgttccgggtcccgagggccttgggaaccccacaggttccttcctccc

SEQ ID NO: 332980 - DNA, 952 bp, Homo sapiens
  chr6:167039796-167040748
  hyper
atctgtatcagcctcggcgctgcgaggatattgcatcaggctctttactcctgaacgccgttttagacgcctaagcagattgtgctgctgcctgttcttccccgttctgtgaattctacactgacttcaagtgcacgaatgagctacaagataaggtggaacctgccggccgggcacggcagacagcacctgatcagcgcctcggagggcggagctggggggcttctccactcgggactttgagggacccccgcggagcgctccgcgccactcggcggtctagctgcagagaaagcccctcctcacccggggctccctgtggcccacaggggaccatcccacaccccgtgcagccagcggcggagaaaccagctggaaatgcagtgggggtggagttgcccccgcgaggacccacggaccgcccaattactacggagtcccagcgataacgtttggagccgtttggttcgattttcggaaccggaccagctttccagtaacttgaactccctgacgggtctcggggtccacccaggggtggcgaggcgggctcgggcgaccacggcccgctcagtgcccggcacctgcgcgccccgagggcggccgcattacctcgagccggctcaggctggagctcttggagcgcgacttcctgcgcaggtacacagagaagaacctgcgcacggcgaacttcttcatgctcaggtccatcgccccgcgcccagcccggagcagccgcagggccgggggacgcgcatccccggcatcccaggcgcggggctcaggtccgcgggcgggcacgcgtggccagggagcccggcacggcggccatgggcgcggggcgtggggcgcgagctgcggtcacaaagggcaggccgcgccggccaccgcggccggggccacaatcgctccctccgcctccttctccgcctcccctgcgagtaccagcgcc

SEQ ID NO: 332981 - DNA, 555 bp, Homo sapiens
  chr6:167764613-167765168
  hyper
gagccccgcaggcccgtggccccctgcctggttctcccgcctctgcaagcctagccttcaggactccgcctcgcccccctcttttctgttcggagactcacggggccgtctgtctggaccacgtgtgcacatttctgaccacgattcctccgcacaccagctacaggcaccgcagcgctggggacggcacagctgaactgtgctggcagcgaaggggcctcacggggacggctcagctccctgagggcgcaacccacctggtccgggggcgggggggggggtgaggaataaacttccgcggttttcagtgacccagtttgttgcatggcacatgttggaaaggtgaatctgaccgcgttgaccgcgttacttcagagatgcgctgtgagctgctttgtgccgcgaaatgacctgtttacccgacagcgccctctgcagcccagcgccggaacgggctttttcatgatgttcctgcgttgtgtttacagcctccctgcgaggggttcgcacgcacaggcggacctcgttttgttgcgccttgctctattgtgcctc

SEQ ID NO: 332982 - DNA, 154 bp, Homo sapiens
  chr6:169653496-169653650
  hyper
cgtttacccgggttcccaggcaggtatatacattgaaatagcagcagccacaaccctcagagaggaaggggtgcccggctggtgaaagcacagccacggaggaaaagctgaggagcggccacgtgccttgctcttcaagcgggcagtagaaaca

SEQ ID NO: 332983 - DNA, 198 bp, Homo sapiens; identical to SEQ ID NO: 232615
  chr6:169653852-169654050
  hyper

SEQ ID NO: 332984 - DNA, 502 bp, Homo sapiens
  chr6:170124883-170125385
  hyper
cgccgctcctctcccgcctttgttctcgggtcgcccctctcgctggtggcgctccgagagagcagcggagccacctgcccaggccacgcttccccgagcatccgcagctgcacccgggggctgtcggcgcccgccccggagcgtgcgggaggcacagcgggaagaagtcgctgagattcggccctcgtggctttgcgtgcccgcgtggttgatgcctccgccgagaacgcggtcggccgggagccggggaggagcgtggacgccggcctggcaggtacccccgcgagaacgtgggagccggtgtatttcagctgcatttattactgatctcgggctgcaccagggcacttgtaggaccgcactaaaaacagcggaaagtgaggagccaagcctgggtccggggcggcccgccgtacagctggcctcacggattccactgcctgcgcctgcagatgacttgttctggagagtagagaatgttctcggatttaaagtacaatcc

SEQ ID NO: 332985 - DNA, 925 bp, Homo sapiens
  chr6:170598179-170599104
  hyper
cgagggcccttgtcatttttcttgggggatgggcacgctccgggtggtagcggtcgcgctgcgcgggtaatcgcgccaccaacgcgtctaggagtcgggaaaccagaaccttcccacgtgaaggggcgcctctgactggagacctggcacagaggccggatacggaaatctcccgggcgcgctcggcctctcctcctcgccccagcgcggtcccctcctgcaggccgcggggccccggggcgaggtgtccgcgctgctgggctggagtcctggggccgccgctaggcagatcgcagcgcccacctgcgcctcgcggggtccccgaggtcccgccaccgagcgcccaaggcgggatcccagcgcgtcctgcagcccgcccagcttcagggccggcccggcgcgcgcaggtgcggcactcaccggccaggtgaagccgaaggggaagcggatggggttgctgaacgcggagtcggcgcccccgccgtcgggcagactgaaggagtcgacgcccagcacgggggtgacggcgctgccgtaggtgcagggcggctcgggggacacgctggcctggtagtgcttgaggcacacgcggaagaaggtccggcaggcgcacggcggtggccccgcgcccccgcggcagcagttgcggttccccagcagccccttcttgttgacgaactcctgcagcttcagttcgaacaccccagagctccagacctgcacgggggagggcgggggcgtgaggacgcgggtcccgcccgagctagggggcgtgaggcctgggtggggggtgtgcggagagcctggaagggctcaggggccgagcgcgctcgctgcacggccggcgctggggtcgtcgcccccgggattcatcttccgggccgtggctggcgcggcccgtgccgctgtccgcccctccccgcgc

SEQ ID NO: 332986 - DNA, 771 bp, Homo sapiens
  chr7:149024-149795
  hyper
cgggagaacacggtcaggcccgcaggagacgccgcggcacctgccagaaagagagccgcaggccaagaccaggagacgcgagagaggtgggcagggctgcccgagagacccaggcggccattgcccgccctgcgtctgcgcctgcgccggagcctcctccacactgcgccagcgccgagtccggccgcctcctcattgcgccggcgccggggcttcctccacaccgcgcctgcgccgatgacaacccgcctctacaggacgcctgcgcaacgccatagtcacctcatcagctccgtgcacttacgagtctctctctgatcgaccacgtgttcctgtcggctcacagaggccgcctcagggtcctcccccattgtcttcctcgcaccctccactgttcccggcccttcactctgcgcttgcgcaggagtcgctcgctcctctctgcgcctgcgcagaggccacctcctccccgcccgtccgctcccttggcgtcgtcttgggccgcgccccgaccccttctgtttacgcatgcgcaggagccgccctgcgcgggtggggggctgagcccctgtggcttcaggtttaaaggcgcgagcgccacccacgcaggcacaagggctcctagtcgttttatttttagcgtaaggttttcctctttaacaaggaagtaaaaaaaaaagttgtgcaataaatattaatcgtccttatatgtactcgggaacgttcgtcctttaggttttctcctggcgcatgggcgccgccaatcatttc

SEQ ID NO: 332987 - DNA, 2016 bp, Homo sapiens
  chr7:191993-194009
  hyper
cgggaccggtgccgggagctccgctgccctggcgtcccctgggtccaggcccagtcgctccttgggcctctctcgcggggccgcctccgcctcctccttgccgagacgggcgtggggcacggggtcgccgcccggcggggagctcatccggcggcgcagacgccccgcggctccggggagggacttggcctgggccccggccccgcgctcctctggggaggagccgagaggctgcagctggcggcggcggccccgggcgggagggggtcccaggaagcggccaggccggagccccccactcggccgcagctgctggcctggccagaaccgagcgcgccctcccggtctccgccgcttccctctgcaaaccgcgggcaggaggagccctctccttagcgggcccggagctcagaggcgtcgcggggcgcggccgaggggaggaggaaggagagcgggagcgcagccggcccgggcccagccgtgactcgtggggcggcggctccgccaatctgtgggcgctgacgcggggggcggctccgcggcgctcgatatctgcccgcccgggacgcggggcgccgagaggctcggccaggcgggagctgcgctcggggcggccgctgcacctgcccgggaccccgccggccgctccccgcgcccaccccttccgcccttcgccccccccttccccccagccccggtctcccgggcgcggcgtgagagcagagcccggcccggaggagccgccccttccccgcccgcccgcccggcgcctggagaggagcgcgctgaggatcgggacgcctgcggccgccgccaccgcccaggcccgtcgcgccccggccgggatggacccacacgcccgatgagccccgcgccggcggctgcgagcgccgagcctccccctgctgcggccccagccgccccccgcgcgcccggctccgcggaccaggacccctgggctccccggctgagggcgcggccgctccggagaggccgagcggggacgggcccgagatggcgcggggacccagcgctccggcggcgggcgccctgcacgcggcccgggcccggggacagccccggagctggtagccgcccggcaccgatggaccttgacccgcgaggcggcgccgcgctcgtgcccagctgcagctagaggggcgcgcgggcagaacgcgctccaggcccgggccggcccgcgcggccatgaagatgatgctggtgcgccggttccgcgtgctcatcctgatggtgttcctggtggcctgcgcgctgcacatcgccctggacctgctgcccaggctggagcgacgcggcgcgcggccctcgggggagcccggctgttcgtgcgcgcagcccgccgccgaggtggccgcgcccggctgggcccaggttcggggccgccccggggagcccccggccgcctcctccgccgccggcgacgcgggctggcccaacaagcacacgctccgcatcctgcaggacttcagctccgacccctcctccaacctctcgtcccactcgctggagaaactgccgcccgcggccgagccggccgagcgcgccttgcgggggcgggatcccggcgccctaagaccccacgaccccgcgcaccggccgctgctgcgagaccccggcccgcgtcggtccgagtcgccccccggccccggcggagacgcctccctcctggccaggctgttcgagcacccgctttaccgggtggcggttccgccgctcacggaggaggacgtcctgttcaatgtgaacagcgacaccaggctcagccccaaagcggcggagaacccggactggtgagtgggggctggcaggtgcccacccccaagggagccgtgagcccaaggcatggtgtagagaggttcaggggccccagagggccgccccccatggaagaggccgggcagggagtgtggtgcgggaggaggcagccgcctacctcagggcgctgcctttgtctccagaataacctcctccttgggaggggctgccggctggtcc

SEQ ID NO: 332988 - DNA, 726 bp, Homo sapiens
  chr7:556571-557297
  hyper
cgggccctgacccgggggccgcctccgcccgcccgcccgtcggaccgggagccgcgcctgcccttggggcctcgctccgcgggctgcccgcccggcgcacgggccagggctctgcgcccagggtctgggccggatcctgccgctcccccggcccgagggcaggcgcggggcccgcacacctggcggaggccgcggctgaactttgtgtgacacacgcggcgttttccttaaaggcgaaaacaatcccggggcgagcgagcagccctcggccgccgctgggagagaaagtggagactggaagagaaactcctgactcatccgcccgggcgcttatggctggggattggattctgacctttcggtgcgctcctgcgcggcgccccgcccggccccagctcggggcgcacaggccgcccgcccgcgccctccccgcgcgcggagggaaggggcgcgatttacctacggagtctatctccaggagtcgctggaggtcccggatgctgtggatctgactgcgggccagcctctcgatcacctcgcgggggatctcggcttcctgcaagcagaggccacacggtcagcgcccgcggccccgaccccgccggcacgcgcccccggccgccaggagcgccgccgccccgggcccgaggagaccccgcgagcgccggccgcagtccccgccccagcccccgcggagccctcgccccggccctggaaccagaagcc

SEQ ID NO: 332989 - DNA, 367 bp, Homo sapiens
  chr7:557636-558003
  hyper
cgcacgcgcgcgcagacacacacacgcgcacacacatctcactcacacactcgccccaccccgggctccggcccagccgcggccctagcgccgactaagacgcccaaatccagccggcggccgggagaagaagcctccagggaaagcgagggttaaacttccacctcgcgcagctctccgtgccctgcggagaccaccctcacctctggcctcccccactcccctccccgatttttaaggagagtcgggggtcgctggggagcctgaagcactaagttcccacgacgggggctgtggaaagtcattcatcacagcaaagctcccggggatggggatggggatggggatgggggggcggggacgccgc

SEQ ID NO: 332990 - DNA, 325 bp, Homo sapiens
  chr7:561093-561418
  hyper
gcatggcttctggaaagagccggactcgcagggccaggacgcaggccggaccccggcctcattcttcggccagttatcccggagtggcgcgcatcctgtcttcctgggcctcggactgctcgcgcgcagagggggcccgaggacacctctgtggggttagaggactcggtaagacggtgtggaaggcaaggaggaaggtcgcgttgtattggggatggggtacccgtccctcccagcttgagggatcctgggggtcctcgccgcctctgagggcctagatggctgcttccctcggctcccctgcccggcctggagctacgggtgc

SEQ ID NO: 332991 - DNA, 694 bp, Homo sapiens
  chr7:751765-752459
  hyper
cggcaccgcaccgcggggcgcaggaccccagccccccgccacgccgcccccggagtgcccagaccgccgggaaggcgcccacccagagaccccgcgccccccgccccaaacccggcctcagcgccggcgaggaccctcccgggacccctgaccgggagccccaggcccggccccgccccgcgcgccccactcccggcggggccgaacccttccaaatgtccgcatccccggggggcctcccaggcccggggctcccggcgcagaccccagcccggccccgcgtacctggatgcgcggcgcccgaggccaggaggcggctgcgcggggacgcggggcgcggggacggctggcgagcgagcgagcgggtccccgcactgcagcggcgccgccctccacgcccgcccccgcgccgcgcgcagctgctgcacccccaacgccgcccgcgcgggcctgcagcccgtctccccccgaccgcctccccgcggggcccccaaccccggcccccacccccggctctccccgcccccgccccatcccccaccggcgcaggttcaggccatcgctgccaggaccccccgctgtcgccgccccccgccccctccactcagactctgagtcgcccactccagccggtgcaggccgcggggccgcctctgatggcctgggcaccccccactcccgccccgttcacgac

SEQ ID NO: 332992 - DNA, 238 bp, Homo sapiens
  chr7:822395-822633
  hyper
cgatcttcctggcgtggccgcctcccgtcacgcagcgtcagaaactcggtcttcctgccatggccacctcccatccggcggcatcagaaactcggaccttcctggcgtggccgcgtcccctcacacaacgtcagaaactcgatcttcctggcgtggccacctcccctccggcggcatcagaaactcggatcgtcctggggtggctgctcttgttacgcaacgtcagaaactctcctgc

SEQ ID NO: 332993 - DNA, 197 bp, Homo sapiens; identical to SEQ ID NO: 232634
  chr7:852642-852839
  hyper

SEQ ID NO: 332994 - DNA, 274 bp, Homo sapiens
  chr7:889360-889634
  hyper
cgacgggctgttggagctgctgcttaagccctcatcacagaagctcatagccaccagatcgcatttgctttgattgttgactgtctcgtgtgtaattgagtttcccagtttctacagactgccattgctatgcacggctgagatggacagagtttgcttgtgaatccgccacactcactgcctgtcaccacacctgcaggcgacgactgtaagggcaagaggcacctcgacgcgcacacagccgcccactcgcagtcgccacggctgcccggtc

SEQ ID NO: 332995 - DNA, 333 bp, Homo sapiens
  chr7:1001822-1002155
  hyper
cgatgtgggccgcgaccgtcccggcccgtgcaggaccactgtgggcgaggggctgtgaccgtcccggcccgtgaaggatcaatgtgggcgaggggccgtgaccgtcacggcccgtgcaggatcaatgtgggcgaggggccgtgaccgtcccggcccatgcaggatcaatgtgggcaaggggccgtgaccgtcccggcccgttcaggacagtggcctataacctctgacatggggtcacaggagaatgcggcttctgccttgcccctcgcccctgccccgcctccacatacacagctgggctcccctgcagcctccacgctgcagaggccacgc

SEQ ID NO: 332996 - DNA, 332 bp, Homo sapiens
  chr7:1270815-1271147
  hyper
cgcctctcggtctcctggattggctgggcctggtcctcaaccctgcgccgtcccctcctctcccgcaaggagagacaagagggtcattgaagtcggagtcagcgtggatcggcccgtccacgaccttcagttaggaacagggccagactgtgggtccagtcgcagggacaggcagtcgtgtggcaggacggggtggccttgcgcccgccaacccaagcattcccctcctgagcgtttccggcaccccccaccctccccggcccaggcacgggcacctgacccggagggacgcagagatgcgcacggtcccggcctgcccttccctctcacgc

SEQ ID NO: 332997 - DNA, 866 bp, Homo sapiens
  chr7:1275792-1276658
  hyper
cgcacgcctcgggcgccgcggggaccgcgcccgcccctcccggcgagccgcctgcacccggcacctgcgaccccgccttctacccgagccaaagaagcggcgccggcccacagccgcgcccaggtcgccctgcggacaaggacgcggcctcgtgcgggccaggggccgctgtggcggcggtggagcgcggcgccgcggggctgcccaaggccagcccattcagcgtggagagcctcctgtccgactcgccgccgcgccggaaagccgcttccaacgccgccgccgccgccgccgcggggctggacttcgcgcccgggctgccgtgcgcgccgcggaccctgatcggcaagggccacttcctcctctaccccatcacgcagccgctcggcttcctggtgccgcaggccgcgctcaagggcggcgcgggcctggagccggcgcccaaggacgcgccgcccgcgcccgccgtgccgcccgcgccgcctgcccaggccagtttcggggccttctcggggcccggcggcgccccggactcggccttcgcgcgtcgcagccccgacgccgtcgcctccccgggggccccagccccggccccggcgcctttccgggacctcgcctcggcagcggctaccgagggcggcggcggggactgcgcggacgcggggaccgccggccccgcgcccccgccgcccgcgccgtcgcccaggcccggccctcggcctcccagccccgccgaggagccggccacctgcggggttcccgagcctggcgcggcggccggacccagcccgccggagggcgaggagctggacatggactgaggccgcggcggccgggagaggcgcgtagccggcccgcggccgctc

SEQ ID NO: 332998 - DNA, 240 bp, Homo sapiens; identical to SEQ ID NO: 232647
  chr7:1277066-1277306
  hyper

SEQ ID NO: 332999 - DNA, 329 bp, Homo sapiens; identical to SEQ ID NO: 232648
  chr7:1277520-1277849
  hyper

SEQ ID NO: 333000 - DNA, 923 bp, Homo sapiens
  chr7:1280235-1281158
  hyper
cggttagatgcagactggtttaattttgttgataaatcggttcgttgggggtggggacggggcgggggctgtggggagtggggagtgaggagagaagggtgttgtttctttgctgatttatttttaacccgaggttgtacaagcccctgacagtttggataaattagccaggcctcgcagtctcctaatgagagggtattatttcggcacctcggaaggagcgtgaaaaatgagagagactccatccggaggtgtcggatcgattcaggatcagggtgtaaattatatacaactaaatatccagccgcccataccgctgcttaatacggagcttagaaatgcaacattaaacaaagattatgagagatcgacgcctctggaccgagcccaattcactgctcagccgggtcagcccctgccccgcgggccgaggatggggagggggcgcgcaaggagtgaaaacggcgagtttgggatgagagccagggccaggaggggagcctcgccctcgctactccttccctttcttctaaagccagggagctccccgcccagcattgcccgttccttcctccccgccagggcccagagaaatccgggctccagcaccgggcctcagtttcccggaagcggacttgggccccgatcccgggccctctccgcccttcccaggtctcaggcgtcgctgcgtggaggaggcgcgcgtggctcccggcgccgatgtcccggcccggaaccctgcccgccgctgcgactccggggcgggggtgggtcagcctcgggggcggccggggtgggcgtggaggtggacgcggggccgcatattgggcgcttggttctgtttatctcacttagcggtggagggactggagggaaggggcggcccgaagggaggccttggtggggcccagcggctccctggc

SEQ ID NO: 333001 - DNA, 812 bp, Homo sapiens
  chr7:1286841-1287653
  hyper
cgcgtgggagcagcgcgcggtccctccccaggaggcggtggaggccgaagggagtcgccgggtacccggctcaggccgtgtctgagcgccagggatgcgcagaaatgggagcctggccgcgcctctgcagcggccttggaggagcctctggagcgggccccgcgggcgcgtggggtgggacctgctggagacccgcaggcggcggcggccaagcagggtcaggcggttggcaccacaggtcgcgccctcggctgcagtcggggcagctccagggggccgcgtacctcccgcttcacggctacgcgtgggggcggctccgtcctggcctcaccagcctccccggagcccctgccggtccccagcctgggggctcaggggtcccgttgggcgtgtgtcccgcccgggccccggtgtggggggcgcgcagtcctcagggccgcctccctcccgcccccagcacagcgccccccagctctcagccggtccttgcggccgcgggatcccagccccagcagcgggaaactgaggcccgcagcaccgatgcgcgtaaggcagctcggatggggtcagaggggcgggaaggcggaaggcgggccgcaccccccggaccctcaggacctggagcgcgtggagggcgtggaccaccccggatcccccaccaccgggcgtgtctgccaagggtgtcattgggcgccgcgcagaaggggcttccgaggacccgcccctcccccgcagccgtcagggcgctgacggaggcagctgcgcctgtttaactgggagccggttgcttggcaacccgaggcggctcatta

SEQ ID NO: 333002 - DNA, 431 bp, Homo sapiens
  chr7:1408460-1408891
  hyper
cgggctctcagccaaccagctgaaccccgggctgcgctctccccgcccctgcctggcgagtgcagattcccgcctattttccgacacccgcctgcagaggagtcgggcgccagatgggatcgaacccagcaaggtgagaaatccgggcggggtggcagatggggaggccttccccggggaactccaggagaggggaggacagcgagggccccgggcgcggcctctcgtgtgcccccagccgcggggcgcaggcccgcagccccccaggggcgccgcagctgtcactccgcggtgagtggcgccatccggatcggagatgggcgcggctgcatcgccccagggtaggaagctcatcttcggagaccgcgcggctccgagcgaccaggaacgccccctgcgggctgcgggcgggagcgcggaccccggcccat

SEQ ID NO: 333003 - DNA, 1005 bp, Homo sapiens
  chr7:1498587-1499592
  hyper
cgtctgactcagccggcgggcgggggatgccatggctctggcccagctgcattcggtgtccgggcacactgaggccactgaggacagcctcggggggctgcacggtgggctgtgcctgcccagtcccacgcctcggctccccatcccccagccgcccgggcctcagtttccccgcccgtgtcagcgcgcagccgaacagcagaagaatcaaagggcgccaggcaggacttacatgaggtcgggccggtggcggtgcaggatggcgcagaaagccaggccgtcgcggaacgacgtggtcatgttgcagatattcacgtcgcggtagccctcgcactgctgccggcaccactgttgcagcgccctgatggccgccatgtgggcggcgcgcccgccgcgcggcggaaccgccctccgacaccttcccgcggctgtgccgcgaccgcccggccggcgggacagacgctgggaccgctacggaaccgccagacccacggcgcccagccccagctgagccggactgagggcgacgagtgccgggtccctaagagaagccgagcccggccccgcccccgccggccccgcctccttgtaggccccgcccccagccgccaagtcctgcctccggataggccccgtcctcacacctcccagccccggcataggctcccgcccaggcaggccccacctcccgacaggccccgcccccagccgccgggtcctgcctcctgataggccccgttcccacgcctcctggccccggcacaggctcccgctccaggcaggccccgactccggacaggccccgcccccagcctccaggttttgcctcccgagaggccccgccccacgccgcccggccccagtacgggctcgcgccctaggcacgtcccgcctcctggtaagtcccgcccccacgctgtcaggtcccgcccgacaggccccgccccacgccgcctggcccctccccaggccccgccccgccgctgagggccgagacccccaacc

SEQ ID NO: 333004 - DNA, 2892 bp, Homo sapiens
  chr7:1703861-1706753
  hyper
cgggctcggcccgctctgtctccctgttccctggaggtctgggcgcccccgcgcagggactaagggctggacagccgcaggcaggggctccgtccttggcctccacccttcgtgtccagcaatcccgggagcaggcggcggcacttcctccatgccccggcctcaatcacggtctcagtccccccaaccccgtcctgcaggaacaagtgtggtagaggctcggggtcggagggcgggcggccgtcccgcgggctggacggagtttctgggctgcggagaggccgttggacccacgtccggacaggagccccgcgcgcccatccccggcccggccatcctcggggcgcgctgtctgcggcctcccgcgccacccccacccctgtcccgggacctcctccgggaaagacacccggggagcagccccctcccctccagtagtcccctcccctcccctctccctgccctcttgacggtgtggggctccccggccggaggggcgcggcgctggcagcggggtccagagtgtcgcgcccagcgcgcgctgggggtcccgggctccgcagctccgcacgcggccggtttgtgaagcggcgcgcgggggcttagccgggcgagggcgctcttgagcctggtttggaatttttagcccacacgaaagccgcaggctggggaaggggcgggtgggagcgggagacgccctgggaagccgtgagaccgctcggcgagggctcgggaccaccagggagcgacgggggacccctcggctcagagcccgagggcgcgatttcggatccgctgggattccggaggcacatgaagggagagggaaatccgctaaaccgaaccttccgggaatcggaaggcgccgggccgctcccacgcctccccctcctcccggccgaaaggcggggggcgacgcgcaacggggagggaagggagggaggggtcggcgaccttaggggagggcgagtctctggggacgcggggccgccaggggcccgacgaccctctcgctccacctccccgcccccaagtgccccgctctccccccgccccgcaaacgcgcgtcctgcgggctgtgctttggccctcgcggacgcgcgcgctcacagagggtctgacttggggtcaacttccacgaggttgccgggcgcctgtgagcacagccgtgtccccacccaggggcccacctcccagcgccaccagggtcccgacccccagaccttcggacgcttctcttccaaaccgaagcctgggagcctctgggtggcctggggcgggggcagggggcgagcggggcgggccaggaggagggggcgaggccgccactcggcttcccacgccgcccccgcggctggctccaacttcccctccggagcccccctccggccaccccccagcccaccgacgtgcgggcagcgaccccgccccccgcccctccggtcgcccccgccgcggcccccgccccctccccatccctccccgcgcgctctcccacatgaaaccttccatcacgctcagaaagaatgtgctacaacctcggcgctgccgcggccgccaccactgcgcccgcgcccgagcccgagtcggagccggagccgccgctcccccgcctgcccggccagccccgggctccgagcgcgcggtccccgccgccgccgccccgcgctcgccccgcgcttgacgcagtgagcgccgcagcctggctcccgccggctccgctgggctccgggtcgcaggccgagtccagccgggcgggctccgggaggggccggcagggcgggagggggaggagggctgtctggagccagcgagcccggaggaggaagaggaggaggaaggaggggaagccgccgccgccgccgccgcgctcggggaaccggggtgcgcgcgctctgctcgcccgcgacagtgcctccagcccggggcccgcaccccggcccaggtaagaaggggcctgaggggcagggggctgtccggggccgggggacccctctgtcgccgctgcgggatcggagggtccccgcccctaggggaggcagggaagaggatgctctctggggggggcggcggggggcagcgcagggtccccagcggctctcgcagcccgggccaccccatccctggtgccctgacctcggcgtccgcgccagggccgagtctccccgcccgcggggctctggatgcggcgctcggggcccgcggctcccgggcgtccccatccacccacccaggttcggaggcgggcgcacccgaagttagcggccgccgagcctgggccggacaaacttccctccccgacgccgcggctggaagggccaggactccggacccctagggctagggaggcgccgcggggaccccgaaactttccggagcgcgctgagagcaaaaagccggctgggcagaaagagggggagggggctgggcgcgccttcgagtgcgctggggtagccgcggcgccccaagttgaaccacagacgaacccctcttcatctgaaacctggtctcggagtcggaggtggggagggagtgggctgtgggtgcctcgacttcgcaaagccggcgtgggggggcgcagcgccccgccccgcgccgcttgaacctccggagggggtgttacgggacccccgcccccaccccagccggtggctgggctctgccgaccgctgcggagctcccgggaaggacccgctcgcggctattaataggcgtcggtgaccctagcctctcccggtccgggaagctggcgcggcggggctgggctgggctgggctgccgagtggggcgggaccccggggcccagagcggacccccagctctcctggtccctcttccgccgctcttccctccctgccgcctgctttcctcccattttccctcttcgatctc

SEQ ID NO: 333005 - DNA, 751 bp, Homo sapiens
  chr7:1708913-1709664
  hyper
cggcgagcggagagcgtgccgggggtactgaggccgggaaccagaggcgggcgggggacaggaagcggggagggggcgccggcggggacgcgcgggctgcgcggggactggagagggtccccaggcgccggccgttctgcgaacgcgggcttgtccaggcaccgccggggcctgcccggcccgagcgtggagtcccgaggctcctgccgggggtccaggctgcccctggggctctgccttcgacgcgctgtgtagggccagattctgggcctctcttgactcagtttcccttcctgtaacatgcggacgggggcttccgcacaggcaggttgtcagggtgaaactgagccgaagagtgctccagaaccccctgaagtcctcacagaggttggggtgaatgaaggaaggaagcggggccagggctgggcagaggaggcccggcctgcgccctgcgttctccgcccctaggtccctgccctcccggataaggggcggaccgacgggaggacctgagaacgccttggctttgcttgaggtggtgggagtcgcgggtagcttgttcagccaacagctgtcgcccccactccccccacccacccacccaccccctccaccttttagatgtgggcggggagggccggggacggaccgcgaggacgccccctgcgctttctaggacctcccctccttccccagcccctgcgcgtcgccgggagagggaaggagcgggttgccgcggggagccgaggag

SEQ ID NO: 333006 - DNA, 290 bp, Homo sapiens
  chr7:2517249-2517539
  hyper
cgctggggcctgtgcccggacgtcctggtaggagggtgggactgctgaggccgggaggggcctcaaggtggtcgtgactgtccgccagccccctgggtggtgcagagcagtgcggagcctgcggctgtggagcccgtctctcctgcctggctcgtagcagggctggccgtggccctgcagggggcagccctgggcagcagaggatgagcgtgcctgccctccccggccacatccgcgtccccatcctgcctggccgtcctggggcccagcaagccgcaggtccctcctac

SEQ ID NO: 333007 - DNA, 455 bp, Homo sapiens
  chr7:2558444-2558899
  hyper
acaccctgctcaggcgacccttggccacttccgggcccctcgcccctcaccctcggctgccggcgcgcattcctgccgcccccgctcgtgcgaggggcgggcccgggcccgtgggaagggccggggatgggggccgtgtgccggggaggcggggtggggagggcgcacagctgggccgcatctggcccgagcgcaaggagaccaaatgggacagaaggcggcctttcatccggcgagggaagtggcggccttcgtttctcctcgccatggggcgcctgaggatttcggggagccaaccctcccgacggagggccaggatcgaggaaatcagccagggaggaaggagtggaatttggttctggtgctttctcgttagaacctcgtgtccccacctgcggcacaggtggccaagctcttgctctgtacaaataacggctcccctgaaccgagcgctc

SEQ ID NO: 333008 - DNA, 152 bp, Homo sapiens
  chr7:2559952-2560104
  hyper
cgggcgagcggggcggggacccaccatctggtccagctggtggcagtgtcccatgggagtcaggctgcatccccatccagccactagggccatctgtgggcgacgccagtgcaccccggtgcacccagtttgcctgctggggccactctccc

SEQ ID NO: 333009 - DNA, 423 bp, Homo sapiens; identical to SEQ ID NO: 223011
  chr7:2727879-2728302
  hyper

SEQ ID NO: 333010 - DNA, 396 bp, Homo sapiens
  chr7:3018114-3018510
  hyper
cggcgggacagaggccttgtgacagaaaagggaacaagaactcagggttttacgttgtacccacaggtgcagagctgagaaaaggaaagagaaatgaagaacggcaactcggagggaggagacggtgggggtggcgcgggcaccgggtgcaggctgagaaagcgagagggcggtccggccagggggtgggggtgctgcaaccagctctggtcacgccccttctcctgagagctcccaggactgcaggcaacttgctgaagaacttgggtaatttcccggaggccggctcacctgtttccagcccatcagtgatcttgaaacttacaaatactcagactcacactttccgcctatccgtgcaaggtaagaggagccaaacacatctcgaaatgcacc

SEQ ID NO: 333011 - DNA, 955 bp, Homo sapiens
  chr7:3082731-3083686
  hyper
cgcggggggctgtcctctcccatctcccagctccacacccacttttggtgcggctgcccttcctccctgagccaggccccaccttcccaggagcctctgagtcaggctgggctgtggtctgcaaacttccgggcctttcaggtgtcagaaaagtttctcttcctccctctggggcaggtgcaccaaggggctgcagcctcctgacccccgattttttcctgtccagtaggaggaggtgggggctttgctgggcggtgatactcagagacgctcaaagagacacggaggagaggcacacgaggtggaaagtgagggagaaaaagggttggaagggaaaaaggggagaggagagtgagagagagaaggggggcagggggacagagatggagagggaaggatacccccagcatcgcgggaccagcgggagccactcccatcccccgacgccccccccgccaccgtgtcatctcactgatgccccccatctcctccccgtgccctcttctcttcccccaactccccgcctcgtgctccccctccgccagctcccccatccccgctgcgcctacctggggcgctcatgctccgccagccagctgcgcggggcgcctcctccacgcaggcctccggcttcctccaggcgaccaggccctccgtccccccgggcccggagccgtcctccgaggggcgccgcccgcccaggggctgcagggccgggagggggctgcgggcggcgcgggcaggagtccgaaggccagaggaggcaggagagaaaaaaggagagaaagtatgtcataggctgggaggggcgggggagggaaatgcaaaacccgacaggaaatgagactaaaaaatgcgaaaggttagaaaaagataaggaagagagggagggggcggagtcggtgcttcgggaggagggcggcaaggaggtgggggtgggagtggggacagggcc

SEQ ID NO: 333012 - DNA, 1675 bp, Homo sapiens
  chr7:3340362-3342037
  hyper
cgtgtttgcaattacggtaacttggcgcgtcacccccaagcactgagctagctggtggtagccgggcgcctctcggggcgcgccctattccgccctcggccctgggctgccgcacgatctgcgcgtcctgctgcacctgagcccttcccactcgggcgcccgcaccgctgcggggccgggcgaggatgcaccacccccgcccgcgagcccgccacgggagcgcgtgccgaatcgacgccgcctgcagtccccactacgggtccctagggggcgcagccggcgcgggaagccgcccgagccaggcgccgcggccggcacaaaattgcaggcgggcgggcgccgcgactttgaaaacaagcgagggcctggggggcgggccctgggagcgggcgccgcctccctcggccaatcaacggcgggcggcgggcggcgggcgcgggcggcgcgtgcggccgggctgtgaatggggagcggcggccgcggcagctgagggcgagcgcgaccgcgacgtgcgggcgggcgcactttcttctcagcgccgggcgggggcggcggcggcggcggctcctccgcgcccggcggacccctcggagctagcgcggcgggctcgggactgcgtgagcgccggacgcgaatttcccccgttgacaacttcttctcgcccggctcgtccccggcccgcgccgcgcccctcacgcggggacccaggacgccgcccctcagcgctgggcggccgctcacctcgggccggggggcgccgcgcctcccgcggagtggccgcgcccgctcggagccgtcccgcctgtcctgcccgcccgtccgtccggcgcggcgctcggggtggcggctgctcggcatggcccggggcgcccggccctcggcggccggtggcggcggcggcggcgcggagccccctgagcgcgcgggccccgggcggccgcggggatccccgcccggccgcgcccgcccctcgctggcgccgcgccccggcccggagccctcgcgaccccgggcggcgcccgagacctccggcggggacacggcgggcgcggggcggtgcggcgggcggcgggcggcaaagttggggccgggccgccgcggctggtgggcgctgctggcgctgcagctgcacttgctccgggcgctggcgcaaggtaggtgcgcgcggggtcgcgggccgggggcgtcgcctcggggcgcggaggcgcgaacttgagcagcgagagtgtgtccggggtccccccgcttcccggcccgggtcgggatgcgccttgctgggggctctagggagcccaggggctcctccacgccagactcggaggagagggaaacggagccccgtagagcctgcaccccgtctgctactttgcgttttattttttttataccgcagtagcacaaacaaaaatttttaagttgaggacccatttctcagctccttaaaaggatgcccgagtccccttcccattgcatggatgaaaaaggggctggtctgtacctgagtcttcgcaccgcagggtctggtttccggtgagtgacatccagaagacttggaaatatcaagtgccagtcgctgtgaaaagccttttccagcccctccccagggcctcgtcctctccccagcccccgcctgctcctgactcccccaagtcccaaagcccgaccccaagtgggt

SEQ ID NO: 333013 - DNA, 147 bp, Homo sapiens; identical to SEQ ID NO: 232679
  chr7:4784755-4784902
  hyper

SEQ ID NO: 333014 - DNA, 1267 bp, Homo sapiens
  chr7:4922256-4923523
  hyper
cgaagcgcagactttacacactcagctctctcccctccttccatgaatcctatctttacagccccagcccgagccacgctttcaaatgcaaacataattcaatcagatttaattctgacctgctagctgctggagaggagaccgacttgccccccagcaaaagggactttcaagactggttcctgtctggaatgcacaagaggtggcctatattaaccgcgggacacgagcaatcagattcttctgtgcaattcagattagccaaacacttgacaggcgacagggcagggcaggatggtccgcagccccgccagggccctgccaaccccaccaacaggctcctcctgcgaggccccaggagctcggctcagcatctgttatcttggatgcagtatttgtcgaggggctggaaatggtacataaatagccgggaaacaatgctttgagctggcgcacgagtggggatcgggctgcaaccgggacggggtatgtgcaggggacgtctcgccggcccaggtgggagagcgcgcggaaccctgcgccccgctcccccgctgcgccccgctcccccgctgcgcgccccggacgaagctccccctccagggcacagccgggaaaactgagggccgagagtcccctggagttgggggtccggggcccacgcggacagccaggctcaggagctctcgggggtcggcagcgcggacccccggatccccgcaggctgggccgcccttgcccgcgctagccggcctccgggtaccgccccccggtccaggccggggcccgacagccagtcggttcccatggcaactgggcaaacctgccctccgcgccccgaccagcggccgggagtgtccccgagcgcgccccgcggcctccgcgccccaggtccccggcagcggccgagcagcgccccttacgagccacccccggttccgcagtcactcctcgcgcaccccacactcacctccggcacaacccgccgcgccgccacgttcccgcgctgctcccacccgccgttggctggggccggcgcccagacccgcgcgtgccgcggcgcctcctgccggcggcgcaacgggcggggcggggcctcaaggggacggggccacaaagggtggggcgggggagaacaggtgggctggagctgggcctcggcgcccaataggcagaaagaaagcctcgaggaggcggggtctccaggagaggggcggggccaacctgctagaaaaggcgggctgtgctctggcgcctcctgccggcc

SEQ ID NO: 333015 - DNA, 925 bp, Homo sapiens
  chr7:5458503-5459428
  hyper
cgggcttggctctgggcgttggcctggggtccgaggtctccttgcggctactcgaagtgggggagggggacagccagaaccagcaccggcccccacctttccctcccgggtgagcacggggttcaagggggcggcagctgtcctcctgctgtttcctccccgacctcagcctcggcgtgcagaagtcaggcagctcccagcgagcgcagaaggtgcgcagaggcagggctccgaggctacctcccgctgggcttccgaggctggtggcttggccttccctccacctcagcctcaccatccagcaaatgggcattaggccgtctgactgctgcgtcagattaggcgcggccctggcactgtgcatgcatgcatgagtagtagcttgttttcaccgcttcgcattagggcactttgccttgccaggccggagccagatcgcaggcggggagtgcgcgacgccccttcccagcctcgaaaaagccaagcgcaggcccagccagccagagagacccgggtaccgattcccaggcttggggggggcccccctgccaccactccgggctggaccaaatgacccaaaagacacacgcatgcacacacacacacatcacggtggacttgtggggagcgcaaaaggggacagctcagatggtctctgtaccccagggccgccccccaagttcttcctcgggggtcccccgcgcccctccctcgccacaacacgccactagagaacaaacccttgccccggtcacagaccccgggcggaatacgcccccagctccggagggacacaagcaggtccgggggccaagacctggttcttgcgccccggctggcggggatctccgagctcccggcccccgggcgcgcgcccctcccccgcccggcgcctcacaaaggccctttgtcccgccgagccccc

SEQ ID NO: 333016 - DNA, 1413 bp, Homo sapiens
  chr7:5466599-5468012
  hyper
cgccctccccagtatggcgggccacattgaaatgtaaaaaccaggcctgggcgctgtggccatagggcacaggccataggccaccaggtccagccgccatcttccgcgccccacccccattccatcccctccccctccccaccccctcatacttttgtttacccagcgggataggtggccaaaaactgtggacgcaattgagtgaaagtgcgtgtgtgtgtgtgtgtgtgtgtgtgtgcgcgcgcgcgcgcgcgtgtctgtgtgtgtgtgtgtttgactgggtagaaaatcggctgggggctgggggggtcttccttgtagccctaagccgcagctgcgggagaagctgccctggctagccgaggcccggcccagcgtgcttctccgcggccagcctgggccaccggagccgaggccttccctgtgttcctaggccgctggctccggcctccgctccctggacgcctcccgactgacaaaattctccgtctttgttttaaaaccaaaggacaggccaaccttgagcccggccgtcacccctgtcgcgcttttgttggcgcaggctcggccccctacaccgggctggtgcagctcccgcgatcagacggtctctctcaattcggcgttgaacccggttcttcccaaattctggtattgctggccgcttggacacgttctccccttatccctcccccagcggggaaagaaaaagccaggatcctttccttggcgcggccacccgagccactccacccgtcgcgccaaccgcctttccaggtggggaccaaagcccccactctccgctggcatctcattgaagggcacccccccgagggattgccagcttctgctgccagctgagaggccgtgtggctgggcgtcttaagcgccggtttccgcaggtcccgtgtctggcgggcgcggctaaaacccggagaggctgtgcccgggaaagccacgttcgccgtcccctcgctgcgacaggcccagccgcgatacagcgccaagtctaggtcgggccaacccagccaggagctgcccggacctgcctgaaagaccagggacgcggcgccagcgccccacaccccaccgagaccagggcgcaaggcgggcagaattcggactgatgcgccaggcccagccccgatggattccagctcctctcggccccgcctccggccctggcctcttcctccagccggggtcgggtcctccactccactgtttggctgggaaaggaccgagacgcgctcagtgcacagggggccggctgcggccataaatctccgggcgggccctccttcccgctgctcacgccggggtgctccgggccggtctcgtgtcccgggccacgccgcgcaccctgctcaccccatcacggcctggggacccggagactgcgcagggaaccac

SEQ ID NO: 333017 - DNA, 278 bp, Homo sapiens
  chr7:5603124-5603402
  hyper
cgctctctggcccctgcacctgggagaggtggggtgctggaccgagggcgaagtaacagcgtcctgagggcccatccccaaatcgccttccttagggaagccggaacaaacgatgcagcggggcggccctggatctgttccttcctaagagctggagcaggtacagccccatcctagaccccagcaacccgcgcgccctccctcgcaccatctcccctacctggttggttgggttgtggggttccaggcgaccgccaggtggcgcaaccgacgcgcct

SEQ ID NO: 333018 - DNA, 917 bp, Homo sapiens
  chr7:5632268-5633185
  hyper
cggcgaggacaccggtggggtgagagcaccggcggggcagcagcgggggccgcagcgccgggtccctcggcccggggcccctcccgcgcggagccaggggcgggacaggggggcgtggcctggtggcgctgacgtcacctcgcctataaaatgtccggggcgccgctagctgggctttgtggagcgctgcggagggtgcgtgcgggccgcggcagccgaacaaaggagcaggggcgccgccgcagggacccgccacccacctcccggggccgcgcagcggcctctcgtctactgccaccatgaccgccaacggcacagccgaggcggtgcagatccagttcggcctcatcaactgcggcaacaagtacctgacggccgaggcgttcgggttcaaggtgaacgcgtccgccagcagcctgaagaagaagcagatctggacgctggagcagccccctgacgaggcgggcagcgcggccgtgtgcctgcgcagccacctgggccgctacctggcggcggacaaggacggcaacgtgacctgcgagcgcgaggtgcccggtcccgactgccgtttcctcatcgtggcgcacgacgacggtcgctggtcgctgcagtccgaggcgcaccggcgctacttcggcggcaccgaggaccgcctgtcctgcttcgcgcagacggtgtcccccgccgagaagtggagcgtgcacatcgccatgcaccctcaggtcaacatctacagcgtcacccgtaagcgctacgcgcacctgagcgcgcggccggccgacgagatcgccgtggaccgcgacgtgccctggggcgtcgactcgctcatcaccctcgccttccaggaccagcgctacagcgtgcagaccgccgaccaccgcttcctgcgccacgacgggcgcctggtggcgcgcccc

SEQ ID NO: 333019 - DNA, 199 bp, Homo sapiens
  chr7:5633396-5633595
  hyper
agggtgagtggggacgctgcccccgcctctcctggtccgtgcacaaagcgcaccccacccgcgcccctccagcctcccgccctttctcgctcgcggcgccgctgcggtccggagcactgcccattgcgcccccgctaggcacgcgggctaccccgcctggagggggcgaggagtggggctttgcccatcctcgggtgcc

SEQ ID NO: 333020 - DNA, 454 bp, Homo sapiens
  chr7:6543023-6543477
  hyper
cggcccccgaaggcgcgcgggaccccagcagccctggccacagcgacagcccctgtggagccggccgaggcctcggggcggggttgtggtcgcggcacctgcaggacgaactggtccggctcgctgaggcggccgggcgcctcgcggaaggcctggtagcgctgctcctcgtcggcgtcgggcgcgaagagcagcagctgcgcgagatgtgcgggctccaggcgccggggctccatgctcatcagcacctggcgcagctccgcggggctcagcttcaggtgtgccaagaggatggctgcgggcggggcggggcggtgagctgggcggggccggagcggggccggatgggacccaagacggagagggcagggcagaggcggggagagggcggacacggggcggggcctaggggagaggacggggccttgaggctggaaggacaagaaacgcggac

SEQ ID NO: 333021 - DNA, 418 bp, Homo sapiens; identical to SEQ ID NO: 232703
  chr7:6566084-6566502
  hyper

SEQ ID NO: 333022 - DNA, 802 bp, Homo sapiens
  chr7:6570393-6571195
  hyper
cgaccagcccaattgtaggaaggaaagtgggctttcaatcccagccttttatcccaacaccgactctttagggccacgcacgggttctgagcgcccaacgcttagacctcgccgccccggtacccaccgagtttatttccaacctccctgggcctcgggctccgcccaggctcggagggtgcccacccagggcagggaagcccctccacgctccagccccacccgctttcagaccagcccgaggcggatccgtggcgcagagggcgcacggttcccggaggcgcgggacgcgatggggaagctaccgaaagtgccgagagaagccctggtccttccccatctggagccggggaccgcggcgcggcaggtgccgaagggcagggggtagccgagcccaggaatggagcgagcgcgccgcgactccacgcacctctgccctgcgagcgcgcgcggcccctcccgagccgtcccggcccgcagccccgccctggccccttttggtggccccgccccctccaggtagccccgcctctgccctgctgggacccttttggtcgctctggggtgcagcggaaactggcggcggtttgaagccgccgcgctcactccccttggctctctccgttattcccttcccaggatcctcgcctgcgtcctctccagctactgcgccccggacccccacacagtggcgagtccccgcagttcagaggaagccccgacggcctttggtagaacatgcaatattttccggaggggatgccctttacgctgggcctccagggctcagcaggagtcggcc

SEQ ID NO: 333023 - DNA, 357 bp, Homo sapiens
  chr7:6654778-6655135
  hyper
ctcgggccgggcccggatggcgcctactccctctccgagtgccatcgaattgtgtgctaattagccacaatttgcaccgcggcaggggcgccccgaggccacgcctgccctctagggggtggcagggatcgggttgggtaccccccacccagacacccaggcagtgacagtcgccaaccccgtggcgcgaggacacgcgcagcagggatgcggcacagcgcgcgctgcgctcggcaccggccagcccgggacgccccaggggccgccgcatcgtgtcccccgggccgggtgagtggccgggccgggaatggttaagcccaccgagctgcggctgcctagagcggcggcggcgacggc

SEQ ID NO: 333024 - DNA, 651 bp, Homo sapiens
  chr7:6655356-6656007
  hyper
cggcccaggccgcccgcaggctccgggcacctgtagcccccgaggacccgcgtcgcctggccgccgccgaccccaggcggggccaccccgtggtgccgaccccgggcgccggcctggatcccgctgcccgcgatggtcccggggggccggccctgagccccgcgcgggattcggggccctgcctcccgccccagcccccgccggagagtctccaccaacttctgctcggccgctcctctcagccccttcccttggcccagggcgacctcggcagcccagagggcgtggaccctccggagtgcccagaaagcccccggggtggccctgcgcctcctggctctttctggatggaggcgcctccggaaggagccggctgcacgccgtggccttcacctcgcagcctctgctgaccacacctccctagcgcagaggctgcccgggagcaggaaatgctccaccaggtgaggcccagggggtcgttggcgctgggcaaccggggacgcgtcccttgagagagtttggactggatggcacgagtcggcctgtttaggggagaggggccagctctgcacgggccagggtggactctcaggagcgcctgggcacagggccaggccgtgggtgacagtgctctggacacctgccttgccc

SEQ ID NO: 333025 - DNA, 119 bp, Homo sapiens
  chr7:7605673-7605792
  hyper
gccagactccgtctcaaaaaaaacaaaacaaaacaaaaaactgatcataccacttgcctgattaaaaactttcgatgactctaacattgcctttaggtaaatgccatccaaactcacta

SEQ ID NO: 333026 - DNA, 521 bp, Homo sapiens
  chr7:8301683-8302204
  hyper
cgcccggcgcgcccccgccccgaccccggagggcaggtacctcggagccccggcccccaggagcctcccggccgcggtcggagcgtccctccggatcactcatccgacgtcagcgtcagccgaaggcgagggaaaggggcggggggagcgcaggaaccggcccttcctgcggcggccgccaccagccggaatagcaaccggcggagcccgtgcgcaccgcagcgcagcgcagcggccggggggtgcgggcgccctcgccgcccggctacctaccgccgcctgggcgccgccgctgcctcccttccccgcttctaccctccagcagacgcccgccggagcgacccctcccagggtgaccgggggaaggtgggtggcgttgacctcaccttgcttggggagggtcggggactcggggagtgagtttctctctctctactccccggggtctctcctcgacccccatctcctggggtatcccccgctcggatccgccgcccagagtgaccccgcccctgctctcc

SEQ ID NO: 333027 - DNA, 1950 bp, Homo sapiens
  chr7:8473085-8475035
  hyper
cggagcacagaggccgagtctgggagacgctggttgagtgggaggtgtcagtagcgagggaggtggtgacggctcgaagcatcccccgtcctcctcctcccccttcacgctcagcccagccggcggcgaggagtccagaggccaaggtcgcccagtcctctcggctgtctcgagctgaatggctggcagtctgcggctcccccgcctccggcccggcagccacaggtcggaggcgcccggcgtcggcgctcgaggccggcaggggcgccctgcaccctcccgcgcccttccccgccctacgcgactcccggctgctcttcccgccactcccctgggctttgcgatcttccctacgccccccgggaagggggcgctgcggccaccgaagacaccgcgggagccacttgtccctgtgggcccagcccgcgagagcctgagagccggatctgtttacacagggtactaattagtctttgaggaatcattcacccacgtgccaaagtaattgtccgtgtcaggaaggtaggcgtgccaagccgcggctctgcggagaaaccacgaccaccgcggccgccggaaacccaaagcgctccagagcgtccccgggtggccgggcagcaccagggacagcgcccgggactccactggggaccggctcctgggcttcccagcgtcgcgggtagaggtacagctgctccgtgtgccgcaggctccagattctcgccaccccacccctccctcagaaactcggactgctctcgtctgccgtgtggttctcttttcttccgaaaggccagtgtcttatctctccacttcaagtccagaggacttgctcagtctcctccccttaagtcatttccaccatcctcaggcagctgtgggaagccgagagtcctggactgttcgtccgggtgccagcgctggcagtcccagtccgtccggtgcagcagcccggcgcattcccctctctccctccctcttgctctccctccctttctgtcttcctctctttcctcctctactgctccctccctctcttgcctcttaagtttcctgcaccgtgaatccaactgtgccaagccttggctcccgcgaaccaatcctgagcgcgacccgggcactgggacggcgactccgccaaagctggacgaggcagccggacccgtctgcgctcgagcatggagacggagcgcctgggagggcacgtccggggcgctggagacgccaggcccgagtagcttctccatggagcctgcccagagcggtcccttctcgcaggattcgccccaagtcctgtgcggtacgtaccctttgcctccgctgttcccggagggtacacctgggagcggggtggtgggcacgaggaagggacggcagggaggggcgctggttaggaaagagaacaagcctggcaggtgaccctcacagctcggaggaggcttcttctctagaagttagcgaccggctgtaccctttggctcgaaaaaagtagtgctagagatgtgactgtgagcattcgtgggtatctctgtgtgcgccaggggttcgaatgggtaaactgatccctgctttcctgtatgcaaattgcattctctttccccacccccacttcaccgaacgtgttgaggtacctagcacctaatcgcggtcagttctacctacctcttcctctcaccgcgcccccctcgctcaatctctctctctccctttatctttcccctctatctctctctgctggtgtgtacgtgtgtgagcactgccagggctggcgaagaaccagccgccgcctttagtccgagccgccgggccacccaacacaagggcaggtctcgctgccggagaagcctgggctccgaaccagcctgcacgcggctcagtgtgctccgccgcctgggaactcgcacccgaggagcgcagggggcaaggagcccctcaccctccctctcgtcc

SEQ ID NO: 333028 - DNA, 694 bp, Homo sapiens
  chr7:8476378-8477072
  hyper
ctaggggtgaggtgcgctaaagcagcccgaactctctgatgggctacacctctgattggaggtgatactggcgctcctcaatcccaagagccttagatagaacccataagcctgaaagaattgccatccctacaattgacagcgtttctcggccgttgccctggtgcatgtggctgcaaagctgcgagttgtgtgaattctgtgtatgtgagtgacacgtatatatatgtgtgtgtgaatgtgtatttaaccgatttcagcttcaatccaagaaccctcaatgttgcctgtctttgcccctttatcgcctgaccgtagcagccgcggacgccagagggcgctgcgcatcagcgtcctcgcccacaggacaccttggggtaaacaggtgaaagccagggcagccaatccaaaagaacagcctttctgactctgtcaccgaagtctgtgcctttacccgctggaacgcaggcggaatgcaaaaagtgtccttcccatttcccatcttcaatcattttcacccccacctgtgttcagtaagcccactgacattgagagaccatggatggagggcagaaagtttggccagaagaaatatagaatttttttattgagagatggggggagggaatgcaaagtgaaagcgacgggggcgggggggaggtaattttaaggattcccttgaccatcgtaaccc

SEQ ID NO: 333029 - DNA, 314 bp, Homo sapiens
  chr7:8480006-8480320
  hyper
cggagagaaccaggattgctccaactttctcagcggtattttttcggaaagccattaaattcgtggctcctctgtgcgaagttgatttctatttggctttgaattgttgacggctatttcttccttaatgaaagtgttgtctgggtgaaaaatatatcaggtggctgggaaattggttgatttttttttgagataggtgcccagtgtcctatttttctatctgaggaaagattttctgcagactacagaaattgacagcattgtccgggtaataaccgtcgtcgacaatattttcgaaagggcatttgagtgcc

SEQ ID NO: 333030 - DNA, 845 bp, Homo sapiens
  chr7:8482054-8482899
  hyper
cgaaggatcctagctgccgcggctaagggcgcagggggaggccgcgcgtcctcgccacaccggaaggagagggcatccggctcacacatcccaccctatgtcttagaccccgtcctcacacattgactttaaaaggccattttccttcgtcttctacaagaagcaagaaacttttttcgacgtaggcttcataccctcccttcggaaactcagtccgctgaccaaagccgcagtgttcaggccccggggtttcccagccgtagtggccgccgccacagctgcgcgctttattgtctgctttcagtcgcaggtgacctcgagcgatctcgacaggtttatggaaacacagatgcagccctctcgcgtccggagcccaagtccccatgcaaaagcgctgtttctgggtaattttcgtcgacgccaccaagcttcggtgcttttgggacagcgggctggatagcggcagttctcgggagaataggccgcgggctataagatttgatcgcgggcaggcgggcgtggggcacgccagggccgggagagcgactcttcagcaccacggccagcgccacaggctccgccccgcctggtgccagcagtagggcctgcctcccccgctgccgctccggctgggtccttaaagtcgagttagcactctcggtttccgcagatacctcctcaaggcccgctcgcgactgtgacgacccgcctaccccttccagctattcggggggcagctagctcccgtctctaggtccccagcatgacctgcggtcagaaactcttgcttgcacccctctccattaccacactcagtggttgcggcgtcacgtgatcaccacgga

SEQ ID NO: 333031 - DNA, 838 bp, Homo sapiens
  chr7:8483148-8483986
  hyper
tggagccacccaggcgccttccaggctaaggcgcctttagcggcgcgcaggggtgagggagagggtggggagagtcctaattattatgaatttctaaaggcgcagtaattattcacggggagcaggacaaaccatggctaggcagggaaatcgatatatttgctatcgaaagttcctggctcgcctttaatgcagacgaatgggggatgcagcctcattattttccgtggttaggctcgccagcgtggggcctgatgcagcgtgaaatctatcatcattagacccgggatggagcggcgggggggagtttctctttacttaccaaaccgcaacaacaaacaaacaacgacgaacaaccgccccctacaaacactcattctcacacaacgttgccctacctccctcgccgcttgccctggccgctgttgcacactcccctgggggctgtctgcacgccctagagcagacactgcggtcacttaaagtgcgcccagttcctccaccgcagcggtcacaccgttgatttgatccagaaataagacggatagtaccgagcgttggcgctaggggttgtctatgtcaaaggcgaaggttggctgggaagttctgtccgtttctcttgccttagcataggagtcaatccttttcttgtcacccgattctgcaaattctcgctgtattaaaggagcagagatctggcatgtagtgctccattaacccgtagcataagttagctcggacataaggcaagccctcgagaagggaacgaatcagaaggtgaaaagagcggtcggaaggtgaggaagagaaggtttaggcgcaacgcctcggaggtatt

SEQ ID NO: 333032 - DNA, 66 bp, Homo sapiens
  chr7:11870605-11870671
  hyper
cgaacccgcagaaaaggggttggtaattcctcactccgtattgttttcctgcctgtcacggccccc

SEQ ID NO: 333033 - DNA, 896 bp, Homo sapiens
  chr7:12442874-12443770
  hyper
ttggaggtggaattcgtgcagtatggaattcaactctgttctgagaattcaggtccacttgcggctagcataccttgcagatccggcgaaagtttcttacagtaaattacaatgacctcaaagagcaggataacagcaggaaacaaccaaaaacagaaccaagggtcgtagagtaagaggaggcaacaaccgcatgtgcgcaaaagaaaagtgtagagttttcaagctggaaattgaccttttcaaagacagcagagggacagagaggaggcgggtgaggaacaaacatcgcttgctgccttaaaacgcacagggacgctccccaagtcgtccaaaaagtctagcctagtccctctaccgcccacgcggcgccactgcgcgcccacccccgcgcgccctacctcgcttaccttccccccaggccaggaacatcagcgcgatcaccagcacgcaggctccgccaggcatcgctgcttccgcaggtggggcgaaaggcgtcgcagagcccgggccgcgggtgccaggaggatggggccacagcagcccctcgggcctcctttcttggattttctcagtctgttgctgcttggaacagggaagctccgcgtcctcgttctggggtgcacccagtcctttcgtgggatagagccttcgcgtaatccgtctgcgactcctcccttcccattttggctgctggctgacctgaaagccacgcccaacctgtccccatagcccagcgtgtaccggcagtggctccgccgccttggatgtcaccgtgcagtcgcacagccaggagtcaagctacagggatgtagctctccgcccgctgcgtcttgctgttctaacagaggctgtatgaaaacttggtaatcctagaaactgctcagatggacctc

SEQ ID NO: 333034 - DNA, 752 bp, Homo sapiens
  chr7:14028689-14029441
  hyper
cgcaaatctcagctcagtattttatattttgagcatttagctggagatttcctcaggatctggacttctatcaacctagaggggaacaagatggcttttaggcttaaaaaaaaatcatgaatgaagctcttgaatttgcatagctaattaccctccgacagtcccattcacaaaaataaccctccctacaccgcctccttcacctggatccaaagagagccaacagagttcacaatttacatattttcggtagtagcaaaaatccgaacaagaggcgatgtatttatttacactctcgatgtttccctgcgcggtcggtgtaccccgggcagctctgattcgcaaacgtgtgcaaaactagcaatggcgatcaacgagacttgctttgcacctaacgggactaaagagacggagacacctctttcatcaggatagtttttgcgacccacaaccatgcaattatctggagagacataaaaagttgttggaaagacccacctgaaggccacgctaggcgaaaggctgcaaaaacttccctccaaatttaataaaaacattaattatagcccagcacttcccccttggaagccgaaagcgcctctgacagagctcaattcggtggtttttcctctacttctcctccaggggcctccaatccaaactgatggatcgctgcctcccattggctccgcgtctctttcacaagatcagatttcgggctgtcaatcaggcggcttgctgccccttcccgc

SEQ ID NO: 333035 - DNA, 695 bp, Homo sapiens
  chr7:15725486-15726181
  hyper
cgagggtgcctggcgcgcccttacctgagctgtcgcttttcctcttgccgccgcttcgcttctccgcctccgcaggtgacagtgcctggcggccgtagtcccccggcgcgcacgcggccccagtcggggtgctggagcccaagctggaagagttggagcacaggacgggcgggctgctccccaactctgggggccctccagagtcgggctggaggcagaggctgtgccgagccgcactcggtggggaagacatctgcgggaggtgccagttggtttgcagagcctggtgctgctgctgctgatggtggtgatggtggtggtggtggtggtggtggtggtgccccctgtgatgctggctggcaaacatgccctcttcgttggggtatcccgcgattatgcaagatgaggaagaagtagagagctcggggtaagacatatggtcagatcttccatggagggcgagagaggattgggagaacgggtgcaagccttgcgccgtggcgtgagggctgcgcaggcagccaaagagcgggtgttccatagcatgcaagtttcgggttccaggcagaagacttcacggcggttccaaaggccaccaccctctgtcactttttcactggaaaccgtgtgattttttttttaacctcccaaagcaatagcggtgcacttctgcagagctcggataatcccggtcc

SEQ ID NO: 333036 - DNA, 756 bp, Homo sapiens
  chr7:15726410-15727166
  hyper
cgctcagcctgcgccacgcgctcccagttccacttcctatctcctgctggacggacgtagagcgtccacgcccgcccagcactgccggctgccaggactacaagcggcacgccaacgtctaagtcccgcccgggagggcagcagctctgccctccagactctggaggcctgggcgcggcgcacaccacccccaacctagcaccctgattcctacctactcactttcctctcggggaaacgtgacttgtcagtgtcatttgggaactgtcacctgcagaaaagctagggatacgcctatcctttcaggaacacgaaagaagtaatagggttaaaggaaaagaccagagctagtttggcgcaccctcgaagtttttcaaactttgcatcttcccgtgccccgggcgccgcagcgcgcctaggttttcgcagctggtttctgtcggtgggttgttaataggctgggacgccagatctgaggttgcggggatgagcaccatggcctggaaaaggcggttctcagtgcagaaagaagacggacctggttgggtgggtgggaggaaggcgtgagtctgaaagggttgcagatgcctgctccctggcatcctcacgtgcgatgccaggtggaggctcccttccccctctttcccggtcccgctcaatttcctagccacttgtccaccaagaagaacttttcctgggtcaagaatatttccaagcgattgtgtcccggtcatatgagatgtgtagattgcacgc

SEQ ID NO: 333037 - DNA, 858 bp, Homo sapiens; identical to SEQ ID NO: 232732
  chr7:16460420-16461278
  hyper

SEQ ID NO: 333038 - DNA, 491 bp, Homo sapiens
  chr7:16793071-16793562
  hyper
cgtcatctgccagggccaagaatccagaggtgctgtcatatttctccttgccagcgtggatctcctccgagccccgccctccctcctcacctgctcctggggaaactacaccaaggccgccgctctggcctggggctccctcccacacggccttggccctctccccctcgccccgggaccgctccgcccctcccggatcccggtcggcggagcgcatttatttgcatatttctacctttgttccctgccagcggccaatcagcgcgcggggcgagacgaaggggctgggcggggctcgggctcctgctccggctcagctgcggcggccgcaggttccaaagcgggtccgagccgccgccgcgcgcgcgccgcgcactgcagccccaggccccggccccccacccacgtctgcgttgctgccccgcctgggccaggccccaaaggcaaggacaaagcagctgtcagggaacctccgccggagtcgaatttac

SEQ ID NO: 333039 - DNA, 505 bp, Homo sapiens
  chr7:17339346-17339851
  hyper
cggtcttaattctcattcttcgtagagtttggtaaggcgagatgttttaaagagctaaacacatgctgacttttacgaaggggctgagtgcctctaaaggtactttttggtccccaccaactggctttgtgttgcgctcatatttacttatttggcagcaattttgtagcgctcatcgtgaccatatcggtaaagtggatagaagtggtagcaggtgggagtggatgcaacggacaggatacggtggaggatttgtattcttcagacatctttttcggaagcttgcttatcacttttggggtggctttagggtctgtaaaataaaagatttagaactgcatttgagagaggttttcattcttaacatctacctctaattcttttccccttcaaagttttcttctagttgagtgagtacaaacttgcttttgtcgttgtcggttgattttggtggaatatttgtgtgagatggccaattttttgtgtgtgtcagaaaaaactatcc

SEQ ID NO: 333040 - DNA, 1008 bp, Homo sapiens
  chr7:18125868-18126876
  hyper
cgttccaggtaccgccccacaatgctacctcctctttaaaagaagtcgttcagctggggcgggctggcgctgcgtggcgcgcacctgagcggccggggctccccgagccacggggggcgcgagagggcgaggcagcggcctggcttctccccagcaccgttctctgtcacggccgccgcctgaccatcaccccgcgcctcgcgtgggcatgtctcgcttcagaaatcccaagtcgtcttaggttccctggtccttcccctgggggggaaaaaaaacgctggtgcagcccagagcccttttccgctccaccccgggatgtcctcgctgccctcccgcctcccgcgcgtccttcccagcgcgtcggccgcgcgcccaggtgttcccgcgtccgtaatcccctccggcccgcgcctcccggcccgccctgcgggtctccagcgcctgggcccgcgctctcgccgcgggtccttcctcctatccccacccagccccgcccagcctccgcggcgctggggctcccggccgagcctctcctcccacctccgtcccctacttccctccccaagaagtgctatttttagcaaattctccgcgcgccgccgcccgctcagctcgcagctcgcagccgcccgctgccgccctcccgagccccccccgcgcggcggcggcggcggcggcggcggcggcgcgtcccgcacatcgcgcagcgcgcaccgagccggccgcgccgcgcccgccgctctcgccgctttcgccgcggtctcctcctctagcgcccgccgcggccggtaaatctcggctggaggagcagcggcggcccccgagtcaactttcattccctttttgcttctgcctcaccattctcttctcctcctcgaaagatggctgtttggagaagggggagaagttaagaggtcgccagcgcggagcgaaggagggcgcgatagcctcagcaggagcgggcggaggtgagtggcaccacggcagagtccccggctggtgcttgag

SEQ ID NO: 333041 - DNA, 1036 bp, Homo sapiens
  chr7:19146849-19147885
  hyper
cgctgtaaatttcctatacaaatctcaaaatttttcttagcattgtcaactaccttcttggagacaggctacagcgcttctaaacccaatacgcttttctggagtcctcggaacagctggccggggcttttagcacacgggacgggaccttcgcctttgcctgtttttttttcgaccaggagaagcaggtgcgagagtctggggcttaggaggtggaaggcggggaaagagaatccactaggtcctcgtgtagagaacaacagtcgctccttagatattactccaggacggaaacctgattgcaaaccgctgttccttcgaaacttgcaaaacccggaacagaaaactcccgcccagccaattttagctctcgctgaactctcccgcctgcgttacgtttgcacagcaactctttgtaaatgtccgagtcctctcggaggaaagatcgttagggcgacgagaacattaagaggggacctggagggcagatatcctcgatcccaagagagcaactttgtcgcctcagaaaacacgccaacttccctcctgctctttccttggtcaactcagaatcaaccgattgtattgaaatctcctgaaatcccgaacagggattggcccagtcggcttctgaaaccgaggccggggaatggcaggaatggggggcagagaggatcggaaagaagagtccttcccccacagacattcccagctgggacacgagctcgctcgcagcgcgtttatggaaagagggggcgctgggaaccgcgctggcggcgagcagactccagggtcgagattattcgacacgtgtcttttattcctcacaatccatttcttacgggtgatttatgaacgaatctctttgatcagggacggttttatctgtccactgctacagatgacagatgcggctgctaaaatgcctggtccccgctgcctaaaaggttgctcccccccttcccaaatgctgttgctttttctctggcggtccccaccccctgcttcttcgttctccttccctacccccaacccc

SEQ ID NO: 333042 - DNA, 282 bp, Homo sapiens
  chr7:19152064-19152346
  hyper
cggaaattcgaggttgggcctttgcctgaatctgttgctattgctccccttgctaccgctgacacttggcaccgccgcctcctagcagcggccagacgcggggctgggggccttccacgcaaaccgaaggagatacggacatcgtcattctccccaccgcgcgagccgggcccgccacccacgcaggggagaccgtgcccgtgcccctctcccgcgcctgccgcaggtgagaccctcgctccccacggagttctgtttgggtttccgtggcgtttgttcccc

SEQ ID NO: 333043 - DNA, 2154 bp, Homo sapiens
  chr7:19155978-19158132
  hyper
cgaaagaaagggtggcgctgacaaaacggtccttacccgtgaccctgggtgtctctgtctcccctcctgtcacgcacactcacgcgcacacacacccctcaccagggcgcatccccctggagactgctctccctagcggggtcagaccggccttccggggacgctgggggcgcgaggcaacggtgccaagtgaggtgggaaggctgagcggagagtgggagaggggaggaaatcgaggtggactgggaaccgcggcctggccggcctgccgtctgccacctgagaggcgaaggggtgcagcggcgcggtccttacctaggtctccggccctgctgagggggtggggggctccgcctgctagtgggacgcggacatggaccaggccccctccatcctccagaccgagaaggcgtagctgagccgctcgtgagccacatagctgcagcttgccatcttggagtccagctcgtcgctctggaggacctggtagaggaagtcgatgtacctggccgccagcttgagggtctgaatcttgctcagcttgtccgagggcagcgtggggatgatcttccgcagcgcggcgaacgcctcgttcagcgactgggtgcgctggcgctcccgcacgttggccatgacccgctgcgtctgcagctcctcgtaagactgcggactcccgccgccgctgctgctgccgccgccgccgcccgcgccgccgccgccgccacagcccgcagacttcttgccgcgcttgccctgggccgggctgcccggctcgtcgccgcctccgacgcccccacccgcggctccgccgggccccgcgccgccgcccgcgctgcgcctgctgctgcgccgcttgcgtcccccgcgcttgccgctcggcggctgctgccggtctggctcttcctcgctgttgctcaggctgtcgtcggccggcgagactggcgagctggacacgtcctgcatcatctctcgagcggcgacgcgtggcctcgcgggcccggggcagaggagaagagcggggcgcctcagcccgccagcttcccccgcgcgcggcgccggcccgggcgatgcggcccgcggaggagagagcaggaggacggacgggagggacctccgcggggagggcgcgcgggggaggcggggagggaggcgggagggggaggggacggtgtggatggccccgaggtccaaaaagaaagcgcccaacggctggacgcacaccccgccaggcctcctggaaacggtgccggtgctgcagagcccgcgaggtgtctgggagttgggcgagagctgcagacttggaggctcttatacctccgtgcaggcggaaagtttgggggcagcagtgtcattggcctgacgtgaggaggagggacttttcgaagttttataggaaagtttccgctttccagtccccctcccccgtcccacctcccttcctcggggtctaacaattcgtcctcccaaaccattcaaaaacgacctggcccgggcggccggcccctccacccgcctcctagccgccctcccccttccctccccgtcgccttcctccggcgggcgcggggcgatttccttccccgccggagcgtgcgggcagcgcccccgaaccctagcgcagcccaggaagcggtcggaggagactgtcctggccgcggtggcagccccatccggagtggctgtgacagcagcaatggcaacagcttctacacagtgggtgatgtctcatctcgcccaagagccctctaggtccgtggggccgatttgggattgctggggctgggggggtggtgtggcgcggggtgggggggcatgccaagaaaagtgtcaaccgcggagcccacccaatggtcaggtagacgaaccccttggagttccaaaggccaaaccgcggcggcccagcccggaggtcctgggcgtttctgaagacgtggccgcgccgcgggggctgaggatttgcgtcccggcctgctctctcgcccttctgggccctcctttcccctctacaacgacccagtctgacgctccccaacatccaaaggactacgcctcggaaggtgctcgaaagaggcagaagttcactcttcggtggaaggaaacccagtccatgggaaaggcagcagagccagaggggggcagcgcagcgcctttgct

SEQ ID NO: 333044 - DNA, 970 bp, Homo sapiens
  chr7:19183520-19184490
  hyper
cggtggctggtggcgaagctgcagggcgcccaaggccccctgcggcccaggagtgacccgagtgcactcgccccttactctggcctggggcctgaagaaggcactggaacacggaagctgatgctgcactttagatgcaaagcgtagatttgcactctggctaaggcactgaatgaacaccactgtggccctgggacaaggagctgtggtccgtctgggatcaactaggtggcgaaggggagggagaaaggaagagagagggcttgcgcgcgggagagaggaagggacgggagggagagggaatggaagacaggaagggtgtcccttctcagaggtcgcactttgtcagcagttcctctcgactgctctgccttccatttttcctttcctcagttcctggacaagcctcggaggaccaggcagaaccctctggctagcagaaaagctcgcacccccgcacccttgcggcgtctgcttcagaccctccacgcaggcgcccgctggagcgcctgctggggatggcgtaccaccgacccttcaggctttttaaaaacgtaagaatttctactttattatctctatgaaaaaaaaaatgtaaagaagagaggttagattttatagaagctccaaagtctgccatttgcgaggagggttcacttcccacccacccagcccacggaagctcttaggagcagcctgaacggccccgactcagcctcacgctctctgacttccccgctcgcccctgaccccgacttcacttagggcggtcgcgtagatatgaactctacagcagccactctgctcagcgcatgtggggatcttacaatctcgaccccgacctccagaagaccagacgttctgtcttggggcctccctcccggccctttagcctcacccagtgcccggtcctgacacaccccagcactaccagacgaggaagggcagactctccacaccaggctcagcc

SEQ ID NO: 333045 - DNA, 276 bp, Homo sapiens
  chr7:20369119-20369395
  hyper
cgttgtgcggtccacacctgaaagggggagtttcgatgttgtggtttattaaccaggtactttccattcactcagtcaacagaaagaaagagagagaccgcgcctcctactttttttttttttttttttttaactacaaataaggagacggaaactattaaataagaaggggggaaactcccgcatatttcaccttgacctggctggactggtctgctgcctctaagaggcgggtgttgtattaaaatgagaggtcaaactcctcgaatgggaatc

SEQ ID NO: 333046 - DNA, 298 bp, Homo sapiens
  chr7:20816239-20816537
  hyper
cgcggcattccagcgcttcccagctttccggaccccggagagagggggtgggggtgtgggctcacatcgccggctggcttgagggaggagagtggtggcggctccggaggtggacgtgtcaattatatcctggagctccgggaagccagattgcttctaccggcggctgcaggggcttgcaagcgaagataggcggccctccttccttccccactgtgggggattggggtcagtggagcccgtggatttagccacgaggggacatgactggagccctgtcacgcgcaggtgtgcgtct

SEQ ID NO: 333047 - DNA, 986 bp, Homo sapiens
  chr7:20817295-20818281
  hyper
cgctgcactttgacgtcgctggggagaggaggcgggtgcgagtgaacacaaagcagtttggccaagaaaagagcacaggaggtgaagaaaggcaggcagtcgtgggccaggacagagagaaagctgaacaagttcaggaagaagaatctgagtctgtccacgccgcagcagcctccggtggcacgggcagaaagatcaagcgcggcaccccgtgacaggatgggacagattccccgggctccgaggccctaggatggcgcagggcagcgggctggtgcgggaaaactacagagcaagcgagggagggaagcgaaggcaggggaatccctcaccccgtccggcccgagtgtcttttgagagcccacaggcgagcggggcggggggaggctccccgcgcattcccaccgtgggtttgcccaaggtcagaggcccgggactggcggggcgggtctggccggcattgcccgcgctgagcgcgctgcagaacgggagcagggcacagggtggcgctcgctgtccgtgcagcgggcggaggcggccgcggtgcctttgtgtgcggtgggcgcggcgatgggctgctccggcccgcagcccgaggggagcggcgggcccgggccggggccagggctcgcggggagaccccagaccaccacctcactcttcgctgctacgtgcaagcggaccgtgcggatcgccagttcggaaccctccccgggagggccccggggtctttctcaatgtactgggcacttcgaggagctgggaagaggaaagcggagggtagcgtttagaaagggagggaaatcctcccaggctcaaaacctctcgcagaattcattcgaaaagagaacgaagggaactttgggcaggccggacctcggctcagcgccctgcgagagaagcagaggtcgctgccagcgtttcctcccgcgcagcaagaaattggtgcctgagaagcaaagttgaggaatgggctttttaaaagc

SEQ ID NO: 333048 - DNA, 417 bp, Homo sapiens; identical to SEQ ID NO: 232748
  chr7:20823256-20823673
  hyper

SEQ ID NO: 333049 - DNA, 2142 bp, Homo sapiens
  chr7:20823877-20826019
  hyper
gtcggggagaggggcgggcgcagggtgggcgtcactctaggccgttgcggtgcccgggctcggggggctgcagcagctctggggagtggcagggcgggctgcccgcggcgctgtgctcgctgtcggtgtcgctgcccttcttgccgccgctgcccgagcccgccgagccgccgccgccgccgccgccactgtgcgtcttcacgtgcttgctgaggtggtcgctgcgcatgaagcgcttgttgcaaactggacaggcgaagcgcttctcgccggtgtgggtccgcaggtgccgctgcagctcgtcggagcgcgtgaagcgcttgccgcagaaaagccagttgcacacgaagggccgctcgcccgtgtgccagcgcaggtgcgccttgaggtgcgaagtcttgccgtacaccttgccgcagcccgggatgtggcagctgtgcaggcccttgcgccgcaagctcgccccggcagggcccagccgctctgcctcctggcagttggggcagtcgcaggtggcgcggccggagtagcggcgagctgaggagcgcggggagccccccagcggcgccgaaggcccagcgctcaacatggagccccccgcgccggccagcggcgacggggccgagtccgggtaggagccgggtagcactggcttgaagccgtccatgaggtgctgcccggcggggctgagcaggtgcgaggaggcgccgctgctgaaggccgagtgactcaggcccgagtaatccgagttgtagcctccgagcggcgagtgcagcgaggtttggagccccccggcggcagggtgcagcgagccgggcagcgcagccgcgctgttcgggttctgcacgtcgatccagccggcccccacgtcccaccagctggaggcgccggccgagcccacctcgcccgcagcacccaggcccgggtgcgagggcttaaaccacgactcgtacgggtgcgccatgcccacccgcgggtagatgccctgcagcccgtccacagaggtgtgcaccttggagatgaacaccggctggtgggagccgtcctgcgagtgcgcggaggagccgccgccgccgcccccgccgccgccgccgctgcccccggaaactccgggggcctggaaaacagagtagtcgttggcgaagggcgagctggaggcggcggctgcggcggcggcggcggcggctgcggcgctgctggaggtgagggagaaggcgctggagccaggcgagccgccgcagctgaacgagtcggacaccagggccgcggcagccgcggctgctgccgcggccgccgcagccgccgaggacgagccgccgttcctggaggccccggacacgccgaagcttgagagactggaacccactacgttgcagctggcggaagaagaggacgaggagcgtttccaggggtggaagcctttgccgaaggaagaagagctgtccgagagggaggagggagacgggctggggctgcctatcttattacaggtagcggcaagcatggccagaggagtcgatcccaacctcggttcttcctgcgaggaggagaggagaaggagtgggggaggggaggtgggcaaagggccggtgggggaggaaaggaagaaatgtgcatcagtccttcggtagcctccaaagcgccccactgcaccccatctctcgctgcggcgcgccgccaccaactcacctggcacccccaacagccccggcgcccggccgcttcctactctacaggaggggacaagtttggctgccggcgtctgattcgggagcaagcaccacgctaaagaagagtttgacaagtattctcacctaaaacaacactctcttgcacacaaagccccagacacttcgtaacaaacaagcaaaaagtccagattggagaggaaggaagttttctttgccgagaagcctgggggaaaaccattggattgcttttaagagcgcttccctgtaatccggagagctttgaaaaacctgttcgggtccccagaaacccatcctgggttgtttctcccaggccaaaagaaatcaaactgtagggctcactctttcttcctgcttttctttctttctttttttaaaagcatatctacagtagtaaaaacgagacgagttcaacgtacctgcgagacaaggc

SEQ ID NO: 333050 - DNA, 751 bp, Homo sapiens
  chr7:20826098-20826849
  hyper
cgaaatcggtgcctgtaaaatgggctggacgcaggtctcccgggcagggagcagcgaggcgctgcgcggtggcttgtctaaatgcccttcgaaccttttcctgcgctgaaaaaaagtgactctgcccccttctccccctttttcttttctccaaactcacttgtatttaaagaaaaaaaaaaaaagctctcaatagagagactgatagcccgtggcctggccggggcgactttaaccccctccaatcggcaataaaaggaaactaattaaaccagcaagagaaaatcctgagactcacccctagaagtgaagttgccatcacacaaaagtgccctcctcctctcagaggatcttttttatattgataaatcagaggcagtgttttttttagaggtgtgcaatacaatgatcagttccgcccattccaccacaattgtagctccctctccggctttgaagtgccgcggaggcgcggccagccaatctgcggcctcgccgggccgcgcggcgcgcgcgccgtgaggtcatcggcgccgccgcctgccgccgtggtggaagggggagtgggagcggagggggcgggggcggctgcgtgtgttacaaagcgcaaagcgcgcgctcgcgtgtatgagtgtgtgtgtaacaatgtaactgtgtgcgagtgtgaccaggcgtaggagaggacagtgcggagactggagggaggggggatgggggtgtgacaccgtaacagtgacagtgtggtaaaggc

SEQ ID NO: 333051 - DNA, 229 bp, Homo sapiens
  chr7:20827407-20827636
  hyper
aagggttatttttagggatgcgttgggacgtggatgcgcgcctgcgcgcccatgagttgtttctttgatgccgtggctttttttttttttttttttttttttttccctgaggtggaattctgctttagaagtgcacgtctcactctaggggaggaggtgtgtgtgtcccgtggtgttgagtaaatttcaatacaaaaggattagatagagaagagagtaagcgagggtc

SEQ ID NO: 333052 - DNA, 595 bp, Homo sapiens
  chr7:20830567-20831162
  hyper
cgcgtacctctgcagggtacgtttaaacccggctcttagcatctcggtttctagagcgttggcagggacatgcagctctggaagctgaccggcgggtgcccgcgggagacagagcgaacgcagtgctggcactgcgtccctggcctgcgcctctcccagaatgggaagacgacccccaaccccttgactagtgtgcggggtcctcgcacgcggacgtgttggctactaaataaagcgtgaagagggatcgctgggtagctgagcgccgccggcggccgccgggagcagcgagctgagccaggttgggtgggggtgtttcctcgtcgagagctctctggtcaaagtttccttcccgctggaaaacaaaaacaaaaacaaaaaacaaaccaaaaccaaaacaaacaaaaaaaaaaaacctggctaggcgtggacctgtgaattcctgaggggtgccccttagcagtccatttctctttcgtgtggttttactaagaagttacctaacatttcctgggaagagaggtaatacaagcccctcgctggtggcagattgttgagccgtaggtgggaagagatcagtcggccagagcccaga

SEQ ID NO: 333053 - DNA, 350 bp, Homo sapiens
  chr7:20836794-20837144
  hyper
cgatgctgattgacttttgaaaggcctggcacgtcccagtctatataataactcagttggaggaagaacctcgaggaccgagtgtctccagatcacttaatgcatcggcatccaccacgctcggctcatgggcagggcccccgaggctgccaccaacccacggagccttgaggagctgcgcttccccgcgatggtccaacgaacttcggaagtgctcctgcttccggtttcacgtatacctgggatgcgttgccatacaggtttgtcccgttttaatgctttgacccatctaagatacgaggacaggagactggagaagtaaacgaaaggcaatggccgaggggtaaggc

SEQ ID NO: 333054 - DNA, 255 bp, Homo sapiens
  chr7:21293835-21294090
  hyper
cgtagcagagttccttggcaaacgacagagtgccctctgttgatggaaaaagtaatgcgcagcggaggatacagagagaagctttcctactagaagtcgcagagctgcccgttagccgatacacatttgtgatgtaaaaatcacattttaaattataaaaatattgatttaatgaatattgagagagtacagatgattgcaaattcagacacaattgttggaattatgtatttagatagatacacacataaacac

SEQ ID NO: 333055 - DNA, 1151 bp, Homo sapiens; identical to SEQ ID NO: 232760
  chr7:21582475-21583626
  hyper

SEQ ID NO: 333056 - DNA, 1114 bp, Homo sapiens
  chr7:21984772-21985886
  hyper
agttaggcccttaacgcgtaattggggtcgtgctgtgcatatgatttgggatcttgcagcttgtttaactcggcccaatgacgttaccatttcccccaaatggttactaattccttgaaaacgtttacaaaagttctagaataaacactaaagttattatttttaaactccattatccaagttggactggtctggcgatcgactgttaaaaaaaaaaaattacaactttcttaagcttcctgatctctgtgccaattcccggagaaagtgtggggagtgcacaaaaaaagcccctcccccgtctcacgagggctgcaaacgcaggcgctgcgccccgctagctccccgcctgcacccccggcggccacccgagactgagcagagcgccaggctgagcgcggttgtgtgctggggcgaccggcctctgtggtccgcgtagcacaaacgtgacccactgcgcacacctgcagggcgcgcccactccggcactcaaccggctgggcgcgccagatccccagtgccgcagccaagggccacgtttccagcccaaggccagcaggaccgggtggcaaagggaagtcaaactgtgggtgcgtccggacggcggcgggcggccggaccctcacctggtagcgagtcgccaactccattcttcctaaccgggctccagtctcctcccagcacgcggccacgggagcccggactcaccacggcccggcgcaccaagaacgccccgcgcccgagcagctagcgcgctccgcccggagcacaggcgggccccgggaggggcgcacttgacgccctggacagggggagcgcgttgcgctgccccctcggtgccgcctcactgggcctcgtggctccgatcacgttccaacttcgcggccactgaccttgtcttcgcaggcggcgcgagagggggctgcagttgggcgcggcaagagcaattaccagtgttagggcgccgggctcccccctgcagcagagggagggagtggagccgtccggcggggtttagcgcgggagaaatgagggggctgtcccggcgcagcctccagctggcacgcgcgctggatacttggcagggtttattccaggtcatgccctggggcgc

SEQ ID NO: 333057 - DNA, 731 bp, Homo sapiens
  chr7:22589357-22590088
  hyper
gaggaaaatatgtacggctgtagcccgtccatttctcatcctgggatagcgaggggtttccggaggaggcgtcagcggtgggaagtgggagaaagcgagcaaaaggggcgggggcgaaggagcggactcgcctgctgccgcgggggcgggaatccgcaagccagcctgggagaagggacagaacagcggctgatccttccctgggctagggaaggaaaataaactgtgctggcctcggagtgggggatggagaggggcgatggcgctgcatctgcaggacgttgcaagggctaggagcgggcaagactagtgtcggcaggaaggtagtggtggtgatggcgggggtgtgtggcaaacagagcccgagcgaaagcctgagaaggttctggttgccccccagcctactttagtccctaaccctccagcggggcgaggagggagcgcatcggagaggtacctgtgcgatgggcagcggtgcttggcacctgagcgtaggtacgatactcagcaaggcacctgggtgggacataggagaaggaaatctccaccccaaccccccaaaacaccgcccagaagtgggcggtgaggcccagtgccgcagccccagggaaatggcagtgacacaggtggcagccaccttcagagcgccaggcccccgccagcacatctgcaggtagcagctttggccacaggaaggcgcatctgcactgccgggttcgcaaaagcggggc

SEQ ID NO: 333058 - DNA, 1258 bp, Homo sapiens
  chr7:22893437-22894695
  hyper
cgggagccagtcttctgctacgtaattagacgagtcttgaaagaagcacccaggggcgtggctgaagactttaagaaacaccaggcaagggaggggagtgggtaccagagacacctaacattatttgagtggcaggagcttcctctgaccttcaacgaggtaaagagacatcacagccagcgagagtttggggcagactccccagactcggaggccggggcaaagtgggagccggggccaagtgggagccggggccgtgtggggtgggggggggggcccaaggcggggaaggcccgggccgccgacagggggcgcgcgagggcctccgggccccgcgggcggggcgggtgctggacccggaggggccttccggcaactttttggttggtgccgccccgcccaggccccttttaaacttgatctccgcagtgccctcccttttcggccgcggcgcgtgactgggtaagtgggctcggaccttctggacgcaggagccgaccacgtggctccggggctaccccgtgcgcttcctaggcgcgcctctcgctgcccccacgccgaggcctcggctcggcgccgcggggaagcctccgttagggcccctcgggggtgggggcgtcctcgtggcgcttgggcccttcgtcccgggttaggacggcccgtgtccttgtgcgcttgaaggggccgccccctttcctcgaggatcccacccccactcagcagaagccgccaggcgcccgtcacctcccgtgcctgagtccctgccgtccacgcattcggcctacaggcagcttttagtcctttttcaattaaatgattgcattttgaggatcaaattccaaccgcaggcggaggcgccgagccccggacggtctctgggttcttggtgcactcggggctcctgcctgcccaggggctgtgaccgcgcggacggaagcctatttgggaagcgagtgagatctgatgtctgaagcgctttaagtttctaagcggggcagtataatagcggggttagcaaacacacggaggtcatttcactcgcgcagccatcccccaccgccaccagtgccgttcatttgctactggcccgcagtcagataatttaaaggcttggagggacgagtcttgctggagccgacgcctacagtaagttgagcggagtgctgtgagccctaataagggagcctgctttcctcccgaagattcgcttttttgggagtggccagagcgttattacagcacagggcccgcttccaac

SEQ ID NO: 333059 - DNA, 1247 bp, Homo sapiens
  chr7:23052818-23054065
  hyper
cgaggattcccgagtatgttaaaatgagcctcaggagaggaataactcatagaaagaaggggcaagggctcaagaagagatcttcagcgaaataaccaaggaaggaagcgtggctgctgtctgaacctctccgccctgcaggggaccaaagaccgactcgggccaacgctgctctccagggggcgagggcggggggtcgacagtgaccattgtggccaccagaccggacggacagtggcggcctcgccgaagtagagggcgcgagtgggagaggaggcagaggccagagcatccgccgcggcagggaggggacggggggctcccgccccaggcccacccggcagaggggcggccggtggggccgaggcggcggcacccgggtcacagcaggaggctggactgctcctcgccgggaaggaaagacccgagtcgcgcgcacaaagctgccgccctccaggcagcgggcaggctgcgcccaacttcggggcgagcagcgccggccgcagcccacccgcccgccagccgcccccagcgccccgcgccgcctcgcacccacccatggcgcctcgcgcgggagccgttacccccagtggagccgcggccccagggacaaagtcccggtcctgtcctcgccgccgcctcgccccggctcctccctgacaaaaaaaagttatccgttgccggacgccctgggggcccggcgtgggtctctcggctggactcaccagggcggctgccggagctccacctgcaggacctcgactcgtgaggctctcagcgacagcgacggaggctgctctgcttcctcccgagtagcagcaccacctgctccccttcttcctagcagaacgggtcccggtgagccatcttccccctcctctcactgactgacaacccagccgggagagccaccactgccgccagcctctctgacaggcacgaccagggacccgtcctcaagcagccaaccaccaccgccccacgccagttcagcctatcgccgtcctccggggcgggatcagaacaacttctccaccaatgagaatcttcttctgctgggcctggggcggagccatgaggcgccttgagtgggcgtggtctgagcaatgggcgtgatccgggcgtccgagggaagttgattgactgtaaggtttgcggtggccgctaggcgatgacaatcagcgaaggtctcttagattctgagccgttagggcttatggccttctcagaaaaaaataaaccttacc

SEQ ID NO: 333060 - DNA, 444 bp, Homo sapiens
  chr7:23287317-23287761
  hyper
agagccgcagaggcctgagacgtgggccgcgccccggcccaggagaccccgcggccgcgccctaaccctcagtctcccgactgcgactgcgacccgggaaaacgcctacgtttttggaaaggaagtcccatcacagggagctgacccggtgtcagcgcgcagcacgttcccggcccgcagtgcgccgcgcgtcctcctagcagcccgcggagcccggcactgtgatggtcccgcttcccacacgaggccacgggccacagagtgggcaaggaactcgccccaagccacacagcgggtaagttgaggaggcagccttccatcccgacctctgtccttcctgcccgggtttggggttggacaggctcgggctccccgccagcctaggggctgggtctccagtggctttgctccatttcctcatttccttcaaaacgaggagttttc

SEQ ID NO: 333061 - DNA, 2253 bp, Homo sapiens
  chr7:23507580-23509833
  hyper
cgtttacgcacgcgttccaatacccctggcgagctcacagggcagaggcaaattcctctccactcggccgcgcccacggcctcccaaccccggacagagaaggaaaggagggacccccgcgtgtccgcagctgctttcgcctctcctgctcctggaggggtgggggaatcatccgctgcttcccaagccctgcaaaccccccaaactgcttgttgggacccatttcccgtaggagcaatttgacccgctcggaccgaggacattcagctgtgagctttcgagagattttgtaaccaataaccataatcccgcggcagaggccacagaaaagctttcaattcctgcccagcatcatcaacacacacacccccgccataaacttaaaagcaaggattaaagaccggaacaccacgccacacggcagggggtaagcaccagaggacaagaagttctcagctgagtctctccacccaataacggagtgagaacagaatcggggcaaacagaagcagcagctcacctttgcctttttgggaccgagtgctcaacttctatgggtttcccgtgcagttctattttacctgcggacacacaagaagtgagacggtcggccgagttcagcggctctccctgcccgaagacccgcacagcccaagcggcgacacaaatggcctcctgaggccctcgaagggcccccgaggcccggacgcggctccaggcggagggagaagccgaccccctcgagcggcgtgggcatttaactcgcagatggttggggagcagggtccgctggcgggcccactacttgggtatcagtccagtctccaagcctcccccacccacccctgggggccaccaacaccacgaggcccgcaagagggacgcggcccaccctctcaccgccctggacacgctccacagggcagactcggggcagggggctcccctggctttcttcaggagggggcgccctggccctgccctctgcttcagcccagacccgccgggaacactcagcggtgggcttgaggaagacagggagtggcgagaaagggtcggggacggcaggggagaccacgaacgggagaactggcagaggcgcagctcggcacaggctgaaccaggcgcgaaggacggcgaggcgcccgcaccacgtctgaattgattaaaagggaagccgaaaggcacggggctcccatggggaccccaacgcagccttccccctgggcgtcctgctccgcccggcaccgtccctcgccctggcggagccatacccggaggccgcagccccgcgccagggcccggagagcggcgggcggccggtgcgtggcggcgactcccttccaggcgaccagccgcccccgcccacctgcccctatcgctcgtcggaccaggggaggtggaacggggaaaccgggcacacactctctcctcccacagggtggggaggaagcgcggggccgcctgtgcgaggcaccagcctcgcggtctcactcggcagcacggtcgaggccactttccgttctccacggccgggggtttcggggcgcagcacagacagcgccgtaaataacgaccgaggaaagcaggaaggaacgaggcacaggcgggcattctagctcggcccccgaggcccagcgtgccggggcctggagcacgcgcctgggcccgggcggggcgccgggggagcgcgcctcccccagccccgcgccccccttagccagcgccggggctttcttgacagcgcgttcgccctcacccagcaaaccccggccggggaagcagagccgcgggccggagtgggagccggagctgaggagagccccggcccccacgcgcgtgggtgtgggcgctcaggcctcacccccgctcccccagcgcgccgggcctggggcccgcggagccacccggtgggcctgggcgggcggtgcagggctggggcgagagcccgggtggggccaggcccgggcccacctgaaagcgcctcgatggccttgagggcccagctctcgtccgggcagtccacgaacgcgtagccagtcttcaccaggaagggtcccgacaccgggatcttggcgtccttgaagatactttctaggtccgagggggcggcgttctcgctgaggtttccgatatacagtttgttcattgtgaagagtggttgtttaaaaaaaaataacgagaaaaaacgaaaaattaaaaccacccacggtgatggatggatccagctggttttgttcccctcgtcttctc

SEQ ID NO: 333062 - DNA, 929 bp, Homo sapiens
  chr7:23510081-23511010
  hyper
cggccagcggactgtgaaaatatcacactacgtgaggcaggcgccgcctccccataaaaaacccagaagggtgactggcaggagggaggggagaggaggaggaggaggagggaggaaggcgcaggaggcggaaaaaatccgctccgagtgtccggctttttgaatgagccacgtgttcaaactacaaatcaacgtctcacgtgaggaatcccagagcctcaattagagtgggtttcggagaaaaaagcgagcgagaggaagagggggaggggaaacgagattgggagagggactctgagaagggggaggaggaagaaggaaaatgctaaaggaaccgcagccggcaccaagcggggcgctgacggtcacaactcgagtttgtaaagggttatctggtctgggcggatcctgggagggagggctggaatattgatttttttttttttaatgaggaaatgggcagaggtactaacaggcagttcctcagcgctagttaccgtagttttaatcattcgatttttcaaaataggttattaacaacaaaaccagagtcacaatcccgaactcgcctggtggctttaatggcattagaagtgtaaccccagcaaagccgcaggcacgtttctaaggctggcatggacggaaatgctgcgaggaggggtgggggagtgggtgaggggggcagggggtgggggcaagacaggcgggcgacgcgccccaccccgtgcgcccttctcgggccctgggcaccgcgcgagtgggggcggcccggccccggagtggtgggggatgggatcccgcagcgtcctgggcgggtgtctgggcgacacctcctccgcctccgcctgcgctcgcggtggctctcggcttcgcgtttgccattggttgcgcgattcagaaaaggctccaggataaatgaggccgggggc

SEQ ID NO: 333063 - DNA, 1450 bp, Homo sapiens
  chr7:23513246-23514696
  hyper
cgcccggcttgggaccagcctggagtctcaagccgaaacccctcacgcgggtgggcacacaatgcccggcgtgtcgcctgggcctcctcggaggtgctttaacaggctcttgcgcttttgaacggccctcctggactctgatctgtttaaactagaggcgttaataagtgataacctggatctgccctccttggaagctgcctgcctatattttattgtttaaaataaataaaaatggtgccccgggagagaagatggggttgtttcctttttcctctggctctgccccgagaaagagggcgggatcctcacggctcacagtggggagggtctttcgtcggccgccggctcgcctcggagggcctggaccactggaccgcccttccccggggccctgccgcgggaccgcgggcttctggctcctcctggggctgcgtccgtatgcgcggagcgtgtggccgggccgtcgccgcgccaccccacctgagtccgccggccagcgcggggacgcaccgggcagcgtgtgtttggcgaccctcccgcacctctggtctcagttgcgtgtgtgcacgaggggttccatagggcccagggatgcttggtacccacgggggagaatccctcgccgaaccctgcgggtctgcggggcgggccgcgagactggcgcgcaaaagcggctccaaggcggggctcccgcgctccccggggccggcttgccgagtccaagttgagcaaccggcgtcgagagagacaccgcccctgctgcgggcgggggcctctcctcgcttccgattggctgacggggggaacctatcgccgtcggccgcctccgccagagcggtttgctggttttcattcattggccccggagccgcccctggatttccatcttttgtggcgcgaaaataaccctttgctccctcgttggttttgttgaggttgaggggtgggactgtgttcccctctgctcgctctcgtttttcctgccctttaacagctcgcccccagccccaacccccaaggaagaaagagggaggtaacgctgaggaagggtggaaagcagttctgcgtccgtgggtggagcccgccccttggctgaccgcatggtgcccgcacggtcccttcccttcccccagcgtccagcgcccggaggttctggatttgcgccatgctcagcagctggagtcacatcttcgtttccctgcccatttccaacatcttagagttgatgcgtccttttttacttaaaacaactacaaccaaccatgttctcaggtaccagaacttttctgggcttctagagaaatcgactcgccctgcccgctcccttcctaaacccctttgtggtccacagggttgttttaagcaaaatcaaacaacccctccaaaaaaagcaaacgaaaaattccgggtaaaatcaactatgctgagaccacgttttcgttgaagc

SEQ ID NO: 333064 - DNA, 221 bp, Homo sapiens
  chr7:23570157-23570378
  hyper
cggaacgtgttgcatggggcttttgttttctttccagggtttcacacgaactcacttctactaactcacttctacaattccctatgtagggtaaactttggaaatgaaactcactgacaaacgttccagtacatttaagctggggatatcgtattctttgtgatgtttgtatttctccgaccccaaatatattaataaaaacttttttctgagccctcttc

SEQ ID NO: 333065 - DNA, 285 bp, Homo sapiens
  chr7:23570662-23570947
  hyper
cgtgacagcatttccacattcatttcgaagtgaaaggaaagtcgaagggacattaagggaaaagggctccttgcgtagtttcccctcacagctctcgtcttaagaacgcttaagggtcggtgcggtcgttgactaaccacttcattaggctcgtcccaccttcaacctcaaggctttcgcctttttagacgcaacgccgccggttccaacagagacgcggccgctcactgaaatagagagccaaggagacacaggccccagctagtcccacgccagcttctcccc

SEQ ID NO: 333066 - DNA, 149 bp, Homo sapiens
  chr7:23719548-23719697
  hyper
cgccggtccagggaagggagaggggaataggtgcaaggtttgtggagggcggcaaactgcactccatgtggcgcgaggctgcgcttgcggagatccgggttctggtgcctggcgccggcagccagtaggggcgcgcgtcctgcgcagtt

SEQ ID NO: 333067 - DNA, 868 bp, Homo sapiens
  chr7:24613119-24613987
  hyper
cggcggcgcctgtggctgagggagagcagcggcggcggggagcgaccgggagcggcggcagcggcggcgcggaggcggctgaggtgcgagccggtgagttaactggacccccacgccgctcgggtaacggtcgcgccgcgcgccgggccggccgggggcgccctgttgctcggcgcggcgcgccacgcggggaccctggcccgccccgcccccctcggcacctgggcttcggcgggcgcggggaagagggaccggcaggcggcggcggcggcgccgcggtcggggaggctgctggccgcccccagcccggcccgcgcggaaggggcgctcggccgggctcctgcctctctggctgcgggcggctgggcgggccggagctcggcaacgtgtctggcccatgctgcttgccgccgctccccacgcgctccccggcgcggccccgactggggctagggccgcagacgcgcggggccccttcgggcgcggggcttgggtgcctacacctctgcggcgggagtcgcggtggagcctgaatggagagccggcctgggggcggcgttgctgtgactgacacctccggggtctgtcccgagagggggtgattccgccggctcccggttctctcccgagctcggagttggtaggggaggaggctttctccaactaccgccgctacttccgaggtacgagactccagttgtttggccaaagtggctgtgggccgagcacaggctgccgcgggggcgttcgctgctgagatcgtgctcgcggattctcggtacgtttgtctgaaaccaaataggtgctggggcttttttattttggctgggtggagggtcagcaggggagtcgattgaggtatccgacc

SEQ ID NO: 333068 - DNA, 1084 bp, Homo sapiens; identical to SEQ ID NO: 223048
  chr7:24796417-24797501
  hyper

SEQ ID NO: 333069 - DNA, 1194 bp, Homo sapiens
  chr7:25019060-25020254
  hyper
ttgtctcagtctctccggcgcgccccatcccgcggatgtggtaaagcttcgcgctcgccccaatttaccaggcttcctgagcctctagccccggcgtagcgcctccccgctgcccaggacagctccgcgcgccgcgtcctcccgcacctgcgccgcggcccctgcgctcggctcctcctggcggtcaatcctctgagccgtccctcgagggaaggtgtcctggggtgggtgagacccgggtcctccttccccgggagctgcagccggcacccaagctcccaggcttgggtctgccccagggccggagcctccccgggcgactcggacagaccccggtccggcagagaaccgcggcgccccgcaaacagcagcccttccgagcccgcgccgccgccaggccccccgacacccaggccccatttaggcgggcgccccgccactcacctgagcgctgtgcagccggagacgctccctagttccccggggccgggctccggggttagcgcacagaaccgggagaaggcaaccccggcttctccggtacccccgcaacgtgcagctgacagctcccgcaccggccgcaggagtcgggggcggggatggccacttgcagacagactgcggggccggagccgcgctgcgcaccggccgcgaagcgctcaagtcccctctcccgggccggctggcgggcgccaccagcacgcggccagttctgagtactttgcccagaacttctcggcgcgcgccgcccggcgattagcccgaggagccgcgcaagggcgggagcgcaggggaggggcctgagaggcccaggggcggggccccgagggggcgggagggcggcagagtgatgcacaatctcaccaatcagaagtcgcctttcgggaaggaggtggggcgatgtcctcggaagaagccagcggattccatgacgcggcgggggaactagggaccccggattccggatgggttgggagggcggagggaggcgagtcctgcggcgaggcactgggtggggctcccggtggcccagctcggtgcctgcgcgcggtaggcgttcggtaaatgttcctctagtggcttttccgggccagggaaggaggaaaaagtgagggcagcgcgggaggggcaggtttacggagaaggctccaggggacccttgcggtcgcacaggctaggagaactcgacctccc

SEQ ID NO: 333070 - DNA, 695 bp, Homo sapiens
  chr7:25891919-25892614
  hyper
cgttacagggtgggactgggtggagcagccttcaggccgccccggcccctcgtgggaatgcgccgcgccccccggactctggagcggcccgaccctgcttcccaggccccgggcaggcgggcgggcgagacacaaagcaggccccgcgggcggtgctccgggtttcgcgagggcggcggtgcgcttgattgatggattcacggcgtttaacccccgccgcctcgccggaggcggccgatccagctgcggccgagggcctagggtggccatgggcccggcccccgcgtcctccgcgcccccgccccggctcgggagggctgccccccgggagtggagaaaggctgatttacagccggccggccgcactcttgcaaaatcactgcggccggggaaacccactcccaggactcagcccggaagaggccctgaaggggagcggagactgggcgctggggtgggggcgggggcgccgagcctcaacttcccgcgtctgctggaagcttgctctgagcgccggctgcggcgttttcccgccttctgcccacgttttcgcccgggagtgggtttcaggagagctggggacagcggcatccctcgccctgggaccgttgcccctgcgcccgccgccctgtgcctgggcctttgcacccggagcgccccgcgccccagcgcagtcgtccccacgcgccgggatc

SEQ ID NO: 333071 - DNA, 338 bp, Homo sapiens
  chr7:25894678-25895016
  hyper
cgtttatatagaccttgcagacgtctgtgcaatatccaccactgaacacgtgaggtcgtactcaagtctctctggcccctggtaatgtgactcccttcctttatttgcatgaatcgcctggattgggtgtcaggtttttaaaacgtcaaggtttacgcctattgttgtcaaccaatcagcatcctactttgacgtgattggcttctactgtaggtgtcaatcatccaaaatttgcatactactcctcaggccgccgggagcctgtcagtcggctgtggcagctggaagagaaggaatcggacggagaagaatgaaaaatcactttgctttcgcaaagc

SEQ ID NO: 333072 - DNA, 229 bp, Homo sapiens
  chr7:25896368-25896597
  hyper
ttctagttctacttccttcccggttagccagctgctggagagccccctcagtaaattccttccagatcgacctcagtgtgggtgagagcgcagtctgtgaccaccagcgcttctgactcagcggaaaacgccggcaaacaggactacacctcaccgcggcggcaaaagcggcctcagctccagcactcacagccaccactttcaccgtcgccccgccaccaccaccttc

SEQ ID NO: 333073 - DNA, 666 bp, Homo sapiens
  chr7:25896689-25897355
  hyper
tctccctgctgtcaatcatacatgcgcgccatagcgcgcatgcgcactggtggactccagcccccaccgatcctacgccctgtctctgcgtctgggaccagacgcaccaataagagagcggattcgggggcgggccacaaggaagtagccaatgagagcgcggttggaagccagggctagagaggagtaaatccttctgtcgtccccgttctgccgcccccgcgatgatttatgcgtcctttttattatttgtaacactttgggaagttattaaaaggaagatctactgcttcctccttttgggttaaactggatggcaatgtttgtcactggcccttattagagaagagtgtggcgaggtggagggccgttggacgctgggtttgtttgtgtgggtcttgttttttattacaagacacattatccttttaattacaagctgtagacagggccaacttcgaaggtcttcgtggcggagtgatcttggatcattcagggggctgaaacccgatgccttctgactttcgcgtccgtactcttggcgttgggaggagcctctcaggaaggtgttgcaacctttggttgtaccagaaggaaataagcaaactcccatcacccccacccccattccccgccctaacacggagtaaacttcggcctttttcc

SEQ ID NO: 333074 - DNA, 777 bp, Homo sapiens
  chr7:25901811-25902588
  hyper
cgtttccggaagacactctacacctctccgcctcttcataaatatttaaaccgcttctttctagatttgtcatttaaatctactagggaatgtgcctcaagggctcatctttcactgggtcgctcacacagaggtggggcgagagggaggaggcgcattagccctgcgctctcatttgcttaaacggccttcttacgtcatcgtaagcctaagccaatccgtgaagtgcactttgacaagctacccgcccctaatttgtcctttcaccgccagcctaagccaatagtgtggctgcatgtaaatgagaaaccgcgagcatctccccccgcccccggctccgcccaatttcccacctcttcccggagcgcacagacgccagctgagtgggaggggcctagctgcgggcggagcacggaggaggaagggcacgaggaagaggcggagcgggccgaggcgcgcggagctgggtttgctgagtgcttccttcctcggccccacctcccgccgggcaggatgccgtttgatcattggctggtttaataaagagggcgtgtttattttgcataaatagtgggcgggcacccagggctgctttgtaactcgagaacccggtgtcccgcctgtctcccggggggtatgggcgggtctcccgccagcctcgccagactgagccaagggcctgaaggaaataaatggctttctgaaaaaattcgtcttaattcgcccttttgagagaattctgtttctaaatgcatttttttcgttggttcttacaag

SEQ ID NO: 333075 - DNA, 898 bp, Homo sapiens
  chr7:25989915-25990813
  hyper
accctcacctccctcggtagttatttaaacttttgccagcagctaactcactctaacttgtggcaactttttaccttcccatctggaaagctgggggcgggggcgctgcacgaggacgaatattcggagctgaaagagttaaacggtggggaacaaatacaggcccgggaaaagcccctaagatgggacgacccaagaaagacccgctttgcggggcctcccctgagacccccttccccagccattcccagtactctattcccggtcttccagccgcccgcgcccagccccgggaactcgggtcgaagtcgtcccatcccctccgttccacccacccactctttgggattctccctgccccattaggcagtgcttcccgcggaccccgttcgcgcacaaccttgcacacagtccccaagactgctcttctccccctcccggcacccccttttccctgcagcataagcgaccactctgtcccccatcctagcagaccccctccccccacataccgcacctgaacagctgttgcgcgcgtgcaacaggtctggaaagtgctttcccatcttcccccaaacccctcgccaccgttccatcccccgccacccctaagagacaaggccggaggggcagtgggctgcgtcccccgggccggggtgcacgggcggctggcggagtgcggggcgcccagaggctcccggggttgggggcggtggtcgcgctgggccgggacaccttcgcgagtggcccctcgtgcgcccgccgcaggctccccagcctgcccctccagcgccggccgccaggcattcccgggccggctcccccctcgcgctccgctccgctcccttccatcttgacttttgccgacgtggaaattttgggtttggagacgacctgc

SEQ ID NO: 333076 - DNA, 443 bp, Homo sapiens
  chr7:26192424-26192867
  hyper
gtccctcgcaccagcgtggatgcatggctggtgcacagcgtggctgccgggagcgcggacgaggcccacgggctgctcggcgccgccgccgcctcgtccaccggaggagccggcgccagcgtggacggcggcagccaggctgtgcaggggggcggcggggacccccgagcggctcggagtggccccttggacgccggggaagaggagaaggcacccgcggaaccgacggctcaggtgccggacgctggcggatgtgcgagcgaggtaggtgcagagcgggaagcgagcgaagtgcggcgtctacgccgccgggagcccccgaggcttgtgtcggatctgagcaggggccactctcgctgtgtcctggcacccttagcccctggtctttgcaggttcgcagatgctgctgctctgattccgaatgaagggctactagtgctgtc

SEQ ID NO: 333077 - DNA, 772 bp, Homo sapiens
  chr7:26415746-26416518
  hyper
cggtggcgctcccgcggctgcaccctcggccgcctgttggttgcggcgcctccgcggcccgcgcgcatcccccgcgctgcgtcccgcacacgcgcgctcccgccgcgtcccgcccgggccgctccgctggcggcggcgactgggctgcaggtagcgagccagccggcctcggtccggtaacccatggcaaccgccctggtaacccatggcaactgcgcggcggaaagaaaaaaaagaaccgtggtggggcggggggcggcgggcggtgaatgggaacaacgaccgcaaagagacagcgatttaccgcgcgggcctgcggctcccggccgcacctgctgcagacggcccgcgaggccccttcccgcgctacggtgacgattctggctgctggggaaaagagcaataagcagaaagccctcgtgcagaggggatccgggcggtgcacttggtgtgggaggctgccttaaacgccgatgaccctcccggcctccgcgtgtcccggcttccagggccccgccaggctggagagcgcgcgtggagagggccttgccgcctgggggttggttgaggggcggccgcgccggggccggggctggactccaggctttgttctgcagacgctcgcgcccggccggaggaggggctacaccgtgctgccccggccccatggggcccggcccccgagggtccccgcgagcggacgcggtggggccgggcaaactctacgtgccctaaattttgtcatctgcacacgcatcgcacacattagtta

SEQ ID NO: 333078 - DNA, 1756 bp, Homo sapiens
  chr7:27135176-27136932
  hyper
cgtctgcttcctgatttaacgcgtaggggctgtaaggcgcactgaagttctgtgagccatagcttggaccacaacttgagtgggagtaggacacccccaggttcccggaagtctggtaggtagccggctgggggtggcgatggtggtggtggtggtggtggtggggcgaaccgatctgcacccccctgcccactaggaagcggtcgtcgccgccgcaactgttggcgctgaccgcgcacgactggaaagttgtaatcctatggtccgaggggtaggctcgggctgagcaggtccccgagtcgccactgctaagtatggggtattccaggaaggagttcattcttgcattgtccatctgtcactgagtgacctggtcctgcgaagcccggcgtgactgtgccaactttctcacttcctccatggggccggagaagaaaaatgatatgaatgtacagtgcgcaagagggggggcgggagggcggaggacgctggaggaggggcacgtgacggtgtcagccaatggctgagcctcctgcaaaagtttgccggcttccgcagtgatggatcaccgttttagtggcatttaaatccccggcgctccgccgtctaggtgacgcgcagtcgcccccccaggcagcctaggcggcggcagctgctgcggcgactgcaaaggccgatttggagtgctggagcgaagaagagcaaaagctgcgttctgcgcgcgcccgactccgctgcccgccccgccaggcctccgggaggtgggggctgggaggcgtcccccgctcccgccccctccccaccgttcaatgaaagatgaactggcgagaggtgagaagggaagagggctcccggctctctcggggcgggaatcagtgggccagagctcgccgggtggccgcaagtacgccggcccagcccgcagcgcgcccagccggaaggcggggaatccggctgacaccgcgccccgggttcccaggccacctcctctgttctgaggctgggctgggagaccgtggggctgtgaggagcgcatagaaccgtggtggagggcgaggctgggccaccggctcttcaagctcggaatggagggggaagagcgcagagggctggctgggaggaactcgggtgggcgtgaaggagacgagggcaagaaaagaaacttcccttcttccaggagggtcttcgaaaccctctccccacagcccctctcgtcattagcatggcaatgaggagtttctgtaattcgacttggaggggcggatgagccctggaaactcagagctcgccggaaaaggccgggggcggccgggctcttcttccccaccttccctctctcgtcgctctccgcccctttctctttcccactcagttttgcaccgggagccctccgggatgcggagctactcgaccgccggatttttaggggtaggaggcgggggagagagatgacgctggcggacgtggccagcgcgggggccgggcggtgcgctgcaggccatctgccggcgccctgagacccaggagcctccgcgctcccgcgtgggcctcacagggccggtccacagctccaacatagtagctgaactcccttcgttgcgttcctctttttctggaggggaatgttagaagagagagagagcttccttttataaccttcctcattctgctgcacgtctagagtgggtgtgggggctggcaggtgggaggggcggtggacaaatggctgatggtggacgggacactttaccccaac

SEQ ID NO: 333079 - DNA, 1055 bp, Homo sapiens; identical to SEQ ID NO: 232804
  chr7:27190214-27191269
  hyper

SEQ ID NO: 333080 - DNA, 1383 bp, Homo sapiens
  chr7:27195477-27196860
  hyper
cgaacaaacttaatgttaaaattccaagacaaatggagttaaataaatttacgaggatcgaacccattaattgggccataaaaagttttatgagcctcatttacatacaatgctatgggctccacgcaatggcgcctccgctccaattaaaaccagaaaggctgcgccgggagtcacggggctaccggctcgcaacagcctggctccgctcttccggccccgcgccccgcgctccgcgctccccagcgctgcgctccccgctcccggtcccgctccgccagcctggcccgcctagcgactgcgcctacctgaagaccgcatccaggggtagatgcggaaattggcctcagccgcgccatgcagcgcgccctcgtccgtcttgtcgcaggcgcctttggcgaggtcactgcagagcccggggatgttttggtcgtaggaggcgcagggcaggttgccgtaggcgtcggcgcccaggccgtagccggacgcaaaggggctctgataaagggggctgttgacattgtataagcccggaacggtcgaggcgaaggcgccggcgcccgccccgtagccgcttctctgtgagttgggagcaaaggagcaagaagtcggctcggcattttggaacagagaagcccccgccgtatatttgctaaaaagcgcgttcacataatacgaagaactcataattttgacctgtgatttgttgtccggcagctttcagtgtcggttttacgaggtagagtgatatatgataacattacacccccagatttacaccaaaccccattttcttttggacggagctcgccgcagcacgtgaccgcccacatgaccgcctccgccaatctcagcagtcctcacaggtggtctcgctccgcagggcccgcagccgcctagaatggaagggcaagaggctcaaatatgcggccaaagaatccgcccgcgcccggcgggcctggcgcgtcccgcggaaaaagacctggaggctccgcgggagcgcccagctggcggccaacctccgcactggggtctgcggacgccaggcggcccggccccacgcagcaccccccaccccgcccccccgccgactcctgctagtgagccctggaccaagcttgggatcctccccatccctctcctgtccgcctgcccagaccctggaagggtctctgtcccccgcaacagcctgccccgcggtggccttgtgggcaggactcagctatgagcagatcgactctgcccaagtcttctctcacccaggtccagtgggcgacaggccggacttagactcggatccagacggggaaggcgcagcatctcttgcagctgcagagagattgccaccgcaaactggagccatgtggttcgaataaagtcaac

SEQ ID NO: 333081 - DNA, 2172 bp, Homo sapiens
  chr7:27203938-27206110
  hyper
cgccctaaggccgctgatcacgtctgtggcttatttgaataatctgtcatggggacccttgtggcccgggtcgcccgcagcctcatcttggcaggatttacgccgccactggccgaaggcaagaagtggaaggaatcggccgtctcccccagcgtcccagctccggctgccctggctgccgccgctcacggacaatctagttgtacaaaaggctctctgggctgcactgctttcgaagaacggcccaaagtatctcggtcctgggcctgggcagccaaggagaggggcggccagtcttggctcgtcccgaagtgcccgccccgccccctctcgctgcagcagccgcctcctctcccgtagccctgcgggccgctcttcactgctctccagacttggggccctatctgaggcgtcccaaacaccaacttctggctcctggccccaactcgagaggcttccagcgaggacgaaggcaggctcgagagaaacctggcgggccagcagatccgggaggccggcgtggaggcggcggcggatttgaagggaggagacacttactgggatcgatggggggcttgtctccgccgctctcattctcagcattgttttcagagaaggcgccttcgctgggttgtttttctctatcaactggaggagaaccacaagcatagtcagtcagggacaaagtgtgagtgtcaagcgtgggacagtcaccccttctggccgacagcggttcaggtttaatgccataaggccggctggagggcaagcccgcgaaggagagcgcaccgggcgtgggctccagccaggagcgcatgtacctgccgtccggcgccgccgccgccacgggcgcctgggggtgcacgtaggggtggtggtgatggtggtggtacaccgcagcgggtacagcgttggcgcccgccgcgtgcactgggttccacgaggcgccaaacaccgtcgccttggactggaagctgcacgggctgaagtcggggtgctcggccagcgtcgccgcctgccggggaggctggcccagggtccccggcgcatagcggccaacgctcagctcatccgcggcgtcggcgcccagcaggaacgagtccacgtagtagttgcccagggccccagtggtggccatcaccgtgcccagcgcctggcccgcccggcccgacccacggaaattatgaaactgcagatttcatgtaacaacttggtggcaccgggggggaagtacagtcacctaataagttgccggcgcccgcgcccccattggccgtgcgcgtcacgtgcccgtccagcagaacaataacgcgtaaatcactccgcacgctattaatggtccgatgttttgcagtcataatttttatagcaaaagccatatgtttttatgtaaagggatcgtgccgctctacgatggggtttgttttaattgtggccaacgacgattaaaagatcaaatctagccttgtctctgtactctcccgtctccccccccatacacacacttcttaagcggactattttatatcacaattaatcacgccatcaagaaggcgcgggtcccgcgtgcgagtgcggccagcggagcccctcacataaaattagacaataattgaagccataaaaaagcagccaaatcgcattgtcgctctactgtatttaaatctatatttatgatatttcataaggagttattgtttcagaagccacacaggctggcgggaagtcggaaacgaccaacagattcgtttgcctcgccgtggctcccagctgtaaaaatttacgaggacttggaaaggttagactgttgtgtttggttggcgagctccctgtaaataatccctgcggtccccgggagaggcgagtttacccgcggccgccctcgaaaagtcaaattcaacgcaggatccgtcccaaacggagccgccgccggccctaccagggcactccaggcagggaccggccgctcagggagtaccgcgggtgtaggtccccacagctacccgcctggagcgaggggcgcccgggcaacccttaaattcgcctttgctacgaggaccccacggaggagctggccaggagggagcggccagccgccaccagggcgaaggttttgagggcctggttggttgtgcggcgcgctcggtccccggccctcgaccccacgcacac

SEQ ID NO: 333082 - DNA, 945 bp, Homo sapiens
  chr7:27208953-27209898
  hyper
cggccggctggcaaagcgctgcggagaaagacacgaggctcctgagcagggaaagccgaggttgccaccgcaggcctggcacgaccagggccgtgatgccccgcccggcccgacccccgcgcgcagaggtacctggagacgatttcaactgaagtaatgaaggcagtgtcgtgctgtcgagagaaaggtggatcccaacaacaggaaactacctaaatcaccgaccagttctggtgctgcccgcgaagggctgcctcgcccgccgccgccgccgcctccgccgctgccgccgccgccaaggagagaaccctgccatcgcgcctggcccggcccagcccagcccctaggcaacctgcgcccgccagtgcaacagagtgccccaggcggccgcaaatgcgtcaaggaaggggaagccacaggccccagtaaggtattcctgggagggagagggaggaaaagagagggaggaaaggcagggagagaggaataaaggcggggagcaggcgagacgagagcagctccgagaagcagtgtgcgcgccgctttcccaaatcttgcagcccagcgagccggcgccaagaggcggtagccgtggaaggctcgaaagcgccagggacggtacagatcccggctccctgtctggccccggcctcccgcctctcgctctccccctctccctcctagctgcccgcccgccggggcgcgcgctcctgcgccccctccccttagcccccgccccccccactctggcaagcaggaaacgcgtggccctaaggagtgccgccaggtgggggaggccgtactgggggagggggaggcccccatgcagtccagcccgggtccacctaaccgctgcctccagcggctagagatgcgctgtgggccaggcctgctccccgattcagattgagggtcatctgtgacccagacacccgcaaaataacc

SEQ ID NO: 333083 - DNA, 1890 bp, Homo sapiens
  chr7:27212396-27214286
  hyper
gctctcagctcagggccccccgcttccaggccggatttgccttttcttcttcccgcaacgaagattcccgcccctcagcaactttgaaaaaagcatgggggatcgtaaactcgaacttcgccggttaatgggcttatttattggcgctggcggctgcttattttggatgccttacaaacatccgcgctatctgcgggcgagctactttccctccctccccctccccccgcgtgggccgcgccgcgcaggctgggcagggaccagggctctgggtcctcccggccacaggaaagagcgcacaggagggggcctgctcgctggtgtcctcgtccctagtcagggggagctgaggccagcgccgaggacgtcttgctgtggggcgctaagccggacatgaattttactgcgtccccacgcccaaatattaaaaagcaagttcacaaggtcagcctgcctgcagcttgggccaaggccggccggctgctgcgcgggctcctagttttctgatccttctcctccttgtgtctgcctgtctgcccgcctgactgcagccctctgcagccctgcttacccagggaatccttctccggcgaggctttgctgctctcggaaggggccggggagagctcctccgcggccgaggacgacgcgtgcgcctcctcgtcgccctgcgagcccccgccgctgccgcaagccagcgtggggggcggcggcgaatcgagggctcgctccttccgggccgcatcggccgagccggaggctagcgcgggcgggagatcgaaaccgcgccccgggggctgcgcggggaacgggccagccccgagttgctgcgcgccgccgccgccgctgccatagcccttggcggtgccgtaggcctgagaaaggcggaagtagccaggcactggcaccccgctggaggtgcccagggcgcagccgtcgggcggcgggccccgcgggaagggagccagttcggcggcggtggccgagactttggggcatttgtccgccgagtcgtagaggcagtaggagctctcttctttgatgttctgcgcgaaagagcacgaggtggcctgcggcgctggctggggtggttgcggcgggggcggcggctgctgctggggcggcggcggcggcccgtcaggcggctccatccggcaagaccggggcgcgtctagccacaggtctatgggcgagggcccgtagccgtgcgccccgggacctagacccccgccaccgccaccgctgcccggcgacgctgcctcattgcgcttgccgcccagcgtggggaagagcccgcagctctgcagcccgtagggcaggtcggcggcgggcggcaggtagaccccgccgtgggcgtagtaaccgccaccgccgccgccccccgcgccaccaccaccgccgcctgcctcgcctctgcccgagctgatgagcgagtcgaccaaaaaagagttcgcggcggggctctccgagcatgacattgttgtgggataatttggcgaagggagcagatagccctttctggctgacatttcttgtgcaaaacatgctgaatacgattagcaatccccccgcaccgcggcgggcgcccgcagccaatcccgagccagagtttccgcgcgaccactcccagtttggtttcgtaggcgcggggccgctctccgagggcgccctcagagcccgcgattgatataaatatgtaatctgtattgatgggccaggagacgcaccccgacaccttggcccgaaggccgggagctgtgggggctgccccaacgtggctggtggggggcctggccattgggctcgccccgcccctacccggacgtgagccccataccggggtcccttagaagggcccttgggccccgcgcagttaacaagtggggtgtt

SEQ ID NO: 333084 - DNA, 503 bp, Homo sapiens; identical to SEQ ID NO: 232811
  chr7:27219324-27219827
  hyper

SEQ ID NO: 333085 - DNA, 2286 bp, Homo sapiens
  chr7:27223010-27225296
  hyper
cgcctgcggacatttcaccttccagcacctgggctgccccttcccaaggcagtaaaggcggctccagtcccagtctttcccggctgcggccaagactgggcagtccttaacatctggggcggctgccgggtctttgtcagcctgagtcctggccaccagcttctgcctccccggccagccttccggctccgccgaggtggggaggtggcggcggaagccccctaccctaggccttcgctgagcaccacggccacacggccatcctgcacacggcagagcagcggctctatcttaggtagggtgaagggaaagggggcttcccgaagctgcgggcaggctctacttgctccccctttaaaaaaaaaaaaaaaaaaaaaaaaaagacccacaagacaaaaaaaaaatcgcttttgacagattgaataacaattgtgaataacatgcagttgggcagaaggaggcacgtaattgccaccacgccagaggaaaatggcttcctttggacaaaaaggccaactttgggttaatttgttcttttaatatattgctagagctaagcgggctactttatctgttaaacgcgctcctagcgccgtcgttaaacagcgacgcctttgaatcccggccgggactggagtcccggcgcaacacatggcttttataaaaatctccggattacctcgctatcaaaagctcccgaagcccttgcagggggaatttacaggcgcccacctccggctccccagcctggagctggccccgagcggggtcgagctgctgggcttgggagctgagaagggaaaaaagggaaaaggggagttgtttttttttgcaggcatgccttggccggtgggtatttcacggccaatttcagcactcgccacgtgatcccgccttttataacaaagttttgttgggggaaacctaaaggcccttcataaaccttatatgcttataaaacagcatataaaaatttaacagcggtgctgcgctagatttccaactcccctttcataaagcgcagggcgctgcctttatacgtactggagccgccggccttgtcctcagtgtggccggaagacgactcggggctgctgctgctctcggggcgccgccgccgctctttctcctctgctgccgccgccgtctcccggcagccgccgccgccgccgctgtccgaacttgaagttgccggcgcgcccgttgcagccgccgccgccgccgcggaggtcgccgtggccgccgggggccccttctcggcgctcttgtccccggggtagtcggaggaggcgaggttttccggggtgccgtaggctgtctcgaaaaactggtcgaaagcctgtggcaggacgccgttcctgcccacggtgctatagaaattggacgagactgcgggggtggggtggtggtagacgttggccgagctcttggccagcacgtcgccaggcacgccggccgcgctgggcgcctgcaggcagtctctgtgcacgagctcctccgcggagtagcagtgggccagattgccgcgggggtgccatttagtggcgggctcaatggcgtactctctgaaggtcacttcgcgcacgggttggacctggggcaggttggaggagtaggagtatgtcattgggcgcgaagacggggtctggggcagaaaagaagggaggctggagaaatctggacccgagacgtagtaagtacaacttggcaaatacatgttagaggagcagggaccacgctcatcaaaatccattattgggctaccttgggctctccgcagtagccgagcttaacatgattctccactgcagctgcctctttgaagcggatccgtgaagtagaaatttggagacgtaagctgacgtggaaatctatccccatccttagcagggaggtgctggtcatgtgacccgatgttgaaattgacaagctgctagctagtccgggccttttccccccccctttccttttttttttttcctcctctcccctccctcccggcttcctttctttgtagccacctcaggggaagcaacagatcgtcactcggtgttctcaccgaaagcacgtaatcgccggtgtaactcatgttggctggggggcctcccggcgcgcgcggagaggctggggtgcgcccccatgcagcatgcttgtgctcaattgcagggtcctcgttctcgagtgtgcagagggcggtgagagctcaactctcgtccccacctcccacccgcagctccccgggtgggtgagggatgccctggactggggatagccaggtgggagtcc

SEQ ID NO: 333086 - DNA, 939 bp, Homo sapiens
  chr7:27232216-27233155
  hyper
cgggacctgccggtgccacggtcccgtgcgccgggtcccggcctcgggctgcgggcggcttcggggcctacagcccagcggcgcggagcgtggcagaggcgcggggcgcagcgcagcccgaggctgcctcccgcccgggcggacggcgcggccgctggggtgcacagcgtagccccgcgtgcccggctcgctctccgttccctcggatagctcccaccgctcggctccgggctcagaaagcggaagtatttggtagagaaaaacacggtttcttttcagctcgtctcaaaatcccttttagagaaaatgctcctgtcaagttttatttcccgttgcaaaccaccttccacgctgccaagaattaagaccgggagagattaaatacccgattattctcctggggagggcggggcggggccgggaagtgggcacccacaccaaacattccttgaagtaggcttgtcctgatccagccgcgcccggggagccccacgaaggcccgcgcggcctgcggtgacgtcagcctgcagttgcggggccactcacccgcacagacacggcccttgctgttccgcgccgggacctccgccagccgtcctgccgcagccccgactggcccgcgtgccgtcagagggaggcccgctttacaccggcctgagcctccattttgagtagggggttcttgtagaagcgtggagggtttggggccgcgcctctgtccccgaggggcgcgacatcaggtagctctccgagttcacaccccagtacctgggggaggacctatgtcgccgcataaccgcccgcagaggtttggaaatctctgagacccgttgtaattatttctgcccagtggatccggctcttcagcgtcacgagagccgggcagaaatgaaatcaactgtggcaaggccttggctgctttcacggaggagtttttct

SEQ ID NO: 333087 - DNA, 583 bp, Homo sapiens
  chr7:27237765-27238348
  hyper
cgagttctgaagcgtttcttcaagttgccttcttgctctatttttaatccattaactagtggttttcagtttgttgatgacttttttctctttaaccctcctgttctggaaccagattgtgacctgccgctcagagagattcgtcgtggctgatatccgcctccgtttgtccttagtaatgaatttattcgtggcgtattcccgttcaagttcttttaattgcaccttggtataaggcacgcgcttctttctccccctcctataggagctggcatccgagggatgggagaccacgtctagaagacaagggagaaggcaagttacacagggatcggaccccagccagggcataggcgacagctcgatctgagccacccgccttgcagcgcccggctgctctttgccacccgctgtacaatcctgtcttctgctaaagcctagagggtcagtggggaaggtagttagttctgaactgaaatgaaatcacccagggctccagtgacttccccaacccggccatcctgcaggagcagcgcgtaggcagcctcgagtgatagcctggtccaacggcccacaccttagc

SEQ ID NO: 333088 - DNA, 1783 bp, Homo sapiens
  chr7:27238584-27240367
  hyper
agccagggaccagctcaactcgaggcagtgcaggcagacccagccagccatgctcgggctcccaggggtgcagagccgctagggcagaccaggaagagaacagaaacgcacccgggatcgcccgggtgcgagcggagaagaagctggagcagagccggaagaccagggctgggaataggtcgtcatttaccgggcagagtggacttccagaggtggggaggctgcgcctgctctttggggcagtacatttggccgttccagccgttgggcagcgcccagggctggtagctttccatgggaagacccaagggttcgtggcgcgactcgccggggcccccgaggcccggcaccactggcatatccaggtagccaggcatgggctgatggtggtggtaaggcccggctgcgtagccctggtggtagaaggcgaactccttagcgcgggagctgaactcctcggcagctgggccggcggtatccatgtacttgtccgcgaaggcggcggcggcggcggccgaggcgggctgcgcgcacgacttgatggcgttggggtgcgggcccatgcgggcgcacgggtagtagccgctgccgaagtagccatagggcagcgccgcgggccccgacgagctctgcgccgctgccgagcaggggctgcattgcttggcggcctctgcgcccgccgggcccgccgggccgggacctcccgaggacgacgcggcggcggcggcggcggctgcagcggcagccgcggcagcagcggcggcagccgacgggggcgcctccccgggggcgctgctgtaggcggacgcggctcctggcgccaagggcgccgggtgcgccatcaggttgcggcactggttggccgcggccgccgccgcagccgcggccgccgccgccaccgagaagttgccccctgccgccgcagccgccgggtgggggaagcccccgcccccggccccggcagccgccgccgctgcagccgctgctgcagccgccgccgccccttccatgttcttgttgagctcgtcggccaccaggccgccgccgttgtcgtagagaaacatgacggtgggctcgatccagcgggggtggaggagcacggaggctgtcatagcccgagccgcatggagaagaccccagtggcgctgttttaaaaagcccccaagaagtgaagagcgcgcggcgcggggccggggcccgagcgaggggggcggatcgcgccccgcggggtcgcgccaggcggccgcccattggcccggcccccccgctccgcccacggcgtatgcaaagcgggcggctccgactccagctctgcacggtgcacccgtcgtccccgccgcggcccgcgccgtccccagcgccagccgcgcggccgcgcaccattcacccgggggagaggcggaggaacgtgcgggtggggcagggaaggaaggcggccccatctccgccccccttcccttcctttatcccagtggggcccagacccgcgcaaccaggcggggaggggaggtgggcgcgcgattgggttgcgatctggagcagtggggacaggtcaggtaattctgccggcggtcagggatgggagagtggggaggacgggaccagcctagctcagaatgggtgtttcttggagcctctgggactgttttctttccaggaaccggcgcgtatttctgcagtgagaccacaggacggacatcggcgccttcggcttcgatggagttgcgattttgctctttccagggaaacagtggcagggtgtttgctgcttatcggttcctgc

SEQ ID NO: 333089 - DNA, 841 bp, Homo sapiens
  chr7:27244540-27245381
  hyper
ctcctcagagctggcgcaaactccgtcctccaaaactcggctctgggaggcctaagtgactccgaagccggcggcagccgcggcagcggccgtggtggtggaagagctcttttccccgacagtgccactgatcgctcttcactggagctggaaacagccttcgcggaaaggaccggagcatgcgttagaagcagagggagcttggtgaagggctcggctggaaggaggaaacgccttctcgcagtgcgcggccagcccgcgggggacaccggcttgctggactgcaggggcccgtgccacccaggaagtgacctgcgggtcactcagccggggcgctgggcgagcgcgggacggcccggagaattccgtgcggctgcgacgggaaaaggacgaggggtctctgtacccgacgctgccactggcccaaaggaattttacccgcgagcgcccaccccaccctagcttgatgcttacgcccgcaacaaaacaggaaaccaggactgggcagtgcattctttaagtcaacaaatacactgaagacttcgagcgtttgaaggaaggagggggtttgcacgtaagcctggccccgccgggctcggctttctcgctgagaaagcggcgcaggcagccaggcggcctgggcccgcgggggtccatctcgccctagactcctaagaactcccacggccctgttcccagctgcgaattcttaatgcacaacgcgacggagggaaggaaattcaccagcgcagcgacgaggaaggggaactcaggaccccttcaagtacacactgaggtgtgatcagagttttatgggcactttatatgctgtaatcataac

SEQ ID NO: 333090 - DNA, 333 bp, Homo sapiens
  chr7:27250161-27250494
  hyper
tcggaactcaagggcgctgtctctgctcctcgggccgagactcggtttcccctgccgctttttgaagtctagcattcctctgtgaaagctggcttttccctttttttcctatactccccttcccgccctgcgctctaaatcctggctctggaaatccaccagaatcaaatgctggctccctgcgggcccgcgtcggagcggctcacgccattggaatctttttatgacctttgatgtgtttaaataacatggcaagtctgagcacacacctcggattaaactttaatcggctgcagtcaaggtcgcccaggtggtaaaagcgtttcctccgac

SEQ ID NO: 333091 - DNA, 692 bp, Homo sapiens; identical to SEQ ID NO: 232823
  chr7:27252473-27253165
  hyper

SEQ ID NO: 333092 - DNA, 874 bp, Homo sapiens
  chr7:27264696-27265570
  hyper
tgccttcaaaaaggttttgccgttttgttttttgtttgttttaacgttccaccaatggttttcgggtgacggtgtccttgcacgatgtagtccgtcttcaaagttcttttacacaacgtgaattatattgaaattgggctacttcatagagcttcgcctcagtggaggacagcctggaataggtgagggggtctcgaaaggaataccaggccggggagtactggcaagtgtcggaggggaagggcaggtcggggagaggatccccaggggctgggtgtctgcagggctccccgtaactcagaggggccggcggccgccgcccgaagcctgagcttttctcagcagatggagaattcatttttaacccccaggaaggaatgggctgagacatcagaccaccgctcctagagggtcaaatttcctccccataaatccaaaacattctctttagggagttccctccgtggcgcgcaaacccgggaagccgcgcgccctggggtttcttggcgggccgtgcgcgcagcctgaaccgccaaagtcgcgtcatcccgcatttgcctgcacccaggagtttgcaacccgcagagcccgcagaggccaccgccaagagtgcgcgccttggcgccccgtcggcctctacttcctcggatctgagccagcgccgctaatccgcaggctgcagcagaacctgtcgccagcttggagagtccctcgcgctgccctggcttcccggtccgcgggcgactcgcgctgctcccgggtttgtcgggaccccaggagggcgctcaagcctgtcggcccctacttgtgtgtagagaataggcccgggtacaccacctcagaaatgcagaggaagccggggacactgaagccc

SEQ ID NO: 333093 - DNA, 836 bp, Homo sapiens
  chr7:27278959-27279795
  hyper
acaagccagctcctggcccccggctcaggactcctcgctctctcccttctcggggccctgtcgccgttgaaaggcccgctgcaggctggggagggtgatcggggccgcgggccatctcccccgagccgggcgggcagactgcggaggcaggccccacacgcgccgcttttccgagcccggttttcttcaggagcgaagctgttccagctgacccgcgcgtctgggggcctatgcccggcttccgattccatttaaaacgacccgcgcatcttatctccgtcgcctccccggggttcccacccacccccctccggcccgggccaggccagcccagccccggcggaagccaagctgggagcttttgaagtccggagaatttcaatccgagaggagccggctggaccggagcccgtcgccccagcgggggaagggacggggggcctgccgtgtggcaggtgggggatgggtgtcccccgccgcgagaaatgagaagccgccgggcctggagcggcctccacctcagctgctatcaccccctctccgctgtcatgggattgcccaggcttaatggggttgtgcagggcttcacttgctctcggaatttaccttccttctcgagccgtgccgcgaataaccttcacgacacagtgataacgatgttattaaatactccccccacattcaccgcccaaaaaaccaaaacagtgttcttatccagtcctctctttttttgtcttctttcctttaaaaacccaaccgctcttaatgtgaggttgatgaaaggatgcttttggaagaagtgacatttggttaaaacgttttccccctaatgcgcc

SEQ ID NO: 333094 - DNA, 1804 bp, Homo sapiens
  chr7:27281871-27283675
  hyper
cgtagcttgtaaaaagacttttcagccagtttgaggttagctgccaggggcagacagttgtaataatgccgacagaattgaggcttgtaagccgggcttcacacttctaaaatgcagttatggattctttcatcggtgttagatcaaggcaccaagttaagaaaacaaaagtcaaaacaacaataaaagaaaaaatcaaaagcttatttaattaccgagtcccgctgcccctgcggaactcgccgcgcgcgttaagctctcttttctttctgcggaattccatttgcatcccctctgcctgggtgtctccctctctcagtgtgtgtgtctctctgtctgttttcacactctcctccccaatcgagcgaggcccacacctggcgcatcactgccgagccattagctgcgggtttcctttcatcttcgctgtggcagacgtttctatttatccacttgcgctcgccgagtggcgtcaccagcggtactgtaatgacgattgcagcaggaggatgacagcttagaaagaagagggcaatggggcttcctcccagaggcggtgcggcacagaggagcgctcgcttcacaaggtgaccctagctcccaccgccaccgccgcggtcgcggtccagaccgcgctccagcagctccgcgccctcccaggcacccggcctttctttctccctcttgcaaccaagatccgtccggccgctggagacccagggagccggggttaggaactcacttggggctttcccctcccccaccggagagccccgggatggagagccgaaaggacatggttgtgtttctggatgggggtcagcttggcactctggttggcaagagagtctcaaatttgtccgaagccgtgggcagcccgctgccggagccgcccgagaaaatggtgccccgtggttgcctgagccctcgggccgtccctccggccacccgggagcgcggcgggggaggcccggaggaggagccggtagatggactcgcaggcagcgcggcggggccgggcgccgagccccaggtagctggggcggccatgctcggcccaggacccccggccccctcagtcgacagcctctccggacaggggcaacccagtagctcggacaccgagtcggatttctatgaagaaatcgaggtgagctgcaccccggactgcgccaccgggaacgccgagtaccagcacagcaaaggtagccaccgtgcccctccgctccccgggcctcccactgcgcccacccttcacttcggcgcaggccaggaggaagacactcccttcccctagggcaggatggctggggggacccacctgagcaactctctctgctatctgcgttctggcgggggtctcctactgtgttctggcattggcgggactgagggtgacagcagtgccttgagtgcggggtgctgagggggcggatgcaagtcctggacttgggggattcgaagctcaccccaagcacccagtgtttcaactgctcggggaatgcttcaattgctcggggaagacactttccccaggcgagggcaagatcaaacgccgatccgggcagtttgtggctggcagggtgtaagaggcatggaggcgcggaagccaggagtccataaaggaccgtaaaattgcggcccacttgggcagcccgggtgctgcagccctccgaccagtttgcacgtcggtcagaggtccaaattaccttgtcacttcccgggcttcgcggcgccaggtcggaaatggtcccaatggtctaattgcctttggtctccggttgcatttgaaaaggcagagatc

SEQ ID NO: 333095 - DNA, 1308 bp, Homo sapiens
  chr7:27284928-27286236
  hyper
cggggtccaggctggggaggcgggtgtgcacctatttagcgggaagtaaatgccaactgccaactccctgaaacgcaggccaggaatctgggcctggggtctccctgcccggcgcgtgcagattgaccctcgtgacagctcctaggcaggcattgctgccatgtggctgactctgtccctttcctggttaaatagacaaggggtgggcgtgggggaaggggatagagtgcctgtgcgggtgacaaggaagtttctggggacacgctctctgcggccgcagaccaattgagtccatgtcctttcactgctcctcccatacacacactggcctctggcaccccgggggcctggccacctgggcagaaggaaggagggagcgggctggagtcactccccaaacctctctcggagggattccagctccaggtggtggtggtggggtcggtctctacccggctggtgtctgctttggctgttcctgccctgcgaacactgtccccggagcgggaccagactactggcctctgagcatcgggccaagtccagctactgaacctgctccgctcctctccccaggtgtggttccagaaccggcgcatgaaggacaagcggcagcgcctggccatgacgtggccgcacccggcggaccccgccttctacacttacatgatgagccatgcggcggccgcgggcggcctgccctaccccttcccatcgcacctgcccctgccctactactcgccggtgggcctgggcgccgcatccgccgcctccgccgccgcctcgcccttcagcggctcgctgcgcccgctcgacacgttccgcgtgctgtcgcagccctacccgcggcccgaactgctgtgcgccttccgccacccgccgctctaccccgggcccgcgcacggactgggcgcctctgccggcggcccctgctcctgcctcgcctgtcacagcggcccggccaacgggctggcgccccgggctgccgccgcctcggacttcacctgtgcctccacctcccgctcggactccttcctcaccttcgcgccctcggtgctcagcaaggcctcctccgtcgcgctggaccagagggaggaggtgcccctcactagataaggggccgccggctggctgccggctccatgacgcccgtggggtcaccccccggccccgggactcagccagcctcgctcctcgctcctcgctcctcgcccctaggacgccaagggggaaaggagagggcggaaaaggaccagcgggatccggccgcaagaattggaaagcctaggaagtggcggtggctggcgc

SEQ ID NO: 333096 - DNA, 1145 bp, Homo sapiens
  chr7:27290961-27292106
  hyper
cgtcttcatcgagattatttatagcgcagtgagcgctgctgaaaggtatacgctgttaacagggacaattacttaaagggaagcgtttgtaaaatggaaaacaaatgccggggttggtaacaaatgggatcaaaagcagccattccaatctggctccccgagggaaaggagcgggcgtggccctgtaggattaggggcgcttctgacctccccaagacccaggtgaggccgagggtccccggcgcgccagcctgcgccgtggctgtggctgcggtggcgactcgggccgggcctcgctctcgccggcttcaggttcccgcctccctcgcgcaggcagcgggcgcgtgtggcccgggctgggcaagccgaggaacagcgagcccccggacgctgactgcaggacgtcccagtttgtgcccgggtctccgtccctccccgtacggggctcgtacccccgggcctgggtctgacccacagggcgctgaggcctttgtagctgaagtcggaaggcctcgttgcgagcgcggcacaggttgctggtagcttctggactctggaggcttggccttccttctaagccgatggcggggaaagaacctcgtttccacagcttccccgacccccgccgcttgccatttggggacgggaagcgcgcccgggtcgcttcacgtccctctgggccggagccctttccatggctggctcctctgggggcccttgggcctgtgagcagcgtctacttccctcagagaagaatcctttccttcccccatcgaagtgtccctttctgtatcctgaaataacccctcctgggtgaggccagttcccctctgtcgccctcctcccgcaggcgtccgggagcctcgtgaggaccccgtgcagttgagtccaggcgacaggtgcctccccaggtgtctacttgccctccctcaacctgtttagggaaagaccagaacgatgtgcgcggggaggtggttttgtttctcccgaaactggcgctcttgggtaaaaccgcgtgccgcgtctacgcgggctctgttagtgtgcgtgtcccagaagagtgggccttctaggcggcactctttggagaagtaagtgaggtgaactcagaacagagaagcgggaacgatcgtttgatgtgccga

SEQ ID NO: 333097 - DNA, 1980 bp, Homo sapiens
  chr7:28448716-28450696
  hyper
cgtgtcacacggcgctgggctctgcaagctgttgcttgcgcagtcgcccccgccgctgccgctcccgggcgggtgcaccagggtccgcgcgggcggggcggggtcggggcgggaccggggcggggcctgccccctcgacgcgccggccccgcccctcgctccgtccctccccagcggaccgcaatgatttagaagttcaggaatcccacgtgacgtcaccgggggggtgatgtaatgcactctaaatagaatgtattgtaatctttgctcagtccaacgtggtcccttcacccgggctccgctcttgccttctccacacttgtttggtaagttcctaaaaatacggctcggccacttctggggcttttgcatttagccacttttgttgcacttgccgcaggagccatctcgggagtgtacttgtttgcaggggttggttctcggcagcagccgcgaggttacttggtccagtgggcaggtcacagggcaaggagtagggaagatgcgatgcatttttttctggagggtgatctgtgtttgtaaacattttggcggaccagagggaagtccggccccgagtgctggtagactgtggaattcggctgtgtcctgaggccaccctagagaccccgcgccgcgtgagtgccggagcgctcggtggccgccgcgccgcgcgcctggagggatgctaacgtggagccggcgccgagtccgcccggcgtgcgtgcgtgtgtgggagcgcgcgagtcccctgacgcggggaccagttatgaatcgggggtgtgtgtttgcctccagagacctggcaaggtgcggagccctccagaagtgcggtcaagcggcagcggagacggcgagccaggaacctccccccgcgtccccagcttcccagcgtggcggcggaacccccggagaaagtttgcaaacttccagcgggcgcggcgaggacgccgggtcacctagggggcgggtgggcgcgcgcgcagggggctcgctctccccggtgcggagctgcagctgccacctctcccgccgggctgccggctgcagcgggtgggcgcgcgcccggggaggggaggtcgccctcggagggcgcttggctttcgctccaggcgctccgggctggagagcggcgaggctccgtccgctccagtccactcctccggccgcctcctgcctccgctgctttcttgctggcatcgttacctcttcccggccgctgccccaaatgacagctccggctcgagctttggcggcgcccaggcaattcccaagacctggcggcggagtctccccctgcggcagattctcggcagaatcacttgaacttttcacgaagttcttagaggggcaagatgcgaaggaaggaaccaaggagatgttttctctcagcagctgcatcccgcttcttctttgccatagatttatttttaaggggcgtctggtagataaagccctagaccttgtccacactctcacccccatccccaactttccctggaccggtgccgcccccacttgatgcttgctcaaggccggggactggagcgggctacttgtatatttcgttgtcagtctgcagaatgtgtttgatttttatttttccctccttctctgacatgtgtcaaggaataaagactggatacaggtccattacgtcattctgcaggccagtaagtgtttgattaacggcttgagctcctcaagggttcaggagcttagaatgctgacaaagcaactctgctttgcatccccctaccctccccacaacacactcgtgcaatcgccggctccctgggcatctttattgccctctcttcccagcccctccctctccaccactcccccgtctacaccgttatcactctagccccgcccccgcctttttacagctttccctggggcgagcacggtccctggagtgtgggtaaaagcttctggggtctgaggggaccactgtacctgatcagcgcgcaatcc

SEQ ID NO: 333098 - DNA, 1440 bp, Homo sapiens
  chr7:28995382-28996822
  hyper
cgagaagtcggcggacacgccggtgcccatggagcgcaggggccgtcgggtggagtacatgtgccgaacgtggaccggggccccgcccttccgcctagcccgcagtttcctacgcagccagcgagacgcccaggccgccaaggccaggagcaccagcagcgcgttgaccgtcagcagggccaaggtcagcagctggtagtcgacgccgccccggctcccggcctccggtagggtgaccagccccgcgcagtggtcccggggagccacagggcagacacggcccccaagcacgccctccacgcacaccaggtagggggtgtccccgcgcagctcgcgcagcgtggccgagtcgctgctctcaggcaggtagacgaagcggtggaacttgggctgctggccaaagcggtcaaagagcaggcggaagcgcgcgccgcccagcggccggggactgcggtgctcgcgcacggcccagcgcaccgaggcgctgtctgcgcccaccgcctccaccgtcaggttgcacagaatgaacttgttgaagtcgcatgggtcggacaccagcggcggcagcccggccccaccgtcggactgggcggcacgctcctggtgctccgtgcccagacgatgcttcgtcgcgcgctgccaggggtcgccggcgggcgatggcgcagagccaggagaggccgttggggtgggctccgcgagggcgggatctgcccgagtcggacggccccgctggggcttcttgtgcaggtctagggactgtggagccgggcccgcggcggcagcgacggaggggctgggctgctggaggcccgggccccgccgactcagccttagggcgctgcggttgcctaccagctccctggcggccccatcccaggccaccccagctagaaatcgcccctgctgctggagctgcggctgcggcggcagctcctccgcgagacctgcaggtggcgtcatctcctcccctgcggccgtgggtaggggctgccgcctgcggtcagcggtcagggaagctgagggcgagggatccgcgcaggatccattttgcagctgctggtcatccaggtaatccaggtatttgcctcgcagggccggggggtggcgacactgcacgaagacagtgaggagccggccctgcgagtgccagtcgcccatccagcgcttcaggcctcgcagccggcagtcgcaggtccagccgttgccgtctagatccagccgataaagggctgggctggcggcgaagatgtccccggatagggcgctgagcgcgttgttgcgcaggctgagctcgcgcagccggcccaggtggccgaaggtggccgggtgcagggcggacagctcattgccgctcaggtccagcgcctccaggctgtgcagaggctccagcagcgcagttggcagctggctcagccgattaccctccaggcgcagctc

SEQ ID NO: 333099 - DNA, 924 bp, Homo sapiens
  chr7:28997339-28998263
  hyper
cgcgagagcttctcgaaggtcttggggtgcagagagcggatctggttgtactgcaggtccagccgtctgagctgccccagacggtggaagtcgaaggccgtgatgttggttatgaagttgccgccgaggctgtaggtgagcacgtcgtgggggctcggccagcgagctggtcttgggcactacgcggagccccctgttggtgcacaggagatgctggggatgctggcagtcgcagcgctccgggcacacgggctcggcagcggcgggagcgcgaggcagccgcacaccacgagcaggaggcgcaaggcgcgggcagcctccatcgcctcccgccctgcgtgcagcggccggatcgtcctcttggcccgccggctctgtgtctcctctgcattccccttagcctggccagagtcgctaaatggcctctttcggacttcgcagcgccgtccagcccctcctccgtcctttgtccggaggccggcccgggtctctgcaggcgggcttcgcccggccaagtcaggcggcgcggggcgctctgcagaccccgggtactacttgttgcatttctgtataaaactgtttctccgggtgcgcgtcggcgggcgggaggagggagcaagacccggcgctttttgtttgcagctgagtccggagagctggattccctggcgcggattctcccagccgagtggattccccagctgcaggcgggagccgttccaagagcttcgcggggcgcggcttggcagcagagccccggctgctcggcccccgcagacggcaccttctcgctcgcggtcccggacggggagggcggctccagtgcaatagctcggggagcacgcgggctgcgtccggaagggacccaagtctgcgagcggagagcaaacggggcggaaattcgttcttcccacactctgcccg

SEQ ID NO: 333100 - DNA, 580 bp, Homo sapiens
  chr7:29185654-29186234
  hyper
cgcgttgagggagtaagggaaagtgtcctgcacccgccaccctcccgcgctaagagcggcagaggaccccacagcttcgtacttccccggaggagctcctggagtaggagacggcttctagcctggaagaaccccgggtgcgacagttgtgccaggaaacttcaagagtattccctcggctgggcgcacgcagtacatccccaatgctccaatttgaactttgactcggccacgaccaccccactccagtctcactctacggtgctttctcccctgttggtgctgagggcttttgagactacctgccccgcgctccctaagtccgagggaccgaggcgaggacctgtcccgctgagctggcacgacccacgcagggcaggcggcacttacgcggcgcagtcggtgctcctccctgagccgcggcgcgcaaggaccccagccggttgtccttgcagcgcttcccaaatcaggcagaagtgaggcagccccacccagtcacgaggaccctgcagaactcgagcctttaagcgctcctctaggctcacatgacccagacccacagggcaaaaagtgcgtcgtc

SEQ ID NO: 333101 - DNA, 1049 bp, Homo sapiens
  chr7:29233996-29235045
  hyper
cgaaccaccccccgagcgaccgcgtctcctcttcttcctttgtgtgtgcgcgagcggagttggggcggagggagaagggggaggtcgctctgtctgtccgtctcccgccgcctctgcccggtctactcgaagtgcggcgggagaggcgggagcccaggagagggtgcgggagctggcggggcggctcggagctgccaggacgccctggtcccagccgcgcacaggggagcgtggacggcagaggggctcggcgggagccgagatccgcccgtcccggctgcccctcggcctccctctgctcccacctaccccctgacacccatagaaaagcgtgcaaaggcgcggagcgggacggaaaccacaaataaatagcggcggcggcagcgcgtcatctggtggagcaggaagtgcaggcagagtccggaggctggtgctttctgcgcgtccccaggactttgccatgggctgggggccgcggaggctgcgagcggccgggcgagggcagcggcggcggcgtccgcaccggggctgagcgagcagcgacgcgaggggcgcgcggagatggcagcgtccagcaactccagcctgtccggctcgtcggtgtcctccggtgagtttcagcccgtcgggcgctgctgccgcgccgggtctcgccccactgccctcgccccgcagcctgggatggacagagcctacctgtggccatcccgcccgctctctcggaatgggggcaggcgtccggggtgatacttgtttggttcgccagcacctcggtgcccagagcacctccgcgcctgacatctgacagcgcagaggtgggagagcggtggtgcccttagtgtgcggacgcgggtgttccggggcttggagtgcagcgagcgaaaagcgaaaggagcgggcaggctcgcactttctggcgcagctggagcgggggctggcggggcggagaaggttggggtgaagcagagcgccccgacctgtttgccgtgccgcgcccgctaccctggacacccaaatccggagcagaggggagcaaaccctcgctcctc

SEQ ID NO: 333102 - DNA, 2075 bp, Homo sapiens
  chr7:29602717-29604792
  hyper
cggttcacttcctgcagtggctcagggctggatttacactgccctcgttgggtggctgtccatggacttccaggcctgaaagaaggaaattcacatcctcactgagtcgtgttaagagtctcagactggcaggttgtggtggttaagaccgtagaagctagagtcaggccccctgggttccaaccctgctctgccacgtaccagacaggcaaacctgagcaaccattttcccgtgctagggtttcctcgcctgtcgagtgagaataataataataacaatacctacctcctagggttgctgtgagaaataaatgacaatccacagaaagcgcctgcaacggcgcctggctggcaaacagcggacttgttaattacagcctttcaactaagggcgcctgaaactcgcaaacattttgctcgggtgtggattcgctcccgttagttacaaacttgggatcccgggacccggaaagcaagggggaaaaataaatcgcgatggggccaagggacagctgctgcggcaacttttacccagcggagcccacctacagcctcagcctccgggtctcaggtctccgccgtttcttctcaaggagtcggtcgggggagcggcactgcacagcttttctccaatcagacacctcaaggctggcgcctgatccaatctcctcccctggagggtgggaacgcgaagttcctacctgcacctgtggcagcggtgaccgcctcctgggttattttcttttctcccccagctgccccagggttctggtttcccgaatcacttggcaaataaccagcaggtgggcagatgtcttttttgcgttcctacggacgcgtaggcaagttcgatgcgccggagtgaacagccagggtcccatctctcagccggctcccgggcggtgctagcagggaagagggacgcgccggcgaatgaaacactactagcccggaaagccgccctggaccttccacccgggcagcgagtctggcggcccctcgccgccgccccctccgaccagaacagactgcgctgcgagccccgggcttccgccgcagcgcgcagcaattggaggtgccagaggagaccagcagcagcacttgatttagctgggctgcgggaattccgacctgtacactttccagaagcctgatctctccaagtccgcgcccagggactcgagccccggcttccaggttgacccgagcgcgcccccttcgtgctctcggccgcgttcaccgcgcgaggcctccgggtcctgttaagcccgagcaggtgagcgactgggggtggttcggcgtccgccgagacagagcctggccccgggggtcaccctggggtgctgcctggtacctcccaggtacccgcctcccggagccctaagagaggctgaaaaccacggacgctccaggactccgttttctgtacttttgagtaatttgccatcttttccttgcgcaattcgtacaaagcccttccgtgctcacaaagttgatgattgtgaagaagaaaatgtaggttagaggagaggaagcagcatcaggacaccttaccaccactgttagtaaatgacttgggggtacgggttgcttttccgatctgcaaagtaggagggaatgggatgtttgcagacgcagttgctaattgtgcctgagggcgtgggtgccttttgtaccgaaagaacttttggccgttttttcttgtattgttttcaagtcgctgcccgagtgtgtcctcagggcatcctggggaggagccggtgttgcggtttcggggcgcagccgaggccgccccgccgcctcccgtaggcgatcagacttcctctccctggcggttccgggaggagaacctcctacaacaaacaccgccgaagtttccctctccagcgcgatcgccaatcccaggagcgcccggcgcgtgggctgggaaggagccgagcggaaacctggaagtgagccgcggcgcaggcgaatcctgccgttgctggtggcagcgcccaagagaccccgcacagaaagtgggctgggagtctcgcttgctgtacccgcacctaagtgctcagaagcggcctttc

SEQ ID NO: 333103 - DNA, 153 bp, Homo sapiens
  chr7:29847070-29847223
  hyper
ggagggcgggcacccggccgccctggacctggaggagcgccgcccgggccccgtgggcaggcaggcaccggctctcaggaacagcgcctttggagggtggcgtgccagccgcgtgggtgtgcccgtggcgggcgccggggcggcgtggggacc

SEQ ID NO: 333104 - DNA, 1132 bp, Homo sapiens
  chr7:30721275-30722407
  hyper
tcccctttttgggctgtcaccgcatggagcacgggaattgtgggcaaatcactggcttactgagattagacgctgtattgggggtagaagcagaaggcgcgcccccaacactgtaaggggtccttaacgcccgcggtccgcggtaccgcggccgtcagcagctttgtaccgctgggtccggaatcctctttactccctaaaccgccttctcaggaggccggtgtagagcaggcagcgagggccgggggcactcacgggtcgtgttgtacttgacgccgttgaagtactcggggcacggcctctccacgagggctccggcagcgctgcggggccagcacgttccgatctggtccaaggtcgtgttgcagtaggagtagggacctggcggcgggagagagcgcagtagggctcagaggggcccgcagggacgcggggctctcggagcgcggggtcaggggcgcacccagcgcgcgagagaaggagcccgcgcagcctccgaccgctcgcctcccgcctaccctcggggtccaggggtggcccccagccgtccaagagcagctcttcagccagcgccaggctgcagttggcctccagcaggctgtggagcagtgccgcgtccatcgcgtcccgcagccgcgtgcggagagggagtgggagtgcgcgcccggcgtgactgcgagggagtggacgcgagagtgagcggccgagagggcgcggggtcctggcccccgccagcccagccccgatctcccgggcagcctttgggcgccacctccggtcgcccagagctgtcaagtggggaccttcccggagaggagccgccgagtgcacggagctgcgggtacagccgctccgccgcggccaatggctgcgccggggggcggggccgggcggctcctctcggaggggctcagtctccagcccccgggccctccaccctgcccaaagtacggcttctcagttcgcagctctcttccactcgcggcgtccagaggagggcggtgggctggagagcgtgggcctggggtgacggaatgctctgtgcggggatcgcaggcccccgagctgcagggggcagcaaagcgcgcccacctgcccgcctgcccgaggagaacaccgcagctctgctaat

SEQ ID NO: 333105 - DNA, 951 bp, Homo sapiens
  chr7:31091717-31092668
  hyper
cgcccccgacccccgccgctgggatttcccgccgcagctcctgctccagtctgtgctgcgggtggggtcgggttgagcagcccggcgccccccaccgcgccccccaccgcaccgccctcgatctaaccccgcccccgggcgctcattggcctgcagcaccccctccccagcctgtgaagtgagcagggggaggcggtggtcggtcgcctccctccagcgcccagcctggcttcgcggcggaggcggcgcctctcccgcaggacggagccaagctggactgccgcgccgcgcggggcgggcaaagggggcgctgcgctcggccccgggcagggagtgacggcggcggcggcggctccgggcgagcgtggtccccgcgtgcgcacacgcacacgccgccgcgcagggacacacggaccccggccgccagccggccacacaggcgcggagacccggctcggcgcgcgctcctcggcgcacacgctccccatccccgcgccgcgcgggccgcggacttgcaggctgcgcgtcctttgcggagtctgccccggccccacggacaggccccgcagtgagcaggtaagggtcgccccgccgcggctgcccctccacgcctcggccgtcttctccccctccagaaccttcgcccagccgggacctcggatcccctcctctggcttggcggtctccgccagccgcgacctccaccgacggagagcgggcgagggccggcgccaggcaagcctcccagatctgaaatgaagccccctcccgccgctgcgcccttcctgcgcgtcaggctgacaccccccaacccaagtgtctggcgctgcgctcggggcggccgatcgccgcagactgccggggtgggggtcgacctagctatctcacgcccctcctgatgcggagaagggagaccaggggggcaggcaagccatgcggccggagggaccc

SEQ ID NO: 333106 - DNA, 159 bp, Homo sapiens
  chr7:31528326-31528485
  hyper
cgaaccgtgaaaggatgtgggctggacatactaactccaaggagcccgggtatcattgtagtccatgtcaatggcgccccctggtgttcgggggcgcagcagccctgtgcgagtcctgcagcaggccctcctggcccatccactcggtataccccactt

SEQ ID NO: 333107 - DNA, 642 bp, Homo sapiens; identical to SEQ ID NO: 232852
  chr7:32110361-32111003
  hyper

SEQ ID NO: 333108 - DNA, 878 bp, Homo sapiens
  chr7:32337796-32338674
  hyper
ggcctaggtgtttctatcagtgtccccgtgtctggatgttcctgccgctctgtctgtgtgtctctatcatgtccacatcttcctgtcgctttctgtctccctctctcggcactatcttcatctctccatcgcagcgtctccagccctatttccacccctcctttcccccggcctgccttattaaaatcgcagccaggaaaccgagcagttcggggaggtgtgatgctgaaaaccagcttccgcgcgacgccgggtcggagcccgcgaggggtgccgggggggacagcccagggtgcggcttctgtcccgacccagtcgccgctcccgggggctcccgcccggagagcaccctccggccccagcccgacccctgagctccccctgcccgcttagaaaggaactctgaccgccaccggagagggcgtttgcccgagccaggagtccgagaggggtggaaagttctcacctatggtgaagctgtagccatcgatgctgaaagtggcgctccggcattttttgaagccctccttcctgttgccggcgtccgtcatggctcggccggccgggcaggggcctcgcagcgagaccagcggcgtctgcggtcccccccacggcggagtgagcagcccggggctcggcggcgaatcctcccccggccgcgccgcgctgtcactctcagccccgccgcgcgctggcagctgagcgcctggagacaacagcggggacccaatgtcaacagctaaagcgctaggagctcggcggaggcaggagccgtcgcgactgccccatctccaagccgagttccagaggcggcgagaggagtgtcaggaagggaggacgcgcgcccgagcgcgtggacggggctgaccggtgggcgc

SEQ ID NO: 333109 - DNA, 405 bp, Homo sapiens; identical to SEQ ID NO: 232855
  chr7:32467304-32467709
  hyper

SEQ ID NO: 333110 - DNA, 309 bp, Homo sapiens
  chr7:32467739-32468048
  hyper
ccatctcagcgggccgggccggacccaggtgagcggccctggctccccgaggaatccacggccctcgcctgccgaaggcttactccctcctggtgccggggcgcccccagctgtctgctccgcctctgaccctgcgggctgcagcgaaggctgcgcgcccacccgcgggggaccggaacggagggtaatgcgggcggtgtccgcgcccgcctaacagtctggggtggatgggacttggggagtcgctatatagaggctgtccggaggctttactggaaattgaggggaggaaggggcgtggcattaggc

SEQ ID NO: 333111 - DNA, 1183 bp, Homo sapiens
  chr7:32981774-32982957
  hyper
cgggagcgcaaggcctcccaagtcagggcccgaattccgcgtggtgccaaacggcagctggctccctgaatgcccaccctgaaccctggtaaaaaataaaaaaaacaacaacaaaattccctccaacccggagaaaacaagtccgcctctgttctacctagcagcgccgtggccagtccccgccgcccattctctcttcttccgggcctcgccacaccaacactgcaggacccgtgtcctcgtcccttctccgtagcagaggatgaaaagaacggggtttctccatgtcgcagtggcccagggaactcagaggtggagcgcgggggcagcgtgctcggttgaacttgcctgttcggtccacaaatgccgagcaagcgccaataactcttggcttccccaaaagaggcgacgcccacaccaaagcgggggcgaggagcgcaagccgctgccgcctccccgggccgaggcccccgcccacccgcgccgcggcctccagggcccctccgtggccgggcgggcctcgctccccacccagtgaggactagaagtcccgtcgcaggcactaggttcctcacaggcccgcacccctgcctgggtcctgggggcttggaggacccagcccagcgcccaacacggcgccgggcgcccctgttcccagaaaacgggcggcgcgcggactgcggcccagacggctgctcgagactcacaaggactccaggcgcttgagctgctgcagctgctgggcgtcgtgccgccgccgcttctgctcccgggcccgctgcagttcctgatccagcggctcccgcggccaccacgcgcccccagccctcgcatcctcgcgccccggccaggacgacatcgcggcacctgcggcgcggctctggctgcggccaagagggcacttcctccgtgcggcgccccttcccgccgccgccccgcgactcgcccgggaggggccccgaagtcccggcctcggccgccagatgcccgcctgcccgcggccggccccaagtcagtgcgcagagccccagagcccagccgccggtgggcggggagcgcccgctggcggcggctggagccgaggcggggcggggccctggttgggagcctggggaagcttccaggagcttcagggttcccgccaggccacactcatctccctgcccctttgaggttcccgacc

SEQ ID NO: 333112 - DNA, 877 bp, Homo sapiens
  chr7:32996732-32997609
  hyper
cggccacgtaggagcccctcacggcaccaaacccggtgtctccagggacgggcggagaccagcgggtgggcttgggcagtacgcgcttttctcttccgactttgggccaaagccttgtccggagatcacagtgtctcgctcggggacacgccctctctaggcccagacttggtccccactggagttcccagcccccctccccgctgcggcacgcacattcccaatgccgggcggggcagggcgcagcaggcccgccctcggcgcgcggccaggctgggctcctcccctggagctgcggccgggagggcgggcggccggggagacggggtggcggctgcagcccgggtagggccaggagacccggtccacgtttgcaaacgcagccgaacgcccaggccgacccgtgccgcccgagcgccgcgctgcgtccgcgccactcttctcgccgccccgatggcgttccggggctggaggcccccgccgccaccgctgctcctgctgctgctctgggtgaccgggcaggcagcgcccgtggcgggcctgggctccgacgcggagctgcagatcgagcggcgcttcgtgcccgacgagtgcccgcgcaccgtgcgcagcggcgacttcgtgcgctaccactacgtggggacgttccccgacggccagaagttcgactccaggtaccgcgcccttggcgcccggcgcggcctcagcggatgcgcgtccctctctccggacaggcctttccctcctgccggacctcccctagctccgccccgtgcagccgcgctcctcccttcttccgctgcccagatcctcccggaccccagaccctccgccgcgggtgagcctcccggccctcacgtgccctaggctgccagcc

SEQ ID NO: 333113 - DNA, 62 bp, Homo sapiens
  chr7:33943436-33943498
  hyper
cgtcacagcaacgtgctcgcatcagctcctcggtgtgtcgcgatgttggcaatgttgcacta

SEQ ID NO: 333114 - DNA, 485 bp, Homo sapiens
  chr7:33943730-33944215
  hyper
gacagctagctgatcgtcaggtcccaacacttgccaagcgtccctcactcccacctcgcgccttcgtactttggttacaaaaatcatctctctgcgattgcaccccttttgagtagagggtgccactgcgtggggaggaggcggcgattcagcagggggatcacaggagctgactccccgacacccagtgctgcagaggcgagagggcgcagccgggctgagagagcgacggagctccgagctgcagaggccgccgcgcggcggcccccgccagagatgagcggtggggcgggggttcctccctcttttcgggtgaatgaatgattagtcaaacaccacctccccgccccggtccgcccgagattggaagggaggagtctcggagcgactgttcattttttaaggacgaaaggcgtttgcctcggtacgtttttaaatcgaccttgtgtgtgtttcaacttcggtcatccctagtgtcaggacgc

SEQ ID NO: 333115 - DNA, 497 bp, Homo sapiens
  chr7:35225753-35226250
  hyper
cgcagccgttgactagccgttgacgagcggacctcccggtcgtcatggcgactgtgaaatgtagggtggagcgcatgcgttcgaagccattcgcgcgggcagtccctgcgtgtccccctgcgtgtccccccacgtgctccccagcgcgcgcagcaccccgcctctgcgcttccccgagcgtgcagcttccggtgagggcagccccacgcacagcccccaacaccctccccagcgcctgcagccttcggtgcgcgcagtccccaagcccacatgcgcagttctcaccttgcgcgcagccccacgtacagcccccaacacgctcccagccccactggcgcagaacccatcaccgcttgcccttcacgcgcttcattgggagtgcagctcccaccccgagcgcgcagctccacgcagcctctccacactctccccagcgcttgcagcaccccccagtgcgcacagctctgccagtagcttcccggcgcgccgcccctgca

SEQ ID NO: 333116 - DNA, 170 bp, Homo sapiens
  chr7:35226470-35226640
  hyper
taggaaagtctctacgatcgctgaggtatcgggcagtcagtgcccgttgccaacgcggagggaacgggcggagactgcgggcaacacgtggcagagccggcgtgagtccggtgggtctgatcccagagcctcaggttgacgccacttccttggcacggaacagcgtttac

SEQ ID NO: 333117 - DNA, 772 bp, Homo sapiens
  chr7:35296954-35297726
  hyper
taacgaatgctaacgaatgctcccttagctgggagctgcagggaccggtcccggcaggtctaaccaaccgtccgcaggcgccgtggtcgagagcagagccgagacggcggggcagggtgccaagcggagggcacagcctggcagccaccgttggcggcaggagagaatgggagaagggagacccgcttctcagcacaagggcatctgtctactcccgaacatggccggagattcctgtccacagcctccctccagctctttctggtagacactttaaaagcgacattaacgggcttcggtgcctttggattcctaaattaggtttacggaaaaggaaagacttcccaagaacagtgagaagaggaactgcagcccctccaaggccgctgcggcgcgttcccggggcgcgccgagagcagcgcgcggctccgtgccccgtggggagcgcgcggcgcggccttggatttcaccgcgagtcgggagggcgggtctgagccttgcctcccaggatccttccgacgaacaccccgcgggttttagtttatcgagccaaagtggtcccggagaagcgctccctcgcagccaagctgcaagaagtggccgggaacctacaggcctcgggccgacccaggaagcctccgcaccagaaagctcgaggagcccttacccaagtcttgctcgaagggcaaagcaaagagccagcacccctgagtgtcactgaagttcctggatggggtgtgagtgcgcgcgttccgtccgagacctcagtctc

SEQ ID NO: 333118 - DNA, 308 bp, Homo sapiens
  chr7:35576961-35577269
  hyper
cgagcaccccccggggcagagcattgccgggtgagccgcatccctgcctggaacatatgagaggtgcggggtgtaggggaagtgggagcacgcggggggtctggggaggggacagaccgaaggcagagaccaccgcgacagacacctatcgaacttcacgctaaggactgctcgttttactgatccggactcagcccttagcgctgggcggtaccacgcgccgccagtgcggatcatctgggcactggcgccacctagtgctggcagcgcggcaatggcccttttaccgactcgcgcgtctatagtgc

SEQ ID NO: 333119 - DNA, 360 bp, Homo sapiens
  chr7:35839776-35840136
  hyper
cgacattcatcgctacagtagaaactcacacaatcgcagccctttattagtattttgttacccagtagttcctgtgtccattcatttcctcaactggagtgtgagctccaagaggaccgaaccgggcaccgacaaggtgagccaatatgaatgtggcgagtccgcaatgggggctacagcggccgacctctggggctgtgccaggccactagagtgtgatggcgcgagggaagggtcggggaaacagggcctaacctcacttttcaccccgaaagtcaagatagccacggaaacagggatgaatggggagcacagacacctgcctcgaagtgtctcttcactttcactcacaaagccgtc

SEQ ID NO: 333120 - DNA, 1722 bp, Homo sapiens; identical to SEQ ID NO: 223084
  chr7:37487368-37489090
  hyper

SEQ ID NO: 333121 - DNA, 1105 bp, Homo sapiens
  chr7:37955597-37956702
  hyper
cgcccctggcagccttaggtgtggccgcccagttctcgattggcagccacagccccgggcgcctcctcgcctccctccatccttcctacggcctcaccctccgggaggtccgtgacgatggcttcaggcgagatgcacacgccacggtcatagacaggcagctcgtcgcaggccaggctttcgggccagctgtggttgtacatcttcatgaggggctcgcagtcgtcgcgcgcgcgttggcacaccgacttgcacggcttgatagggtcgtgcaggaactccagggtgcaaatgggcgcgtacatggcacagaggaagaagcgcagcacggcgctgcagttcacgtccaccagctcctcgtactgctcgatggccaggatggcgttctcctgcgtgctgtggtgcaggtggttgggcatccgcgtgatgttccagggcatgtgccggcacatagggatgcgcaccgcctcgcagggcgcgccgcgcacgcccagcgccaggtgcagccacaggcacagcgccactaggatggagaggaacatggcactgccctctcgcgctgcgaccccggcagacagaaagcgcccttctcttcctgccaccctcatctttcgctgtcccttcgccgaggaagaaatcctctggggcgcaggagagtttcttcccccaaactccagtcggcagcaaagcggggccgcggggtccggccgcggagctccgccgtctggcacacagggcacgagcagcgccagctctcagccttcggggcgcgaacccgcccgggcagctccagtcccggactccgcagctcggagcgcagccagccacggccattgcgggaccctatttatcccgacacctcccctgacgtgggctcggaacgctcccttggcagctgcagccgcggcgcgggctccccctcggccgccccacccccaggcccgtcggtgcagaagcggtgacatcaccccctctgggccgcagcccagggctggaagcctgctttccccctaaagtccctcctttttagtctggccagtcttttttcttcggaccaagaaaaagaacctctggcagttgttttcgacaccggatacaagagggt

SEQ ID NO: 333122 - DNA, 947 bp, Homo sapiens
  chr7:37960179-37961126
  hyper
cgatgcctcccaggatgctagtggcaccactgccactgcatttcctgttggcagcagtgagcagtgaaaaccgaagcggcagaaggcagtggcagcaggcagtggcagcaggcagtggcccaggcagaaatagctcccgcgcgattcactggagccttccccgggccctggtcccggctaccgggactcgcgcgtccggatctcaaaagcggcagaggccaccgaagggacaggaagcactttggtccagaccacactcccggcacagtgcggaaagagccggcgggagccactctgatcccggacgcctcagcgcccccttgggcttgggcttgccctcgggccggggaaggctgaccgcgatgccaggacgcgctcccctccgcaccgtcccgggcgccctgggtgcctggctgctgggcggcctctgggcctggaccctgtgcggcctgtgcagcctgggggcggtgggagccccgcgcccgtgccaggcgccgcagcagtgggaggggcgccaggttatgtaccagcaaagtagcgggcgcaacagccgcgccctgctctcctacgacgggctcaaccagcgcgtgcgggtgctggacgagaggaaggcgctgatcccctgcaagaggtacaggtcatcggcccgcggggcgggagtagggagccgcgcgggcatggggagggcgaggtcgcagaggcctgcgccctgtaactctttccggccccttgcagctcctcccttctcccagagagatctttcgcgaggagggtctcttggggatagcatggtccgggactgggaggggcgctgcgcccaccgagggcggcctgctggcgggggactcagtaacacccagcgaggcggtggcaggtaaagaagggacccatccagggcgggatcaagctgcagagtgccccatgcccaggttcgcccctgttctcac

SEQ ID NO: 333123 - DNA, 835 bp, Homo sapiens
  chr7:39453515-39454350
  hyper
cgcttcgggaaaataacgagcccctcaagatgccccacaaacgacggtcccctggtccgaggagccgggcagcgccgcgcagccgtctcgcgtgggacccacccgcgggcggagccaggcggcagggctgccccaccgagcttcaccccagcaacccctttaactttcttaaccctgtattccccaaccgaacacttcccagagttcacgctggcagagcccacttcaaaaaatgctgcaggaagccattcacactcattcctatccacgtttttaaaaatgcgaaatagtgatttaaatcagaacagaacctcttccaatgggggtttcctttgcaaccggggcttcgcggtgatttctgtgctgttttgagggcacacacctacataacacgtttgcagagataagggatctcaaactgttcccaaaagtcccagggactcgtaatatgcaaaccgagggcaaatgaacgtgggaggatccgaggcgctcgctgaaggggctctcctgcagtgcccaggcagagggagagtggagggggcggctgtggagtgaagggcggaagtgccctcgccgtcctgaggcctgggaccctcttgatggtaaatggcgctgttgagccccgatgcgcagggactccgcgggcggcggacttgacaggaagctttgctgcggggcggcccagctgcggacgcgcgggacgtcagggccccagcagaagcgccgggctgtgcgtccttaagactgcgggtgcggccccgcccaaggtcgccccgccctccatccttctaccccgcccccccaccacatttctgaaatgaaagagttatcaatc

SEQ ID NO: 333124 - DNA, 415 bp, Homo sapiens
  chr7:42267546-42267961
  hyper
cgctctttctctgcgctttcctgtcgagttcccttcaggttctggtttcctccgacggtggcaagggatgtttttcacgcctttcaccacttttgcccgcgcctgcgtcccctgcccgaggtcccaggccgcggcggcggcgcggtgggttcattagcgggcgcgccgggcccgcgcagcgctgtctgcagccgcgtcgccgcatccatcatcattacatcagcgcggggaagtccacgccgagttctcccggccccggcgcgccccagtcagcgcgccagcaaacagaacatgctggattgctcagagacggctctgggtgtctgggggcagaaggggtgctcccaggcccggctttgatccgcatttctgaagctggctttgggagacaatgcatctccgccagccaggccgc

SEQ ID NO: 333125 - DNA, 1819 bp, Homo sapiens
  chr7:42276003-42277822
  hyper
cgacgaaggcgcgcctctctccatccgctcacaccacacccccgccctccgaagcatagcccgggctggagaagccccagcggcggcggcccccgcggcggaggtccccgcgcgcacccaccatgcctcccgcctccttccgcccatcccgagcgccgtgcgcgcccgaagcccgagccgtagagcgccaccgcgcaaaggaaggagccaggcgcgtgcggggctcgcggagttcttctgaaccctttggatgggggcggaggcgaggggcgccgccaccactgcggcaaacttcgtcccccctccgggaggtgaaattctccaatccgtctccggccggtccgcgggtcggactcttcggaaaggaccttccaggaggagggagcgaatgcaagccttgctcggacgcctcaccggcggctctctaaatctgggcgccttttgacagccattttcactccatcccgtccccacgctggggaccacctctggccccggaggcgcgggcgcggccgcaggagcgggctgcggggtccgcgaaacaaagaacttcgagcgggacgtacctgcggcggcagcggctgtcaagtccccgaacttcccatagacccgcggacggggcgcaggctggcggctccccgctccgcgcggccgcgggcggctacggctaccgcgagcggccgggctgggcgcggggtgcgcccgccgcgggcatggtgcggcgcgggcggccgcggggcgcgcggggaaggcgggagagcggcgcgggtgagtgggagcggcgggtgtgcgcgagtgcgagtgtgcgagcgcgccggtggcgctgcccctgcccgctccctcccgctcgtgcagctccggcatcagtttcggggatcgtgtaatccgatcccttctgactcacaagccctgagtgacagttctgatttggttcaaccgcgggagggaggggaaagagaaagaaagaaacccccagccgtacgcctctcctggcatccaatcgactttctggaaaaaggtcccatcccggcctggtgccccgtgctgggtggagaagccccccgccccgacctggcaccgcctgcactactcacggggtggaaaagttgtccctcggctccgcgctcccctcccgcgcgctccctccttcccttctctcctcctcttcctcctcctccccgcgctcctcctcccccaagttttaacagatgttgccggactctcctcgctccctcgcactctctcttcctccgccccggcccccgcccagtcccttttctttcagccactctcgggctcggaggggacgcgctgagcagcaggacgcctgccgccgcagggggcgaagttgggaaaacttggagtgctgctcgccttacttttgctttctcgctccttccaggccgcgccgggagcccccgcttctcccgcccgccgggtccccaagcccggagtgggtcccagctgcgaggcgggcggcggcggctgggaggcggcgcgtcgcgggccggggtcgggggctgggggggagcccgggcgccgcgagccacgcgcgcgctccctccccgccctccgccgccgccgccgccgccgccgccgcctcctcctcctcctcctccttctcctcctcctcctcctcctccgcccctccccggtcttcacacagacacattcatgcctgctcctcctcttccccctacttgaccccgcgccctcccggcgcgccgaagccccacccacccggcgaggggaagggggcccgggcgtgatgtcacccgcgccctctctcttctctctccacaccgccaggacacccccc

SEQ ID NO: 333126 - DNA, 846 bp, Homo sapiens
  chr7:42927739-42928585
  hyper
cgcttaaactttcacactgcggttgtgtcactgaagcagtgcctgaaatctaatccctgagtgtgacgccgccccaaagggccccaagcaggtagatcccatgctgatgctcttttatcctggcctctcagctgttgaggagagtaattgccgggctaaactgataaagtttcattccaaacaattagcctagtctgcaggattgcagtcgcggcttggacaccatcccggtgtctgtcccccgcagagggcttgctaccttgctgtatcagctggcccagcaggtctggggccgcgcgctgcttacaggcgctggatctcgctgctcgtcgctgcgcgctactaggtcctgctgtcgtccgagtcgcctccgggactctccggaattgtagcggctgtagccggctccttgcctgcggcgcggagggcaggtcccagtggtaggaggatgtgttccctttgcagaatcagaccccctcctgggactgtggggaccctctgtcgccggcctccattggaggatgcgttgtccctggagctgggtgcgctgttgcgtgacctggggcctgggtggtgggcgggcctgtccatggcaaagggcacggctgcgcgctacttcccgagaacccgccagcaggctcttgggaagcagcgatttctccttagtcacagtcagagagggtgatgcgacacactgggcttcactgtgctcgtgaagcggagccagggtgaaaggatcatatggcctaaccctaaccctaatgggagtaacttcacctgcgtcccacaggccccgcaagagtgacgctgccaggcaggcgccgccctgttcggttcctgctgctg

SEQ ID NO: 333127 - DNA, 828 bp, Homo sapiens
  chr7:43152000-43152828
  hyper
ggtgttggatatgcccagtacgcgtgctgggtgttggaaggatggggccggcggtaacaagaatcgatatatatttaccgcgggggcgggggtgggggtgcgcggaggctgcagggcggggcagcgctaatgagagcaagcccggcttgtggttggttctggagtctggtacccacagaggagcaggcagggagggaggggatgcaagcgggaggataaagcgatgaagtgtgctgcgttaccgcgcatcaggcgctgttgttggagccggaacaccgtgcgactctgaccgaaccggccccctcctcgcgcacacactcgccgagccgcgcgcgcccctccgccgtgacagtggccgtggcctccgctctctcggggcacccggcagccagagcgcagcgagagcgggcggtcgccagggtcccctccccagccagtcccaggcgcccggtgcactatgcggggcacgtgcgccccccagctctaatctgcgcgctgacaggagcatgatctgtgcccaggccagggctgccaaggtaagcgggcgtagcgcggggacactgtctgccgccccttcccccccgcccttctctgggcggcttccccgccgcacgcgaggccccggcagcgccctcccttctcggggccgagatccaccctcctccccaccctctcgcttctcccgcgaggttcaattgtcagcctgggtcgcgccgccgcccggtccgggccggcatccccgggtggcgaccccggcttgggtactgcaggcgcacccggccctcctgcggggtacggagagaaacaaagaagcccccaagcgggttc

SEQ ID NO: 333128 - DNA, 519 bp, Homo sapiens; identical to SEQ ID NO: 232906
  chr7:44143965-44144484
  hyper

SEQ ID NO: 333129 - DNA, 313 bp, Homo sapiens; identical to SEQ ID NO: 232908
  chr7:44349374-44349687
  hyper

SEQ ID NO: 333130 - DNA, 1178 bp, Homo sapiens
  chr7:44364449-44365627
  hyper
cggatggggccacgcgcaggagcaggcgcaagcaggtcccgccacccccgccgcctgccgctcgggtgggggtggggacagcgcacccgcgtcggggacgaccctctggggccgcagccgacccctcccggcgctccaggcccgggggccacccccgcgcgcccctcctctctgacctccccgccgccaaatgcgtcacgtctgccgggcgctccggggacacctgctgccgcccccgccgcgccaagtcgcgagcccggagccccggcccggcagccgcgctgggcagagctgggcagggccgcgcgcgctgaggtcaggcagccaggcccggggccgggggctcgcgggtcggggccgcgcggggccgtgcgcttgggcccggagcccagagaagccggcggcgcgcgggcccgcagtgcgcctggagccggcggcgcggagggtcccggaggtcccggccctctggggtccccggcccagcccgcgcgcgccgctgctcttacttgccaatatcctcgtagagctggtactcgtcggtgaagcgggtgcaggtcaccgtggtggccatggcggcggcggacgggctcggcgtgcgctcggctgcgctcgggcggcggcgactccggctcccgctcgcgggcacggcggcgacacgggcgcgggcgcgggagacacctcggctcgcggcgccaggcgggggccgggctgggctgcgccgggcggcgagcgcacgcgagatctgctcgctccgtcctcgccaggagcgcgccgcacacctacgcgcggggaggcgcgggcgccgctgtcaccgccgccgccgccgcgcccgccccgcccgccgccccctgcacgcgccttccccgcgccctgcacacgctgctcctgcacccgcacccgcagggcaccggcgccctgcatctgcacacgcgccctgcacacacacccttgccccgcacccgcaacgcacctgcacctgcacctgcactcacacgcgcgcccgcccccgcccgcccccgcaccccacacacacacccgcgccctgtactgacgccttcatcctctacccgcaccacgcccgcacctcgcgcacgcaggccacttgctgctgccgacccctcgctctcacataacacagaagagtgcacataatgaacgcagcctcctctctctctctc

SEQ ID NO: 333131 - DNA, 211 bp, Homo sapiens
  chr7:44788907-44789118
  hyper
cggcgctcggggttctcctgagcgatgaaggctggccgggccttcgctccaacctgatcgttcctagctttggggccaggcagtctcacctacatggtacgcccctccgctcctacttacgtgcccaccagcacggcgatgtgggggccgtctgaggccgtcacctgctcgcggaggagctgttccgctcctgggctgaacgacgctgagc

SEQ ID NO: 333132 - DNA, 685 bp, Homo sapiens
  chr7:44924093-44924778
  hyper
cgttcctggatttctttcatctcatccgcataccggcaaaaggcgcctccgaacttgccccaggctttgaagggtacggtgatggcattgcggtaggacggcttcacctcgctcactcgcagaaacaccccgtatttgttgcagcccacatcgaagaagaagcgcttggagtccacggtgatggaggtgccctccgggagctctccatacaggccgccccctgggcccccggcgccgcctcccgggccgcctgccagctcgtcgtcctcgcctccgtagtcgtctatgagcttcgccagcgcgtcgcggaactcgatgaggccctgcgcaggcagcgcgatggtctggccgctctgcaagccgcccggcccggggcccgcgccgaagccgccaccgccgcggttgaccgtttggcggatgcgcaggaagcggccgcgctggttctccttgaggtccaggtagtacttgcggttctcacgcaccaagaattcgctcttgagcgcgcgccgcggcccgccgccctcctcggcgccagccgccagctgctcggggctgctagggcccagctgcgcgtagtgttctatgaagtcgcccagcgagtcgcggaactcggcggccaccgccatggacagcgtgaggcggctcttggaaccgcccgcgcccacctcggcgatcttgaggaagc

SEQ ID NO: 333133 - DNA, 187 bp, Homo sapiens
  chr7:45299664-45299851
  hyper
cgcggtgagacggtgcatgcgcgcgcaatcagatccgggttagcaggatgcatctttgaggtccccaaaccaagccacctgcacggacccaatatctctggcgcgtcccgaacgccgtggattggcgtctgccgccccctgccggcggcgcgctgcactgcagacactgaactcgcccaatgggtgc

SEQ ID NO: 333134 - DNA, 1738 bp, Homo sapiens
  chr7:45613459-45615197
  hyper
gaattgccgaggggcggggggtccctcatgcgcatggaagggacgtacgccccaggcctccaccttcctcctgaccccggggattcttggacgtcgattctccgtctcgtaggggcgagggccctgggttcgcagtcagacgcgggcccctctcaaatctagtggcctggttttattgagtgggggaaggcacatattttccaagattaactgccccgcaacagggaatttcgcaggatttcagtattttcgactccccaggtgacgccaagagggtgggttccactgtgcacggtggggaaactgaggctcggaggggacaaggaaggtactcgaggtcacgcggctcctccggcgggcgggaacgcaggacgcggagttggggcgcgggctgtgcgcgcccaggttcgcggctcccggggctcggctgtcgcagcgcggtcgccgccgaggaccacggtcggggcgcgggcgggctccagtgcgcaggcgcggcgggcgggaggggacgcgctccgggcgcgcgcgcggggcagccggcgccccaactccgcccgccccgcgccccgcgccccggcgcctcgccgcccgccgcccgcccgccccggcgccgccgcccgcgccccggcgccccgggccggcgaggggcgcgcccgcggccgcggccgctgcatggcgctgagatggcgggggcgccgcgcggcggaggcggcggcggaggcggcgcgggcgagcccgggggcgccgagcgggcggccgggacaagccgccggcgcgggctccgggcgtgcgacgaggagttcgcttgcccagagctggaggcgctgttccgcggctacacgctgcggctggagcaggcggccacgctgaaggcgctggccgttctcagcctgctggcgggcgcgctggcgctggccgagctgctgggcgcgccggggcccgcgcccggcctggccaagggctcacacccggtgcactgcgtcctcttcctggcgctgctcgtggtaaccaacgtccggtccctgcaggtgccccagctgcagcaggtcggccagctggcgctgctcttcagcctcaccttcgcgctgctctgctgtcctttcgcgctgggcggccccgcccggggttccgccggggccgctggggggccagcgaccgccgaacaaggggtttggcagctccttttggtcaccttcgtgtcctatgccttgctgcccgtgcgcagcctgctggccataggctttgggctcgtggtggctgcgtcgcacttgctggtcacagccaccttggtccccgccaagcgcccacgtctctggaggacggtaagtgcagccgcgcacccctcatctggtctcggacacacttgctgggacgatgctgggaatgcccggagtcgggcgcgctttttcctatgcggcgggtggggacactgaggctccgagtgggggtgtgttcaaggtcactcctacgagttggggacgcagtcggggctggcaccctccggccagggctctcttcagagttacaatccacgaagcgcccctggcgtgaagtgtggagaggggagacaggtgtggagagagaaaggtttggccaaggtcagggagctgatgagcggccagacggcggccagaggggtccgccggtcttttgccgcacccatccccacagagggactgaaagtgggcgaggagagcagacccccagggcaagctccaaggccggctctgcgcgcagc

SEQ ID NO: 333135 - DNA, 873 bp, Homo sapiens
  chr7:45959983-45960856
  hyper
cgtgtgcacccccgtgcggggcgaggagaatctcctgtgtccaggatctttccaacagctaaacatcggtaccgctcccctcagctccggaaacctttaacccattttcactgaaagcgctttgcaatttacaagtactctgcacttagagaatcgagcaagtagagggccggctggggagggtccctccggcgaccgccttcacctttcccggagcgccttcagtttccccacatattatctccagtgagaagaaaagcggagtctcccgcagcggcacccagcaacccccaggcccttcggcgccagtgcgccgggtgctgcacgcagcgcacctggcgcgggcggctcacctggagctggcggcgctggcagcaggtaggcgcgcaggcggctgacggcactagcgttgacgcagagcccgcggccgtccagcagcgcctgcagcggtcgcgcctcgtcgggcgacggctggcagcgaaggccggagccacagcgctcggtgtagatgccgcacggctggccctcgctcagtgcgcacgtcaggcagcagccgcagcccggctcgcgcaccagctccgcgcacacggcgggcggaggcgcgcactgggccagtgcacgcgcgtcgcacggctcgcagcgcaccacgggacccaagcccgccgagctcgcgccagcccgcgccaccggcggcccgcggagcagcaccagcagagtcagcgcagcggcccagagcgtgggtcgcgcccgctgcatgacgcctgcaaccggggcacgctgcttggcaggctgggcgcgcagggatggggcgacagtacacggcgcgaagctgtggaatccaggcaggaagcggctgatcctcagcgcccagcc

SEQ ID NO: 333136 - DNA, 216 bp, Homo sapiens
  chr7:47621704-47621920
  hyper
cgagtagcgcgcgggcgggcccgtcctcctggctggctgccggcgcccgcggcagggccccctcgaggcggcgcgggcaatcgccacggccggcccccgcgcccgcgccccgagcctggcgggtcacctggcctcatcaccctaacaatgcagcgcgcctccaggcgcccttcaccggggtcccccgccctgccgaggtgcgccctgggacctccc

SEQ ID NO: 333137 - DNA, 1005 bp, Homo sapiens
  chr7:48074954-48075959
  hyper
ccggctctgggctacgggcagttgacaggcggcgcccgcgctccgcttcctgccctgattggcccaccgctccccctcaggcttcccctattggctgacagtgctccagccgcgcccgccggttggccgttcagccgttgccctggcgacgccgatgttgtggttccgcggcgcgctgggagtttgggtttggttggctgcagccagccagccgtgtaaaaactccaacgccgggcgccgcgggcagcacccacggagacccgcggggagctggtgagcctgagcgggctggaggacaatgggggcgcccactgtggtcccgggccttgtccactgtgcggagctcgcagtgcgggcagtgcgcgccggggctggagggaggggaccaccttgtcgccgggttgggatgagcacagggcgggatctccaagcctgcccaagtcccgcggccccttggttacctgttgcttatcctctctgtacttgctgtgtccctggcgtggacgtgcctgtactggatacccggcgtgacgtgccccctctgtgtgccccgcacgcacgtgtctctgctgaataccccgcgtgaatgtgcccctgctgtgtacccggagtgcgtacgtccctgctgtgtaccctgtgtggacgtgccctgctgtctacccggcgtgcgtgtgttcctgctgtataccggcgtgatgtgctcccttctgtttacctggcgtggacatgccccctgctgtataccctgcatggaagtgccagcgctaggcgatcgtaaggcgcctgcaggcgtgtcagggcgaggcgtacagaccgacccagagcgggcgcgcggattttgcttttgcagctgcagctcctggcaactggtcaagcaggcagcgtccagcgcacccgcgaacaccaggtccggcagcatctgtcttttcccgcagcgtgcagcgcctgaccatgaggaacacaagcaaggaacttcagggcgccacgcaccgctacgctccctgc

SEQ ID NO: 333138 - DNA, 3000 bp, Homo sapiens
  chr7:49812751-49815751
  hyper
ttacgtttcttactcgtaaacgtctatttctctgggtttctgaatgcaaagacgagaaagtctcaacagtctgctaaactaacacggccttcgaatcccaatctgaacacagtagctgaaacaagctgtccacaaagaggaaagccagagggggccaattaggaaggaagaaattaaagaaaagagaaaagccaagatgaaaggtccagcgcaaagtgaatgactcgactggagaatggcagccctggcagggtctgcggccggctgcggaggtggggacgcggccgcgcggacgagtgacaggttggtccggcgcagcaaagggagcgggtgcggcggtagggcctctccgggggcagcgcgagggcctcccccggggcagcgcgggccaaggcggggcctccagagcgggggcagcagaggagggagcggaacgggagccgggcggaggcggctgcggcagggggaggcgggaggcgggcgcgctagctcccatgctggcctcggtgccactcgcgcgccggccgcgctccgggcttctcttttccctccgacgcgccacggctgcccagacattccggctgccgggtctggagagctccccgaacccctccgcggagaggagcgaggcggcgccagggtggcccccggggcgcgcttggtctcggagaagcggggacgaggccggaggatgagcgactgagggcgacgcgggcactgacgcgagttggggccgcgactaccggcagctgacagcgcgatgagcgactccccagagacgccctagcccggtgtgcgcgccaggcggagcgcgcaggtggggctgggctgttagtggtccgccccacgcgggtcgccggccggcccaggatgggcgctggcaacccgggcccgcgcccgccgctgctacccctgcgcccgctgcgagcccggcgtccggcccgcgccctgcgctcatgtatgtaggtttggcgccggtcttcagggctgagggtgcatgctgggtgtccccgcgcggccggacgcgctccagctgggttcagccgctcagctgctccggaggaaccccctcccccgcccaagtttgtgaatatgggcgcttcgcccagtgttgaggtcggcagggaccgggcagggggtcagcagggccgggcacgtccggagccctcagggaggagggctgagggggaggggacagacgcaccggagtgcgcagagtgggggcgttcggggagtgaggcggagagaggctggattgccggtgtcctgcggcgtctcgggctctcccagcccctttgggcggcagaaactttggaatccagaaaggctggccgggatccagcgagtaggagggtctcgcgcccactctgcgccctggggccccagcctcccgcactgcacaccttggtgctgcccgggcgcttctgctccgcagccaggacactacaagactgagcgctgcggccggcgacctggctcccaaggctcggaggggcgggccggcagaggagctgaagccccgggaatccccgacccggccctctggcaaggggccgagggcatcctttcatgcagcggggcttagagagcggggagggggcgtctgctcccgagacgggagtcttttaagaagttgttagaaatgaatcgtggagtcctaggagaagctttgtttaacctccccgcattttcccagcacaaccccctaaagcaaatgaggaagagtttccctcttatcttcctgtacattcgtccgtctctaactccactgctgaattctccatttaataaccttcgggaaatgtggccaggacctagggagggacaccctgggtgcctgaattacgtggttcaaggcagagctttgcaggggggcgcgggcctggctcgctgcgttccctgggctccgcaagccgcccttggccatctccaacactaatcacgactacatcagaaacacgccggccggtgtcgttcttggatttcgcttccaatgtatcgctccacagtttgtgatgtctaagaaccccggccgtgcaccgacgctgggcatgctgcccccgcccccgtcgcccagctcgttaatctagagctatgccggagcccgggtgggggccgcggcgggccggggcgcgcgcgggccgcggggctcagttgtgctgctgttctctccgcagggacggcggctcccggctggcggcggcgcgcccccgggctgtgaatgcgactcgcccctcggccgcgctccccgcccgcccgcccgccgggacgtggtaggggatgcccagctccactgcgatggcagttggcgcgctctccagttccctcctggtcacctgctgcctgatggtggctctgtgcagtccgagcatcccgctggagaagctggcccaggcaccagagcagccgggccaggagaagcgtgagcacgcctctcgggacggcccggggcgggtgaacgagctcgggcgcccggcgagggacgagggcggcagcggccgggactggaagagcaagagcggccgtgggctcgccggccgtgagccgtggagcaagctgaagcaggcctgggtctcccagggcgggggcgccaaggccggggatctgcaggtccggccccgcggggacaccccgcaggcggaagccctggccgcagccgcccaggacgcgattggcccggaactcgcgcccacgcccgagccacccgaggagtacgtgtacccggactaccgtggcaagggctgcgtggacgagagcggcttcgtgtacgcgatcggggagaagttcgcgccgggcccctcggcctgcccgtgcctgtgcaccgaggaggggccgctgtgcgcgcagcccgagtgcccgaggctgcacccgcgctgcatccacgtcgacacgagccagtgctgcccgcagtgcaaggagaggaagaactactgcgagttccggggcaagacctatcagactttggaggagttcgtggtaagatgcgaacgcccgccgggc

SEQ ID NO: 333139 - DNA, 1629 bp, Homo sapiens
  chr7:50343211-50344840
  hyper
cgggtgggcactcgcatcctggggccggagcctgaacccgggagccaaggggccccagttccagggacgtgaagctgagcgtacagcgggcgctcccagacactggggaaagtgctttacgatgtcccgagtccctccagtctcgccagcggggcgagcgtgagggtgccccgaccgaccagcggccccgggtgcagggtggcgggcccggcggcgcgcgtccccctccccctcctggcggcccgcacgtgtcgcccgcgccgcgcccccacgggttacgcgcgggtcccgcagcgccgcggccgagccgggctgcccggcccgcggacacagcgccggccgccgcatcccgtgcggggccgcggcgcgatgctgcgctggaatgaggaagcgcggcggcgaggggagggcccgggcgcggtgcgcgcgggggtggcggcggcgcgccgagcgggcccggcgcgggcgagcgggctgcagccggcggcggcgccagcaggtacggcccgcacccgccgccgccccggcggcctttgggggctgagccggagcccggcgcgattgcaaagttttcgtgcgcggcccctctggcccggagttgcggctgagacgcgcgccgcgcgagccgggggactcggcgacggggcggggacgggacgacgcaccctctccgtgtcccgctctgcgcccttctgcgcgccccgctccctgtaccggagcagcgatccgggaggcggccgagaggtgcgcgcggggccgagccggctgcggggcaggtcgagcagggaccgccagcgtgcgtcaccccaaagtttgcggggtggcagggcgcgcgctctggccacccgccgctctgggcggcagctggtggcaacgcaagggcgcggcgggggcggccggcgcggagggggccaggtacggggcccgcgggcggcgctgtgcgcgcggggcagccggtcggccgggagcgcgaaagcctggtctgagccggctgggggcggggagtgtggcggagaaatggggaacaatgcgagtgagcaacttcaggaagtcattgtgaaagaaagctgggaagagctccgcggccaagttagcaggacactctaacaagtgactgcgcggcccgcgcccggggcggtgactgcggcaagccccctgggtccccgcgcggcgcatcccagcctgggcgggacgctcggccgcggcgaggcgggcaagcctggcagggcagagggagccccggctccgaggttgctcttcgcacccgaggatcagtcttggccccaaagcgcgacgcacaaatccacgtgagtgttttcaaattgaatttcaataggaaaacttggggtaactggtgaatttaaaaaaaaaaaaacacagtaaagaaaagcggtaaggttggtagaccctggtgtcgctcaggtccgcctctcttttctgaggacagtgagagagttcacttctgtcaagcgtctgttgctctgcactgtgccagcaggtgcaggaccaggccgacatgggacacttctgagcagccccgctgtcaccaggagaggagttctagctcccaaccatatttaaatttatgtagacctacatatacccacggaagtcagcctttataaagtc

SEQ ID NO: 333140 - DNA, 1485 bp, Homo sapiens
  chr7:50860152-50861637
  hyper
cgcacatgctccaaggcagtcgtcaggcaggcgtttggagaggcaatcagcaaaggcgaagagttgcatcagaaatttccttctgcaaacggtaccgctcttatcacatttccacggctggcgggcggctaatccgcgagccctcaacttggtgttaggccccagcggcggctaacgggtcaccaacagaaccaaaaaaaaggtcctccgtacgaggctgggccggctcgggatttgggagtgtctggcaccactgtcccggacgcccggacgcccgggcgcgcgcgccgcggccccgccgcgcagtcggagcacccggggctgcagggacgcctgggcgcccaccctcccaggcggcggcccccaggagcgcggccttgaccgcagcccccgccacagcccgcgagccgccggcgtctgacaagatggttcaagaatgcaccgcttggactccacacctccccccaggggtcgggaacgcagcgcggagagccccgcggggcgcccggctgcctccgcctccgccgcgcgcccgcagccccagtcccgcctccgagcaccgcccgctgcgggcccggggcgccggagcccccggcccggaggcgacgcccttccgcccgccgcgcctccgcggggcccggcgtccccggccgcggccgcccagcgctcagacaatgacggcgcggggacccgcctggccgtcccgggccccgcggggacgccaaccacaaagtaacttgccgccgcgctccccgcccaactccgtacctgccgcgcgcggctccccgccgcctccgcgtggctgcgggcgacactcggcgtggccggcggcgggcgcgggtccccgcggggcgaggccggcgctcaagactgtcccgggcgccccgcgccgccggcgctgccgccacccaggggctgcgcggaaactttgggctccaccgggtctccgagcgccgagcccgcccggccgcagctcgcttccctctctgcctcctcccgacctccccaccccctcgatgggctttaaactcgcccggccccgcccgccctccccgcctctgccgccgccgccgcctccgcctccgcctcctcccccggctacttttcctgctcctcctcccgccgccgccgcccggaccgctcggcggccgccagcgcgggaggagccggggcctgggcgcagggcgtggcgcgggggcgcgggccgcgggccggacggccggggggccagaagctcccggaggttcctgccccgggctgctgagcgggttcccccctcctgctgtcctcgggactcgggcgcgggaccacgaccgccgcggctcaggaggcttcgccagtgaaaggacaaattggacctgtcccgaaagacaatttataagcgaactgtttgaaacgcacaaagtattaactgcgcagtccagatcctttatcctgggcgcagcaggacgggacggaagagctggggctgccccgtactctgtc

SEQ ID NO: 333141 - DNA, 1768 bp, Homo sapiens
  chr7:51383335-51385103
  hyper
cggcgcgccgcgctgaaaactacaaagtccaccgggactgcgcgctaccccgcggcccagcctgcaccgctggccgggatgagcacggcgcacctggctcggggtctgaataatgagcagggctgctcgtcctgtttgagggaaattactctttctgagagtcaaatcctgaatgtgacgtgtaatccctgcacgcaaggtgtggggatagcaaacagaaaccgggagaggtttgggcaaaagcggaatcgcgaagacagggatgggccgccagactcgcgggtccgctacggatgtctgcgcctcaggcctggccccactaggacgccccttccactgccaggggagaccctggaataaaggcagggagggagagctgctgccatgaaaccctccgggcaatccgaacaccttccgagaacgcggggcccgggcggctgcgaagccggggagccctcccctccacgctgccgggagagccgatcctggggctgccgccgaggccgggagagggaagacttgatgggaaccggccaggggcaagcccgcagggaagaggccggagtcaaaggccgggcgtcccctcgctccccgctccacccctacggcaaacacttggggggcctgaggaaagctcggagctgagtgggggctgtgctggcggggacccccataaggacgcctgcatacaaaccaccccgcgcgaaaagtgcgctccggccccggcccgacacggttacctgggcaacgacccgggtgcccaaagtacacagcacgcaccaccacccaacaccagcacccaacaccagcaccgcaccacctgctccaccactaccaccagcacccgctggggcggcagagagggcgccctgcccgggagcgcgcggtgcggacgcgggcgtccgagcccagggaagccccctctccaccccgcccgaccgcggggccgcttacccggtcgggggcttggccgccgaggcgcgcggcgcgtccatggtgccgggggccgggacgcgggcggtgctccgggcccgccgagtcaggcgctggctaccgccgccaccgctgccgccctcattcactttttccgcgctgacccatcgtcctcccacgcgggccggcggaggacagcggcggagcgcggcggacggaaggggctggaatcgtctctagcgggcgggggcgccgggagcgcagggaggggctggcggcggcgcggggcgggggcgccgggagcaaggtgcgccgcgcccccgccccggctgctctgccgcgcccaccggagcgccgcccccgccccgccccgccccgcctgctcagagtcccgacccggcccgcggcgagcgtccggggaaggaatcctccggcacctgggccctgcaccgacacccgcgggtgcggcagagggcttctccccgtgctcctccacccctggggggagcgcgaccctctctgggcggagtgggggatcccggggccggcgcctcctggcggagttgggggaggggaaccacctggagcctggaggccgtgcgagggcgaggtgggcggaccagcccgggaggactgacgttggagggtgagaagtgagtgtccggcaccgctctctgacctttatccgtgcagcaaatgtctagtgcgtagggtcgcaaagtgggagtcccgaccgggagcgtcaggaacacctgggaacttgttagaaatgcagatttctggggcccaccaggtcccacggaatcagaaacagtgcgggctggagcgcggcctc

SEQ ID NO: 333142 - DNA, 1504 bp, Homo sapiens
  chr7:55086556-55088060
  hyper
cgcctccggcggccgctggccttgggtccccgctgctggttctcctccctcctcctcgcattctcctcctcctctgctcctcccgatccctcctccgccgcctggtccctcctcctcccgccctgcctccccgcgcctcggcccgcgcgagctagacgtccgggcagcccccggcgcagcgcggccgcagcagcctccgccccccgcacggtgtgagcgcccgacgcggccgaggcggccggagtcccgagctagccccggcggccgccgccgcccagaccggacgacaggccacctcgtcggcgtccgcccgagtccccgcctcgccgccaacgccacaaccaccgcgcacggccccctgactccgtccagtattgatcgggagagccggagcgagctcttcggggagcagcgatgcgaccctccgggacggccggggcagcgctcctggcgctgctggctgcgctctgcccggcgagtcgggctctggaggaaaagaaaggtaagggcgtgtctcgccggctcccgcgccgcccccggatcgcgccccggaccccgcagcccgcccaaccgcgcaccggcgcaccggctcggcgcccgcgcccccgcccgtcctttcctgtttccttgagatcagctgcgccgccgaccgggaccgcgggaggaacgggacgtttcgttcttcggccgggagagtctggggcgggcggaggaggagacgcgtgggacaccgggctgcaggccaggcggggaacggccgccgggacctccggcgccccgaaccgctcccaactttcttccctcactttccccgcccagctgcgcaggatcggcgtcagtgggcgaaagccgggtgctggtgggcgcctggggccggggtcccgcacgtgcgccccgcgctgtcttcccagggcgcgacggggtcctggcgcgcacccgaggggcgggcgctgcccacccgccgagactgcactgtttagggaagctgaggaaggaacccaaaaatacagcctcccctcggaccccgcgggacaggcggctttctgagaggacctccccgcctccgccctccgcgcaggtctcaaactgaagccggcgcccgccagcctggccccggcccctctccaggtccccgcgatcctcgttccccagtgtggagtcgcagcctcgacctgggagctgggagaactcgtctaccaccacctgcggctcccggggaggggtggtgctggcggcggttagtttcctcgttggcaaaaggcaggtggggtccgacccgccccttgggcgcagaccccggccgctcgcctcgcccggtgcgccctcgtcttgcctatccaagagtgccccccacctcccggggaccccagctccctcctgggcgcccgcgccgaaagccccaggctctccttcgatggccgcctcgcggagacgtccgggtctgctccacctgcagcccttcggtcgcgcctgggcttcgcggtggagcgggacgcggctgtcc

SEQ ID NO: 333143 - DNA, 389 bp, Homo sapiens
  chr7:55640395-55640784
  hyper
cgtcctgtcgccctagactaaacccaggaaggcttttaaaagaagcagagtctccgcggggggaagcttgttccctgagaggtggccgcagacgaacccactgctcagtctggcatcccgaagccgctccgctcctggctctccccgctgttcctgcgcgcagcgggggcagtgcccccacacccacgcgtgatgggaaggccggcctgggggtgggaaggcccaccgaaatagatggtccccacacctcactgcttccttggatgtggctattttttatgccagtgttctcctgctctgaccctacttgaacttgaccgcaaccggccccgccttgcaggccaccctcccgcagcagaaaactgtgcggagctcgcgctgtcctcgcc

SEQ ID NO: 333144 - DNA, 65 bp, Homo sapiens
  chr7:63767198-63767263
  hyper
cgaccagagagccgggagccgttaagagactacaacgtccccgcacgcccggcgaggtgcgcagc

SEQ ID NO: 333145 - DNA, 429 bp, Homo sapiens
  chr7:63767582-63768011
  hyper
cgaaaaccaccgcgccctgccgccctgccgccctgccgccctgcctctctttctaaagctatgcccaaaccccgagcccggagcatgccgggattgtagtcctgcagtcctgcaacctagggactgcgagaggttaagagactacatctctcagcatgtctagctaggcgcgcaccgccgtgtccccagggcttcgcaccgcccccagacttgcgcatgctgggattgtaatactgtcgccttgccaccaacgggctacgagcggttaagagactacagctcccaggatgtacggtgatggcacccgtttggactccgcccctctgcgcgtctagagctgttctcccgtgcggaggggatcctggctgttcccaaatctcgcctgcctgcgaggagccagcgtggcccgggcagctgatctcaacctgt

SEQ ID NO: 333146 - DNA, 110 bp, Homo sapiens
  chr7:64254700-64254810
  hyper
cgggttgttaaacgttatccaatcagggacgccgggctgggaacggtccaatcaggcacccagctggagcggacatgacgtcttccgggaggcggcggggtctttgtctc

SEQ ID NO: 333147 - DNA, 976 bp, Homo sapiens
  chr7:64349108-64350084
  hyper
cgttcacacccagccccgcagagccggatagaaacgctgccactgccgactccatgctgccgggaagtgcactgtggaggccactttctggaaagaagaaaccgtctgaacacaaagttgctcaagccatgttcatctatctgccagggaaacggaggccctgagtgccagagtccaagtcaccctgcaagagaaaactctggtggagcccagggtgtccagcccctgtccacccagccgccgtggtcaaggttaataagggcaaggggccaagcagaaccgcctacaaggaaccgagtgtccacaaagcaggaagcgaagaacgtttctcctacctagagcgcagccgttttgcggaaggcacagtccgggctccgggagccaagcagggatccgggcctcgttgcggaggggacgcccgggctgagctgagctcacttgctggcggcggcagcccctgcagtcatggggtcaccggcttgtggagaggggctggcgctgttccttggccccgctccccgcccgcaaagggccgggaggtcgggctcccggcagtgtccaggctctcgcccgccggtgcctgagccgtacccaccgcgtcccctccgccccaacagctggtgctgagggtccggcccggggtcatctggcagggccgtgcggctcctgcgggtgaccaggagcgcggagccccttcccactcgggctcgggtggcctcacctttcctggggctgcgtccccgcgggacgccaggttcccggtttcttctaggtcgccctggttcctggcagctcctggtgccacgcggtcctctacggtctcctctgacctgagagggacagtgagatggggctggcggggatgggggtccccgcgctgttggaaagcagcggggctgctgctgaccggagccgcctgggtctgttctggaaccgtcgccctggggcccctccgccccgcaaacgctcgggatgc

SEQ ID NO: 333148 - DNA, 746 bp, Homo sapiens
  chr7:64712213-64712959
  hyper
cgctgtccctgtcacccgtgttcccgtggctctgggcccctgccacgccaggcgtgctcttctgtttctggctgtcccaccggcgatgctgcgcttccacaccacccggcgcacaggcgttggtagatgtggaaggtaccaagagcggcaggaggaaggggcgcgcggacacccagccccttcccgcgcacccagagcaggaagagcagcgcgcacccggtcagcgacgcggcgggctccactgtggcgcgcgcactccgagcacggagggctgcaggctcacgccacctggctccgcgcccatcccaatccgcacccgccgcccaggaaccggggctcaccctccgcctgacaattgtctcggggtgccgagggtccgtggcccgttgcccgggaggtgaccactgaggagtcgcgctgggtatcggaccaggaactcactgctttcattggctgcggaggtcagaccgtcccaccctcttctccccgccgccgcggcaaggccagggcgaaagggacaagtgcgctgctggggtcctctgcgctgtgcgggtccgggactcagggttcccggctgctaacaaggctgcgtagcttccccctcccctcctccttaggtggcaacttgtggacacacccattaagcggtcaggcgtcaggtttcctcccgagaggtgggaggcgccctggccttgattcatcgtgaagctaggcaggagatttcccagccacggagggtggaaagc

SEQ ID NO: 333149 - DNA, 646 bp, Homo sapiens
  chr7:64734140-64734786
  hyper
cgcactaatgctggggacggtgggtgtgggggagggtcctggagccttattcaatctgtcagagtaggaaccgtcctatcaggcacgcagttggggaggagggcgtggcttccagcgtttggcgcggcctttgtctctggctcaggccggagcctgagatccatctctactgtcccgcgtgttgcccctcgggagcactaggtgactttgtcacatcctctgttgccctgagatctggaggtactgggaaatgcatagctaagatgccaggacatcctggaaaccaggaaatggtgagtacgcggggttgggcatcccaagaggggagagtgggctggttgaaaccagcggaaccggcctccccacggtcagctcccgggtccacagacctgagtccccgttggcgcagctgggccctcagtacccccggagagtggggtggggggcggtgcaagacggcagctgagccagcggactttgacccctcaccgtcctcttcccgcgccgcgacctgcctgaaactctctgggcagcgctgcacccgcagccccgactctctcccagattgttcagggatgacagagggtcattagagcagaatcccgactcggtgggtgcgtgggaggagctgcggccagtggggtcc

SEQ ID NO: 333150 - DNA, 719 bp, Homo sapiens
  chr7:64974274-64974993
  hyper
ggctaaaagccgcaaaaagccgcggaggggggagcgaaaagcagtgggagctggggcaaaaaaccacaaaaagccgaggcagcggcggcagaaaacctcggcagcgggggcaaaaagctgcagcggcaaaaagcggcgacgggggcaaaaagccgcggtggcaaaaatgcgcggcggcgggggaaaaagccgcggcggagtggggcgaaaagcagtgggagctggggcaaaaaaaccacaaaaagccgcggcagcggcggcagaaaacctcggcagcgggggcaaaaagccacggtggcgggggtaaaaagcagcggtggcaagaagccgcgacggtgggggcaagaagccgcggcggcccaggcaaaaggccgcaaaagccgcggcgacgggggcgaaaagccgcggcggcggaggcaaaaagccgcgacggcagggggcaaaaagctgcaaaagcctcggtgcgggtgaaaaaagtcgcggcgagaaaaagccgctgaggcgggggcaaaaagccgcggcggcaggggcgaaaaccagcaaaaagccgccgcggtgggggcaaaaagcagtgggagctggggtaaaaaaccacaaaaaaccgcggcagcggcggcagcaagccacggcggcgggggcaaaaagccgcggcggcaaaaacccggggtggcaaaaagccgcggcgccgggggacgaaaagcttcaaaggccgcttcggc

SEQ ID NO: 333151 - DNA, 137 bp, Homo sapiens
  chr7:65037624-65037761
  hyper
cgcagcgggcgaaaagccgcggcagcggggggccaaaagccggacgggcagaaagccgtggcagcggcgggcaaaaagccgcggcggcaaaaaggcgcggcggcgggggcaaaaagccgcggcggcggggaccaaaa

SEQ ID NO: 333152 - DNA, 579 bp, Homo sapiens
  chr7:65509014-65509593
  hyper
ctgtgacccagaaacgctggtaaatgaatgagagaaggagggggcacattgaaaggcagccggacacggaggtgctcggccccgcaccccagacacaggttgtggaggttcggaggggcttgagtcccgttcgtccctgtccctatcccggggccctcccggacagggccagccagccccctgccctcacttccgtacgagggtcgcccagtccccacggctctcggctctcagaggtccaactgttaggctcctcgcgtaccaaaagggacgcgtccagactagagtctggacttccatgaggtccagactcgtcgcctctggctgccagcagacaaggaacttcacactctacagctctccccaccgtcgccaacagcgccaaagtgccagctccgcacgccaaggtgcaagccaggagcgccgcgcttcatgccgggagcttggcggactcggaacctcgcgccgcaggttctcctttctcgggggtgggggtgttggggggggtgggggcgtgttcctgtatccttcgcccaggccgacttcagactgctgagcgtttgcggacaggattatctc

SEQ ID NO: 333153 - DNA, 3158 bp, Homo sapiens
  chr7:69062203-69065361
  hyper
cgcacagctattttacccagagaggctggtcgcttttgttgatcgattctcggctgcagtcagctctttaatacaactttttatgagcatcagccacattgcggcgggaggaggggctgtggtggaaaaagcagggaaaccgccccccactcccaaaaagtaaaggaagcccgcggggcagggactgcggtttgccggtctaacgggtcctcgagctggggcggcggtcccggccccttcggccccgcccctcgcccgcggccgcctccgaggttcaagttcggcccccggctgttaggcctcgcgctcccggatctgaagccgcccgtgcgtccctaggtcccccgctggaagacgaggcgggaatcccaggggtcatccgggcgcggggtcgctcgtccacgcactgtggtgccacgtggaggaaaagtttccaactctgccagttggtgctcccactgcgcccaggcggagcaaaggcccgcgctttggcacccgctccccgttctgtctcctccagtcgcgccccctcccagggacgccccccttgtaccccttctctgaattcccttctctcctcgcagcgcaggtagccaagggaaaacacccttgggggctggtggggcttcccgagaaggcggcctcgggccggccaggggtagaggatccagggacaagtgtcccgaggaggatgtggggggcgcgcgcgcgaagtggcctgggagcaggggcccacacgcgtccccgctgcgacaggcgggatcctccggcggcttccacgccctggcgcgccaactctgcccggccgcggccgaccccacgcgggcgccccctccacgcccccgcccccgcccccctcacagctccccaccgcccccagtgcgcaggcccggccgccccagcgcgcatgccctgggctcgcgagcgcggccagcccccagccttttgctttctacacactctacaactggggagggggcgggggaggagggagcccagccgtccacgtgatcccgccggccggggccgcgggggcgggagcgcgcgccgagagaggcgcggggagggcgggtgcgcgggagcgcgcgcactcgagcgagcgagcgaaagcacgaacgagcgagcgagcgagcgagcgagcgggcgggcgcggggttgggctgaggcgggcggcggcggcggcggcggcggtgggctggccgcggagggggaggagcgggagctgcgcgaggcaggcgggcgggcggaggatggggcagtgcccgggctcccgctgcagccgcccggggacacgccgtgcaccctccggctcggggctttctcggcggcggcggcggcagcagcagcagcgttagcggcggcggcgagagcagcgttcccggctgcgcttctccctcaggcggggcggcgagagaagcggcggcggcggcggcggcacaccggtgtctctcccgctggagatttctttctgctttcctcatcgactgactgactcaccccctcccttttttgaggaagggtgacctcttctctgggactggaaaaaatatttttgtgaggaggggggcgggtggcagcgacagggtttgcttcttctcttctttcatctccctctcctcccccctcgaagaccgaaaagcaaaccccacaactgctccagcagcatcctccttcccttcctccgcctcccttctcctccgccgctcgcagtttcgccctctcttccgctaatgattgcattattatgctcccctctctggggggtctcgcccctcttgggtcgctccggagccccggcctcccctggctgcatttcttaaaaatttgggagcctgggagtgagttttctccgaggcgtgtgtgagaggcggcgggggtgttttcctgcgcgaggggcgggtgaagttcattgcccccacttttcccgcgacctttttcggacccgattttggatcgagttgaggggggcgcgggcgttttcggggggcggggggcgcggcggagaatggccgcggggagggctccccggagcctcccagtctcttgatcaaagcattccgctattctgatttattgcttgcttggtgagttatttttttttcctctaaaggagacctgtgtgttcagccattactttgctcggcgctgctcccaggcatctccgaccctcggtgctgtggggagccccacacttgggctcctcgcctctcgccctcgctccccgtccctcctcccctctctccgccccttcccccttttctttctcctctctttcttcccctctctcccttctttcggccgccgtctcccccgcgccctcctcggggcggagggaagccgtgaagggggagggagggctcggtgtcaatttttttttgtgtggctgcggccgtagcctgtggcgggcaagcggggagaccccggcgcagcagaaccatggatggcccgacgcggggccatggactccgcaaaaagcggcggtcgcggtcgcagcgagaccgggagaggcgctcccggggcgggctgggggccggcgcggccggcggcggcggggctggccggacccgggcgctctcactcgcctcgtcgtcgggctccgacaaggaagacaatgggaagcccccgtcctccgccccgtcccggcccagacccccgcggaggaagcggagagagtccacctcggcagaagaggacatcattgatggatttgccatgaccagctttgtcacttttgaagcgctggaggtaagggggaccccccttcccccgggttccctttatgcacgaccccactcggctgcgcccggctctcctgcctccctcgccgcgctccgggctgtctgtctgtctgtctgtctgtctgtctgtctaggctgaggtcttattgttggtggggggagctgggggcgcgggcagacaggcagcaggagggagtcgcaaagccgtgcctggtctcgtttcctcgctcgcctttcccctgcgccccctccctgcaccccctccacagcagatgggcagaaagaaaggggttcgggcatcacaacaatgcgccccctctccacagagagctctgcccccactccttcctcctctccctccccaatcatggcttcttggctggtggaagtctctttgctgggtttggggcgcctgtggac

SEQ ID NO: 333154 - DNA, 553 bp, Homo sapiens
  chr7:70060834-70061387
  hyper
cggcaccgacaccgtccctttcacacggtactgagccgcgggctgcttcggggcggccctccccgccccgtgccttgccgggatggcagagcggatcagaagctgcgcgcgctctgcctgcgcgctttgcctgcgcgctttgccgccgcaacccgcgcagcagccaatccgctggtgcactgcaggtgacctcccccgggcccgggaataaattgtcaagtttccccaccgtgggtgtctttgctagccggcgagttgcagtcttctgagctaattaggagacggtcatgaggagcgaggcgggccggggcgctccgcgggccggggcggggctggggcgggcggcgcgcagctcctgggccgaggcatccgcgagccgcgggtagatcgctcgcgtctgatcgccgcccgggagctcccgcggagccggctgccaggactcgttccagctccagtgcggggctgcccgggcgtccagaggcggcggacggcgtgccggcaagtttccccggcacctgccagtgcccgcgaacccacctcggaagccagaccc

SEQ ID NO: 333155 - DNA, 1482 bp, Homo sapiens
  chr7:71800958-71802440
  hyper
cgagtaaacccagactgtccggggaagacggatcccacccccacctgggcgccagacccatccagctgcttggagctcagagactaggtcccagccggactgcagaggcctctctggttaccccttgcaccctggcgcccccggactcggggtgggtggcggcgaggagcgtgcgcccagaaaggcaagcagtcagcgctaggggccggaggtggagagaaccctgcctcccgcctcccccgatcgccatgactccggcttcgcgaagagacctggttgccgccgggcgctcccacctgggctgcggtgcggctccgagtcccctgccctccctccccatcgcccgggcgcctgcgggcgggggcgcgcagcctggtggccactggcgcctgggggctagaagagcggctcccagcctccagcccgcacggtgccgggacagccgagtccgccgcggcccttccctagccccacgtccccaggcaggcggccaggagccagctccacggaaggcaaggtggccggcgcggcccccagcccgcggggtgggtgccccagtgtcggagccaacaggtacgggaggcgctgtctgccaaccatctgcccactctgagcaccagggcccgcgacagcccgggggtttggacaccctagagagaagcgaggaccgagggaagaagaaaagagagcgcgcgcgcgggtaagctagggagccggcggcggcactcacctcttgctgggccggggctccgcagcccggcagccgaggcgcctccgcacagcgcggggggcttcctccgaggcccgcagggagggggcggtgcggaatggatgcgccgagcgggcagcgctcagcctctcgctcacacccccagcaggcagccgcgtccccgtgccggcatcctcgctgccgccggctccctcggcgcccccgggccgctccccacgcgcgcgccgggacctgcacgagccccctcgtcgactcggagcgcgatctgggcgcgtgcctccctgtccttgtcctctgctctcgtctggggacgtgtgccccgcaccccctgcaccgcgcgctcctctacccctcccgctcccgctggccgcgcgggttcagcccatgtgcgcggctgcctcgctgcgccccggagcccagtggccgaggccccgctggagttgcgcgccctagaaactccatgcagctccggcctcctccccagctcctccccagcggatcccccagggccttgccgccgacagcaccacactcctcgctctgccggcgcccgcgttcaggagccgggcttctgggctcgccttggccgcctgcgccccagctcctccgagggtcggggagcccccaccccccaacctccgcctctccaatggctccctcggtttccaagcagcgcaacctgaggaacgcctcggcgcgcgcgcactcacactcgcgcgcacacacacacacacacacgcatgcacatgcac

SEQ ID NO: 333156 - DNA, 229 bp, Homo sapiens
  chr7:76145303-76145532
  hyper
cgtcaccccagtaggctctccaggacccaggagcctccatcacctggaaggaccctctgtgcaaaacctcaagcgtccatctgtgcacaaggccggtggttcccgtcgtcgccactcggggtcgccggtgagccgcagccaggccgcctcacggccagtgtgcatgctcgctgctattcgctgccccttctgcctccgaggcggtagcagatgccacgttggcggggtc

SEQ ID NO: 333157 - DNA, 373 bp, Homo sapiens
  chr7:76751573-76751946
  hyper
ttggcttgactaggcgatgtaaacatcagctgcgtaatccccaggggcaagttgggatttgaaagctctgaactctgacctggaccccttgcctaagtccaccccctttcgctaaggccgacgggatacgtagttctaaagcggtggaaagtcgcagagctccgcctcttagaaaccacatatcccaggaggcaatgcgcaggggagcacgggtaagagggcaggtgttagaatcgctggaaaggcgggcgccctttgtttcaagaccattggctattggaggggcggtacatgggaggccactggccaatgggaagcacggaagggggcaacgagggtaaagctgcatggtcaccttggataccaaggacgc

SEQ ID NO: 333158 - DNA, 2290 bp, Homo sapiens
  chr7:79081837-79084127
  hyper
cgcccccagcccagccccagaaacgctggacgcagttctccgctcaccccaccaccttctcttcccagacccgctggtgatgccgctgcaccctgaagttgctccttccttctttccctcccttcctcccattctttctttcttttcttccttcctcccttccccaaaagctcttcatccgcttcgggtgatgccactgacgcacattcaatttgccccagcagctctgaggaggtcagaccaggccgagcaccttccaaaggggagggtctaactgagcaaacaaagttgcacgccacaccacaacctgcccctcccctccctttagcccccaagtcgaatccccggcgaaactcacttgcactgcgggtgctctctggcccccaccccatcatcgcgcaacacacccccttcaacatgcgcggccaccctttcattgccctgcgccccgagcggtcccaccgcccggcaaaacactgagcaagccgctgctctcaccttgcttgacacacttgagccggagggggtccttgcagtgtttgatcacggccagcacgtccctgatggtgagccccgccacgggggtctcgttcacctccagcagcagctcctccgacaccaatttgctgccgctctcataggccaccttgccgggcttcacctcccccaggtaggggaactgtccattctcggcgccccccttcagttcaaagcccagctggccctccgggttcctgccaatgacactctcatggactttgctagtccagtggcttttctttttcaagcttttggacatggcagtggggcgagtcgcctcagttcctgggctccttggggttaggggggctggtggtgagagaatgaggatggaggagcaagggggcccagggggaagaacagcagactttgccttcgcccccctctattcggtgctttccctcttctttggatggagtgtggacgaggaatggggaggatgagagggacggctgggcagaggtaggagagcttggatgaggttgtgctgtcccttgaatgacactcaaggctgtggccccgcagcagaggaagcagtggtggtggcgtcggcggcggcggcggcggcagccggagcgagcagtagccgagctggtgagcgggtgtggtgggggtggggaaggagggtagggatgccgggggccactcctgcgtggtgcgagtgggaacgcgcgcgcgcgcctgggtgtgtgttgttagctgatatccatggcagctgcagtggcagggtgcgtgtgcgtgtgtgtgtgtgtgtgtgtgtgtactagttctactgtactggcagacgggaggaggcaggggaggaggggcgcgcgcgccgggtggggagccacggagggcttcgccgctgcctccctccctccctccgcagcttgacccggtagtgaaggcagagagagaggcaggctgggtccgcctggcagcctacgggaggaggcgggagccgggaaggaggggagcctaggcccggcgtggggaggccggcaggaagggcctcgagcccagtgcggacctttcttcagcctctgtgcgaccgagccgcgcgccaggctcctgtgcgaggaggacgcgctgactccctccgacctgggctccgatggagcagaaatagcgggacctggacttgtggcgcgcctggtgccacatctcgggctctgcgagcgtcctggcgcgggatcctgccgtgagaaggagttggggcgggggacccggcggggcattgcgggagaaggcctgggatccctgggagccttgtagcgtgggggagttcactgtgtagagaggtttcatgtcttcatctatatagtcacttatttgtcttaaagttctcgaaattccctcttagagaaggagaaagttagagaactggaggctgcgtaccctgattacgcagaagggaagcagcctcgcattccccggggcaggcccccgcccgcgcgtcccgccagtaggggaatttagcggacggctgcggttgtctggtgaaaggctatccaaggataaggggcttcacttttcccaagtaggggaaagagaaggggtctacagggctaggggtggagggagcggatgcagtgagcagcctccgcagagaaattgacaatttaaccagggacctgcggcagagacaaggcggagacactcccttgcccaggaaagccgccagagtccggcttgtacctggggaagaatccttaagacggtctggcccaacactcctttgctcacagagaaaggggagaagactccc

SEQ ID NO: 333159 - DNA, 1305 bp, Homo sapiens
  chr7:79764137-79765442
  hyper
gcggaggccgagctcggctgggcttggcgaggctgcggcgcggccaccggcgggagtgcagcggccactgtacccagagattcaaaaccccaaacccgggacttgggggcgctgagccgggccgggaagcagagcctggtcgtgaggaacagccgcccgttgctgtctgcccctttgcggacagcgtctccctcgactccgcttaggaagtggtgggggcggcgtggcccccgtcgggaggcgttcgaacgcccgctaggagagagaaaggattcccctgtgcttggagcccgcactcgggcgcggagggagcggcggcaggctctcgctttcggcaccatgggctgcacgctgagcgccgaggacaaggcggcggtggagcggagtaagatgatcgaccgcaacctccgtgaggacggcgagaaggcggcgcgcgaggtcaagctgctgctgctcggtaagggcggccgggtcggggcccgggggtcggcgggggaccgggtgcggcgctgcgcggccctcggcgtttggaaacccggagggaagggggaggaagcgcccgaggaggcttctgagcgggagctgggtccggcggtgcggaggcaaggcgggtccccctctcccggtgtctggtctctctccgccccggcgggcgaggactccccgcggcggggcgggcgcgtcacttcactcggatgctttcgtgcgacccagcaaagagcccaggcgcgagtccgaggcggcgggtcgcgtggaaaccctttgctttgaagtttagctcagccttgtaaagatgaaggggcattcgcggctagaaaatgaaaacacccccccccccgcgccaccaaccccctcccggaaaacccttcttcgtgtgcggtgtaggttgtgtttcgactgtggttttctcatgcccagagtgccacgtttggtgaaatcagtgcaccttttgtggggcctctgagatggggctgaagcgtctttcctgttaacttcctatggcgactccttaagtggtcaaggagcgctgattacattccccctgcgctgagaaaaggctgcgctggatgcttgatttttcttgctgtgggggcatggaagccacccaagtggggttgggaagctttgctttagtagtaggcaaggcagatactcgagtggtgaaaactgctgtgaaagagcgagagggtcacgccagacaacagggttctgtctccgctgccaccgtttctgatgaatgagatttgccaggtacacgcaaggcttttatttgttcttagcactgttctgttcgtgaaacgctac

SEQ ID NO: 333160 - DNA, 828 bp, Homo sapiens
  chr7:80548021-80548849
  hyper
cgcgtgtgttcttaagaaaatgtccaggcttgagcataccaatgtatgaaaaatcaatatacaggccaaaaaagttatactttgctaaatctgtaatgcggaaaatgaccaatttagcttaccgaggttgaaagaaatcagcacggaaaagtcatcagtttgctaccggggttggatgcgcttgtgtctccagtccttttcccagacgaccttattttctagcacgtcgcaaaggtgaaattctttcttcccggtcctctgagtttctttgtaaaggaatctcagcgctgcagtgccgcggcacccggagctcttctccgcgtcgctcaatcaagcacctcggagtgaatggaaagtggccggaggccgggggcgagcgctcttggtgtccgattacagcgccgcggcgcgcggctccggctgccccggcgcgccgccctgcaggctcgcatcaccaccgcgcagccccggccgcatctccgccagccgcgaggccccaccccgagcgcgcccgcgagagcctggcagggagccgcgggggcggaccgggcggggccgacccttagagctcgcggctggccagacgcaagaatgcgcggccgcaggctggagccctagctccgcaaccctgctcctttcgcagtccgcggcggagtgagcaacttgctgggtgcgctccacggtttttgttgccggcggctctcgaagacttacacaggctttgcctggccgtaaatatcaaagtgcaaagcagttgtggttttttatttttgccagggaaggatcactgcagccttttaaggcaaagagatgcgtttttaaaaggac

SEQ ID NO: 333161 - DNA, 771 bp, Homo sapiens
  chr7:82072331-82073102
  hyper
cgggtgagctggctggaaacttttttccccagtacggctgcactctgaagtctagagaatcccgttagagacgggctgagacgccgcgagtcgtcggcgggcgcttcccgggacagtcggcccccagtgcccggccccgtggaggcgcccgagacgccggttcgggacgcattccagcggcgagcggcgcgcaccgcctgcccggcgtctccgcatccgagcctggctccccggccgctcgctccccacccccacgggcggaaaagccccgcgactcgggaaccgacccccacccccaactcccgcggcgcccctcggccggcgctccctgcccggcccgccgacttacgtgacggccgaagggaacggctcctccgacgaggggccgatgagcaaagattggaaaagtgtcagagtcaaggccagcaggcagccagcagccatcttcgcgatcgaagatcaatgccccctccctgcccaagcgggggaaggagcggcgctggaaaccgcgggcggaggaagagcagcacacgccgccgggaccgcgggcgtctggagggctggctgcgcccggggcccgaggcgcggagccgcgcgggggacggcaagggcgggagcggacgccgaggaaggggcggtggcgggcggacccactagcgtgcgtcggctgctccgcgccgcggccgccttgcctccgccgccatcaagggcgactttggaaacagacctcggcgagcccgccggcgctcgcgcgctctcgctctccctctc

SEQ ID NO: 333162 - DNA, 250 bp, Homo sapiens
  chr7:82073323-82073573
  hyper
cgggcggagacgggccgggagcagccctccatacaaggcagccaggaactcccaaagtcggcgccggctcgctcccgccgcccggcgtgcgcaggcggagcggaccagccccgcggggctcccgggggacggccagccgcccagcgggcatccacaggctgcagaggctccaacccaggacttggctcgcgtcttcgggggttatttttgcacatgcaggcagcgttcccccccagccctactcccaggc

SEQ ID NO: 333163 - DNA, 424 bp, Homo sapiens
  chr7:83277846-83278270
  hyper
cgcggatgccatgctgccgtgttcaccgtccaagccctcgctcctcactttaaggagggtctgagttttacttaggacttccctccaggggcagcgtgcgagaggctttgtcagaaatcgaacgcgttgtcatcagaaagcacagttccgaagtgccatttgtcaggctgtatttggctatgtaaaacctttctttcctcgggacagttgtttataagccgggagcaagaggacattccaaagagtgagtcttcagagccatgtcctgtctagagcgctcttcagcaactacgccggtagattcaggaagaagctgtatttttcagtcacttgggcaaagctgttcattcagaaaaaaaaaaaaaaaagagagaaaaaaacaaaaccgagcacacgcactcccttctcccgtggaggtcctctc

SEQ ID NO: 333164 - DNA, 1016 bp, Homo sapiens; identical to SEQ ID NO: 233000
  chr7:87229460-87230476
  hyper

SEQ ID NO: 333165 - DNA, 966 bp, Homo sapiens
  chr7:87256927-87257893
  hyper
cggtgggtagtgagaagctctaggaagggggcgcttccgaacacgcgcgtcgaggagggcgttccaggactctgagggagcagcccagctggaccgaggccgcgtcgttcctgggcttactattcccagacccggactcccgattccggagtcacggcccaggacgcgaaaagactctacactggcaccacgctcctccttaggcgggccgtcagtcccgggtgcgggctgcgctggaggctgaggtgggagcgacatggtgtggaggggcaagaaatgtcggcactagacgcgccaagaaggagattctacgagcaattcccccctcgggccattgtgttgctgtttattagcccctgggagggcgtcaggacaaaaggaaccctcctcccttcttagtacttaggcccaaggtcgggtgtgggagccggcgcgctgctttctaggcaggcactgaagctacggcagccacgcaaataggtatcagccgttaaagcttggctacaggcaaggggggggcaataggcccctggcgctgtggggccccgcatcccacaatccccgcggctagcctgtgtggctactggcggcagctagcgggctgcgaaagcgagcccagcgtccttgacagcagcccacgcgtcggggcggggcttgagcccgctgctttaaaaggtccgcgcggccggccccgcccctctggtgccgcgattggatccggcgggggtagcgttgatttgataggcgcagagagggtggggctgcgcacgcgaggccgggggccttgccgctgcctcccgggctggggcacgagtggctgcggagtgtgggtggttgggcgtgaggggccgacgggctcgcgcgcgcgccgtctgctgaggtccctcgggaaggaggagagcgcctgacgccgacccgcaggcgcagcccggcagtcggcggcgcgccgagggcggaggtggtgcg

SEQ ID NO: 333166 - DNA, 484 bp, Homo sapiens
  chr7:87257959-87258443
  hyper
cgagccgtcagtccccgggtgcgagtccctgctgtcttccacacccttcctccctccaggctcctttcctacatccttcccgcgcccccacggttgcggaccgagcgagaacccccttaagcaggtgtggggggcgtgcggggtggcacgagacaaaaggggcacgggggtaagcccgccatggcctcccggagcctggggggcctgagcgggatccgcggcggtggcggcggaggcggcaagaaaagcctgagcgcccgcaatgctgcggtggagaggaggaacctgatcaccgtgtgcaggtacggcagcgcagggcgaggggaaccagcctcccgccggggctgagagctctgggcttccgcgcgggtccttgggggtcccgggcatgatgggctgccgcccagtgcccccgcctatgttgcgccagccaaatctgtgagcgcgcagctccttggacaggggcccgggtctggacaccgtc

SEQ ID NO: 333167 - DNA, 1361 bp, Homo sapiens
  chr7:87563203-87564564
  hyper
cgatgcagatgaatactggctgctgtaacggcccagttggtgcatctcggatgccaggaggcggtccagtgctgatctctttcttttgcccttccctcccgcccttccagtctgtgggatatagaggacctcacagtcacgaggtcgcgacggtccgtgccgtcgtggagacaagcgggacacggagagagaactacatttcccagctgactctcctgcgcgcgcccttgcctgcgcgcggggggcgagtgcaccgggcgctcgctccctgccgagctcttgtcgcccgcccgagcctttgccaggggatgaggtgggaggcgctagaaaccacttagctacagccaaccgcccaatgcagcactcgctcgctccccccgccagcggaagcgtccgcgaagcacaatgcagcactgagccgcggtggaggttgcagcgccacggccgccgcagcaccggccggggctgggtggaggtggccgcggggaccccgggggcgcggagcgagggaaacggactcggcggcgccggcatgaggagctgagcgtctcgggcgaggcgggctgacggcagcaccatgcaggcggcagtggctgtgtccgtgcccttcttgctgctctgtgtcctggggacctgccctccggcgcgctgcggccaggcaggtaagttagccgtcctctgtgcctttgggccataccatttcccgggaatctttggagccctcaggcgtattgaaaagggggcatccccatttcccgagtgcgcggggagattttttttttttttttttttaattcgggagggtggtgagaagtggagcaaaaatatatgtgtggaggcgcgcagatgcactggaagccttcggtcaaagcctgtttttctccttctgaagaggaatggggagaatgggaaaggggtgccctgcttctgggccccgctcctggttgctctcggatgagctggtccaaggctctcgggctggtgtctctgcgtccttcccagttgggttccgagagggagggggcggtggggattttcgtaggggagacgtaggactgcaggatggaggagtgagggtcagggtcattattttcgccttttctctccactccctcctttcccggttcctgcctggaggagacgcctcattgatggagctagagaagaggaaggaaaaccgcttcgtggagcgccagagcatcgtgccactgcgcctcatctaccgctcgggcggcgaagacgaaagtcggcacgacgcgctcgacacgcgggtgcggggcgacctcggtggcccgcaggtgagaggctcggtccgggaggtggtcctccgcgcctcccggcccacccgagaccccacgatt

SEQ ID NO: 333168 - DNA, 400 bp, Homo sapiens
  chr7:87936014-87936414
  hyper
cgatgggctggggagtggggtcctagcagcagggactggaggtgagctgaagcagataagggacgggagccttgtggcgaaaagtgacccacctgagggagaggcgcttccaaggaggaagcgtccagcgccaacggtgcgcgccgcgggccgggcgggtagagggaagtttcgccgcgcctgcagctcagcgctgtggcttgtggctctcgctgctataagaagccagagaagggcgggacggtctgctggatttcgcaagagaagcggaaaagaacttgtttcctggaagagttcaagctgagaatcccagcagctggaaggaccggaacttctatactgcggtgctgctgatggtgccgctgacccccgggaagcggggattttaagggttacaccc

SEQ ID NO: 333169 - DNA, 745 bp, Homo sapiens
  chr7:89840705-89841450
  hyper
cgcgtaagaaaagcaatttctagagcggaaaggtgaccccacattacaaaaagaaatggagtagaaaaataggcttgactattctaaagctgcttcagaaagaatctccggaagaccacggaggaaccccgcaggggagccaggcggatactcagccgctcgcggtagaagggcgcgcaaagctgcggagccgcgtgtgtggagctccccagtgcactcactgctggctccccctcggtgctctgggcccttcccagctccctccacacagcccggctcccttcacacacccccgccccctccgagctccccgactcctccccgcgctccacggctcttcccgactccagtcagcgttcctcgggccctcggcgccacgagctgtccgggcacgcagcccctagcggcgcgtcgctgccaagccggcctccgcgcgcctccctccttccttctcccctggctgttcgcgatccagcttgggtaggcggggaagcagctggagtgcgaccgccgcggcagccaccctgcaaccgccagtcggaggtgcagtccgtaggccctggcccccgggtgggcccttggggagtcggcgccgctcccggggagctgcaaggctcgcccctgcccggcgtggagggcgcggggggcgcggaggtgagcgggtcggggaggagcgcgaaagaaggtagcggcggcggagttgagggtcaagatgcagtctgcgccacgcgctgcatccatcctc

SEQ ID NO: 333170 - DNA, 404 bp, Homo sapiens; identical to SEQ ID NO: 233013
  chr7:89950293-89950697
  hyper

SEQ ID NO: 333171 - DNA, 1513 bp, Homo sapiens
  chr7:90225111-90226624
  hyper
tggaaggagaaaaccgctcaaacaactggactcggcccgtttcctttcggtaacctccccacagcccaacacgctgtccccagacgctgcccgctcccaccccggtcccttcgtgatcctcccgcgcgcgggcggggcgggggaggagcgcgggggcggccgggaggggcgcggccgggagggggcgccgccggggcgcgagccagacacagagggccgcggaggacgcgggaggcgagcggggagccgaggtcgtgctaggatcccgcgcccaggggccttcgtcgagggaggggcgtggcggcggcagcaggagggcagcaggagctgtcaggctggcggttccgcgccgcggctccttctgcgctgcgcccgcaactctgggctgagaacttctcccgccggcccactcgccctcgccccgcgcactcggcgccaggcgactcccgcaccttgtacccggcccgccccgcctcctccttcggccgcaccactccccctgccggccgcgcttctctccgttacaaaggagggaaaatgagccgggcggcggcggcgcggcgcggggccaccacggcggcggcgagcgcggccgcccccggcaccacgtaaaccgcccccgcccgcccagctgcggcccaggccggagcggagcctgccgtcctccgcctgcctgctgctcgcctccctagacctgcgcgtcgcttcccggcccgccgaggaggtggtggaggaggaggcgccgctttccccgcggcgcgcgccctcgccgttgtctgagctgtgcctggaccagtttggggaagttgtcggggctccgcgtcgcccagatgtgtgacctcattgagccgcagccggccgagaagatcggcaagatgaagaagttgcggagaactttgtcggagagtttcagtcgcattggtgagtagcgcgctgcccccggcccccccagcgcccgctcccctcggcctgcgcccccgccgcgttcctggcaccagccatgcagctgccagcggggctggcgtggggtgcgttgtaggcggggatcgagggcacagtgctagggacccgggggagggcaaggacgtaaaggaaagagacccctcttcctcaggatctgggggttcatttgtagattctctcaagcctacaatatgggttctcccctcctccgccactagtgctcgccctttcgcgcgcgtgggggacgggcgaggggacccctcggcccccaccgcgcaaggggctgcgcggctgcttgggccacttgttattttttgcgcacaggcttggatattgggcgtttagtcagtaatttagctttggaaattggtgaaacgttagactgtgccctggtattgtttaacgtatccaacctaaagggaagtgggacagttaccttgggacctattgttcggtacttcgggtcctggaaagcgagatttgggtgttcagtctcgaggtctctgaatcttcccgctgctggagagaaatgcgcgctgtggagttgtct

SEQ ID NO: 333172 - DNA, 757 bp, Homo sapiens
  chr7:93203842-93204599
  hyper
cgttagtctcagtcctccctctccgcccctctcctggttttctgacactttaaatctgtcttaggtggttcagacccaagtctaggttgtattatcagctaaaagacaactgttctttcccctggcttgctttctacctccccagagtccaggaggctcaccttcccggcgccttcctgcgctctcccagctgtgaagctgtgcgcaaacttctcctgacttaagagtctcaatcctagcctgcgctcccgccccacccccgcccgcctcccgacaggcggcagaggaggtggcagcagaattgatgagagccagccccccttcccggaccccgccaccccagtcagccccctcctgtcccaggagagggaggggcgagctggtgagctccgtgcgcctcgcgccagccccagtcgccccggcccgcgagtggggctgcgctcgcggctgctgtctcgctccagtcagggctggggctcaccctgcgagtccgggagactaaagcgccgcgtaaacacaggaagcaggcgagggacccgagttagaccttgagtagggagggagaggggggcgacagtctggactgggagacagctttctgggagccctgtcccctccccggagaatgcaaattccggagggaggtgagtttccacaagaaccttatcccagagacattgtgaccctggcttcttcagccgccactccggggacagcactagggagcctgtggagggagggtcggtagtgggctagg

SEQ ID NO: 333173 - DNA, 126 bp, Homo sapiens; identical to SEQ ID NO: 233024
  chr7:93204907-93205033
  hyper

SEQ ID NO: 333174 - DNA, 991 bp, Homo sapiens; identical to SEQ ID NO: 233025
  chr7:93519346-93520337
  hyper

SEQ ID NO: 333175 - DNA, 905 bp, Homo sapiens
  chr7:94284379-94285284
  hyper
cgcaaatatttgtggccgaatctcggcaacccgctggaaaggattaaacgtgcggttgccgtgactaaacgcattcattcaccctacaagatttaggaaaatgtaacgttgcaagggaagcaaggtctctgtgtaaacctcgtaatcgccaccaaaagtcggtagctgggagccttcaaagcccgccaaacacactggaagcatccacagctgttttaaattggttttggtttctggaaatagcgcactcggtacggcagcatctctggcctccagccggggttaaccctgacctgaacgccctgtttagctcccagcatttcatgattccgcttccctgctccgtaaaaccgaagaaaaccgagatttccgtcaccgagaaatgcacttagcaagagggggaaattcggtgttttaaatgtcacatttttgtgttctctaccactatcaagaaaaggaaaaaagatgtgtttgtgtagcggggacgcagcttgacacccatttcctttggctcgcatcgcggtcgcagagcccaatcgcggggaaacgggccccccagaaaaacaggcaacgacccccagctctttgctacagggatcgggagaggactaccctggggctgggcggggagggggatgttgggaacaggaattggagatggaatttctgcgcccgcagagcagggaggggcccgcgggggcgcggagaggaaaaaaaggccaggggtcaagcctggggagagagaagctgggccggggaaatggggtacagggtgtactgaaggaggggtacggtggggtccgggacagaaagagaggctggtgcccaaagggcgcgctcaggcgcccggaacccgagcgggggagggggaggcggcggcctgttggccccgggacctccacgtc

SEQ ID NO: 333176 - DNA, 1084 bp, Homo sapiens
  chr7:94536809-94537893
  hyper
cggagccaacacccgaacaggaaggggccttgccccaggccggagaggcccctcgcccacggccgagggggtggggcggcctcgcctcgggccggtgcttttcgcccttccttggccgccagaggctccctctctctccctctcccgggattttgctgccgggctccctctctctgcggccctagagttaatcccatcagccgaggtgaggcacctgttaccccggccttcctcacccccgcggcctctcctccattacaccgcggccgccgaaacggcccggcgtggcgaccgcacgtgggccaaaccccttccccggccggcacccctggccccaggccggcccgagcgtgcgggcgcgtcgctgctcgggccgccgcccgcccgcaatggcgttggggagcgcagcgcgcctcccggggccgcccgccgcgggcagggagcgcctgggggccgacgcgcgagtggaagcggccgccgcagccgccctacgcgctgcgccgtgaggagcgggttgcggtgtacccagcgggccggcgccgagccgagccgccgcgtccaccgtggggcggggggcgcctgcgaggagggggtgggagccgcggcggcccgaccctccccgcccgcggcgctcccgctcgggtaagggggaggctgagcgcggggcgaggagttggggagggtggagaggaggaaaaaatcggcttgtacaaaggctgagttgcaggctgggggtgggggtgggttgtggtggaggagcaataggttgaagatcggaggcattatcagtgggatctattgtttcctggcacattgggaggaaaaacaaagggatttattttcattaccctgtaattttttttcttttctatttttttaaatgtggccagggagctcgtctctctccgtgtcacagtgggatccgcctggcagccgccgggagctgcagccaatgtgttaggacttcaggtgcttcttggcacaaagctagactgcgacctcctaccatagcgcttggcgtcacctgctctcccggtcctgccccagggccgagggattgcgtcccgaaccgggcttgggaatc

SEQ ID NO: 333177 - DNA, 510 bp, Homo sapiens
  chr7:95025596-95026106
  hyper
caggaacatctccccgactaaggacaggccgacccccagcaggaccagcgccacgagcttccccatggtctcggggtgcccagcggcgactgcgcggcgccgagagctctcgggggcgcggcgggcggttcctgcctcgcgtacggattggggcccgctcggccccgcccgcacacgcctcctacttacctgagcggcccgggtgccgcagcagggcgctgacgagtcccgccgagccccgccgcccgggttcaaggccgccttcacgcccacgattccttgttttttgggcagaggtcaaggctcaacggagagggagcccgggaccgagttgtggtgggagtttgctcctaacacccgcgaaatcctacctcaattcctcagatggcctgagggagaaaccggagggcccgggaatggcggggagctccagttcagagccggaactccggacttctgcaaggccagacgtgaggcgacactgaattgctcccgagacgcgggaagggc

SEQ ID NO: 333178 - DNA, 385 bp, Homo sapiens
  chr7:95225923-95226308
  hyper
ctgaactccaggtcgcgccaatcagatcagagaaagaactatgggctccgcccctccagccgcggtcatcacagaatggcctggcacggtgaccacggagtgccctggcaccggtgcccgcggctgtgacggaaaaagggtgggaagaacagggaagaggaagcagaaacaggtatctggggcaacgtgggcttaagattagcctcttgggacggggctccgagtcgcgtgggctggggtcccgcccaggctcgcccttgtttacaactcggaggctgtctcaatgtcaagtactcctggccacaaactgtttccaagagtttggactccgcgtgctcattggtccttgctcagagcagggcttttacagtagccaacaagctgc

SEQ ID NO: 333179 - DNA, 565 bp, Homo sapiens
  chr7:96621730-96622295
  hyper
cgcgtgtgggcgcggtcctcgccgcgacgccgcgcgcgggtcaggctcaactgcgaaccttgccaccgagctttcccgcgggaggcttcgaatataaccttgcctatttctcgcctactgagatttctttccagaaaaggacattctcctgctccgaggagatggatccctgaggtccccatgcccgcacagggtgtcctggaggagtttagaggacactcctggggcccttccctgtgtagtacgcttattcccgaggtgggggctgagaatcgaagagcagcgccccccacactgggattgggggtggtcgaggggctacagatgcccgcattgggcttcttagcggcctaggctgatgcctggaggtaggggggattgggtttggctggcgactagctttaatgcccatcgagttcctgggacacccaagttcagcacttctgcatgaaaccgaaacggccagggaggggcggagtgggccgaggctgagggagcggcggtgttgacgccctcttcccacccaggatcgatcgatcggtagggaattttttatctttgggaa

SEQ ID NO: 333180 - DNA, 362 bp, Homo sapiens
  chr7:96632634-96632996
  hyper
cgatttgtaaacgtgtagatcgtgttactggttcgcgtgttaaagtgcacctcttgttaaaaggtggggaacagggcacgccacttaaaaatgaattcagagttactgaaccggctccccagactcaagaacttaagcgcaacgggctgggaaaaggagggggagaggagcgcaaacgccgctgacctgggaactcggaggaaactcgcgggcagcgagcttcaggtcttctgatacattgaaggaaagaaagaaagacagaaaaagaaaaaaacaaactgtcctggagatagctagacatccagggctgggagctgggaaaatcaattggcataagccgctgccggcgggcttcgcgcaac

SEQ ID NO: 333181 - DNA, 264 bp, Homo sapiens; identical to SEQ ID NO: 233043
  chr7:96633236-96633500
  hyper

SEQ ID NO: 333182 - DNA, 623 bp, Homo sapiens
  chr7:96634291-96634914
  hyper
cggcctgaaacggcagggaccgagccagaacagggtctgatttttctttttctgtaccaccccccagtggggtggagcccaggtgtgagggttcgtcttccttctgtggtttcaataaaatacgtctagaaaaatccacggtgacaaggagctcccacaagagtgtagtaggaccagagtggcagggacgtcaagaaaggggggcctggatttaatgcgggggtggggtcactgcttctaagcacaggcaacctacaagggtgcaaagggattgaaagagagcagcccccagttggctgtttcaaggctgagatattggcaactggggctccgggatttggggcacgagctgcggcgggaagcatcggcggccggccgggcagaggcgcctccctccccaacggccccgggcgccacacagcgcggcccccggctgcagctccggctgggattggaactgcggaaggtaggcgaagaactctgcaagtcgcgcacacgccagtagaagccgtgcgcctgtgacgtcagggggcgactgaccaatggggaggcactgccctttggagacaaaccattcgactcgtggcgtctgcatcaagtctgaaagcagacgcgcaactttc

SEQ ID NO: 333183 - DNA, 805 bp, Homo sapiens
  chr7:96636033-96636838
  hyper
cgcccttttccttgctccttccctccaggctgtaacccacgtttgacccggctggggacatttctgggccggaactggggagcgtgttttgcttcccagcccacgctgggcaggcagtggcctactttgcgtggggcgccccgtgctcctcagtgactcggagggaagctggcctggctttcgctctggttaaactagtaacagtcaggctctttccagtgggctttaaagtgtccctcaccttcatccctgaccgggccccctatctagcttttcgctacagtgttggctgctcctttgttcgtggaggggaagcaaagaacctcgggctgatggttctcagcacccgagggggacaaagttgccgtgagaggcgcagcctgctcgtgggctggtctgagctgttggttgtgttttgtttgaggatttggtcctcctcaggagagtcatttcaaaacatgccgaggatgcttgatgcactgagcttggagctggtgacatcaagtcaactggccgcgtaaacacctgggtggctcaagcacagcttcaggtactgttaagccgggcacaggggccccgctccgcccggacagctgccgccttgctgcgctgcgcaccccagagagcctccggcaccgcctccgctgcggcaaagcgggctgtttgtctgagggcctctggcgctcccttggcccagacgctgcacattgttcgggccagggactgggtcaaggagattacgcagacgctgggagcacacgggcagagtggaccaagagaggtcggggcatcatagggatttttc

SEQ ID NO: 333184 - DNA, 1021 bp, Homo sapiens
  chr7:96645918-96646939
  hyper
gcaggcggatccgccggcgtggcgagcttcccagaggtgcccgagggcgtctgccctctgggtgtgcctccgggagggctagagagctctaggttggcaagatcccagtgaccattgggaggcgcgcgatccaaggggttgcagggatggggcggagaggaggggcggttgggtagcctaaaggtccctctcccagaatacaaggaagcgctaagaaggaggatgtgggggcagtgttccagcaggcatcccaggctcttccggctggagagctcaggagactgagcggtgtcaaggctggagtgagctatagggtgcgctgggaggaggtgagcgcagcctggctttggcgcgctgtgggtgactcccaggacggcgcggccaggacgccgcgagccgtggggcgtccggtgggatcaaaggaaccagaggaggccagccgacgcgtctgggattgtgggataaggggcgggagagaggagattgacatgggcggggagatcctggcctggcctgtgtcaccggagggggttgtgtgcgtttgtgtctttgtgcggatcaacgctctcgggcctgaggccgtgccctgggtggatccgagtgtgagtggacaggctcccgggtgggtgcccagacgggagggagagcgagcgagcgagatcaagggcagcgaggtctgcgggttcctctgtgtgtgtgtctcaggccctgtggctcagcactggagccgcctggcacccacaggaatgcggcttctctcggatccccaggccgccccttgtcccacaaggaggtggccgccaggaaaaaggggggaaaaggggcagaaatccgcctagctcaacccgagcctcaaacaaaggccaatttatctgatctcttacaggatggcccaggaggtggtctgggcaccgaagaatcgcgctggccctgaccgcatgccccagccttcctggggtttgtgaggagctctgaaggtgggggtgaggtgttgtaagtaaggggtggggagtatgaagac

SEQ ID NO: 333185 - DNA, 894 bp, Homo sapiens
  chr7:96652889-96653783
  hyper
cggacgaaaaaggaggacggaaagacaaattgtgggcgcctatggagacagaaaaaaaaatctatcctacaacgtgacccctcagcaaccctcctccacctttaaatggctttttgtttttggaaatgcctggataaaccgcaaaactctcggcgcgctcttctctggctggctacaactccttaacccccccacccccacccagcgtgctcagggcacccgcaccgtgctagcttgtggcggctctcaaactaatcctgactgagtttttgaggcagccttctattcccactcgcaccaacccagcacgcttaccaaaattcccaagtaaccttctctttgttacgcaaacgccaggagctgcttgattctttcttctctccacccctatcccctttccagcctagccggcttcctggccgggcaagctgggaattcagcgactgaagggccttggaaggtgccggaggggagagacgctagttcgaacctccacagggctctcctactaaaaatccctaaaatgctggcccgagaaactctctttgttggagggtctgagtcctactcccttctgccgcgtgcgcccccactgccgtgaaccgctgtgacccccaatctaccaccccatctcgcgcccccagcgtcctagtcgccctgtatctgcccagccttccccctgtccatgtacctggctggttggtggcgcttgggacgcggttgtaggcgccgccgtactggtggtaggagctagcgtagctatagtcggcataagctttggctgggtagctcccggcggagccgttcacgccgtgatactgatactggtaggggttgagagctttgccataggaagccgaggtaggagagcagtagccgtgcggggctcccccc

SEQ ID NO: 333186 - DNA, 635 bp, Homo sapiens
  chr7:97361020-97361655
  hyper
cgtctcgagggacggaaaagttaccgaagtccaaggaatgagtcactttgctcaaatttgatgagtaatatcaggtgtcatgaaacccagtttcgaaggagaggggagggggcgtcagatctgcagacggaagcaggccgctccggattggatggcgagacctcgattttcctaaaattgcgtcatttagaacccaattgggtccagatgttatgggcatcgacgagttaccgtctcggaaactctcaatcacgcaagcgaaaggagaggaggcggctaattaaatattgagcagaaagtcgcgtggggagaatgtcacgtgggtctggaggctcaaggaggctgggataaataccgcaaggcactgagcaggcgaaagagcgcgctcggacctccttcccggcggcagctaccgagagtgcggagcgaccagcgtgcgctcggaggaaccagagaaactcagcaccccgcgggactgtccgtcgcagtaagtgcccgcgcggtgctggccgcggctgcccgggtcaccccgccccgcatctgtccgaggtggccgcgctgggggcgccgctgcggcgagggacagtggggagactggcttcccaaacgccaacgcccctctttgtcttccacct

SEQ ID NO: 333187 - DNA, 129 bp, Homo sapiens
  chr7:97680605-97680734
  hyper
cgggatccggtttggctccgcccccgccctgctgtatccatggtaaccaggtctccttcgcaaggctggaccagtcgccacgacgagctccggggcgccaccggtggcctctctgatggcccgctcggc

SEQ ID NO: 333188 - DNA, 231 bp, Homo sapiens
  chr7:98030420-98030651
  hyper
cggccccacctgaggcgggcggggcagacgggggcggggccgcagggccggaggggcgtggcgtacccacctgaggcggcctggtgagcggggcccggccggggtgggcggggaggaggcggggccaggcagctggaatgggcgtggccagagggaagcgggccccccgagtgggcggggtcaccccacctgtggcggacagggcagcgaggccacggtgcgccccctcgc

SEQ ID NO: 333189 - DNA, 663 bp, Homo sapiens
  chr7:98245893-98246556
  hyper
ccatcagcgtccggcgcctggtcctggtcccggtccccgaggcccccgggattcttcccgagcgttttccgagttggcgcggggggtggaggcggggccatggagcgcgtcccggggaccgttgcatccggaggcggccgtcgtgcggctccttcccgcctcgagagtgaggtggccgggccttgacgagaaggcccacgcctgccgcgggggtggctcgcgatggcagtcggggttcgagtcccgcctggggggctgctcctgctggagaaaacgcctccctgagggcggcggcaaacgcgcagcgaggccccgtgccgcgccagaagccaccctgagaaaggggcaccgggacaccgaggggttcccactttctcctcagcctgtgacgcccgcgtcctcgggtgggttcgaggggcgcctgggcacggccagccgaggctctcgagagccccagtgtcgttttccacctcaggcctcctttcctgaggcagagcccgggacctcgcgctctcgcctcaggctccggcccacgctcccgcccggccgccaggcgcgcaacggaaagcgcccccgccccgccccgctccgcccactgcgtgacgcgcacccggccgagccaatcagagctcgtggcgcgcgccccacacgccggccccctcc

SEQ ID NO: 333190 - DNA, 696 bp, Homo sapiens
  chr7:98247077-98247773
  hyper
cgcgcggcgcgggggccacgggcaaggacactatgggcgacctgccgcgggaccccggccacgtcgtggagcagctcagccgctcgctgcagaccctcaaggaccgcctggagagcctcgaggtagcggcccgcggggagcgcgggggacctggaatggggacgctcccgagtcgggggcggaagactcgggaggatggggaaagggggcctggccctggggagggtgtgatcgtccgtgggggtgagctggacttgagggtgaaaggcggggatctagatcctgctcgggaactcccctgcgtggtatcccttcccacaccgctgctcttgctggaaggaaacgtttaaattccacccccgcgcgtcgggactgccagcgggatccgccgagcacttcccgaggtccgggctagcgaacccagacggccaagccgcgggcgccaaatacccggggacgcggtagcctctatcctcttgcaaatctccaaatctccgcgagccgggatgcgctcccgcaggccgtgcgggttgctgcgaggctgccgcgggaggtcagctgccccgggcatgtggtgtttctttctttaaatcaggtcaggctgagctagagggggcggaagtctgggggcggaggtcgcagggaggcgagcgcagggggtcaccggcgaccccagagcgcgcattagaggggcaa

SEQ ID NO: 333191 - DNA, 682 bp, Homo sapiens
  chr7:98971524-98972206
  hyper
cgcgaccggccgaggtaaggttttcactggggtctcttccatctgcctggccgccaggccacgtatccactgaagaggcagagggtcaggatgggaagactccggggaccacctagcccaagacccgcaatcaggcggctctgcaaggctaaccgggtaacttaaagaagtgaagccgattgacgtaaaacagaaaggaaagaagttaactggccggccagcgtcagcaggggcggccagtgtcaccctgcccggggacagcacccctgtttcgtggcgaggacacggagggccaagggggcggggccgggctgccctggccacgcccggaccgcctgctccccgcccagggcctgcacagttggcgcccaccggcatcagcgtgaagggagctcctcgctggctgccgacggggctgcagggctcgctagccgctcacctgcgtgtgagcgcggagcccgcagtacccgccgtccgggctcagaggacgtgactccccgaccctgcgcccggcagtccccgggggccgtgcgcccggcccaggctcggaggtccagcccagcggcggctcaggctgcgcgcctggctcccagcctcagtttccccattggtaaagcattgacggtggttgcggacggcttctgcggacagagccttgggctccgacgtctgcgcgggtacc

SEQ ID NO: 333192 - DNA, 1384 bp, Homo sapiens
  chr7:99155672-99157056
  hyper
cgcaactgtcagtttcctccgtctctctcggttctattccaatctgctcatctcccctcccgtccccgctttccccaaggacctactgagatttcgatcccacaacttagtgggtcccatctcacccaggccccgcaatcctcgccttctacttgtcagcgttgtactacactctgagcaggcacccctgtgctactcacggaagcgggaccattaggtcggccattcctcctcaccccacgacacgcacccactgggtcgggccgcctccttgcagggagtctcaaggatgggctggcgtcagggaggggcccagggggcgctttcccaacactggtcgcagtcattgttggtataacggctagagacgcccagtgagttagcatggagggcagtgggaccggaaaaagacgtggaaaagctgcgaaaacgagccttcgaatcatggacgcgcgggcccagctcctcctccgagttcctcatccggggccgtcactcacatccggggccctcactcacatccgggaccctcatccggggctctcacccacatccgggaccctcatgcctgggcggaggagggggggccctcattcgggaccctgcactccgtcgccggaagtgccaccgagaagcgccggcctcggggctgtctacagcggcccgggagaggctgtggtggccccgagcgcgagtgtgtaggtgacaggacagcggccaggcccgcccctcccctcggtgagtacccggaagccgttttggggtcgcagcggggtggcagcttgttttgccttcacgggagtagaaggaggcggcgtccggccgcggccgacggtagttcgcttccccgagagtgcgcggaggcccgggtgcgaggagggcctgtttctcttcagccctggttcattcacctcgcggaccgagggccccgccgtcaggagccggcgaccgtgccctggtgcgagctggtctgtatgtcctcactggtccttttgggactttgccttggcctaaaagggaagtgggaggagggcagcgccgggcaaggccttctgaggaccgagctgggagccgggcaggggcccagggcgagggtggtgggagggggacggcaccctcatgcgtccttgggcctgaaggacgccgctcaaacctgttcgaaccgcagctcttacctgcgttgctctcaggattccgggaaaaggccggtctagctggtctgagttagcgaagggcctgaccccaaaagtggagttttattcgccaagcccgtgtagtaaatcggagtgggctgacggtgttaccaagacatttcctagggggcctgctgttttatttatttaaatgagtttatttacgtaaacgcgggcctgtcacggtggtt

SEQ ID NO: 333193 - DNA, 388 bp, Homo sapiens
  chr7:99595206-99595594
  hyper
cgtcgtagggtacacgccctgggaatcgggggtcttccagtatagggaaccaccgagatgcgggccctccgaagtcctagagagggcgcctcggccgccggcacccgccacacttccggcctttgtgggccgcagcgacggcggtctgcggctgtcggttctgtttgttgctgtcactgctgtttgttcttgccagcggctaggtgtgtagttgcttggggctcctagcacgaggcctctgtccccaggcacgcagcgccagtctccggctgttgcgccctgggcgccgcctctctccggcccccctttgtttcctgagccagctgggaagactaaaagggtgggtcctgggagcggcccatggttcgacccttcttttcaggcatcc

SEQ ID NO: 333194 - DNA, 154 bp, Homo sapiens
  chr7:99680237-99680391
  hyper
cgaggcggggatagtcaaggaagtgaccgtgtcctggagacgcggcaaccgtggtgaccgcagtcaacacagtaagccccagcattcgcattgtaattgagctcattcaagctgagcgctctccagtagggactttcccctgtagggagcatgc

SEQ ID NO: 333195 - DNA, 455 bp, Homo sapiens
  chr7:100091142-100091597
  hyper
cgttggggggcaagcaaggacttgcttctgaggggagacgtgggtctcggcagtgcggacccgtccggtcatgctgaggtccccgaccttacccgcgttttcctttctcccccgcccgcggcacagccccaccccgcgctgccgctgcctctgcccctgccgccccagccggcccgcgagcgtgacgggaagctgctggaggtgatcgagcgcaagcgctgcgtgtgcaaggagatcaaggcgcgccaccgcccggaccgaggcctctgcaagcaggagagcatgcccatcctccccagctggcggcggggacccgagccccgcaagtccggcaccccgccctgccgccggcagcacacggtcctctgggacaccgccatctgaggcgggcgggggggtaccggggcgcctggactggggagggggcgggcacgcctggctctcccgggagcctc

SEQ ID NO: 333196 - DNA, 1061 bp, Homo sapiens
  chr7:100167136-100168197
  hyper
cgagcggggcgtggcaggagccagcagggtgcatggaggccccgttccaaagccctctaatcgccagcgccaccaccgctgccacaagtccgatcactggcctcacaccgaggctttctcggttgccccgacgacgtgtccggaccgcagtcagctgatcggtagagacgcccccacgctctctgcccctataaaggctcagtcttggggtcgaggccgcctctcttggacttccctactcaaactccagttcctgggcgacgtgaggattagtctcgtggggtgggggttccggagcggtcggcggagggagggaggtagtggggagcccaggccaggggcaacagtcaccgggacactcgctgtgcgcagagtccttgccccaaacttccagtcgggagcccgggagagacgctgggcatcaagacgggtggcagcctgcccggccgctgctcccggcccgccgagttcgccacctcacccccacccctgctggcctctccccgtgctcaagacacgagacccagccgtctctgcctcttctgcagccactttattgccttcgcccctgaatgaagcccgcaggcggcggccccggggagagccgggaatggccgccgtgcccctcagccagccgctgccctgggcctgccctgccgacgtgcggttctgcggccacctgcgcgcagacccgccgcgtcccgagtgttccgagagcgagcagaagtttcgcgcgtgccgagcgcggctccagcgcagcctgagcctggcgggtgcgtgcaccaccagcaagtgcgcagatgcgcgccagcaccacctgatcgtcctctacacccgcgacagcagcctgcgcgtggcggcggcaggcgaggcggagcagcaggcgtgatacaacaccctgctcgaggagcgcggtgatgccggtgaggcccgagccccgggcttccgggggcctcgggggcttctggctgtggtttctccgtggctcgcccctcccccaggtcgccgaaagttcaaacattaaaggggcaggtttagagttctccgggcacaggcccggc

SEQ ID NO: 333197 - DNA, 753 bp, Homo sapiens
  chr7:100202090-100202843
  hyper
gcgggtggaatgggcggcctggggttactgggacggtgagtaactgccggcccccgtccgcaatcgggctccctccgtcgggcgcgagggggcaccccagggctggggggactaggttcctccaaccccggggggcccctacacccagccctgggctcccgattgcggtcccatcaccccctcctggcggcagaagtctcccttgcaatgtttcaggcggggacctccctaaaggggtcctcgggggctgtgccccaagtcgaggacaccctctccagcctgaaaggggactctgctgcagggccggggagatgggatctcctaggggaagaggcgcggtgcggccgcgggtcggggaggggccagaagggggcgtccagccagttcctcctcccgcttccaccgcccgccagtgcgccctgcggccccagacttccccgagccgcgctcctcccggccgctctctgttaacctgcccccatcttacctccccttcttctcgtcccctcatcctgagccccagacatccgagctgcctgccggggctcccagcctagagttctcctgaagctgaccgagggtctccaccgccccccacccccgctcctctctcccctccccagagcaccaattttgcggggggcggctggagaaggcccagggaaccctgaccacgcccaactggcccgagtccgattaccccccgggcatcagctgttcctggcacatcatcgcgcccccggaccaggtacc

SEQ ID NO: 333198 - DNA, 497 bp, Homo sapiens
  chr7:100203058-100203555
  hyper
cgcgggcctgtcacttgtgagtgcgccaggacttgaccttgccaaccacgacgaccgacacccctgcagggtcccatgggtgtgtgtggtcctccgtgctgtggtgtgaacgccttcaggaggggggcccagaggacgcgggaggtgggagtgggagctgctgcaggcacccagtaggagatgaggtgcaggcgcccaggggtgtcccgccgcgcagtccccgcctccgcccgccgccaggtcatcgcgctgaccttcgagaagtttgacctggagccggacacctactgccgctatgactcggtcagcgtgttcaacggagccgtgagcgacgactcccggaggctggggaagttctgcggcgacgcagtcccggggtgaggggcgggacctgggcgagtccgggagagagtcggcggaccgcacgcacgcggctgtttggaggggcggggttcagctaaagggacgggatctgaaccccagggctccaaaccggc

SEQ ID NO: 333199 - DNA, 379 bp, Homo sapiens
  chr7:100224197-100224576
  hyper
cgctcgggtcctccagcctgaccgatctatgagcactgcgtgtccaggactgggaagagagcatccagaggaccgggactgtgtaggcggggagagagaggagcgcgcagacggggccaggtccaggaggtggagccccaggggaggggcgggacactgggggcggggcgaggagggcggggcctcacccgcattatgcgcacgttgtacatgcgtgtcagtcgctcgtctctctcctccgagctgtagatctcctgccgcagcttttccgccgcccggatgtagtccccccgcgccgagtacacccactgcagggtcagcccgcgggcctggggtggggaggcgcgggctggggctggcggcaggggccaggaccccc

SEQ ID NO: 333200 - DNA, 355 bp, Homo sapiens
  chr7:100253835-100254190
  hyper
tgagactcgacccgctcgtgcgcggaggtgacaggccccggggtgcccagagctcggatggatggcgcgggtttggaacgcagggctgcgggagccgggggcccgaggctcgctcacctccgccgtagacgcccccgctcatagtgcccgctgcgctgctagcggcccgtgggcggtggcgggatcagcaccgaggcggccggacagctcccgggatccctggcggggcgggactctcagcggccaattgggaggccggatcccccgctccaacggcgccgccgattggctgccaggcgagacaatgaccgaccgggggcagctgctttaaaggggaagatacactctattaagc

SEQ ID NO: 333201 - DNA, 594 bp, Homo sapiens; identical to SEQ ID NO: 233086
  chr7:100318139-100318733
  hyper

SEQ ID NO: 333202 - DNA, 528 bp, Homo sapiens
  chr7:100660381-100660909
  hyper
cggagtccagagagtgagtggttctgcgggaccaggaagtaagtgatcgctgtgctccgggaggatgctggaagaagattccagacgcagcttttttgcctgctatggttaccgttgctatgaaggagggcggccctgctgacccagagccagccctgtctcccgctccactctgacctcacccctgagtccagggctgaacgcacgctcctccgtggcccccgcttccaccccgtgcatgtggggggcttctgctccgctccctcctgttccggggtccagcgggcggctccccaggcaggctctgcacttacccgcagcccagtgatgcagggtcggaggggtggtcggcagtgggaaagggcgtagggcagatgccgggctgactcttccttttgccagaggaaatcccctctgccccctagtcctccccctaccaaggctcccatcactcatcacggcctctccctacagaccagaatctgagggagagcagattcggccttgagaacgcctacaacaacttcc

SEQ ID NO: 333203 - DNA, 1487 bp, Homo sapiens
  chr7:100806337-100807824
  hyper
cggcgctcctccgcctccgcctcctcctgcgcgcgccgcgcctgggcctcccggccgggatagtggcgcgaaggcggcaaggcgtggtggtagtggcggcggcgcaaggccgagggcggctgcagtgtccgcggccggatgtagttggggaaagggtggtacggccctggcgggtacacctcgtcctcctcccgatcccagggcgggagcacctcgttccagtccggcagctcgtctcgtgcgggagcgggggcggggggcgggggctgcggggagcggacgtgggtgggggcgggggcggcacgggggggcggcacgggctcgggaggggcgttcttcttccgcttccgcttctcctccacctcctcgatgatgctgaccacgtcgtccgctggcaggtggagtttggtggacagctcaatgaggctgtcgatcgtctgcggatccatctcctcgtcgtcctcctcctccccgccctcctctgtcccctcggcctccttccgccggtggcccggcgtctcctcctgggagcgcttgtcctcggcgccggcttccccgtcctcctcctccgcgaacaggagcgcgttctgccgcgccctctccgcctcctccgcctctgcctccgcctcggccgcctcctcatcctcttcccccaccctctcctccccgccgcgtctctcctgctccgcctcctcctcctcccttgcactctctcgctcctccgccgcctcctgcagcccccgacccccgaggccgcgctgccgggccccgccctgcagcaaatactggagcagcaggtccgaggcgaggtcggccagccgctcttcctgcgccgcggcctgccgcgtggcctccgcctgccgccgcccggcctccacctgcgccagcccttgctggagaaggcgctcgcccgcctcggagccgcccaggagtgcgctctccggccggcgcgccttggggaacggggcggccacgccttggtacgccttggacaggggtgccaatgcctcgcctaggtgtgttttgggggaggacactccttccccgaacttgtgggtttcgggaaggggcccgctgtcgggcatacgcgcctggaattgagagggggccgggggcggcaggggcgcgcgctccgggacacgcgcctggaactctccccaggaagcgcgccatacgcgctctggccccgggctctccagattcactcgggtcagcgtgtgcgtgcgggtttccgtctctgctgccgccgtctcctgctggcgcttggcgctacttggactgaaatctcgcagttcctggagcagggacgctagcgcctcgagctcctcggagggatcgctcgcctcgggcccattctccggagtctgagggcgaggcggagccgcgggctccgggctctccggcgccgggaggctgtgggtctggctgcgcacggtctcggtcagcagagcttcagctgcttcttcctccggcccctgctgggagcc

SEQ ID NO: 333204 - DNA, 547 bp, Homo sapiens
  chr7:100815484-100816031
  hyper
cgttgaggccaacgaggcgcggggcctggcgctgcaggtgccacagcagctggctctgcacctgcgcgccgtcgctaccgaaggcgtcgatgttgagatagcgccaagtgccgtcccctccgtgcgggatggggaaggggcgcgtgcacagcgtgagcacgcgcgggcgcgcgcggctgtccacgcgccactccaggcccttggccgccagcaggcgcaggttgctttcgctaggccggtagggctgccagtcctggatgatggtcccgcctggaagcacgtcgcgctgcacggagggtgacagcaggaggcgtgccacgtcgccgcctgcctcggacacggcctcggtgggcagcggcgagaaggtgccagaggtccgcagcgccgccagccgcgcgcccagcccggccagcagcgcggacgcgttgaatcggaccaaaaggatgccctgcggggggcacgagtgagcgcggggagggggggcgcagcagggctggcgagcccggcgcctctcggcaggcatcttcactcccacgttcacgcccac

SEQ ID NO: 333205 - DNA, 270 bp, Homo sapiens
  chr7:100816642-100816912
  hyper
tgccaccttgacccccgggtgctgtctcttgaccagctgcgagcagaagcgctgcagcagcccggccacgcccttcccgcgctcccagggcgccacgcgcagcccctccaccagcaccgtctccccggcgtcgatcacgttcaccgactccagcgcgatctgcggaccgaggccgttagcgcggggccctccccgcctgcgcccctgccagggctgtcggttcactgggctctcctcttcccacacgctgagcactccgcgtcaccaccc

SEQ ID NO: 333206 - DNA, 619 bp, Homo sapiens
  chr7:100823171-100823790
  hyper
gttttctgggtcttcggactgggaggggctgggcagaagggggcgcagccgcttggtccccctgaggggcggtggccttctgctgccccattctgcggtggaggagcacgctagccccctccccagtccccaggcccggccgcccccctacctcgccggagccggagctggagccagggccgagatgccgcaaagccaagcggggcgggcggcgggcgcagacacccccggtgccaagagagaggtccctttggagcccccaagagtcaaaggaggatgacgcgcggggactcggccgcgctgtcggagcccgactctaacgtcggtcagcgctggggcagcgccgcagctccgttggcgacgcgggccggggcgcccatcggttcaggggttcgggtggcacgcgtggctcccccggcgacgctccggcggcagcttcgaggggcggagaccccggcgacgcggaagaaacccgggacggatccggagcggactcgtgccctgctggcggggccgggggtcggggtgcgccctgggcagctgggtggcctcaagccctactggcgagactccgccctgtgtcccggctggggagtgggactgaggatggtggtgtctc

SEQ ID NO: 333207 - DNA, 433 bp, Homo sapiens
  chr7:100845050-100845483
  hyper
cggacaggcgaggccaggcggtggggcgcgcctccgtgaggaccaggtgtctgtcggcggggacaccatagcgcgcctggtgctcctcgaagagctgcgtgagtcgccccacgtagcgcgcttgcagcgtgtccacctgggccggactgggcggggggctctgctgcacgggaatcgccgaccccactgcgggcgggacgggaggcgatctgggctgggatccccggttctcctcctcttttcctccttggggataggcgggaacagagttcagggctggcgcggtggccaaaggccagtctgggtggccccaacccgggacggggagggagcgggccctgggccaggatcgcggggcggaggccggggctcacctacggtgcggatgggcgcgcggaagggcagcgggaggccccggcggcccaggaacagc

SEQ ID NO: 333208 - DNA, 171 bp, Homo sapiens
  chr7:101006949-101007120
  hyper
ggtggtctctggccgcgcccaccctgtcccttcctttcttcgcttccccaaccttcgccccctcgttccgggctccgagtagaggtggttccgaccgccgtggctggggctggggctctgcccggggcgttcggccgctcacgtggctctgccgctcacctgcgcggctgc

SEQ ID NO: 333209 - DNA, 484 bp, Homo sapiens
  chr7:101460545-101461029
  hyper
cccccggtgacctgcggcgccgggtcccttccttgcgtcccctcggggcttctgccctctctgcagggcccgccatggagcgcgcggcgggtgcgctcggagatgccttctcgggccgggttctcgaaagcagagccccgggggcccgttgggaccgtggcatgccgggcggtggtccgcgcgcggagtccccggcgccgcggggggaccgtgccggggctccccggcccgcgcccgagtcgccgccgtgcccaaggggcgagtgcctgcctgccaccccccgcccggaggagcggcgcacccttagggtccgccccgcacgtgccagctcggcgcccgcggcgccgggacagccccgggactctgccaggtggatgttgtgcgtagccggagccaggttgaaggtgagcggcgtgtgggccagaagtcccgaggttgcaggcgcggagggaaccggggatgtcggggggtgcccgggtcccgc

SEQ ID NO: 333210 - DNA, 1160 bp, Homo sapiens
  chr7:103085750-103086910
  hyper
gcccggcccaggtgcgcactagatgaggcagtcaaccaagtcaattggttcccgatcaactaaatctctcctaaaaataaacactgccgcgagcttcgagagttcagcgtgtcagagcctctatgatggcagagcacctgccgcgatgcctgattggtagggagaaggatttcccgggagggggccaataccaaattttagggctgttaggctctgagcagtcccttcgtgaccggataagtcagagacccggggtttgagccttgcccggcgctgagcggagggcccagtttcgggaccacagccttgctccctgggagctccgggcggccaatgccgggcaagcccagcccggcacaggaggaggcagggcccgtctccggaaagagggccagaggcagaactgagggcctggttttgtgtaattcgatttggatacaaacaggccagacccaaactggaaacggcgaagggctggattagcaccgaagggattcgaggaggcaaacgggaagtaaaaatgctgtgtggagctgcagagggcaaggggacaggggttgcaaaggaaagagcttcgtgagactttctccttcccggcgtagggaccagcagagtgcgggcaggtcagccctgtcaccggttcgtttagggaaaaagcgcgacatggggcctgggagacaggggcagaggcggtgacagcgagggcccctgctcgggtgggcccgcgggcctcagctcagtcccctcccgagggaccgcgacccccggccccgcggccgcccgcgcgcactcaccagcccgggctgccctgggcggagccgccccgccgcgctccacagccgctgcctcttcgacgcgcgcgctgcctccaggtgcggctctaggaggaggcgccgcgggcagtgccggccgcgccccgcgactcccggtaacccgagcccgccccgccccgctagggccaggccccgccgccaccctccgcgctgggacgccggggcgcgggcatccctgccgcctacggatctcttcccaagcacctagaactttccaaagcgtgcttggaatttaacaccttggtcgtcgatccccgcaaatatactctgatgagaccggctttcttcccataccgcccaggagtttctccaggtggcattcctgtc

SEQ ID NO: 333211 - DNA, 975 bp, Homo sapiens
  chr7:103629365-103630340
  hyper
cgttcggggagtggggacatggagaatgaatcccaacttgtgactccattctccactaactttattctcgctccctggaccaagcgcatcgctggggccagggttgtcatggttcttgtttccaaggccccttggaagaaggaaagggatgagaaaggtgcgctggcgggcgcacccggcggcggcgagcgcggaggtgctgcggtacctaccatggtattcttgtcccggaacgtagtaggtggggttgcccgcaatatgcagggaaatgagcacctcgccctgctccccatccccttccagctccccgtggtgggtgcacaggaaaaagaagggcgaaaagcgggggtaatagccagccgccgcgcgcgccctcagcgtcgcccccagcaacagcgctaggaggaaagtctgccgggcccagccactgcgctccatgccgccgccgccgccgccgccgccgcgcgccctacgcgccgctcgctcattcagttttggagacgccgggacggaggagccacgcggagagaaggcgagaagaaggcggacgggagcggaacgggctcgggagcgggcctgggagcgggcccccgccgagaagttccgcgggagacggcggctcccaaagttactttgggccgcgggagcgcgggaccggggctgcgggcgccgagagcgcgtcgtctgccgcctccgtgcgccgccgccgcctctgcgcgacgcccctcggccaggcctgggaaagcgcccgccccgctccacaccttcttaaagccccgggcgccgcgtcccccccgccgccgccacacgtgtcccggccgctcccccgcccccgcgcgccgccccgcccgccccccgccctctcgggctggctcggcggcacctcgcgcggcgaggggcgcacgcgtccccggagtccccggccagcgcccggttcgcacccgggaggacagggaggggcgcccgccggggagc

SEQ ID NO: 333212 - DNA, 1218 bp, Homo sapiens
  chr7:103968866-103970084
  hyper
cgggaggcgccccgggcttgcgcgccgcggtgctccacgagggatttgccgccttcagctgcagcagctgcagcggcggcggcgggaagaggggtggagggtggtgaggagggccggagcccgggccaggagggagggaggggagccgggaggctgtgccaggcgagccggaggggtgctccgcgctcccccgccctccttccgggagcgaggatgcagactctgaaactggtgctgctgggctgaggcggaggcaggggagttgcagcgcgcgaggctccgtgagtgtgtctcctgcgcgctgagaggcggggggaggcggaggaccaggaggaggaggaggaggaggaggagggggagaatgcccggagccgccgccgctgccgccgccgccgccgccgcgatgctcccggctcaggaggctgccaagctgtaccacaccaactatgtgcggaactcgcgggccatcggcgtgctgtgggccatcttcaccatctgctttgccatcgtcaacgtggtgtgcttcatccagccctactggataggcgacggcgtggacaccccgcaagccggctatttcgggctcttccactactgcatcggcaacggcttctcccgggagctgacctgcaggggcagcttcacggacttctccacgctgccctcgggcgccttcaaagccgcctccttctttatcggcctctccatgatgctcatcattgcctgcatcatttgctttaccctcttcttcttctgcaacacggccactgtgtacaagatatgtgcctggatgcagctcacctccggtgagtgcgcgctcacctccgcggaggcggaggaccccggggcgcccgagccggggaggggccagagtgggagggacgggggctgtgcgcgccgctgcgagccaagccgcctaatccgctcaggcgtcgaggtgtggggggcgggagcccagcgaggccggaacccccggggttccccagccccggcgctggcgcctcgtcccggggctttcgtgagcctcccaagtgtgggggacgcccactcagagggacgccccggaggcagggcggttgtggggccgagtccgctcagaactaaggatggtgggtggagaagtggccgcttagagagatggggccggggttccgtgctgagggactaaggagggactgacagggcgaagtgaaaagcggatttggagaggtcatagtg

SEQ ID NO: 333213 - DNA, 1328 bp, Homo sapiens
  chr7:106684813-106686141
  hyper
cgggggttcaccatggcgaatgacgcctgggaagcggggcgagtggccagcccgctcctggacgcgcggacaggtggacacgaaggcggcctcgctgggcctccctccgcctctcccggcccgggcgcgcagccctgcggtggtctgacaggcgggtgcgcggcgccagccagcggaggttgccatggtttccgggggtcacgtgggcgcgctctcctgcgccccctcccgcgcaccgcggcggggcgggggcggggcgcccgggcgggggagaggcgcggccgcggctggagcgggaggagcaggagatgctgccagccctcccggggccgcgctcgctcagccgccgccaccacacggagcagacgcgcgccgggagccgcgggccgggccagccgggccgccggggcccagtgcgccgcgctcgcagccggtagcgcgccagcgccgtaggcgctcgctcggcagccgcggggccctaggccgtgccggggagggggcgagggcggcgcccaggcgcctgccgccccggaggcaggatgagcatcgagatcccggcgggactgacggagctgctgcagggcttcacggtggaggtgctgaggcaccagcccgcggacctgctggagttcgcgctgcagcacttcacccgcctgcagcaggagaacgagcgcaaaggcaccgcgcgcttcggccatgagggcaggacctggggggacctgggcgccgctgccgggggcggcacccccagcaagggggtcaacttcgccgaggagcccatgcagtccgactccgaggacggggaggaggaggaggcggcgcccgcggacgcaggggcgttcaatggtgaggaccagaccccccacttcgcgcccccggatcccctcgctgccccccaccgctccccgctgtgctctcggatcttgccgctttgcgcacccacctctccccgcattctccacctttccctaccttcccatctcgcccaccccctcagcatccatttctgtctctcccactcgcccaccttcctactccgctctctgtcataccctcttcccttcctctagaggtgggagagctgggatgttacgcttccctcttaccctttgccccctctgcctgggccggttggggtgggcatctgctagaaagacaactttcgctgtggttggaggtatttcgcttagaggataccattgtgcataaagaaactggcccgcttggcgtcttctttcagcccttgtatttattaatggaatgtcgaaagagaaaaggagaaccgtgtttaatatgattggctttactgttgttaggacggtagattc

SEQ ID NO: 333214 - DNA, 1228 bp, Homo sapiens
  chr7:107300997-107302225
  hyper
cgcccctgacctcgcaacccttgagattagtaacgggatgagtgaggatccgggtggcccctgcgtggcagccagtaagagtctcagccttcccggttcgggaaaggggaagaatgcaggaggggtaggatttctttcctgataggatcggttgggaaagaccgcagcctgtgtgtgtctttcccttcgaccaaggtgtctgttgctccgtaaataaaacgtcccactgccttctgagagcgctataaaggcagcggaagggtagtccgcggggcattccgggcggggcgcgagcagagacaggtgagttcgccctgaagatgcccacaccgcccggcccgggctccactcccggggaggcctcgagggttgcggatgggactcttaagtggtcacggatcaggtgggcagggggcagtacagctttctttctgagacgccgagagcgaacaggctgctcggaaaacaggacgaggggagagacttgctcaataagctgaaagttctgcccccgagagggctgcgacagctgctggaatgtgcctgcagcgtccgcctcttggggacccgcggagcgcgccctgacggttccacgcctggcccgggggtctgcacctctcctccagtgcgcacctggagctgcgtcccgggtcaggtgcggggagggagggaatctcagtgtccccttccagccttgcaagcgcctttggcccctgccccagcccctcggtttgggggagatttcagaacgcggacagcgccctggctgcgggccataggggactgggtggaactcgggaagcccccagagcaggggcttactcgcttcaagtttggggaaccccgggcagcgggtgcaggccacgagacccgaaggttctcaggtgcccccctgcaggctggccgtgcgcgccgtggggcgcttgtcgcgagcgccgagggctgcaggacgcggaccagactcgcggtgcaggggggcctggctgcagctaacaggtgatcccgttctttctgttcctcgctcttcccctccgatcgtcctcgcttaccgcgtgtcctccctcctcgctgtcctctggctcgcaggtcatggcagcgccaggcggcaggtcggagccgccgcagctccccgagtacagctgcagctacatggtgtcgcggccggtctacagcgagctcgctttccagcaacagcacgagcggcgcctgcaggagcgcaagacgctgc

SEQ ID NO: 333215 - DNA, 785 bp, Homo sapiens
  chr7:107641955-107642740
  hyper
cgggaggaggcgctagcagagcctcgaaccccgctctcagccctcacctgcaagtggctgacgatacagtagggttcgggcttgtgcagcccgcacgtcgaggtcaccgaaagcttctgtgctcggccgatgagaaggtcgcccgtggcgggatagcagctgccttctgcgcagccgtagctgaactcgggttcctgagcgcgcactcgggctctgcacagggctgcgggaaggacaggcaacagagttggggggacacaagcagggagtggagcccgaaaaaaacgaacaagcgggggcgggggagtgggtgcggagagaggacagtccattcggaagaaagcaaaatgcacagaaaagacaatggagagatgagcgcaggagaggctgggaaggcagggactccgaaaggagaaggacacggaaagaaacccacacacgtcatcaggtctgtccagcagcgagagcctccctcccgggaaacccaccgacgctcgcgcccaccctgatcagccccggggagcagctcccccaacaaagggtggatgtgtagaccctccacttcgacgtgtccggagcccggcgcagggaggctgacccccaaagggccacacacccacgcacgtgaacccgcgtgcacgcggcagcccgcgcatcctcggtgtgagtgtgcgcgtggagatctgtgagcttgggaagcgagagtgcgtgtgcgtgcacgcgcgagggtcaccggcgcttcgctggggacgaggcgccggggctcgcggtggacgccgctttcc

SEQ ID NO: 333216 - DNA, 932 bp, Homo sapiens
  chr7:107642811-107643743
  hyper
cgccaggtcctgctgtttctggtgccatccggagacaaacagagatggttaattaaagccacatggcccccatctgttcccagaatgaagcctccgctcagctcaggcactctcctgggcaatggatttttggagagccctcctcggtcagcaccgccaaccccagggaacctgccctctgcggtggggaaacccagggtgaaccggccgagggtgcaaaaccctgagcgggggccgcgggaggccgcaggggccggggcttgggcgcagagcccgggggatgagggtccgcggcgctccgcgtgcgctgtctccagccaccaccgaagcaagggcggtggcgtttaatcccaggggcgtcatttccatccagtccctctcccaagcccccaggatcccacgaaggtgagcaagcagcttttgggttttccttccccatgcccaagtccgtccgcctccccgcaccgtttccacggaattacctaagaaactgaaagctagcaactggagaagccccatgccggctccctgcagccacggggacgcggcagaggagtggagaagacgcccgccgagccgcctgccctttcttcccgtcttcctttctggagaggtggaaaggaggggaaaaaaggcaaatgttcaaagagagaagaggcgcccttccatttcctgtcgctcccacggaagcggggggtgggctggaaagtggggaaaatcgtgcagccactttgttctcctcacccggcgacgcgagctctcgccctgctccgggagcccccgagcccaaagaagggaattagaaagtttagccttgggaggaacagagggaggcgcctctgctcatgcgcatacggagagccggggctgaaggggcgggcggccgcaactctgcgaggaccgggtgaggtcccggtcccaccccccggggc

SEQ ID NO: 333217 - DNA, 2444 bp, Homo sapiens
  chr7:108095249-108097693
  hyper
cgaggaagagcccagtctcttagacccgcacttctgagcgttaaccatctgggactcggaaaggaaaagaaagctttcttctcaggacagttctgcgccggtggtagccaagggctggagcccctgatgcgaagaaaagggaaggagagaggcggggtgcgaaagaaacgccaccgctcggcgccctccctcggtgcccgcggcgcaggggccacccgccagcgtacgggggacgaagatgtggccgcgggcgcgggcgggaggggaggcgatccggggaaggaagcggcctgttcgccagccccggggcccggggagccctccagcagcgcttgcggccctgaggacaccgctttgggagaaatgacgactcccttgctcaccctactgcgacaccccgtccccctccgcactctagcagatgcgggccgggagtagctgagctggccaaccgcctgggaccaggatgcggcagcgcccacccgcgcggcgtggagggggccgggggcggcgctcggcgcagatggcgctcgctgcgagatggatgctccagggcgggtaatcactcctggctcaacacagcatcccgggcggagcggatgccagatcccaccgctaagagcctgggctgggaaagcaatctttccaggcagcccccagcccggtgcgccggccccgacaagtcccagccctcggaggcagggcggggcgcagggactcccgggacccgcacctgtaaggccgacaaagcccccgcaagcgccccacccctctgtcctccgtgtctctctcgttccgcctcgattccccgagccctctccaggcagcgactggagaagcgaagtcggcctcgcccccgaactccgtggtcagcacaggtgtacgcacttccgaacaaagcccacgcccagacgtgtccgcaggggcccgaacaggcacacgcccgtgcgctcccggcccggcccccgcgctcctcgccccgccggcactgtggcgtgacgccccgcgcctccgtgtccaagcccgggaagccgccgtgccgggcccgcaggctctccatgcccaactgcccacgagcaagagctctgggcagggcttcccggaaagcgtggggtgcgggcgcggagcagaagttggccacaggctggagggggtggtgggtgccggcgctgctggatttcagctgtgccttcacccaagcgcaggtccccctgctccctctcggcgcccgcgggagtgtcgggggcctgcaggggagaagggagttggagatctgctttgcccctcctgcagcgctgccagcccggtgagcgctcggctgaaccccgcggcggtgtccaagtgacaacgcagcagcctcgcgcgtcctcctccgctccagccgtcacccccgagcaggacccagtgtcaccgccagacgcgcaaggagctacttacgttctcgcgccgcgccctccgctcagctctggcgcgactgcccaggaccctggaccgccggtgtcctccgttctcgacgaagctatcccctctggctgctccagccaggcggcccctgcgccgtcccccgcgcccgcgcgtctgaggctcggactgcggcgcgcgtccgccagcgaccctggcgaagcgaggctggccccgcgccggcgcgcgcccccgccgctcccgccctctccgctccccctccccgcgccgtgcttttgcccctcccggctctccttagcgtcctcccgtccccctcccccgcactccctgcgggcgtcctccgcctcctcccctcctggccaaccccctcttgccctgctgctgcgacggcagcgaatgggctccagccgccggcgcctcgagggactgggtggcccctcacctgagcggccgccccaccgccaacctccgtcagcctgcgagcgcgtgtggcggcgggggtgggggtgcggggacggagggcgggagtgttccggggctaggatggctgggatttagctacaaaagatgttccagaaaatgggtagtttttgaatgccactctcatgggtttagctttctgtgggaggtctgtggtcttctagttttttcttttttaaaaagcactttcttcgaaattcatcagttggggtggttgagattgggtgagtggttttgggggttttgttttgtttttgcaaccgttctttccaaacactccccgccgccccccaccaccgcagaaaaaagagcttttagcataaggcggatgctatctatccgcggtagaaactgggtcttctggtcccaaggaatagggttagttcggatttgcttatttacaaatgggggagtattatggagattttttttttttttttttggcaatgtaaatcgagaattaagattttccaactgtatagtatttgagtaaacacactgcttgctgcatagttcaggctccgaagcgcacgtctccactc

SEQ ID NO: 333218 - DNA, 235 bp, Homo sapiens
  chr7:111844236-111844471
  hyper
aagcctctgcccaccgcttgtaaagaaaggcaagagaggaactaatcgataccagcaccccagctgtgacctggcacatgaagaaatcaagaaaataaatcccatccataatctgtataatttaacacttggaagaaagcaacatctgggatcgactccaagcaggacagttttgcctggatggatctgagcttcctgcactgagtgttaaagccgcttaggaggcgatgccctc

SEQ ID NO: 333219 - DNA, 702 bp, Homo sapiens
  chr7:112429912-112430614
  hyper
cggcctccttctagcgagatgtgggaggtccgacaaggagcttggctgttctccaccatcctctgcctcggagaacgcgaccacaacgtggcgcccagttgagggggaacccttgcgaaatacggagaggcgctcccacaccctccaatctccaaccaccactgtcaactcctccagaggcaggtatcctaccccggccctgggaggccgactgggcggagcttggggtccggaccacgcggagccctggcagtgtctatgcctagatctcgccgccctgccgtccacccatttctccctacctgactcggccgtcgccaccaacgcgctctcccaaccctcggagtcagttccaaaaccaaaccaaaaaggaggagagcagacaaggcttcagcctgcgactgagaacagggaggcggcacgccttggggaacgagggcccgaggccatacgcgctaatacaggccagtgtcggcgtaaactttctccgttaccggcccggccgcgaccgccatgtttccgccgccgaaatccgcgacggtacggaacgccgccggggtcaaactgcgcggcgcgcctccttcccgaggcccggccccctccccgcccaaacccgcgcgccgccacacactcaggtgagcaaggcgctgcgcgagtgtcaactgccccacctaaggcgcctgccttcctcaagccaaagtc

SEQ ID NO: 333220 - DNA, 376 bp, Homo sapiens
  chr7:112726534-112726910
  hyper
cggcggcgcctgcgcgctggagcctccttgagctccagccgcgtcctcccctgtcgcagcggcaccgtctcccccagtaacgcaggggccgcggcggcggcggctgcggtggcgagggcggcggcggggctgcttcagcctctgtggaaccagcaggaacccctacctgactccagagctggctgggtttattgactgccctgtccaatccaactggcagcattaagcttttgtcccttcgtggctgcttctgaacttttccctccccgcatttgtagtggggggctggaaaggccctttcaggacctcaggcccatcctcttcccaaaggcagcgcacgaggaagtcacagtgcccgtgacgcccgccccctccc

SEQ ID NO: 333221 - DNA, 1045 bp, Homo sapiens
  chr7:113722711-113723756
  hyper
cgcgtgcgtcgctttccttcatcttggctatacttcctctcatctgcggtgttttatttcgcgcaagatgcgctgacagaggccatttcaaacgaatttatctttcactaggaccgtactagagcagtgtctcgaattttgttgatttgtggtttcgtcgtaaaataaacttgaaatcaaataaactttcgtgaggaagctttgatgtccacttggtgaaactcctcattcacccagttgagccgttgaactttcttctggaacctctttaaatgacttttgccgatccacgtgctgcaaagaagacctgaaccgtgcctatgaccctgcgcggcgactacagggacagaatttggctttccttctctttccaatatgcagcgtttcgtttaaaggctgcctcgatccagtgggctgaccagtgacttgtgcaaaagaaaactattcgatcgctgtttgccctttcagcgttttcctcggctgcggaaacccggttttcctattattatacttcaactttttttggagtcagctagcacagagcgctaaaccccggccagttccagcagcagccgaggcgaacaaagcctgcagtgttcggggccatgctggggcgggagtggtggacgagttcaaggaattgcaaataaatatattttatgaccacccatcaacaaactacgtgccaccgtggcggcccctggtagccgggccgtgtctgcagtgtggccaggggcgggggctgaaaaggaggcggccggagaggcgaagcgagctgcgagccccgggcctgaactttcacctctcgaacccgggcccagcccattggctgcagccgaggggtccaccgagggcagcggctcctgacaggacctgttttcccaactccctggacagcttccctgcgggatgggttggtggcccggggcatggcagcaggcgaggaggagataatgggggcgaagttgagcgggggcacttgggagctgcgggctcagtttcactgagaaaaaggccccggaagggtacgcgtccactctataaa

SEQ ID NO: 333222 - DNA, 1700 bp, Homo sapiens; identical to SEQ ID NO: 44615
  chr7:113724594-113726294
  hyper

SEQ ID NO: 333223 - DNA, 1440 bp, Homo sapiens
  chr7:113726354-113727794
  hyper
cggctgcgcgagacagcgcgagcctccgagaaagcgcgagacacgccggcgcgtgcagctccgcggccgccgcttcgccctagctctagccccgcgccacccgcagcccgcccgcgaacgcccgccccggttatttatgcggcggccgcgtccgctggctgcggcttcctcggccccccccctccccgggcgcgccccccactcgcggcagcagctgcccggactcgcgcgtgggtgtgttgtttgggggcttctgcctcgccgccgcgggtgccacctcccgggacgctgcccacggcgtccccggtcgcggtaagtttcttggccctcactctggcgcgctacacctccgcaccccaccctgtcccagccacctccacgctgggccgagctgcgactttactctgctccgcgctcctcccgcggtggcgacaaagtttcgccccaaaggcagcgccctgcttgccggggcgagtgtgacatgtgtcaaatttgggctcggcgttggggtcgcattccggacccagcatcaccacttgttgttctctttcattttgctttgtgatgggggaaaaaggggtggagaggggagatttgctgttggctcacggatgatttttagtttggataatgcaaaatgttgcttcgtccggagagacctcggctggaggagaatgtgtgtcgaaacaccagatgtgtgtttgtttactctcttctttttaattgtttgttgtcttttccccttcctccccgcacccccacccccaacctcgggaggagaaacaacagtaaaaacatctggcggttagaagcacacactttattgatccaactgctgacctttatttactcagttgggcaagtgcacgcttctcgcgtctaagttgggcacttcagcgttcatctcagaagtacttctccaggaaggagagagatggaaaggggacactcctgtttctggagtcaagaaactcctgggccctactgacgcttcgggataaccgtgcacagggatgactgctgccttgatcgcgttcctttccctgtccacgcgttagcacgaccggcttcccccggtgtctggcctggttttacttttattccgctttagagaggtcgcctggctgtttgtgggtgggtttggggtgaaatcgcacctcgcggcacttggtgaggggacgtgggaggagcgcagacacctttcggtgatagggagggcttctcacttggctgttacctggaagtccacagtggccccggcgggcaggcgggcgggcagagcgcgggtccgaacgcccttcgcgctcgcggcggcgcacgtgcggcggcggcggcggcgccggcggcgcgggcgggacccactgggtggccgcgcgcgccacccgcgcgttttctgcgcgcctctgcccacccgcgaggccgcaacgcgccctgacaccc

SEQ ID NO: 333224 - DNA, 1164 bp, Homo sapiens; identical to SEQ ID NO: 233154
  chr7:114562236-114563400
  hyper

SEQ ID NO: 333225 - DNA, 293 bp, Homo sapiens
  chr7:115117321-115117614
  hyper
cgagccgccagacgtgagctaaagaaggtgctggggggcagaacgggtactggggcgcctggaggagagttgaggggcctgaaagactctgggggcccagctcggtcggtgggtttattccaagtgccccgtcccaggcttgcactccccaaaaaggagccgagacgggagggttgaggcgtctcggctgcctccgtggagatcccgagaaaagctcctgcgctccaagttaacttctctctgggccgcgcggcgcagtggagtctcggtgcagcccgcgtccctggaggcgc

SEQ ID NO: 333226 - DNA, 90 bp, Homo sapiens
  chr7:116759594-116759684
  hyper
cgcttatttttctgttctagatatttgaatggtggtattttcgcaaatacggaacttcattcattgaacaagtctcagtaagccacttgc

SEQ ID NO: 333227 - DNA, 948 bp, Homo sapiens
  chr7:116962854-116963802
  hyper
gagactgctgcggccgcgggggaacgcagccaggaagggtctatgtggccaatgcggtccccattccgatctccaaaatcccccgcgcccgtgcgcgtggacttaccaccatgaagagttgacctcgggggtgagccaggtcaagagcagagggagccagagccagattccaccgagaggggcgttcatattaacccccttgcgtctgcatcaggtcagactccgtgtgcgggcgccatgcgtgcccagagcagaagcgctcagctccgggagcgcctcgtcacggccgccggcgcctcgccgcgcccccgccccccgctcgcgtctgcgacgagtggcgagactcgctgataaagtttcaaacgatgggcccagcgagcgataaaggccagcccggaccgcctcgcccacagcccaattccccaggcgcagcgagcgcctgcagcccgaaagctctgcgcgcctcccgcgcgccccgtccgctctgctcccctccgggcgcagccgagggagggggtgctgcgcctggcgggggtggggagaaacgcggggttttagacacgggtgcatgaaatgatggcaagagatgtctggggatgaggtgaggcggggaagggggaacatcgctgcatggttacgagcacacgcgaatacaggaacctttagggaagctccaggccaaagagcatccgtgggctctcggagcgtgcgttccggattgccgaggccatccgctggcaaacaagtccctgagcgtgcaatgtgaggaaacgaggaagggggccaggggataaggagattactatgcatgggatacaagaatccagagatgattctcaactcattgcttcgcttctctccctgaagctgggatgaagagctagcacttgtaaatttggagctgccgcgtctatgcagggcaaggttagggaggggccaggcctctgc

SEQ ID NO: 333228 - DNA, 791 bp, Homo sapiens; identical to SEQ ID NO: 233165
  chr7:117119487-117120278
  hyper

SEQ ID NO: 333229 - DNA, 854 bp, Homo sapiens
  chr7:117512802-117513656
  hyper
cgctggcctcagcggcagcagcgcccacatctggacacggccctctcccagtgggcctcccgaaggcacaggaccagatgcacacaatgggcatccccacacctgctgggcgatggcccacctcccccaagctgctctcccgggtccgctgagcggtaccaggcacccccgagacacgcgctggcaaccacgcgcgcagcgagaggtgaacaatggggggtcaaattcgccaggaaacacgtcccagccttctcccccggccagaagcgaccgcagcggagggagtgggcataggggtcgcactggacgcagacagggagctgggagaaccgggcgacccggggccgcttcccgtggggcgcggaagggacaggagggatccccagccagggtggccgctccgctcccccccgcggcctccgccgtgtgggcatcccgaggaaggggggccccgatgaaggggcaccggagagtcccgggcttacggaacgccccgggggtgcgaagtcgggtccggctgggaccccggcgccgcccccggcccgcgtctacactagccccgcgcccgccccgggaactcggttaccgccgcctccgccgcggcccccgccgcgtcctccggggcccgggacaagtcgggctcgcagctcgcgccgtccgtcgccatcttcctgctctagcggatccgaatgcgagctcggagccgcggctccggactcagccgtctccgcgcgggcggcacttaacccgctgctgtccgggacgcgggcgcctggagccgggagccgggagccgcggcactccctccgcccctcgccaccgccctcgccgcttaacccgctgcgcgccggagc

SEQ ID NO: 333230 - DNA, 1478 bp, Homo sapiens
  chr7:119912404-119913882
  hyper
cgccatccacgccatctagtggcttgtatgtgttacgtttggttttaaggatgattcctaatgactcgggggcggggtacgcgaaaaacaaaaaggttggtagcgacaattttcctgtgtctctctacctcagtaacccctcatacgaacacctttaactcttttaactattttaaatatgcgcagtgatgcgcagagaggatgaaggggacgcaaactttcagagacgcacgccccttgacgatgacatttagaaaagggctccacatccctgttattcgtaaaggacgggaaaaggagttgtgtcaagacctcgatcgaggagagtctctgattttttggcaagttggacagatggcatatcaatccctgcaacgttaacaatctggttttgaaaataaataaaaacagaaagaggaaatgcacttaaaaattccgcgtcggagctttgcgggtcttgccttccagtcgcccccagaagacaaccaattcctgcgcattccgctccgctcaccctccttcccagcttctctcgctctctttccccccattttcccacgctcgccttgaaccgggactcgagaggcagaagcaaggcacgggtcccctttctcctctcctccaccaaaccaccgcagcccagcacgtgaagcttccctttgttcatccgaggctcgcttttctccccagcagatccacctggatgctctccctcggtgacattttgcgccggggttggtgggtggctggggtggagcgagaggagcccgagggggcgggggcggagaaaggtcaagccgagggaaaggcaggagacgcctttcctaacctgcgtggcggggcgtgcgcgcggttatttatttattttctccttatttattgatcgcactagcagagcagcgcggggagcccggggagatgcaggaccacccactggcggggaagcagctagcagccctcccgcgcccccgcgctgccgagcgccttctgcctccgcgctcggacgagagcccgtgccggccccggccccggccccaccgcgccaacgccgcccgcccggccgccccgcagccccgccgccccgcagccccgcaccgcgctggccaggctcccgcgacagtggccccgcagtaagttggcaggagcgagtcccctccgttctcgcctcccccgcaccttttgaacttgttgctgctgctctgctcgcctgcgcctggcttttggaaggtgaaaaggaggagggaggcacggagggatgggggaagggaaagaagagctcgcttgagctttatttatgctctctcggcgcatcggattcggctgctcgcgagctgctttctctcctcttccctttccgggtgcacggcgaggagaaagtctctatgcaactaagccccggcgcgcacttggccaggtatgtaccgcgggagcggcgcgttctgcgcggaagcagatgctgctgccgccacggcggcggc

SEQ ID NO: 333231 - DNA, 748 bp, Homo sapiens
  chr7:120496826-120497574
  hyper
cgtaagggagaagccccatcctttcaccacatcctactcccaagggcaaaacggcagcgatctgcagggggcgggggagagagaacacgggacatctcaccatcacgcttcccacagcctgcccgtccctcctccacccgccctcagcagggtccagagggtcccgaggcccagtgcattcgagacatcgcctcatcaaaaatcatttgttaaaatcataatggtaactaaactcccaaaagttccaaaccggcttcagataacacctgctgggaaaagaaaagagcaactatccggatgaatgaagtcgcacagtaaactcgcgttctcaggggacacgcggcggagccctgtgcattctgatgagacgctcttgaaaacctccctcactccacgcccctcctcgaggacagctgtgctcggcactgtcctgaaggtgagaaaccacactgccccctaccccggacacgtcagaggcgccaccggcaagcccgagagaatgagcgcccttctagttaggacagttcctgggcactccaactccgcacccctctaccccgtcccgcagctcgggtgtgaatgcaagggactggggcggcggggcgggggcgggggcgggggcgagggggcagcgcggagttgagattccgcccggctactagggtttctctgggagaacgtgagaaatgatgttttcggccccagaatgatggattagcctgggacagtgggcggggggcggggggcg

SEQ ID NO: 333232 - DNA, 1415 bp, Homo sapiens
  chr7:120969345-120970760
  hyper
gatggacagggcggcgctcctgggactggcccgcttgtgcgcgctgtgggcagccctgctcgtgctgttcccctacggagcccaaggaaactggatgtgagtatggaggtggcagggaagcatcgggtaggtggcaaaaggggtgcccaatcctagggaactttcaactgaggctgggggagaagggcggggacccttagacgagtgacctaatttttcggaaaacatctggaattggggagcggcttaacgctacgggcggccgtgtcttacaggtggttgggcattgcctccttcggggttccagagaagctgggctgcgccaatttgccgctgaacagccgccagaaggagctgtgcaagaggaaaccgtacctgctgccgagcatccgagagggcgcccggctgggcattcaggagtgcgggagccagttcagacacgagagatggaactgcatgatcaccgccgccgccactaccgccccgatgggcgccagccccctctttggctacgagctgagcagcggtgagtcctgggtccttaggggttggtgggggacggaaggcgacaactcctccaccggttcctgcaaataaagtaaatagtgctacgtggtcctgtagctctctaagttccagaagaagccctttagtgcacggggattgagagctacaaaggccagacctggggagcaggtgcgagcctggagggaggtgactccccagttccagagcggagctctaggggctggagctcttcctctttcctgcggtgccccgccagagttggaaaaaaaactctaattctcctaccccgccgaccccctcggaccccgtagcgcccccctacgtgggtgaccagctggagaaacatgatgtcggcagcggggaatgcggctgccgcatctgctttgatttaaccaactccgctgcgcaccaaaccccggacaagtggctaattgcagcgaagccccacctttattggctcctaggagcaccgagttgacagaataatggtgacttttaaagcgactgtccgcgaccacccaacgtgcggctaacctgagcaggaccacttgtgcgcttctcgtttctttggcttttctatctttccctcctcggcgcactcccgcggcgcgggaagctgcaggaaaacaaagttccacttccacgtgcgtagtgacttggtaaggataaaggtacagggagccaggattgttcctggaatatcaacagatccaaagaatgttaggactggggcgctgaaggatgcgctgtcgtttttcatgttcatttccgttccccctccgcctttgacccttgtccacgcagtccctgcgcgcacccccgccgagccgcgcacctcccccgcggcgttctggccggcacgcccttccgaaggagccctggtcccc

SEQ ID NO: 333233 - DNA, 562 bp, Homo sapiens
  chr7:121512771-121513333
  hyper
cgcccccaccgcattctgattggacccacttaagcatctgcagaaaacaataaaatgaaaaaaactcttagaggtgaaactcaaaggtcaacctctggctgtgcgggacaatgggtgtccggccttcccttcccttcccttccgaagtgatgaaggagttccaatgttctgcgaacactggaaaccccagcggatccctctaactccagggcagcgaaaccactggcagcggacagagggaggattgtcggtgtgtgaattgctaccctgggatccggacccagagcggcagccgcgcccctccgccccccgcgcgaccccgggtccgaggcacgctcccagcggagcggtcctgcgcccccgccccctccaggagccgcggcgcgcacagccgggctggagcgcgcacccggcactgaggcttcgctgctctcggagcgctcagaccgcggccgccgcagccggcgaaagaggcaaagtcccgcacgccggaggacatgcgcctcggctagcggccccgggccccaccaccgtgcggctttctccagattattcctctctc

SEQ ID NO: 333234 - DNA, 894 bp, Homo sapiens
  chr7:121939737-121940631
  hyper
gctccctcgctttccgaagtcaaatctaacatggatttggccccaacagtgggcaaggtcggggcatgaggtcaggaaaggagaaacatcggttttcgatctaataatggctgggctggagcttgttccctgtgtccaaagggcgtgcgtactagcacaagcgttgagaaaggtctggacccgatgtctgcaggaagtgtcaggacctccctgttctggggaccttcccagcccacaccaggtccgtgctctctagattcccccaacctcgctccacaacccggaaggagctcaggccggacttggcgtgagggtccctgcggggctgggtcacctacccgtccgcgatcaccccacaggggctgttagtaatctccctgcttcctaggccgttgagaagcactcaggtcacccactctcggtgaccagagcggtcagtctttccccgccatgaaatgtgagttcgggtggcagccgccgcgcccctgcagtgtcccctgcacatctccggtctcggtctcgcctttctcagctccgcgccgccttttcctgggcgccgcaggactcatagaagtgaggcggggccacagatttaagtttattccccgcaactgtcggggcggtcccggagctggtgaggacgcgctacggtgggtgcagaaaggagatccctggactctgtagaacctgggcccgcggtgtggaccgatggtggattctccgcgacaacagccctggagggagagagtgggccgggggaggggccacggggcccctgaggcctgcggggctggccgcactggccccgggcctggcggggtggtggagtccgaagcggcgaggcgaggaccccggggcccgctccccccagtcgccctcccgggatgtggcccc

SEQ ID NO: 333235 - DNA, 614 bp, Homo sapiens
  chr7:121941896-121942510
  hyper
cgaaaggccaggggatgcagaggcttctggtcggccctgaagtgtggggcccaacatgccctggggtctgcagacgaactcggaccaggagctctagtctgccgctgcctcagcgtgggggcacggctgaggctgggaggacccttagcctcgatcactggtggccctggtggagcccgggctgcaggggccccggggttggcagcggcggctgcagaggaggcagcgtcatcggcggctgctgcggtagcgggggcggcggttcagtgcctggttcgccagctggcgtgcgggccagccccaggctgctgtcgtgcagcttgcggacatgcttcttgaggtcaaagttcctgcagaaacccttgccgcacgtggggcaggtgaaaggcttcttgtcgttgtgggtgtgcatgtggaaggtgaggttgtaaacctggtggaaagccttgttgcagatattgcacttgaactgcttctccccgctgtgggtcaacttgtggtttttgtaattccctgaaacacacaaatgacaggaatatggttctgaaaaaaaaaatagcttaaaaagggaggagcagacacgtggaaggtagcgccaggcaagcagaagagcc

SEQ ID NO: 333236 - DNA, 889 bp, Homo sapiens
  chr7:121945147-121946036
  hyper
cggagtctaattcaggggcaaacgccaggctatatttatcaaacgccaagctccagaaagcctcggctaggaagcctcggcagtgaaatccgaggtttcgctgcttggttccactgggcctgggtgggccgggctgggccgggctgggccgggtcagatctgtgccacctccgcagacctatttcttcctccagggctcggggttgcccgctcccggaatcccggagtctccgcggcccgaaccgagtctggaccatttagaagacgccggcaggtaactggcctccccaaacgccccgaaaattaaaagccttaggaggcttgttctgtgtttgtggttttgtaaaggcaatgcccgcggcaataggcctgggaaagtcgcactttcatccacaaagttgaggagttgcaaggaataattgggtgtcacaccacaagcaaccttgactcgatcggaccccacccaggatacacacagacgcgcgcgcgcgcacgcttccgagtttccattgagagtctggaaagagcatttctttcttaagtacctgcgctcagctagagctctcccggagcattttaaatactgaatgccgagcggagaagggaaacagagtgtattaatccccactccggttgccggtgtctgcaagcctcctctaagcagcgcaggcggcagcctggatgtctgtgcgcatcaaggagacttgccggcgccagagttgtgtccacaggtgcacttgtgcctcccaaagagcgcgcgtagagaccatttcccctgcaacgccccccagccgaacacccgccgggtgtggcacctcggccgaaactcctggggcggcgcggtggagcgtgtggaggtttccgggaagacgcctacggctgcggctcc

SEQ ID NO: 333237 - DNA, 561 bp, Homo sapiens
  chr7:121946043-121946604
  hyper
cgggctcccgccgcccaggcaagagcgtccaggagcgcgctggaagctgcggcgcgcaccttccccggcgcagtctcttgccagccggcgatcacgcagagctgaaccccgcagctaggcgcgcaggaagggctgcacagagtttgaagacacggcagctgtaagctggcgtgaggaggccaaaggagcgcgcagagctgcaagcaaagggcggtggggcctggaccctgaagtgagtggccgaccgcagcagctcaaggtgccatctgcctggtgagttaaccccacgtggctgtgagacaggtggtggcgggtgtcaggtattgggccaagtgtagtgggggcgtccttctgctagagctctgaaaagggttggccccggaaggctggataacggcggactagaaaccctggcattattaagtccctgagcaatttcactcaaagatgcgaaactggaccttaaacgaaggaaattgacgtcaaagtattccctcctctctaccccattctcaacacatgccaggcaagctacccgggtccctccgccccactctaact

SEQ ID NO: 333238 - DNA, 579 bp, Homo sapiens
  chr7:121946856-121947435
  hyper
ctcgtttcaggcctcgaggtggcttcaggctgggacaactgatgcagcagagaagggcagagcgcccggggggagaaagcaaagaggcgctacactccaaggcggccctttggaaccgtccttggcccgggtgcacctactttggattcgcccagactgcaaatttttctttccttttgctggggccacgggacagagcacctgggcagagcaagcggagaggcgccacatccccgagaggcgcttcgtagttgtccttggaccgggcgcagacactcagtattggtcagcgctggaaattttctttccttttgctgttggggccgcagaaccagtctcctcctttcccctgctcagacaaagggcacgggaagggctttgctggggcaaaggggggtggggggttctctgtcccacgacagatgggtcgcggttaagactttaattgctgacttttgggccggatcagattccttttcctacctgccacttcccagcagcgaaaaatccccctcctgctgcactcctccgccaccgggctaggttgaaaggaaaaagccaagaagcgcgaagcagccc

SEQ ID NO: 333239 - DNA, 1031 bp, Homo sapiens
  chr7:121950024-121951055
  hyper
cggttcgactgtttccttgacactacccacgaagtttaaagcattttttatgttattttcaaactttcttaagtgatcccatgaaataaaagtcgataatagaaattaaaacaacacagagcaaagaacgagcttagtgaaatggagaagcagtagaggtaaataaaaatcctcgagctagaaagctctaagaaccgcttataaattcagttacctcctgaactccggccgatggccactccggcccgggagtgccccgcgccgacccgctggccttggccgtctcagccttcattatcgccacggccttggcgccccctgcccccggctgcccaggggaaccaagttcccgctgctggagttggggcagaggagccccgcctcattcaggattcggtggccagcgcagagccatttgaatagaagaagcccgaagtgaaacagaaaagctgaaaactccccggctgggctctccacttctcggttcttgctcacgagttccaaacagttaaagtgacgttggcaaggccgagggccaccgagctctgtgagactcccttggaggggtcaggaaacttagctcgagaagcttggaggcggctgggagttggggcgcaacttcagtgaccgggcgccgctgccgggctggggctcccaagcgtccggctcccggggtggtcgacgcggcgctgccttcgatcaggtcccgccgacctcgggcctctggaccaccaccgccccagctggtctggcaacccatcccgggcgcaatcgcgctcctccccttctcctctgcattcccgcaggtcctggggcggctccatccccccaaggctgagagatggcgagggaggctccaaagagtttcgggagggggcgccggatctggtttaagagaccgcggaacagatggtggagagctcctggatgaaagtttttgaacaggcactcgctaatagacttgctttgacgactcagggtgtaattgaagggtcatttaatctagacgcaaggtgaaagaaaacaggccc

SEQ ID NO: 333240 - DNA, 277 bp, Homo sapiens
  chr7:121951878-121952155
  hyper
cgcgaagctttaagcgccccgcgcgggtgttgacgctggcagctcgcaaacagcgtcccgcggccacggtgacccgaggggccggccggctgacgtcacgaacgcggccagctgcggggacccgggctgcaaccgcggcctctggcccctgccttctcgttgggtcgagggtgggaagggaagttgaggtctggggtaaaaagccggaaaaagaaaggaacaaggctgagaatcattcaaagattaaatggggtcggctcccgttgcttgcgaagac

SEQ ID NO: 333241 - DNA, 1029 bp, Homo sapiens
  chr7:121956311-121957340
  hyper
cgcactccggtgactactccctgaaagccaatgagcggttgaccctctggtgacatctggaacccaggttcagagtttcgctctcgcctctactcccttaatattttactcaatgtcacagaggagaacagcttaaggcagccctgctccccatcttcaatccgaagctggggtatcccagagaaagtctcgctctgagctcctgctggggcacctgcccagccatgcccctcgagggcgtcgctgctctcaacccctctccgctactgcccggccgcccaggcctgtggacgcgactccatctgtagcaaagttcgggggccaaatgggtcgcggctcttcctcgaaggttactgcgagcgggacttgaagggaaaaggaggcgcattagcgacttcgttttcttgcatagtactggtacagagtaccggtgatggtcgtaggggaactctatgtaaagactggatgaccaccggcctcccggaaaccccacacgccaggcctccaacttcttcacaaaagtggggtgggtggcggagggctgtggcgggggcttggagctgctgagagccgagaggcgcagagcgcaagctggcaggctgggctgctatcccggcgcgcagatgccccgccgccagtcgagcgcgaacatctctccggaacatcgatctatcacctccctttaaggacccggaccgggaaatttccattttctgttttgggaataagaaataaaagcgaccaagctcttgccctaatttccccccgcgggcccttccacgcgggctggcgggatcagaaggacgggtccgagctcgggggcgcggggttcctgtgaactccgggcttgctcggtccggtccccgcgcctgctgtccccaggccctctcgggaggcagaccgcggcagcgcaaaggggcttcgaggatctctgagcaacgacggctgagtgacctctttccctctcaagcacaccttcaaggagccggtggaccctctcaccgccggtagctgcaggctgagggcggc

SEQ ID NO: 333242 - DNA, 938 bp, Homo sapiens
  chr7:122526214-122527152
  hyper
cgggctcacagatctggccgcgccgccgccgcccgcgcgccccggcgcgtcccgccgcccttcccgagtcggggctggaggagctcgctgcgagctgccggctgccaccagcacatcgcggctttcctcttccagcccctcgtccgactcctcttcgctggaagacgggtccagcatggtgctcggggatccccgccgctcggcccgcggtccccaagcgcctcacccccggcggctgcgcccgcgggtctgagggagccgcggggctggctgcagcggccgcagaacgaaaggaaaactggccagggctttccggacacgtcgagttagattcaggagtgtttcctaccaccagggcgaaaggggcgggcaggagccgggaggaggattgggaggggggagagggggagccgccgggactgaataggcggagttagcgttgggggtgagcttgggcgcctcaggaattgctccgccagccccgggcgcgccgacccagcggttccccagagcccgccggcagaggcggagccgcccgagcgcccggacgcaggtggggaacctgtggcgcctacaacaagcaacacgtggaattgaatgttgaagagccgcgcggggccgcggagtgcgcgtgcgcgcgccgccgctgctgcccgggcccgcctggagccctagcacacagtttgcaaaggcggggagcggccgagcgcgatggcccgtgtaagcgtccaccggggctgctccgactaccctcaccctaccacctgtgatcttttctccagcaggtggaggtggaatggggagcggggagggactgttccctagcaagaggttagggggagcggccgagacatctccccaacccgaatcggctgcctaggattgaaccccagcgcggaaaagcgggactggagcccttcaccacgaagtatctttgc

SEQ ID NO: 333243 - DNA, 223 bp, Homo sapiens; identical to SEQ ID NO: 233190
  chr7:123172987-123173210
  hyper

SEQ ID NO: 333244 - DNA, 1648 bp, Homo sapiens
  chr7:123672031-123673679
  hyper
cgggtagtgagaatagtcccaggaacaagccccgcacgtgcggagtcccagaccccaggacagctcccacacgtagatgaagatcacgtagatgggcacccgcttccaagtgccccaaccgcggctgtagtggaggtggaagtagagcttttccaccacgaaactgcagctgccgtacataaagaaggaccagagcgacgtgtggccgctggttgtcccgtccccctgccccagtacgttgaagaagaaggtgaagaagatctcatccagaaagccgtgcattccgaagaaaagaaagcggggtaggtcgggcagcccctggctgggggctcccccggcgcccctggggccacggggtcgtcgccgccgggctccggccgcagtagggacccgggcgccgggagggacggggagcgcgcccctccgctgctgctgctgctgctgctgctgctgttgctgctgccgccgcctctgtcgcccgtaccgcaagcgcaggaagcgcttcaggaacacttggcagtggtagagcgccagcacgtactgcagcgccaggtccagcgcccctggcgccaccgcgacccccgccccgccgcccaggctgagtagtagcgcctggcccgctagggtctgcagccccacgtgggccgaggggtagaggaggaaattgaagacgaaggcgttgggacagcgccgctgctgcaggtacaccttctccagggcgaaatgggtgagcgagtgcagcaggcagcggtagggcgaggagaagcctagcatccgcaggtccgggctgcgggcgaagcgccgggccgaggacaccagcacgtccagggtgatcccgtgcatcccgtagaagtagaggcgcatccaggcgggcagcgtggcgctctcagccggcgcttcagcagtggacagcggctccgggcagccggctgccgcctcgcttcctggcccgccaggggcccccggacgccgcgccgcgccgcccctccgtgcggggccctcgctgtccacgtcgctccccgccatgggctcggaggctgtccgaacgcccgaggctgcaccgccgccgctgccgggtgcgcggagctgcagggccgagcggccgagccccgcgccgcctcctggccgctgccggcccccggggggcgcgcagggagctccgtcccggccgcggtcccgcggcagcgggggctgatgcactcaggggactcgcgggccgcccggctagcggaatccccccgccgtggccccgctgcgccctcccttccagtcccgggcgaggtgccgcccgcccgcgcccgctctagctctcaccctgcgcggcctaacgggcaccgcggcccagccaggggaggcggcgccggggctgtgaggggaaatgcagaagcttgtggaagccccatcccctccgctgcttagccccgcgcctccgctgcaggctctgggaacgtaacgcgagcagcggcggccctgcccccgccctgccaatgcccctctccgcctgcctcgacctctcccgccttctcaggccgcccccacgcgcccgcccgccgcaccgagtcccacagggtctgctcgggaaggcccggccctgcttcttcctcccggtgcgcccactcaacacaggggctccggtcgtgcggggggc

SEQ ID NO: 333245 - DNA, 861 bp, Homo sapiens; identical to SEQ ID NO: 233192
  chr7:124404309-124405170
  hyper

SEQ ID NO: 333246 - DNA, 3107 bp, Homo sapiens
  chr7:126891155-126894262
  hyper
cggggtgggacttgcttaggggacttaagggtttctgcaaccggcgagggggtctgttttcacccccgctatcttgggtgcgcagacactctctgacaccaggcttcacagtttgggccacgggggaagtaattccccagggaaccgcgggggtgcggttttgcgcaactgggtgactcgcgtgtccctccgcatttcatttgcaccaagggagcgcgtgtcagacgaagggaatttttttttcttttttggtgattctgttattttttcaccaactgtacgaagctcaagggatatccgagctttctggctgggcggatgggcttcgcgcttggcatggctgagcggtccatctctacctctccgtttctatctctaccataacagcgaccactcagcccgccaggagcccctgtttcccagcgcaggttcctttttcttctcagttccttgggctgttgaagccgggttctgggtagatagagactggggccgtggggagagcgccaggctgcttttgcctttcccgcgccccggggcattccggcgcgctggggatgcagcctccgcccccgccgcacctggccgcccgagcgcccgcgcccacgccccgcgcggggccgcccgaaactggggccgcgccagccgcgggagctaccgaggagctgttggggtgcgtttgcctttgctttttaaacaagatccccgagaccttttctccatccccccaacccccagcaggacacggaactccggcgtttctcgaaagccacaaaagaggggcacggaaatcccaagctcgccgtgctaactcggagaacgcaaactcgaggcagagcgtgcgccgtgcggggatgtgggtgtcgaggaccccgaagcgcccggcttcccccgcgacccccatcctccctagatcctggttagacatccatccagcccacgctcagagggcgggggttaccccgactcatcccggaagccgctaacttcagaaatccctcctgttaggttcgcgaaacgaaggtacctcgtcatctcggcggggcaagtccggattccaccagggcaggtccgggaggtcacccagggcagacgatccgaggcagagcgctttaaaatcctgccgccgcacgcccagtcagagcgccgagcgcgcctgcccccttcccgtcacccttcagtctcccattcgccgactaaacttttgggggatcacatctccaagccttgggagttccgggtaaagtctccctcttttctgaacctctttactgtaatgtaatcatgggcagacaagaggggtggctgccttgttctttgcaacgtaaaatcaacagacacccaatcaagctccaatgcccggccagcccctcgccccctggtgcccactctccttctccccccattcccgtcacctccgcccgctatttctctcacagactacggacatgcagggccatctacttgtgctcaggaaaaacaaatcactagagtgatatgagaaggaatggtgcacctggctgtccgctgaaaggttttagagaagaaaacggaaaggggaataaaacggggggattctccttttccaacaagcagggcgttttggggaagtttgggggccaggggctttttgtcccgtggttcggcacttgctttcctcggagccgctttctgctgccgggcggcgagtcttaccctgctccccgcagagggcgcggtgaggaagcccgccgggggcccgcagctccatgtcagcgccgccgccgccgccgccgccgccgcgtgaggcgagcacagcggccgcacttgtggctgatctctgggctgagggggctgagctggcctagcaggcgccaagtctcttccatgtgaataacaaatactcccaccggcggccgcgattggtctgcgcccggcgcctcccgatcctccgcccgcggccattcacccggcgcggcgcggggagccgcggccaggatcgcgcccgggatcgccaatcgcttcgcgccaaccagtcacctcgggaagcgggaggaggaacccccgaggggcgggagcctctggatttcggtgtcacccagcggccctggcgcgggcagggagggggaccctcggcccgcggatccccctccgctcttcagcctgaagcgacgaggagaccagaaatgtcaatagttctgatttttaaaaatcatccccccttccccgcccccaagaaaaaggggaggacccaactacagagtgagagggtgggaagaagcgggagcggtagaagaaggaatatggttgtggaggagcccagcggctccggctgcctggcgagcccgggaccggcgcggggaggcgcgacgcccgcccgagcacagcgggcagcacccgcgagcccgggtccccggtgaacacagctccagaaagcgtcaccgagaataacacatggtagatgacaagtgtcccgccacatgctttcttttcgggaatgcttaaagtagagccggcaagccgcgcggttcccttgcaaagtttgcctggcgccgcgcggcggttccgccatttgtcccgccccgcggctctggcgattgtctccccactccccgcccccgagggtctgagggacgcgtgcaacagagtccccagggctcgaggtaccacacagcgcggtccgctgcgggcactgcgcaggaaggggcatgggtggctaccgggacggtcattttattgagatgattcaaggagccgcagacgcggggcaggaaactccgggggagccgtgctcgggttctgcagggaaacctcgggattcccttcgcatgccgcatgcggaaacctgccgggctcgacgtgcacagtccagcgctcctccccactagttactgcccaggccccccgatcctgcacccgccggaatgagagaaagtagcccctcgccgcccagctcccgggtagctgctccggccgggccttgcgttggtgagaaagttccatctagaggcggccgcgcgcaactgcaggcggcgccctaggcccgggcgagccagggagagcggggcgcggggggagagggggcagcccaggagataaggaggatggagaaggacgggagagacccc

SEQ ID NO: 333247 - DNA, 436 bp, Homo sapiens
  chr7:126987826-126988262
  hyper
ccgtggagacggccgcggcgaggcgcctgaggtacggcggtgcggagcgagggcgaggtcccgccggcggccaggcggcggcgctcacggagccgcgggcttccccaggccccgggcagcgtgctggagctctcgggcggcgccgccgcggagcttggcgcggcagctggcagcggcctgacgcgtggtgacggcgcccgcgggcaggcagcggctcccgggggcggccgggcgcagggcggcggcgctgcgggacgacggcttcgcgaggcttcggcccgcacgggtggcagcggtccccagggaggaaagacaaagatatgcgggttagaaaccaaggaaagagcgccgacgcctctcagccccgcaagagctgcagacccacgggcagtgcggtgccactttcgcccaacagggtgccaagagagaaaactgc

SEQ ID NO: 333248 - DNA, 277 bp, Homo sapiens
  chr7:127291492-127291769
  hyper
cgaagaacgagggtcactctcccctgtatacgtggcatgtccttcctctgagacatttattcctcccaccaacaaacattaatggaacgcctcacaagtgctagaccccagcgacacaaacaagggcgaggcacactctctgactacaaaaagggcgcgcggccgcgtggcaggtcaaagcccacatcggtaggaggttccacaaagctctgattttccaagttctctccatacttttagccaaggtaaaatgtcggaagtcgagtggagcgggtac

SEQ ID NO: 333249 - DNA, 657 bp, Homo sapiens
  chr7:127671336-127671993
  hyper
gccaaagtgcgctccggcggccccggcccgctctgcgggccgccgccggagggagtgcgggggcgccccgaagccgcccaggccgcactcgctggatgctgcgctccctctcccggcgtcggccgctccgggccggcggcagctgattgcggtcgtgagctcgcggagcggcgagagttaagaggaggtgttcgcggcgccttcgccctccccagacacacaccccctttctcctcgcctcttctcggagggtggaagagacaaaaacggggggtcagttctccagtccgccggctgccggcacgcggggcggcgctccgtccggcccccgaggaccagcggcgtggcggctgcgctcggacccggtccgccggccggaggagcgcgcggcgcccgcggtcgcgcccgcaccgcaggccccttcagagagtccgggggcgggcgcgggtccggcggcggcggcggccgcagcccccggcggcgcgcaaccgcccgtcgccgcccgccgctgcccggcccccggcgcgccgccggctccggctttgtgcggagggagcgagttcgcggcttcggctcccggcgccctcagtggccgcgccgccagcggactgctgcagcggcgtgagcagcgggggtcgcggctgcgggaaacgctcc

SEQ ID NO: 333250 - DNA, 496 bp, Homo sapiens
  chr7:127744072-127744568
  hyper
cgaggaaaggaagcgacttggccaaggtcggagagctcattctttgcagggcggggtttggaacccggggtctggctctcggcaacgcgccctcggcccgcagcctcctgccccctgtgccccgcttcggcccccagcgcagctgcagaggggcccccctcgacgcatacactcaagagcccgaccgcgcggctgaaatcgcggagctcggagccgcggctggctgagcgatcgcggttcctgggctgcgtgcgcgccccttggagctgaaaggagcgccaggatcgggggcgctgcaccgggctgggcccctcaacgctcgcagaccgggccgggctgcagctggagatggcagcaatcccgggaggtctccgggcctcttcagggtgcgtccaggaggcgggttccgtgcgacgcggcgcagcccacccccacgagaccgcttaacttcgcgggggcagcctcgggcgctcggagacgcggaggcccagactgc

SEQ ID NO: 333251 - DNA, 747 bp, Homo sapiens
  chr7:127808033-127808780
  hyper
cggggtgtccccagtttgggagggagacacgcacagtcgctcccgtccacactcctctcgtgtcctggctccatgactgggagtctggggaaagaagaatgggtgtctgagacctacccctccgccggtgtcgccccgctctttctgggcgtaggagcgggctgcctgcccctctcccgcaccttcctggtctcgggctagaactggggcttcccatcggccgcgcttcccttaggggcgccatctgaggtcggaagcaaagctggaggggcgtccaggccagaggacgcgggctggggcgggagcctcggcagcctggtgggagctggtgcccactgcagggtgcgtgtacggggctgcctgcgtgtgcttggtgtgtgtcacttctgggagcgtaccccgtgtgtccacggggtgtgtatgcgcccacggaagtcctctgtgcatgcgtgtctgtgccataggcgtgggaacacctcgtgcacccatggtacttgcccggagagtaggaagccagcgagggagcggccctgctccagggtctcttccctgctcatccctccagctggcccagattacaccctactcacacccgggtcgcggcccactttccccatagccgcagcttccggcggctgcacacttcttagtgctcatcctgccttctcgccccaactcgttgtgcccttccctccttggagagtgagtagaagaggggatggggaggaatccgtttccatcccccgc

SEQ ID NO: 333252 - DNA, 619 bp, Homo sapiens
  chr7:127841246-127841865
  hyper
ctgagccacccaaggtcacccgggcagcgggcacagttgggactgaacgcaggggctctacctgtgccaggtgtccacacctcggtggcgctcggccgcctgacctcctcttggagttcccggctcagggcagggggtcgcgtccctgcggtctctggaggccacgccccacccgggcccaccggggtgggcgtggctacgtggctccctggcgctgaggcgcctccttcccaggtgggcggggctcctgccgggtcggttcccgcaggctgcccgcggaccccagccacttggccaggctgcagggacagtgcgaggaggcgctcagcctggaccacagcggaggtgtgcaggactcagcgaggcccccaagcttgtacgcctccttcctccgccggcttctctgtctgcctcccactgtccctattctgcccttcacagatcgttgtcattatcaagtcctacactttgagagcagaaaacgaccccgtacgtggtgggtctccgacatctgtttattacgttggaccgcatgctgcatatgatccagccacctcgctctactcctgtggctgcccttcgtcctcgtcgccgggacccctctccctgcctcccagac

SEQ ID NO: 333253 - DNA, 287 bp, Homo sapiens
  chr7:127991593-127991880
  hyper
cgcgtccccgcgagcgatggcgctccccaggggctccttgtctgggggcccagtgacccagcctcccggcagcagcggagccgcgtggcccggggacaagcggaagagcttggcccagcagcgcggcggcacgcgaggactgcagagcgccgggtagaggcccagcagcgccaacgggagcgcgacgcccacctcgcccaggcgcaggcctagctggaaggcccaccagggccagggcccttccaggccggattggccgccgtagcccagggcgtgcagcacctcat

SEQ ID NO: 333254 - DNA, 476 bp, Homo sapiens; identical to SEQ ID NO: 233208
  chr7:127991910-127992386
  hyper

SEQ ID NO: 333255 - DNA, 66 bp, Homo sapiens
  chr7:128337471-128337537
  hyper
ttggggcagcccggcgccactgccggcatctacgcaccctgaacgcgcccgatctggtctcatctc

SEQ ID NO: 333256 - DNA, 182 bp, Homo sapiens
  chr7:128337620-128337802
  hyper
cgctccctctctctttcccccttttgtcgccgcgcttttcaaccgccccctaactctgctcccccttttactccgtcgcagcccgggacctcctggtgggggtccgccactgcagcaccaggcgccactgccataccaccctgaacgcgcccgatctcgtctgatctcggaagctaagatgt

SEQ ID NO: 333257 - DNA, 239 bp, Homo sapiens; identical to SEQ ID NO: 233214
  chr7:128430710-128430949
  hyper

SEQ ID NO: 333258 - DNA, 216 bp, Homo sapiens
  chr7:128509984-128510200
  hyper
cgaggagcccctgctgcccggatacctcggcgcgcagggtcgctggcatctcggctccggctccgcgacctgggagccgccgccgggccgggggcttcgggcgggtaagcgcagcccacgccccctcccgggcggcccccagctttgccaccgccggtgccgacctttgtggctcgcctttgatcatgctctgcgtcagcgtggtagtccttctcc

SEQ ID NO: 333259 - DNA, 876 bp, Homo sapiens
  chr7:128828489-128829365
  hyper
cgagctagagcaacaaaggagccgggtcgccggcggggagagttcggggggctgcggcgcgctggggcgaaggtggctgctgggccgcgggctggcgcgggggcggagccggagctgcactcgcacccccggcccgcgtctggcctccctcgcggggcggggaggtggctttaatggtgggagagggaatggggctggggattgggggcccaggggtctcctagggctgaagacaacttggattgcgaggctagggcttggggagtcgtgcatcccgttccgggcctccgcagcccaacatgggccccgggttccaaagtttgcgaagttgggcgccgaggggccggggcgcgcggagcgtccgggggggcccgggcccggattctctgggcgcacaggtcgcctgagccgcctccgcggccgccgaggtcgtgcgtgtggccggggggctccgaggagcaggcgggggcgccggggcttttgctgagttggcggggttggccatggccgctgcccgcccagcgcgggggccggagctcccgctcctggggctgctgctgctgctgctgctgggggacccgggccggggggcggcctcgagcgggaacgcgaccgggcctgggcctcggagcgcgggcgggagcgcgaggaggagcgcggcggtgactggccctccgccgccgctgagccactgcggccgggctgccccctgcgagccgctgcgctacaacgtgtgcctgggctcggtgctgccctacggggccacctccacactgctggccggagactcggactcccaggaggaagcgcacggcaagctcgtgctctggtcgggtaagtgcggcggagccgggtctggggggcgggaggtgccgc

SEQ ID NO: 333260 - DNA, 845 bp, Homo sapiens
  chr7:129418307-129419152
  hyper
cccgctaactcccccgcaggagcatgaaggggcggccttgagcggtaaagaaacgagcagtggtggaggctgccgctccgagcccaggtccgaaccgagagccgcgcggggaatgtgggggtcgaggctgagagctgggcttggggcaggttcctttgcgttcgctcaggccacgatgaggccactaggacagatttctccgaaggctcggcctcggatcagagatccgccgactcggtgcccatcggtcgggctcactgggtgacaggtagagggtgatgcgcacccgtagagctgagtgacccggcccgagaatccgccacctggctcgcaggattttcgccctcaggagctttgcgaagacgggcgcaaacctgggaggcgccgccgcaccttgcctgtgggggtggggaggtcgattacggcaccgcccgccctcggccctaatcgctcagagccggcctcagtgcccctgcccccggcgggtattactgtacacggtgtccgggagcccgggttggaagagcaaacgaatggctcagcctggaggacaccgtggaatcgggcgacccctgaccccgggtgacaccctcactgcccatagtcctgggatgcgctgaccggtgaggcgccagaggcaagccgtccagccgccgatcttggggaagggctgggaacctgggtgccactagcgctattaacaggaatggggcagttgagggcggggaacggtgtctcattcgcgtgcgccggggttcccgggatgagtggccgcgaagtggaggcacacgggaggtctgagagccgctttcccccagagactgggcggggcggctccgggccac

SEQ ID NO: 333261 - DNA, 1457 bp, Homo sapiens
  chr7:129421203-129422660
  hyper
cgttaacaccttgtcttgggctcgagcaaaagaagggggtgaggcagtggaagcggggcccgggaaatctatagtttccccacccccagctcctgccgagccgggaggggccaagggtgacggcaaggatacgaacccttcaatatgcccgactcccgggcagggcctgctgaagccgtagatgtcgcagccagatggatcgggaagcaagattcccaccccaggtggataactggacgagtctcagggcctcggggcccctctccccatgcagccagggatgggcacggtgagcgagaacccggacagcggagataatgagcacgtcacagagcccaacgggccaaaagggggtgatagctccacattaacccctccccgtcctactagcattcccccgcccatctaggtcgcctcgagcctccctggctgtctctgcacccgcgccctacctggtcctcagacccatgcgatgctgggcaacccgggccgggtgtgcccaggaccgcaaagcgggaagcgcaggccttgcggactgcgagtggcccccgcggcctgctgctcccctttataacgcgcgccccgccccccgcgctccgggcgccccgccctggcccattcacctgctgtcgagaaccagacaccgcgcagcagaaagctagccgctgggccgcgaggtccggccgtcggagcgggcggggctggggcgccgccgagacagatccgatttccaccttttcttaaatgcgctgctgaaagtcgagaaggccccggccggggagctcgcgtcgcttcctcccccctcagctcccctcgcaccctgagtcccccagccccactccgggaggggccgcgaaactgcacccgcaagggcctcatacatattttaaggagcaggccaggcaggtaaccggagctggactcggacggtgagggggcggcccccggggacctgataccctggatcccttacggctcagggctcaggcgggggaagaggtggctcaggacgacctggggtcctcactttgctggcctgtccagcgcatcctaagcccgcgtgtatcctaccccctccttctgcagatccaatgtccgtctggcaattgccccattccctctcgctggagagatcccttccgcctcgccacaggcgtcccacgctgcccggagtcgtgcgccccgggacgggtagttttgggttcctcgacgcttggccaggtttaggaaagacccgctgtcttccttgctgcccccacctaggagactcggcgccttgcgctccgtcctttttaatggtgtcgcggcttgtccctctggcttgctccctcctagtccctaccccacacggctcccttcgccagctccatgacaatcccactcgtgctgaagaccttgggcaaagaagtaaccatcggtcttcccctcccttcccattcctccggcggcaggactag

SEQ ID NO: 333262 - DNA, 564 bp, Homo sapiens
  chr7:129422937-129423501
  hyper
tgcacatgtgagcacgtgggtacttggcgacccggagatctctgcaaactgcaggcccagcgagatggcctcagcacgccctgcaccctcgtccgcgcgactgccgccgggtgcccgccccagccgctgtgtccctggtgcttcctccgccagggccacgtgccggggaagccaaagcgggagtctttcgatcttggcccagcccttagccctcggtcctttgctctagcatctagattctcgtgggtcaacaaagtcactggaaacccaacgaacttcccgacatttttcgaaaaccgtatgcgtgtgcttctgtgcgtttttcctctgatcgaggtagggccctgtagggttctgtttggacgggaggctggagtggttccttcccggctgcggggtcggaggatgcagagattcgaaagaaggagaaacacagagactgtcaaatgaaaggagattctgtcttcggaatcgacccagctctttaaaagaatgaggaaaacatggggtctttatatatcctggaaagtcgcctaggcgttcagtgaaaaacgcaaaaggcac

SEQ ID NO: 333263 - DNA, 1554 bp, Homo sapiens
  chr7:129424378-129425932
  hyper
cgggatgctgaagcctgcaggagttgaatcagagggcgagctgcagagcggaggcactggggcggcgggccttgcccgggctcttggctcccatgaatcctcgatgagtagagaatcgtcgctcggagcaaaggcgagaggagagagaagcgtgcgggtgcggcccttgctgctttttaccaggcgacaccccggtcgactttgacccccgagcaggtgaaacataagcgtccaccccagaggggtcccctacccaagtcagaggagaaggtggcctgccaggttaaaggatcgagtccagcctcggtttcctcatctgtaaaataagccgagaacatccgcgcctctttctggagaaggctgggaggatgccagagagaaactgcgcgcaggccctggcgaggagcccctccggcccatgcggaactctgcacaggctgggtccctccagggttagaaacccagcttccccacccctacccagcagggacccgcgctgcatcccctaacgccccccaaccctctgcacccagacccaagagccggccttcgacgcaccacatgcgtggagcccgggtcccagccctgaggaccaggtttcagggctcagaagactccagcgaggttccctcgcagattgtgtctgcggtcgttgggggaggggccccgcagccttcagcagattatccaaaggtcagtgacccagatatggttttggccacgggccatgtttcacttcctgtgccccaagcagaatttagctgaataattcggaccccaaaccaaacaaaacgctcttatttccgtttggggattcttcggagttgggatttttctgtctcaaattagaataatctgcattattaaccacttaacagttatttgttggttggctgcctgacctttctgagcctcagtttcttcgtctgtaaattgggagcttacccaggtcggaggactgttggaattggaaatattcgaataaggaagtgtttttgcaagtgctttgtaagcagcaaagcgcttcttcaggggtcaatttttttttagctctgcagtcaccacccaaattcggaagatcgttgtgcctttcttggatgagaatgcccggctccagcccggggatgggacggtcttttccttgctaggagtccgctgtggagggggcgatgcgctctgtccaggacctaggagtccctttctccctccaccctcggctcacagcgggcagctcccccgacgcgtaccgcctctttgcccccagcctgaggtgcgctcttccccaggacgcctcctctgtcctctgcacgccgccggccctgctggggttgctttctgccgcggcgtcttcgcgaatatcccctcttgctgtctgcctgggcgtccctccgggttaccgcacaccgcctccgaccctcccagggcgcgggaggaggggcagggcatccgcgttcgtgtctgggccctggcggggagtcgcgtggtccaacccctcgtttttaagaggagggatctgaagcccagctaggcttctaattccagacagagccctac

SEQ ID NO: 333264 - DNA, 438 bp, Homo sapiens
  chr7:129913008-129913446
  hyper
gtgctcaaggtacacggtgcagggacggttcttcctctcgatgtttctagaatctccctcctcccaggctagccggcagtcccagcttgtgctacagagaggctcctttttattactttttttttcttttcctcctaaccggtccttgctggttttgagtatccactcccccacccccgcccccttctttttctttctctctgttcctgagcaagctgacgcaggtctgcaggagtgaattaatgctcacgtcctgagagatgagctcctggggaaccggggcaaatgcgccaataggagccgaggaagggggaggtgcgggccgggggaggttgggggctgggggctgtaattcaagctgggagttctctgcctcccctccccttctcttttttttctttcctctttaaacacacacacacacacacacatacacgc

SEQ ID NO: 333265 - DNA, 158 bp, Homo sapiens
  chr7:130741985-130742143
  hyper
cgttgttttctttgatctccttagactctctgcctcctagagaatctaatccacatgaactgcgctcctggatcttttacataactgtggtttttcacaaggttctttaaacaaaggtccacgtgatagatttctgctcaagcttagttccaggaaac

SEQ ID NO: 333266 - DNA, 101 bp, Homo sapiens
  chr7:131240439-131240540
  hyper
cgactctgtacctgccccagcacgggctcaaggagttgagcctgcacacattacttagaaaaaacctctgcaaacgggtaagtacatcgcccgcgtgggcc

SEQ ID NO: 333267 - DNA, 487 bp, Homo sapiens
  chr7:131242600-131243087
  hyper
cgtaaactgagtttatccggtgaaagaacaaagaagttcctttcccctcccccgctcccctccttttttccacccccaaagctgcctgggagacgcagaccccaggcccgcctgaagaggaggcacatcggcggagccgggaagcggagggggcgaggggtgattaaccttggaacccgggtacggcgtaaatttggctcacgtgactccggggttgctaatctggagtctatctgccagatggggctgggtggaggggttttctccaggatctagccgcgtcccgggcacaggggactccgtgagcccctcaagtcggctgcaagcaggcgatgcctgcagggcactgcgtccctggagccgcgaaggaagcgctggagccctggctggggttccgtggcagccggcctcaagcttgggaagggctgacggggttgttttcatcaggaagtttctgcaggatcgttctggccccgttttccacacc

SEQ ID NO: 333268 - DNA, 217 bp, Homo sapiens
  chr7:131514717-131514934
  hyper
cggaagcccccactttggcgctcctgggcttggatcccgctgtgaggccgggggcaggtgatcatggcaggcggtaggactcctctcactctctgccccagaccccgcctgggagcctctgccgccctctcctgctccagcaggcaaggccaggaagccgggagtgcttgctgtcaatatcacatgtggagctgcttgtggccggccaggactctca

SEQ ID NO: 333269 - DNA, 987 bp, Homo sapiens
  chr7:132261071-132262058
  hyper
cgcgggctggctccgggacactgaggactcccgggtcggcccaggtctgtccgaccttgctgccctcgccgcccgcccggccccactccccggcgggccggctccttacctggacgcgccgcgtttccctccttcagcgggagcgccgcattgacactgcagatggagcctatgccgctgcctctcgccctcctctgaacgtgtgcgtgtgcgcgcgtgtggctgcctcctccagccccagccccgaacgcaaatactccaccgaggcacagggaagccgggagcagccgaggaacgcggagggcgccgaatcagagcctgcggggcttgacagcttctcttgcggcgtccaaggtgggcgtaatgtccaacaaaaaggtcggaaaatggggatcgattccgaacacccctttcctccacccagccccggagcccgagcagcggcggcggctctcgggggctgcggtggcgacgccgggctgccccccttcgtccccacccccgcgggctgaatgtccttgatgccaagcgggcacagcggcgtcactccgcgccgcccatgctcgcccggtcgggccgctgcccgggcgcggcgagtgcgcgggggacccgccggggagcgctctcggcgcctctgcgcgcctctctgggtagcggcggccgccccccggcagcccgcggccggccgcgccgcggcagcccccacccttgccgagacactcgccgggcagtgccctggggccggggctggggggccgcgggagccgccggctgctccccggggaggcgcggggctgcggcggtggtggctgcggcggctggcgctgcggcggcggagagctcggccgcgggccgagccgggcctcccgggcgcgcccccggccccccgggcgggctgctcgcaaagtttgcagggggcagggagcggggccgccgctggctcggccgccgccggagctcccgggctgcctgctgccgccgcggctc

SEQ ID NO: 333270 - DNA, 1138 bp, Homo sapiens
  chr7:134142980-134144118
  hyper
cggctaggcacttctcggggacgctgtgtggtgttgaggttttacagggaaaatgctaaccttggcgcctcctgaattatcaactagctacggggtgcccagatttttctcccgagttccagacccagggcaccccgaggcggcgcctggccgaggagctccgcactgcgccttgttaacagctgggtccgggcaaactcgcgccacctaattctctgccctctaccggcttgagatgcttattcctcagggagggcaagaatcgaaacgattgagaccaactatttacaagtgaggcaaccgggctacaggtgcctcgagggaaaggaggctgggtctgcgctcccacaccttgccgacggctccacgtccctgtctgcgcccgaggtccaccggtctgtgaagcccactttccccgcctccctctcgcgttgtgccgcttggggcgcccgctaggacccaaaatgcggactggtgggccgcccatcaagggttgcccgcggtagggcgggggctcccgtgagctgctcccaaaccccactcgcaggatgctgccctgacgcccagggccaacccggggagccaaggcccccggtctctgcaaggccgaccccagcccgctggggaccctgcaagcccgcgcgtggctcccagcacgccgggcgtccgcggggcgagctgctcagggtcactcggggtccctcgccaatacaggccgcgcggagagtgtgaggcgagccccgggcccgcgcccccacgagcacctaccttccaggtacccaaccccaggatgggcatcttggcgccgttgttgagcaggagacggcttgccatggctgctgcgctccccagacccccgcccagtacggtgcggccttggccgcggcgcgtacctttaaatagcccgtgaggtcggcagaaagggcgcctgcggttggcgcgccgctgcgcgaaggagccttctgattggttgcgctgggggtgccgcggcggccttccccaagggtcggcggggatgcttcttccgcctggtcctagtggcagcggattctttccgcccccaacgctcgcccgcgccccgcgtggcagaaaggagttcctcagctgctgtatctggtgggaaagcgaatgctttagc

SEQ ID NO: 333271 - DNA, 456 bp, Homo sapiens
  chr7:134832843-134833299
  hyper
cgactgcgaaggcaagggggcaccagctcaggactgcatctgcctgccatttcccttccactcctcctttctggagtctgacattagaaagccagcgagaaggaagattcaaacaaccaaccctgatttcctgcttctccttttcatgagtgttcctgtggtctctgcacctcctttctgtaagtaccgatcctgcaagcatcacagcttacccagacgtctactaccttgtaagacaattttgttttcttctcagatatttcatgttctggcaatccacataggggaactcactggttgttcagtatctgtgaccctccctcgctcatgtctgtataatctacataatctaccccctttactctctgctctccttccttccactcttcggcatcaacatgtgtagctctggcctcaaagatgatgaaagtaaggccagtataactggttagaaac

SEQ ID NO: 333272 - DNA, 807 bp, Homo sapiens
  chr7:136553558-136554365
  hyper
gccagagcctggaaatcgcagatttcaccaggaaatcgccgaggtacccgaataggtgttgcctcccaaaactaattcctacttccccaagcactttggtgaagaaatgaatccagcccagctcgccgaggcatccaggtctccattctattttggtctccaggctcttcgtgaaagccaggtttgaaagtcttgtttgcttctcctttagtggtttggcgtggagggcgggggcagcgtcaatttaactccagtctaaaccacgaacaggtcacagactagccaagtggctgagacgagtgtggggtgcgtgactctgcctgcgcgcgcgccagccccgcagctctcgccagagccttggggtcggttctctcccgcctctcccgcctctcccgccccacccctacagtgtctcggcatcaactaatcttttccttttcttttgcaagatcaagggagaaagagaaccggcagctggcctcggactctaagcggtgcgcagctccagcccgagcggatcggccctgaacccacaaaggactcctcgctccttcaagcctccaccacctcgcagccggggaggcaactggagcgaaaccagcgacaggtaagggccccgcgctgtgcagctctccgcttacccactccaagggccctggcaccagggggtctctcccttcatatccccccaagccggaggctcaggggtcggggcttgggggaattggagggaggtcctccccacgtgcagattctcaaacggaaactttggatcctggggcttggagggttgcgagcagtgatggc

SEQ ID NO: 333273 - DNA, 920 bp, Homo sapiens
  chr7:137531067-137531987
  hyper
cgggaggagagggggaaagggggaaggagaggcgtggaaacagagaggtgcccaactccgcggaagcgccccttgctgggtagaagagtgggtctcccgccgcggcgcacctgtctcggctgccggctccccgcacctacctgtacgagacctgcttccggaaagttaagttcctcagcttctcctccagcgcttcgtccttctccttctggccggcggccgcgggctcgtccagggcagcggcccccgccgccgcggctgaccctgcgccccgcgggtccgcgccgccctcggcgcccaggcagcagctcccggcgccgcttccgctgctgctgctgccgcccgtcgcccctttctcctctcccgccgaggagctggggttcatggcgcccgctccggcggccgcggagggagcgcaggcggcgccgctgcaggggccgggcgggctggcggcggcggcggcggcggctgcaggagcgcgggcaggtccgcgcgccgctggcaggggcagcaaatggcagccccttcccgcagcatccatccgcggctgcaccgcaccggggcattgtgggaaactccgctcactcccccgccccggccaatcagaggccgccgctccccgcctcccgcgccctcccgcgccggcccgcaccctccagccccgccggcctcttcctaaatcccgagcgaaagcccaagctgaacatgaactctgcccggaggcgacgggctgcggcggagggggagagagaggaggacaggctgcgaccccgggctggggacgccagggcagggacagcgagcatcaggaaggagagcgtccggggaactcgagtggccgcgccctgggtcctgcaccgtgaggctggggggaccaggaccggcgggcgcccaccttggtcctgagcccagctgccgac

SEQ ID NO: 333274 - DNA, 1438 bp, Homo sapiens
  chr7:139167556-139168994
  hyper
ctgggcgggtgtgggggtttcggctacgtccacccgacctggcggcgtcggctgccggcgcaggtgagcactcacccgtaagcgttacggcccggggcagcttctcgtcgccgtccaaccccgcgcggggcaacagcgccgcatcctccttctccagccccagctccttgcagcggcagcacgtgggggagcccggggagccggcgcttccttccgcggggctggcccggccctctgcgtcgcagccgctctccgtccgggctgcagccagcggcgagcggcggccccacgtgccgccctgggatggtgcgcgcagcaggagctggtgcgccgggtccgcgtggcgggagaaggcaggggactcgggcaccggcaccttgaggaagcgcgtggagggcctgggcgatggcgtgctgctgccaccggccgcgcccacgggcttcacgcgcacatctacctgcagctccatgggcgcccaggcgctgggcgcaggctcagccccgggcgcctcgccattccggggcagcttgaccaaggcagggcccggtgacggcggctcggggcagaccccgtagcccaggctgagcggcggcacgcgcggggacccggggcgaggcgaaggcggctttttcttgctcgagggctccaggcctgcgcccgccgccttctccacggccccggccggacttgggctgctttcgggaccttcaggttgtcgcaccttcgcgggcacctgcggctgctccagcgtggggaccaggcttcccacgggctccattgggagctctgccccggcttggcctccgggcgcagcctcccaagactcctccatcccgcgcgccccgccacccggagacgctgaggagcgcacctgggcccagtgcagaggagcttcgctctcctccgtccggattggtccagccgcgtcgccgaagttgtcaggccacgcccctccccgaaggaccccgctgtgattggctgtggctgaggttctgctgccccgacccccttcgggacacagccccggcctccaccaggcactgggagggagctgagaacggcagcggggccaggcgagggttgcagggtgggcgggagctctcgggagaaaagcagaacaccagcggaggcttgtggcagggaacccggagccccgcctgacccttccctcttctttgtctctgacctcacccattttcccctccagccctatgccggggtgttggttttgagagttacagtttgggcggggaaggattggccaagcctgtctggatcctgggacctcagagaaatcagaatccaaaggaattggggcgacctgtggaaaagtagcccagttggttgtcctgacaatccagcagggtttcgaaaggactctccatcatacttgggaggactcccccactgagtaacgctaagagaaaagaaacagggc

SEQ ID NO: 333275 - DNA, 356 bp, Homo sapiens
  chr7:139208473-139208829
  hyper
tgagcgcaccgcggcggcacccggcgcagaggctccagcgcggggagccgggctcagccccggcctgccagcgccgcggtcctagcccacccgaggccggcctggggggcccgcagggcgcgcggagcgccgagtgcgcgtcgggctgggccccgcaccccggtgcaggagcgcgggcgcggcgcggcggagcgccccgcatggagccggcccgggagcccccctcgcgggcccggccgccgccgcccctcgccgcgcgccccgcgcccgcccccgccgcccccaggccgcgttcgcccgcagaggctgaggcccgcggccccgaggggctgctgcggcgatccgggtcgggctac

SEQ ID NO: 333276 - DNA, 854 bp, Homo sapiens
  chr7:139929854-139930708
  hyper
cggctgttttgactcctgggcttccgccctttagtttacacatttgatgattccgtttgaaaatcgcaacctgaaatactcctcttctaggctggaggcggggttgggggcgggggcggtgggtggcggaaggagggccctcaaacaaagatccgctttctcctgaacaggtgtcaggagaccaagctttgacctccagctccctggcctccgggcgcgggccctgggctgatctggcggtggacgtgcagggcagcgggcccgcgcccaccagctgtggcaagtttctagtaagagagggatagagacaggcggagaccgctggggagtttcccggtgctcagccatcgcataggggggaacggacccttttgtgggccctcgggtccccccgtggtccccgctggcgcgctcgtcctctgccacccccagatctctgcgcactccccactcctgggcgttcgcactgccccccggcgcactctcgccgccccggggtccgaagcaccgcgcactccaccccgcgacgcgcgcatccctcgaccctcgcgcgtccacaccgccgctgcgcctcgcgcccccgcacccccgcaaccccacaccacgccggccgggcggggccggatgcgcagacgtgcagcacgtgcgctgcgcagcgattggcagcgccgcccccacgccgccccgccagggaaagggtgtcccgtgccctgccgcggctgctggtcccgcgggcgggggctgtcggggcgcgcgggccgggccgtgggggtcgccgcccgaagtgaccggggaacaatgacagcccgatggggaagggcggcggcttccctagagggccggttctctggctc

SEQ ID NO: 333277 - DNA, 209 bp, Homo sapiens
  chr7:140103670-140103879
  hyper
cgtatgggccagcactggtttaattcactggctgttccttcctgtgagggctttccgctaggccggcgaaggctggtgagaaagccggctctgcgccctgccctgtgctggccgccctcacctggcgctttgtaccctgaggcagctccggactcagggcaggtgggagggattgcactttcctttcactttctcaggacgccaaaccc

SEQ ID NO: 333278 - DNA, 813 bp, Homo sapiens
  chr7:140340170-140340983
  hyper
cgtctgcagagccgcttcccccgtcagggctcaggccgcgcgagccgtttcctccctcccccgcgcgtcccctcctccgtcccctttccctccccagctcgaccctgcaccccctggcccggcccggccctacctccccgcgggcggcggctccgcgggctctggggcgcatcttgggggctccggggcgggccgggacggctggcggcgcggctcgggggcgggcggcggcgggtgccggggacgccatggccctccgccctccgcccctttgtccgccgagcctcccccggccgcccgcaagcccctgggggtccccgccgcgcgcgctcccgtggggtccccgccgcccccggccccagcggcgcgcttccctcggccggcccagcgcaggctcgcccgcggcccctgcctcctcctgccgtggctccgcgacgatctgcgcgacgcgcgccccctcctcccgacccatcccgcccggcccagtgagctaatccgcagctggcgggcgcccggccggttgccacggcaacccctctcccagggcccggccccgcgcggagctgcggtaaacaggaccttctgccggactcgccccctcgcctctcggggtgggggagaggtggcttaacccttcctgggaggacgcccgccgcgcgcgggctccattccacccaggcccgggcggattcgcgaggtgcttccggcctgaggcttagacctggacgtccaagcctggggaacggcggccgcgtgcccggccccgcttactctaggcagttaacacactctcggcaccgggccggggccggg

SEQ ID NO: 333279 - DNA, 799 bp, Homo sapiens
  chr7:140771242-140772041
  hyper
cgcctcgttcgcgcttttcaaaatgcaggaagggcgggggagagagagagagagagagagggaaaaaaaaaaagacaaaaagaatatggtggaggtgcgctcattttggctcacaagccccgttgtgcaaagcagggtgtcagagactctctttttccccagggcaactctttacccggcaatgccggacctcgactttggggtgagggtgaaaacgaggggtgagcattagagtgaaaaacccagcgtttgatgccgggagggagggtcccagcctttgcggcgccgtctcacgtgagcagagcaggggggctgaagttgggatgaagcggggcttgcctggggcccacccgctcaaggtctggggtccggcgctacctcccagagcccctgcagagcctaaatccagcggccacccttacaaaatgacaaaccctgcatcgaggtttcttttaaccccaccttccctcaacgctcgagctctccagcgttttcaaaatatctactaacggaccaccccccatccaccattaaatttctctcgtcttgagtcgatcagccaaatttcttctttctgttcctgccgaggagggagggcaggtggaggtgggtgtgtgtcggggtgcctggctctggcttgggactggactggggctggccggataactccgcagccgctctcagctcagtcctaggtggaaacgcctgtagcttgcaaggtagcgcctgtggctttctggggaaaaaaagatcaaatgcctcccaagacaccagcgacccaaaccggggatgcagggag

SEQ ID NO: 333280 - DNA, 924 bp, Homo sapiens
  chr7:140772338-140773262
  hyper
aaaataagagatgaggctcacgttgcacggatgacatcactagcttttggctgcgcgctcggtgttctcgtctgtgggttttagccaaggctgcagctacccgcgccggacgagagagcgcggcagcagcttcctccggcgcccgcacccgggcaatgcgatttccccagtcccctgggcgcagcctgggctctcgcgcctcccgggcaccagccgagcctgcgaggcctcggagccgccgcggctagaggaggaggcgacgaggggaagccgagtgacccagcctccctcccccaccctctccccattcatctcggcgaccaccgcgcgccgggagccggatcgtgggacgccgaggccaggacgggattctctgcacgctgtcgagtgagccggcatctcggcgcccgggtgggctgcgaagaaaatggtgcaatctgagagcgactgagcccagctgggcagagcagacggggtgccagagtgccaagggctcaggtgcctggagaaaggggcggattgtttggaggggccgggaccggggttttcttcggtgcctgcggcattttctttgcacctgggcggcaggctcccggggctcccgggtgccagatgaagtgaggcggaggcgtcgcgggagagccgggtccggaggcggtcgggtggacactccaggcagaagacggcgctgggaagagctgcgtgacgctcgggggctggcggctgggccggcagcgcgccgtggcggcgtgacctgtccatggtgttgaaggcgcggtgggccgagcccctagcgccgcgcgcagtgagcgctgcctggtgcaccctccgccgcgcagcccgcccctcgcgtccgccagcagccgcccagtctccgcagatcccaggccgggtctcgtccggtaacgccgcccgggtgaacac

SEQ ID NO: 333281 - DNA, 956 bp, Homo sapiens
  chr7:140773774-140774730
  hyper
cgaggcggctgcttcggggcagtcgcttcctgcggggcggggagggggcgggaggcggccgcgctgggttcgccgccgccggaggctgcacctgcctcagaggatgcccaggagcccgcgggagcctctccggatcagaactttttaggccgcccgcccccatccccgcagtccccgggccgtgctccggtaggcgggggccgagggggcgccgcggcgcgagtccctctcctgccccctcccccagctcggccgcccgccgctttgttccgggtgcggcgagggaaggcgaggctgcggcggatcatgcccatggtgtagccgccaagcggaggcatggctgccggaaggttactgctctacactggcctctcgctagcgctctgcgccctcggcatgctggccgtggccatctgctcggaccactggtacgagacggacgccaggaagcacagggacaggtgcaaggccttcaacacccgccgggtcgaccccggcttcatttacaacaataacaacaacttgccgctccgggcgagccgctcgcgcctggaccgctgggagggcaaactcctccgggcccggaatcgccggcagctgttcgccatgagccccgcggacgagtgcagccggcagtacaactccaccaacatgggcctctggaggaagtgccaccggcagggcttcgaccccgagatcgccgccctcattcggaaaggtaagcgccgggcgcaaggcgtggcgctgcggagagcccggcgcctttaggccccgcagcccctcgcgtctccttcccaggccacaggctatcaggtctctgggttccaggcggtccggttatccaggcctggctgagcctcggggccaggacttgcctcccaatagctgttaatgaagcttggtgcaggcttaactctctcccctgcctctcctttcgcgcgtctctgtcgggattc

SEQ ID NO: 333282 - DNA, 617 bp, Homo sapiens
  chr7:141211339-141211956
  hyper
cgacctgttctgctcatgatctgtctgctactagccagccggctggaaaatgtggccaagaaaaccgcagagaccaatgttcggaggagaaaaccagaaagaggggcctgcctggcccctttgatcctttatggccgattccgtggacattgctgctcctcacgccggcagccctctcttgagtacctcaattgcagtctccagaccctccaccccgccaggcattcctgggtcggtgtcccagtcggtcacagtcatcggatcctcctgcagagcagtagaaagtccgggaggggcccgtgcccatggctccaggaaaggagcggccaggtacctgccaggggagaccaggcacttccaggtgcgaccaggtacctcccaggtgcggccaggcgccgcctcatctctcggtgggcgagtgtatttattccaaacccagactgagaggtgacagcttcaagtctgctcgggaaggaaacacctcgcaggccaagcacaaaggggcttactcgtttcttttctgcagcggcagctttccccctccctcctgtttctccgctttccctcctttccctccaccattcctcgcccactcctgcccttcccgggtgggacac

SEQ ID NO: 333283 - DNA, 999 bp, Homo sapiens
  chr7:142985430-142986429
  hyper
cgcaggcgcaggcgcagtgtgcgtccgcgtctgaggggagggatgtgggggaagcgacggcccccggtttgtttgggctgtgggcggtgcgcagcggagagcccgggaaaagcgggaaatggcggcgccgagcgcggggtcttggtccaccttccagcacaaggagctgatggccgctgacaggggacgcaggtaagtagggaacggtcttagggctccttaggggagcccagggaaggggagcgtggcccccaggcgtgcggccctgcagccccctcccctcggagccccggaaagcagccgtgtccgcgcttcctgccaagggtgggacgcccgcccgagccgctccgagcctgactccgcgcaagggcccgcgggcggacctcttggccttgtctctcgtgggaaaagactgccccagcctccctttgttcaacccacgagggttctaaaggggaggtctttgcagtcctgcccgctcttgggttctcttgaagattcttcatcctttcctctggctcccttatgagggaaactataaaaagaccatactctgtctccttaaaaatcgacgagaccttctgcagacctcggtgctctgcctgatgtgcatttgatttgtatcgattgtatcatgatctgcatggctttgcatagaatgaccagattttcaaagaagtcaatacagggtttggaaattgagtacttttggcagaacaagggggttcctgtggctccgagtgtccatgcctctgccccggtcattccatttcatggcagtcatcacccaggagaacattgtaatgcctcctgctcgagactgaagattaaggtcttcgcaaagggaacctgcagaaggacacagaattaagacgtaggaactccgtggtgcccttcgcccctcctccccttccagttgtgtcctgaaattctaaatgattggaaacttttataatgttcacgtttaagactctcatactacagagtagaggaaggagc

SEQ ID NO: 333284 - DNA, 564 bp, Homo sapiens
  chr7:143105734-143106298
  hyper
cggcttctgcaggggggtgctggccgggccccgggaaggggcggggcgcgggggttgggggcgcgggggcgggggtcggtaccttccttggcgcgcgcccccgggggcagcggggcgcagagcagcagcaccagccctagccccaggggccagcgccgctccatagctccgggccgggacctgggacagtggcccggatggcagcgccaggttgcaagggactaggagagccgggcgggccgggcgggggcggggggcggggccagcgccgggggcggagtcccggcctcacctggttcacctccttaaagggacagtagggcaggaaagaaacttgctagactggtaatcaaattcaagaaccggaggcgtcttgacccgaatgagactgcgggcgccgcctagtaggtgggattaagaattgacgaaccttttcccaattctaatcctaaactcaacccaatcttgatccagcttttaacctaattctacctctgacttgaattacactcctatattcctctttctgtctttgtgcaggccccagagctgggtaatagggcc

SEQ ID NO: 333285 - DNA, 1569 bp, Homo sapiens
  chr7:145812737-145814306
  hyper
aacatgtgcattaacggcatctgcagtcctccctccctgctccagtcagtcgggatgtttagcaccgtcacttggtgttaggaccactcggaagacctgcctgtcggacgcctgactgtggttcccggggggccggagctccaggagcctgtaccatctttatctgaaggggaggagagaaggaaaggagaaggcatccgagcgagggtgttctccttcctgcagccgggtagggggcagccaggtttggagcagggttctaggattacacggcaaatccccaacttcagcaccgcggacagcatcacctcccgcccagggagaggcgcgcgcctccttgctccgcccccgccccagctgatggaccccggccggtcggctcagtctcccttttgctttcaaacgaggccagggcagggcagaagggttttgacagccagaggggtacggtaaggaggaggaagaggaggaggaggcggaggaggaggaggagccgaggagggaaccgagaagggaagagaagggagggcttccctccgcctcgctcgccgcccgggctcacaggagctggcggcggcggcggcggcggcggcgtctcctgctctccgcggctgttgctgctgctcgcgctccgccgcccgggagatgcttcctcgcgcggcgcagcgctgaggccgtgcgtgcgccccggctgcgctgcgcgctccccacatacacaagctctccatgtgagctgacaggcgagtggaaacccctcgagtcacgctgcccggcggcggagggagcgctcgcccgcagtggcaacagctgcaccaccgtccccgtcgctctgccttcctcttctgcagcctctgctcttctgattacctccctcccccgtcctttggtgatttttttttttcaagaaggagagggcggggtaggtgtccgttccctcccctcttccccctcctttgccttcttggtttgaatttcctcccccggcgttgcactggcacacagtgcaagaggcaatacccgcacggagggagaacgaaggctgagactcccctgccgctccaagcccggaagaactggagcctggaggggggtgaggggagaagaggaagcgggaggggcttggcttcctcgcgtatttgaggacagcccatctcccttcaagaaccctacggagagtcggactgcatctccgcagcgagctcttggagcgccgccggccgggaggcgaaggatgcaggcggctccgcgcgccggctgcggggcagcgctcctgctgtggattgtcagcagctgcctctgcagagcctggacggctccctccacgtcccgtaagtagccgtctcctcgctctgctctggagcagtttcagtgcggcattgatgtttggcaccagggtatcaactccgaagtgcatcgcagtgctggcaccctgatgtgtttgtgtctccgctgtcacacacttgcagccactgcagtagacaaactcgaaacccagcgtttctgttttggaagagacagggttgtgacgctggtgatgtttctggaaagttgttcctggtcttggtgatc

SEQ ID NO: 333286 - DNA, 669 bp, Homo sapiens
  chr7:148036392-148037061
  hyper
cgggtgggaggatgcaagtacaattacgttttttaaaactccagtccagatattggcttttccttggatacttttgtgtggctctcccagtacagtcagatccgccgccgcagcctagcgctccaccccgggttttgcgtcctcccctcacctgcctttcagtggtgcggggtttgatcccgagagcggtggactcaaagctgcccgccgggactcgggctgccggccgacaaaggacggtcctcgggggttctgaagtctgacccggccagtgggaaagccacctgcatcacaaagcgaggggcacacctgaaccggggctggcgggaagaggcaagtattgcgcgcgggctggctcccacatggagctgcctcccggtgcaagtgttgcaagggtgcgctgctccagcccggggagcgcgggaggcggcggagagagcgtccgggtgatgagcggggcactgtaactggattttaacacctctgcaagcagcgcttttggtcaaaaaatttccgattcttgatcttctctctgcaaggtcgggggttctttggggagtaaatcacagcgtttgggtttgcattcgaagcactaccaagtctactccacagggtcactgcacggggagcaagtaaaggaaaacgaggagaatctgagagtgctccttc

SEQ ID NO: 333287 - DNA, 298 bp, Homo sapiens
  chr7:148394984-148395282
  hyper
cgaagtacacgtgaaaacaatactattttatatcacgactcatgccatccgtatgtgtaatcaaagccttctaagtcttgatatgtccttacaaagacgaaggatagagtgaatgtcaaaatttgccaaacaggagttactgaaagtctgaaggggaaagcctagttaggttttatcttagaagtgatttttaaaacgaaacacgcagataagctcgagctttctggagccgattcctaaggccttgcaggtggtaagggggtcgagaattggctgaggttcctcggaagtccgcgcc

SEQ ID NO: 333288 - DNA, 168 bp, Homo sapiens
  chr7:148523540-148523708
  hyper
cgtacaataattgcacttacgatgtaggaagcagtcatatttaaaacatcgcctacagaaaagcgtatgaaaggagtgtaagctttgctctctctgaacagatttagcatttggtccatctatgttgggggtacattcaggaggaagtgcgcctgggagctgctgttc

SEQ ID NO: 333289 - DNA, 330 bp, Homo sapiens
  chr7:149112127-149112457
  hyper
gcgcagagggaacgcggatttacccggcatggtctttggaaatcagtgtgctgtggaagcaggtcttgctagagccaagaaacctctaaaagccactattcagggggcacccggatttgaaccggggacctcttgatctgcagtcaaatgctctaccgctaagctatacccccgtcacacgggaggaaagcgtcactcacgtcttcgtagtcagccgcacgcaagccgcgtacagcactgcagggtccgcgctttgggcggcgcttttctccggcggccagttcggacctttgcgcttttaccgtcacactccaacgcactttcttcccc

SEQ ID NO: 333290 - DNA, 908 bp, Homo sapiens
  chr7:149119398-149120306
  hyper
cggggctgcggccgggcggctcccgcactgcgactaagggccagccggctggcaggcggggctggggctcggatgtcgggactagcgggtctctggcgcgaggcggccgccaccaccgagaaggccgcgcgcattcctagagcggccgccagcggccaggtgagggcgccgcggcctccggggcctcctcgcctctggccggcagggggcagcgcgcggccccgcgcggcccgacgtggcgctggcccgggaggcagcccgtgggccgccggcgcgccctgccgggcacccagcagcgcgctcccgttctcatcagacgggagaaaaaacgcccaggcagaggaacgtctaaaagtcaagtcatcaaaattaatgtaatcgagaaaatgtgcatatttaaaatatggatagagacgcataaatacatctttaaaataaaaatataatcgtttgtgttaagtccttgctccattggctctcagctgcactcacagcaccagtgagaccgacacggttgtgccccatcccacaggcgccaaatggagggcgcagggttttaggagctcgcgtagggcctctcgggcggcagcaatggagccgcgaggccggcggggagaccgaggacgggacccgctgagctctgggtgagctggggggactcgaggggacctggatgggccagaggcctggcttggggaagggccccttcccggttccccaaggtcccggtgtgccgctgccgtagggaagcaggaaggcacggccgcgccaggcgacctgaacgagaggaagcccggggtcgccgcccgcgggcgcggctggtgttcatacccagccaggaagggcgggcgggcctcgggtgccacgcggcgtgcccggcgctttccccgcagtcccgcttgctgccc

SEQ ID NO: 333291 - DNA, 1010 bp, Homo sapiens
  chr7:149411354-149412364
  hyper
cgcgcttccttcccgcatcacacgtttatttgaggcctactatgtgccaggaacaactggggttaccaccccagcaaacaggcacgcaaaatgtgacacgaaggtaggtcatggctgcggcgagcgggggcgcgggcgaaagacgtgaggatgtacgggggcctggcagctgctctgtcccacccacgcccggccggaccctcgacccctttcactccaggtcgggtttccccgaccgcggcctctgggaaagatgggtccctcttcatccccaccatcagcccctggcacatgggacgcgctgagtggtggctgcgggaatgaatgagtgataagcggcgcgtacccgcgggcttgcacgcccacagccgccccggctggtctcggcgcgcaacctctacccgcagctgggggcggggacgaggggagggggcggggacgaggcccgagccaggtccgccccgccctgtctccgccccccgcttccgagccggcgccgcggcgccttctgggaagtgtagtccgcgtctgcgccggccggccgggccgccgaagccgggggctccgggcggaaacggcaccacccaccaagggatgcgaggcgctcggggcgggctcaacgaggccgggggcgggcccgggcgcgcccacccccgcccctccccctcggcccaggcccccggccccgccttctcctgcgcggacctgggccgccgccgacgagggtcgcgtgcgcccgcgccagggcccgcgccggaaaccgaggagtggcggggaggctgagcccggggatggcgcgccaggtaaggcaggcggacgcgcggacccctcggcgcagtgcggccccgaaggcggtagggcgagaaagagctgggacccccccgcaacttcgggatcggctgggtgaggctgggcaggcctgatgctcaggggttcgtgccgggaagttcaggtcctcggacaacctctctccagctctccgccgccggtacccacggcccagtctccac

SEQ ID NO: 333292 - DNA, 1063 bp, Homo sapiens
  chr7:149570366-149571429
  hyper
cgctgcagatggatgtccgcgaggacgccagccctccgcctcccgccgggtccctgaacgccggcccggccggtccaacctcattccgcttcccgccatcgaaacgcgaagcccccgccttcccccaaacgtctcagcgccgctggggcctttctggctgcgccgcctccgaccccaggccccggtccgcgcccgccgctcgctagtcctgggagtgaggagaacgcgtgctgaggacccggccagagggacagcggggaccgccctcccgctgcgtctctgaaagcgaggccgttcctcccgcgtccgacccccgcggggccgtcaggttcggggcggcccaggctgcgggtccgcagggcgcttcgggccgagccggcgcggcgcgtgaagggcaggggacgccccgaaagaccgctggggtgggaccccaagctccaggggtctttggaaataagaatgcggcgtgacgttggctgtgcgggcgcggggctgacgcggaccctataacccatcgccgaaaccgggcggccgcgcccctattcctcggcatttctctctgtccgcggccctgctcagccaatcagcgagtgggctcctaggcaggtcctgagtgacagcgcggcgggctggatcaggagatgcgcgtgcgcggcccggcccggctgatcgcttcgggtgctcgactcctgttgcgcatgctcagcgcgctgcccggctggggacccgcgcacctgcagcgcccgctgctcggccctgcatcctgcctgggcatcctgcgcccggccatgacggcgcactcattcgccctcccggtcatcatcttcaccacgttctggggcctcgtcggcatcgccgggccctggttcgtgccgaagggacccaaccgcgggtaaggaaagcgcgcaggccctgcagacctctccaccccggccccctggcccggctcgcccctccgccccggggcggcggcttcctgctctgcagcgagcgtccgcaggagggacgccaggaccccggacgccacctctgaggtctctctgcacctgggtctctgacagcc

SEQ ID NO: 333293 - DNA, 133 bp, Homo sapiens; identical to SEQ ID NO: 233302
  chr7:149745490-149745623
  hyper

SEQ ID NO: 333294 - DNA, 115 bp, Homo sapiens; identical to SEQ ID NO: 233303
  chr7:149917248-149917363
  hyper

SEQ ID NO: 333295 - DNA, 437 bp, Homo sapiens
  chr7:150075217-150075654
  hyper
cgaatctcagtccccagttcctgctgtgctactgaggctaaaccgcagccgggcctgtggcaaatgtttaatcagctgttgactgaagaaaataaggtccgcctgcccaacagcaaccgtttgtagagtctcagaggcccagcttctgtctgtatctacctcatgccccagaggcagcttctagcagctccggagagcatcctgccagtgggagttgacccagctgcgccccctttgagggagaagtgtgaggaatttccttacaatggggtggggagttgcgaagatactccttcctgaaggtctggcagtctggaccggggtggcaactgggcggagatgattccgctcacgggaaccctacctagtaacccgacctagtaacgtaacctcagagccgttcctcagctagaaaacaaagggattaggccgggcgc

SEQ ID NO: 333296 - DNA, 35 bp, Homo sapiens
  chr7:150102887-150102922
  hyper
cgcgggtgtcgctgcgggagagttaccgtatttgc

SEQ ID NO: 333297 - DNA, 376 bp, Homo sapiens; identical to SEQ ID NO: 233311
  chr7:150655196-150655572
  hyper

SEQ ID NO: 333298 - DNA, 846 bp, Homo sapiens
  chr7:150671471-150672317
  hyper
cggtctaactctagtccaacttgctctacgtgcccacacctgcccagggaaaaaaaggaccagaggagccagacccacagcctagcaactcctttgccctcctgaaaaccatctcagcagagtgaggcgcaggccccggaaccgcgcctcccacaggcacaccgcagggcccccgcccgcgtcacacccccacagaaccctgcccgggctcggggcgttctccagccgcccccacacccccacacccccacgcaccctgcccctcgccgtggtcccgcccctcttgaccccgcccctggtcgtggccccgccccggcccgctcctaccatctttccggtagaaggcgatttccactttgcgctcctcggcgcccagcagtgcctgcgcgatctgcgcggcagcgcggcgctgcgtgcgcggcccgtgcaggaagtcgcaggtgcagggtcgctgcatcacctcggcccgcgagtagccgcacagctcgcagaagccgtcgttgcagtagatgacggcgcagttctccacccgagcgttggcgatgatgaacttacggcctaggggggcggggaggagagtgcgcgtgagcggggaccccagcctccgggactcccagcccttccccacattctccactcacacagccgcccggggactccccgccacaggaagcatggctgggactggggtcccagcagggggcgaacgcagctgtgcgtgtgccccgatacaggtgcctggccggccgggccgcgcggcgcgccccctcctccgcctggcccgcgggcgggctgcgtggcttcccccgggcaggccgccagcagcccgccgcctcctccatgccc

SEQ ID NO: 333299 - DNA, 351 bp, Homo sapiens
  chr7:150676178-150676529
  hyper
cgcgaggttccaaccaggggatccccgggtgcgagcggcccgccctcccccggcagcccggggccagccttgcacgcccaatcggcgggctcggggccctgcggcggcggccacggcccagcccctcggaaagccctggcctagccgcaggcccctccccccggccagctggctcgctccagctgcggctcccttatttaggcaaggaggcctagggatgctcaagggcaggcggggtgtctgccccgccgcctgctcatcgcctgcttgcgtctgagtgagggtctccgggcgcggtgtcctcggacttagcagtcaggcagggccccgggaaggccagggcggggaggc

SEQ ID NO: 333300 - DNA, 1353 bp, Homo sapiens
  chr7:150714968-150716321
  hyper
cgtggcgcttcacatccataagggcaaaggaacagatgtccccaaccccagccacatccacagtgaagtgatgaaaaaagtcgataatctccagggcacgagggcggaaccagaaaagcagaaacagcggggtgaggagcggggacaggagctcctccaggagggagacctggggaagcagcggtgaggctgagcaggggtcgctgaggggcccacgcgcgttatcaggaccaagcagtccccagcgaccctcgccagggcaagaagcctccccacccagtcactccctagactcctggtatagtccgtttgtctcatgccctctcccagacagaccctccgcgcagacagaccctccgcgcagacagaccccacaacttcctcctcagcccgccgtcgcgcccaccctcaccgctcggtactgcagcagctgcgccatctgccggtaggcgcggtccctgccgccggggccgggctcctccgggaggtagtgcatgtgggccagggctgtctgcagcaggagctgcggcgcacgaccctggcactgctcttccggaatgaaagacctgaaaggcgggatccgtggggggaaggggcctgcgattaggaggacgcgcggtgggatgtagggctagagggccccagtggtgggagaggtaaggattcggggggaacctcacatggccccagatcagagaaaccaacacacaccaccaccccgggcatctgccgtcgcacctggcgacggtggcggtgaccccgagcgcggtcatggcggtgagcacgtgctccacggctagcacgtcctcgtcgtagacggtgagcacaagcagcgcggcgaagagtgcacccgcgaagaaaacgagctggcgggccagcagcgtgcgcaggggcgcggggggcgcagcggtgcgcaggaaggcggcggcggggcggtaggcgcgggccaggcgcgcgcgcagctcgtgcggcagctcgttgaagtggcgcagctgcaagcgcgccaggcgggaccagccgcgcgcccccagcgcgccaggctcgcgccgcagcagctccacgtggctatagaagacgtgcagaacctgccaggccagcaccagcgggctcagcgccaggttcagggcggccagcagcagcactgtgcgcccccagcgcgctgctagggcgccccgctggtcgctgcgcttgtaggcgtgcggcagctcccagcccccgcggaagagcgagaagggaccgcggaagagcagcaggtcgacattgagcgccaggccgcggctgaggaaagccgcactgcctccccagggcagcgggcagcgggccggcagcaggcctttgttggccagcgccacc

SEQ ID NO: 333301 - DNA, 35 bp, Homo sapiens
  chr7:150716351-150716386
  hyper
tggatgtccagctccgtcaggggccgcggctgcac

SEQ ID NO: 333302 - DNA, 296 bp, Homo sapiens; identical to SEQ ID NO: 233318
  chr7:150748197-150748493
  hyper

SEQ ID NO: 333303 - DNA, 960 bp, Homo sapiens
  chr7:150784079-150785039
  hyper
cgccatctacgacctgatcgagcgcatcgaggatttggcgctgcagaaccagatccgggagcacgtcatctccatcgagggtgagcggagccgggggctgcgggagccggggcgcagtggcctctccggcgccggccgagggctccacaggccgtgcctggccatgctctccctgtcgggggtccttgcgcgcttgaggaccaggccacgaggtttgccgatctgtgttgcagaaccggcgggcagcttcgccatatctcgttcggggacactttggggttgggggttttctgctgactgtgttccagggcgcgaaggtggtgtcgcttgggggggccgggaccagatctgtccaggcctggccggggaaggtgggcgcggcagagggcttcagctgcggggaggtggggtcgtgaccggggaggcttcttagccgctgcccgggccctgctccgcagtggggcgggggatcggagcctcgcgttagtggatggcagccttcccgggcccagcgcccgcaggcccggagggtggcgctcgccgcggcgccctctcccgacgcacaccccctacgccgcggcggccaagcgggagcgggccgggcctggcgctgggctgaggctcagcgaccgcgtgggaggcgccggcaggtccatccgcgctttggccgggtcatgagcctgacggggatccgcggctcctcggtctggaggcagctgctgggcagccgggtgctgaccgaccgccagggacaccgcacccggagtcggggaccggaaacccccggccactgcgctgcctagcgcttttttctctgggcccttaggccctggactttcgaccgctgagggcacaggaagtggtggcacgctgctggcagatgcctcgcaagccctggtgtggtgggtgctggaggcacccgcaggcaccccggtggcatggtgaccttcgagcgggcac

SEQ ID NO: 333304 - DNA, 762 bp, Homo sapiens
  chr7:150863966-150864728
  hyper
cgcgcgatctaaaggtctgggacttcaaggctccaggcaggtgccgaggtgccgaggttccgagcaggttcctgtctggaatttccaggtgaaccggcctcccgccagccctggtcggccctagcacttaccgggcagacttggaaaagtctctgagaagtgcggaggcggaggtggtgggggctctgccactttctcccgggccggcagcagctcatcagcttccagcccaccctctgggcgtcggccgcctggctcggggttgtttcgggcggcagtggcggcggcggcggcagcggcggcggcgagctcctggggcccgtagaaagcgtcgggcggctccgcgaagctgggcagcgcggtggtcagcgccaccatcgagggcacagcctgacccagccccgcgcagaaggtgttggtaaggcggccggcgaaagaggctagcggggcgaggggcgggaggccagcgggcagcggcgcaggggccagcgcctgcggcagcacgagcggccggtagggcatgaacatggggtagccggtgtacagcaagtggccggagcgcggcggcggcggcccgattagggagtcgatggagaaggcagtgcccgggcccccgccgccgcccccgccgttgcccccaggggcgctaccgcctccggcccgctgcatcttgttcggagctgcggccgccccggggcgctcctctctgggcgcctccgtgcgccccgcggctcgggcgccccgcgcggacacgcagggctc

SEQ ID NO: 333305 - DNA, 370 bp, Homo sapiens
  chr7:151038589-151038959
  hyper
cgggcgggaagtcctggaagactgagcctggggtggcgttggacaccaactcccaggtcctcgccccacacggccacatcctcgcccagccccgcctccgcttagctccgccccgtcgcggctccgccccgcggtaaccacgcccacacaaccgtatccccgcccacagctggcttcgccttggccccgcccacaaccctctttccaagcggcggcggcggcggcggcgcgaaggcgacagcggcggcgggggcggggctggcctcacccggaatgaaaacaaacggcggccgctgccgcatccgggcactctgctggtcgcggcgggagtggcgtggcgcaggtgaggacacggcggccgagtgtcctc

SEQ ID NO: 333306 - DNA, 977 bp, Homo sapiens
  chr7:151106536-151107513
  hyper
cgtccgcggtgctccagagccgggccgtgccgtcctcgctgcccgtcagcaggcgctgcccgtcggggctcaggctcagccagttgatgcccccgcggtggtcggcgcagaccctcagggccgacccgccgccccccatcccgctggcagggcggggaacaagaaggagctgcgccccgctagggaggggcgccccggggtccgcgcggcggctccgtacgactgcggcccgcggccatcgcggggaacggggagcccgactcctgcggaggcacgcggcgaggggagggtgaaggaccctagctccccgctgcctccagcctctgggcccgcgaacccagggcgctgcggggggcggcccactcgggacctccgccctgggtagagtcctgggcgcgcgggcagagagaacccccttcccagcaccgctcggaggatccacaccccaccgggcgaacaaggcagctgcgtctctggtgcacaaggagccccccgcctcctctcgcgcccacggggctggggcggggagaggaacacgggaagccgagcgccccgcgccctccccggccgagcgcggaacaatacggtccagcctggctcctcctcagagaccacccctcacccgatcccctcccacttctcgggctgcgccccagcccccaccccgcgcgcctgcagcctccccccttcgtcgctgtgcgggtccgggggacggctccacgtgcgaccctcctagctgcccgggctgcgcctctgggctctggcctctgccacctccgccgccgccgcctgggtcccctgagccaagggccgggacgagggagggggaggcggacaaagggtcggggtcggggagaatcgcgcgccgggaactcatttggggcgcagctccaccgacccctcggctactcgcctccaccaggcaagccaggtcctcccatgctctgagccctaaggactctgcccgaggggctctc

SEQ ID NO: 333307 - DNA, 301 bp, Homo sapiens
  chr7:151136933-151137234
  hyper
cgaaggcggagccccactcggtttccttggggttgagggacgcactcaccttccccgagcgctgcgccatggtgcgccccgccccttccgcgggtccccgtttacaccgggcagcgccctgctggctcagcgccgccccggacaaaagatttgctgggccggccccggagcgttagtgctgtcgggcgtgctaagcccgaggggccaccaggcggttgggacccgccgcggccaccctgtgccaccgcgagtgcagcccgccctgcccggggtctccctgtgctctccgcgtttagctccc

SEQ ID NO: 333308 - DNA, 961 bp, Homo sapiens; identical to SEQ ID NO: 285541
  chr7:151572578-151573539
  hyper

SEQ ID NO: 333309 - DNA, 789 bp, Homo sapiens
  chr7:151722451-151723240
  hyper
acacagatgcgtgtcgccgcgcaatgggcacagcgcatacagcgcagagctcccgggctcaagcgctgctcccgcctcagcctccggagtagccggggccacaggcagggcatttgtcattaatggggtcttttgagaccgcgggtgacagacaacaggagccaggccacgcgcggcgcctctgcgcgaacgctagggaggactcagcgcgcggcggccggtgacgtcagggcagcgagaggtttcgtcaccgcggcgcgggggcggggccgcctgtcacgcggcgccggcggacgcgcggcgctgggcggaggcagcggctcggggactgggcgagggccctgggcctgaggaggcgcggccgccactgcgcccagcgcctgcgcgacgcctggctgctgggccccggggcagttcagcccgcgccgctcctgcgggtcggactggggctgtggcgggagagaagatgccgcagcccgagtcccagaaggcggcgatcctgggctgcgggcaaggcggtgagtaccctctaggcggcggcctcccggcgtccctcagcacctcgagagctgcggcggcggcggcgcgcggggcctgggcaggctgggggcggcggcggggcagcgcctggctccccgcgggtcctgggctcccgcacgccccctgggcgaggctcgtgtctccgggagacgccgctgcccccgcgcctcccccagcgtctcctgaggcttgttcgcgggcgtgggggcgaggaccagggcgctggcctcgttttcgcgtatttaggac

SEQ ID NO: 333310 - DNA, 152 bp, Homo sapiens
  chr7:152591571-152591723
  hyper
ctcccccttcgccccggccctcggtgggcgcctctgacctgggccgtagtttccaggcccgcgcgtccccgaggcggacgccagagggcgcgcgccccccactcctgcccgcgtcggggccgcagccgcgctccgccctttgcctgcagagc

SEQ ID NO: 333311 - DNA, 551 bp, Homo sapiens
  chr7:154861705-154862256
  hyper
cgtgtgggggtggctaggggaacgttttgaggaaagttcattggtcaacttgttcaacgtggcaaactcatttcaggcaagagaggcagcaccgtggacagcgccaaccctcctgctcccgggcggggcgaggtggcagcaccgcggacagcaccacatgtggtggcgcacactgggagccgccaggcgcggggagcgcagcagcaccgcggacagccccaaagccgcgcgctctgagccaggaggcggggagagatggccttatcagctgatggcttacgtagggctagatctccacttggataaggcaggtctcggtgggcgcgccagcattcgctctccggagctgcagcctccgaaggggtggcgggggcaacagggacagaaggcaggtcccagaaagcaggttcccccaaaactggcttccctagcacggagttaaggctgcagccggctgcctagagagaagggtgggcagggagacaacgcggtgagagcgactgctctgacgcaccagcccctctcctgcacccacacgctgctggccgccc

SEQ ID NO: 333312 - DNA, 1922 bp, Homo sapiens
  chr7:155164457-155166379
  hyper
aggcgagcggaccgcgctgcacgggtccaggctgggtgcccctctcccctggggtaaagaggcagcacaggttgggacagctagatgggggcaatccaggcgtcctgcccacggtttcctgggagccaacaaaggcgccgagacctcacccgtgtgaggcaaccgccccgtggtcccacagagcttctggaagtctgcgtcccggccttcccgatgcaaggcgccctctccacctgcctcggccgtgagcaggttcaggagggcgagaaaggttaggccgagcggaaccgcgcggccagcgttacgcagggtgccctggacacccctaggcgcccacctggacttgttcccacctcctctcgccccttgccttcttaacccgcattacccgtgtaggcctggggtggaatcggactacttgttcgggatttgctcgagaacattctagggagaaggcacgcccggctttgggcttggccgagagtttagggcaggagcgccggcggggagctccccgggtgctggagaatgcgtgtccggaaagaagtagggcgcgcttcgtggatgcaaccagggccgtctcgcgcactttcttcctaccctgggacagcgcctgaactggagctgggcgcacacactttacggagccagctcgggttcttacgccctggctcacccccgcccgccgccccaggatgcaggtgctgcggcgctccctggtagcctcccgcgctccctgggggcgcgctttcctccatttcagggaagtccccggacaggtgcccacgttttacgctgtccggtagaagcccgcgggctcaggccgacttgcgcggccgcttctccccagggagagaagctggagcttcccccacgcggccctaaggcggggccggctgggccggagtgggcgcggccagggtgtcccagcgcgccccctgccgaccgcgcgctgcggggggcaactccacctcccctggggaggcctcgtccccgctgcagggagactaaagcgtgggtccgcgaccagccggtttaggaacgaaaactctggaactaaaaacaaaaaataaaactggtgagtgcgcagcgtggtcagtgtttccctctgggtaatgcttggccaagggggaagatcgagtactcccgcccacatccgcctcccccaggagggaggattccctctctgctcacccaccctgacccacgcctcccgccaggtccactgctcagacaaatctgtaggtttctgagtatccgtatctcgaaaagcttcaatgcacaaacgaggttttaagcccatcgcggcttcgcaaggggaaggggctgcttccctaaaaacaaaacacaacaaaaaaggcaagggggtactcttgcagatggactggaattagtaatttagccagggtctcttccaaactcactgcaaaattcgccagcgtctcattcttcacacacggggcaccacacgagaatcaccccctccccagaattttgcaaagcacgtttgctgagttttctcgcctttccttccgacaagctcgaactggaaccagcgctctcccctctagacctgcctccgcgccccacccttcttcccccacacagtccctccgcagggagaattcaggtgctaaaaatgctcgggcctcgcagcttcctccctcctcctcggttcctcgaatgacccaagctgcctctttccgggcccttggaagacggtgcgaattccgcggcggcccgctctcgccagcgccacagccctgactcccacccggaggcctgagttcaaccgctttcgcttccttgcgggccgttcaaccctctgaatacgcagattcatttatttatgttttttaatgtagtaagtgggcagctaaatgaattgcaatttgtcatttttatggttaatttgaaatctc

SEQ ID NO: 333313 - DNA, 1423 bp, Homo sapiens
  chr7:155166425-155167848
  hyper
cgcgtgtttcggcagcagtgattctaacaggcgttttatgttaaattacagcagaacccagaacaaaagcaggcggcggacttgcagtcccagcggcctcggccggtccgcgctgccggtgtgagccccgaaggaaagcaccccaagctggctgaccccgcgcacccccggccacacccgcccatcctggcttcgagattaagaagcccagtttggcaccccaattatgtttggcaatgtccccggtgccccagacccgcactccgctgcctcctggcttctcatgcccgcgaagcacggcctcgccctgggcgcggggcatcaccggcgcggaggcccgagggcgggtcacttcggatccctttcttcccttcctcgtctctgcctcttttcctttcttttctccctccgcctctctgtcagctcttcccgtcgtttcctcggcacccagctccagtccaggcgctgtcccagggtaggaagaagggcgatgccccttcttccccttctctggtcccctccccagcctccggctccccaaggtgcagggctccggcgggggctgggccgggcgggtgggtttctgagccgcagcgcttggagctgggggagcgggagcaggggcggcccggcgggcgggccgggacccggcttttccggctacccgtgggccaggtgcgggtttcagcacgcggggcgcgtgtgggcggaggcgccggggcccgcggctccgcttgttcgcgcgttgtcgctggcgaggcgtttcttgtccccggcgcccgctcggtgccgtctcagtgagtttgattgaaacgcggctgcgggaaggggtcgacagaggcaagctgcgagcaaggcgggggtgggggcgaggaaggggacccggagagctcccggagggcttggccggccaccgccgcgcggcgctgctcggggactgctactttgcaaggcggcggctgcccctgcggggttcgggttgcagggtcaagtgtcacgtcctccgcaatctccaatattcctgtaatgtatttaaatggacgaattcattacgcggggccgtgtgaatggggcgaggccgcgagcgcggcgcgatcagtagcgcccactaacagttcgttctgcacggcggagcgcgagaccgcggacccacggaagccccctcaatggtgtttgcgtcctcgccgccaccggcttggtagggtcctttagggaaggaggaagagttcaggcacccggacagatcctaatggtctttctgatttttctttcccttcggtccgctttccccgcgacctcctccaccctcagtccgcctttcaaacgtcgtccgcggggatggctgcgcgatggagaaattggtctcgtccagagacgcgcgcacagccgtccccgcgcacacgcgacacgcccagggccggcg

SEQ ID NO: 333314 - DNA, 853 bp, Homo sapiens
  chr7:155174253-155175106
  hyper
cgggtcagacaaaagccaacttgcatcttccgctccgaggggatctgggcagagcccgggtacagccctgcgcggccccagggagaggggggagagggcgcgtgtccccagccctgccaagtggcgtggggagcgcgaggccctcctcggtcagagccaccaactctggtctccgtggacatcccccttcccccgcccgctcccgaggctctagggcggcctcctggccgctgccttctcgcacccagggtcttcggcctgggctccacacctcaggcccctcaagtaatcggcctcttggtggccgggcactgcctttccggctgctctctgcacccgtctgcccctccggcctcccctggcggctacaggcgtccggggccctcgctccccagctccaggcgtcccgggagccaggcgcgcagcggggcgagttctcgtgtccgtgtgagcgcgggcgtgtgtatgcgtgcgcgtgcacgagcgtgagtgtgcgtgagcgtgagtttgagtgtgcatgcgggtgtgaatgtgtacatgtacacgaatgtgagtgtgagtgtgcatgagcgtgagcgtgcgtgtgcgtgcgagtgtgcacgagcgtgactgtgagtgtgcgtgcgtggaagcgcggcggggagcctggctgaaggcctgctgcctgcatggctgtcagagaaaaacagaagtgggagcctgctgcgggctccgagaggacttgatgggagccctggcgcgcgctgggcaccgcgcggtgagtgtcgggggtgggggccgcgggtctccagcagcccctgccctgtgcggaccgccgccccgagggtccctgcttgcgggtccggggctgggc

SEQ ID NO: 333315 - DNA, 2294 bp, Homo sapiens
  chr7:155242121-155244415
  hyper
cggagagcggagagcgacagggaggcagccgaagacttgaattttgaaaggggagctggcggcgaatggtgaatgagacagctacttaggaagcgagtccagccagcccgggaggcggtggagacccacgcccggaagtaaccggattaggtctcagaatgtgatcgccccccgggtcccgggggagacgccaaggacgcgcaagcggagggcgcggagacaactgggagtcagagtctccatcacttgggctgggaacgcctctgggcgttccgacggggtggcggtgggggtcgggggaggcccttgagaaccgtgcggcccggggagagcccacccattgctgagccccgacacaggctttgaagttgctgcagtggctcagcccctcccccgtccggccctgcgcagcgcggtgccgcagagtccaggccgtgcctccgtttcgtcgctcagagcttattgcggcggctcattggaccacgtcggtggggcgatcgcagcctctgatctgtgagctgcaaagagctccgaggttcattcacaaatctgcgcccccagccgtccctccacgcacccgagccacgtcccgggacccggagagcccggggcgttgggcgctgcggaggaggcccggcttctgtcgctcccttcacctcccagcccgcgagggacttgggggaagggggagcaagctttcgctccggaagaaacgttcggaaccaaggagtctgactcctggatccgggtgcctgttggatccaggctcccactcccgggccctccggtcgaaccaagggtcccgacagggcccgaggcacccgcattcctaggagacaggagctcggccagggcgcatcaccgggtcctgctccgagccagaggatgtagtgtagacacccacccccacaccgcccctccacagagctcctctccccttggggcgtcgctgggcacagggcaggtcgctaggaatccccagtaaaaccacgctcgctcagaggttcgcggcttcctcagagggcgctggggaaagagaggggacctgatttcttcgaccctcggaggaaaagtgctcggggcctcctagggacacagccctggaagctcacctcatcttagcttaggccgcggcgaggtggggaggagagttaggagagggggagaggggctctgcgccctgcagaggcctttaattctggaggaaaaagactgggacacacccaagcgagccaaggcccgagccccacgcacctccacccacccggggcggcgcacagccagctcctgccgggcgtgagcactcgatcaagggagcaagtggaatgaaaatccagctgggggggtccccatcgacacaactgtcccgcagtcgagcttctggattcctgggagatgtggagagcctggggccggctcccgctccgcagagcagactggactgccctaggtgcctggaatgcgcctgcaccctgtccctcggacccgcgggagacccgtgttccgcaagtcccccttctcaccctagtctgcccctacctacatcccgccggcgagtgtgccaccgcgaggcgcctccttccccgggaagggagctcccttccgcgcagacccgcattgcccttcttttcgctcggttttgttttccaggggtagtttctgcagaaaggagattctcctccgggccgaagggctaccagcctgcagtcagttcagccccggaccctgggagatgctcaccactctgcggatcttgatccgaaatcctttctggccgcccactgcggagagtgtcctcgtagagaggttttcaatcgaaggagcctgggctccacattttgtcttcaagcctgagctttcagggctgctttgcacgaggtgcagatgaacttgtgtctgcaaacaagacagaaaaccctaagtgccgcccgaccttcctcttttggggaacccgcactttgtcctgggagcgtgcccagcgccttagtaccaaactttctggccggggctggcagagctcagagtcccgcttccccctaggcgcggccccctaacatctgtaacccaaatgttgcgccgcggccaaaattagccctggcagtgcgaacagagaactaaaagcaggcagtgaatgagaacagctcgcatttctccttcctggtagacggggaggtgtaaatcccgaggaattctagggcattcgctccaaacgtgggaaatcttcgcgcgtatcccgtttcttcctcccagcctgtgttaatgctccaaatggtgtcgagttgctcaactttgcc

SEQ ID NO: 333316 - DNA, 1864 bp, Homo sapiens
  chr7:155246273-155248137
  hyper
cccccctccccgggcgagcctgggctaagtatcaagtcaggacagaagggcggtccccagtcggctcctggcccactctgcttccccaacacctagggagcttgggctcagcacaggcgcttctccagcgatcggggcagaaccaggacgtgcaatgcgactgcccccccctccccgctccccggcagagcttctgtccgcgccaacccacccaccaggctctgcccgcgccacgcgcgcccctggcaggcctggggcggggaaaggcgaagcgctgggcacgcgagggcctgtgcaccccagttcctacgacgctcctggcccttttcaggcccgccgctgccgcatttaaccccctccttccgggggttattctgaagaagtctcagaccctagacccagcctcccagaccccgtccccgagctcgcccggtgggcctgtaggccggtcctccttcgcccagaggagagcgcagacacgcaatgtccgcccgttggccccgcccgccccacccctgctccccgcgccccttcgtttcggcctttgtctacaggccgggtcggaacgtcagccccaggagccgacggtggctctctgctcgccccggggaaggtgttgctctcctatcggccccaattccccgcccggcgcctggggcttggctgcggggctcggctcccagccgagggcgcagggctggccaggcctgctttggctgaggtggagatctcgctctcagggattgttgggcgtctctgccccgcgagtaacgagaccgccgcgagcgaacggctttcattgagtccatttttccaagtgtcaccacgtcaagctagagaagcgaggcgagtggaggggacgcagaggggccggaaaagtcacccttctctggcctcgttttcagataaaaacgggagcctggctcggcatccgggcgcccggtgtctccggggcgcttcactgaggttttgtttgcaaaactagcgtccgtgtcctgaagcgcacggcgtctggaagctgctttcctgctcgccctctccgaggcccctctttgtgcagcgagcctgagaaatatggaggaccgtcctccgcaagcgggtggtcgcgggcgctctccgattcctgggtgaagctagagggaaaacggggttcccgggtcagtgccccactttccatcccgggagaaactaatgtccggagagggctcgtctgatccgcacagaaaggccgaccttgagggcggcggtcgttcgggggagaaagcggaggctctgggctcgcgggagcgcggcagccggggctggcatcgcagaggagagacacgccactgccccgcatccccagaaagcgcgaggcgccgtcccagctggggcaggcggccgaggccggtcctcatgcgcgcttctcgaagcttcctgaaacaccttgcggagttccgtgtgtatagaactcagcaccgcccagcccctgggcagctcaactttctgcagccccatcccagcttccccggccctttgaacggtgacccctcttaccgctttcccagagttgtttcgtgtttgggtccactctggggggcccggtaccctctagttatctctctcttcatttatttctctttctcctattcctccctccacctctcaccttcctcctttccaggagagcgacccacgaattcctcttcctccagccaaccccagggcccagcccgcagaccctgcgagggcaggtctctgcccaccggcccgccaggcgccctggaggtgacgctctgcttcccagagtctctgttgcagccacgaattggggtctgggtcgcaggaaagcacagggctgaagcccagcgtcttggggccattt

SEQ ID NO: 333317 - DNA, 996 bp, Homo sapiens
  chr7:155249624-155250620
  hyper
cgggtggaatgcggccgtatgcacgcgcctccctgcacacgcacacacacgcacacttacaataagtgtctgcaggaggagtgtcctgcgcgccagctctgcgtttaagacaggaagctgccgggttaccgagtcaaatgggagtgacactattcctctccatcagcaaggaaagcggaccacaaaagtccctttgtatctcggcagctcatttaatattatttatgcattttgtgcaaggaattgtgggatttcgccccacggtaaacaatatggaaatcttaaaaatagcgatcttcctgtgcgtgtccacctacgcgccccggggtgacctggcggggctgtcgccgggtgactcacacccctgaaccgcgaagcgacagggaaagcgcgggcgagcgcaggagacgcggtcgggggtctctccgggttcctgggctcccgcacccggagcgggggacgcggccgctttaaggggaggaggggcggcgggctgctcctgtcacccagcggcggccggagcgtcacgtgggcgcgcggcgccgcggccattggcccgaggcacgtgtccaggagaccggcctgcgacgtcactcgagggggctctgttaaaaataagaacaaaaatccagagtgaaagtgtctcaggttgcgccgagtggcctggaaatttccgagcccgcgcggaggccgaggcggcgagggcggcggacggccggggagcgcgggcggcccagcccggcccggccgggccctggcctcgcgtctctcacccatgcgactcgggccgcggagctctgcggggctcggcgggggcgcggccgcacgccggtggggcgccccggcccgcagcggggcggcggccgcgaggagggggcctccatgtgcgtgcgggcggtggcgggcgcgctgaccgcgggcgcccggcaccctcgagggccggctagggcgtgcgggcggggacggccgggcggcggcggcggccggagccggccc

SEQ ID NO: 333318 - DNA, 382 bp, Homo sapiens; identical to SEQ ID NO: 233362
  chr7:155254935-155255317
  hyper

SEQ ID NO: 333319 - DNA, 124 bp, Homo sapiens; identical to SEQ ID NO: 233363
  chr7:155256238-155256362
  hyper

SEQ ID NO: 333320 - DNA, 713 bp, Homo sapiens
  chr7:155257774-155258487
  hyper
cggtgctattccagtgactacatttttttaaattttgcgaagttcaacaggtctccctccggctgggtgctcactggccctgccacccgtgctggaccgaggcgctttcccctggggacaggaactttttactccactgagacaaagagactctccttttcaaagtgtcatttttgtttaccttttgttgtttcccccccaaaacaaaagactttgtacaacttcctaagcaggattgggggagggatcagcttcgcctgtgctgaccgcgcctctggattccgctcatcaggaagtgtttggggtctttgagcgagtgatctacgcgttgaattgctgtttttccaaactttcatggcttaaaaattttttttcttctccctgtaaaagaaactcagagactggtgatctgttaccgaagacgactttttaggcgttttctgtttccccaggcagctgggccgttggcgttcccaggcggaagcggggcctctgggctgggcctctgccctgccaggaagcggtctgggggctgcccctcgggattttcagaaccctggaaggagagagctggggtctcaccgcggagactcccgagttctcgttgcctgggcccgagctgcgccccagggtcatcgctgatggcgcgagaccacgcattccccgcgaaccccgacttctgaacagttcagaaagttcgtagattaaaaacc

SEQ ID NO: 333321 - DNA, 1884 bp, Homo sapiens
  chr7:155258815-155260699
  hyper
ctcatggagagccgcggctgtgccacctgcctgctttcgccatggagaccggagtcaggcctgcagggaagtcggtgcgcctttcccaagtcctctgcccgctggttcctctcgggcctcccgggctctgcgtgccgcggatctggacccggactgcagacaccgccccacgactgggcccccggccagactgttaccccacaggaggagggttccctaagtgtgcagaagaggaaagctcatttataaagtccttgctccttcgagctgaacgacccccgcgcccgaggcctagctgtgtccccgccgggcccaggctgagcttactccacactgctccatagccgggcagagactccgcgagggtctgggagtcctggcctcggaggacccgccgccctgcaggcctgcccaagcaggcgcccccgcgagagtgcgggacagagagggcctggcggggctccttggcgctgagagccctccttctccgctgcacccagctctgccaacggggctggatgagtgggggctggagtcagaatcccagggtctacacccgccgacagcagcaatgccgacccgccctgcctttctcctaaggagcggagggaaggagccatgtgaatgaccccagcctgaccaccaagagggcgccagcatttctgttttcctagagtgaaaaggtcaaatcgatgggggctcctacaccgctggacacaggtgcgcccgggcgtccagtgcgcgcaacacacgcccagacactctatatgcaaatatgcctgccgccgcggagccggccgggaggcagcgtttgttcgctggggttctgctagaagtcattctgtctcccgctggtttaatatccgccctctgcggtctccgctcgcctcggcggctcccgaagcgcccccgggagggtcccggctccgccgaaaactgcagcctgccaggctgagccgccgcgcgctgggaggttaatagcgactgacgacaaagggccaaggtgcaattcctaaagcggggattcgccgggtgaggcagaaatcagcctccggggagatgggtccccccttcccgacgcgcccctgcacacactgctgccccggcgccgggcctccgggcggggacccctcttccgggcatcgcggccccattcggcggagagctaggccctctccaggcctccaagtagggagcggacgtgggtggtggggaagggaagccgccggcgggacggagagtggggtcccccggaccctgggtcgggcaggcctggcgctggcagctctgttgcacagatttgtgagcgatgctggtggccgcattgccgcgcggcgcgaaccccaagtagaccattcatgtttttattaataatctcaaacacttcattatatttatgctgcctgcccagagaaaataaaaggccattcttgaaatcgcctgaaatgtaataatattcattaaagcgcctcctaattatgtgatttaatcaagcgtggtgcgcccgcgctctcggctctcgctggaaaggctggcgatgacggttattattactgctgttgttagtggcctcgtgatagcagccggccagctcttcagtccaggcccagtttcctcagagagactcggggagccccactttgagggatggggttccccggaacgactccgaagtcccggagaccaggcgcggcccaggccctctgcccttctccagccccagccccagccccagccccagccccgggcaaactcttccaggccgagggcaggactttctccagacccttggggccctctgtgtcccctggggacgcccgacccggctttctaggagggggaactccgggtcctgagcccgggccccgccccgttggctgttcc

SEQ ID NO: 333322 - DNA, 123 bp, Homo sapiens
  chr7:155299564-155299687
  hyper
cgtttctgattcagcggagacgggggatcctgtgtcagagccgtggatcgcagaggcagcgaggctcggtctgcaaacaagacgctgcaaggctgagtgagagagagagggtgtgcgagcagc

SEQ ID NO: 333323 - DNA, 279 bp, Homo sapiens
  chr7:155301671-155301950
  hyper
cgaatctcttgaaagttctctccttcgtcacagggtcttcctcaagcttgtagtcgttcattcgctcacagactttctccaaaagatccgttaggaacgcctccgactgagctagggggatctaagaagaaagacagggcgaggaaacttgtcttaatgttaatgttacttcaaagaccttccggcgagtccacatggaaacgccacactctccctgaatgcaaacgtgtgccacttccctagcacgggcccagaagacggtaccgcagattgttatta

SEQ ID NO: 333324 - DNA, 937 bp, Homo sapiens
  chr7:155302323-155303260
  hyper
cggggctgcccttggctgcgcgtcccccacgctgcagccgcgcgatggcccgggctggggtggacgtggggctgggagaggaaggggctcacggacgggcgccccatctcccaggcgggctcctcggctgctttctttgggaacagctggtgcacgtccccgcgcgcccctctccctccggaattcggcgaggattcagctggaccctttggccaccacctccgccccgggcgcgggtcaaagagcacccctcgcccttggtaacggagacaaaacgttcggggccgtctagacaggtcaaggtgcaggatgcggcgtccccgcggctccttccggaagggggcgtggagccgccaagggcgccggaccgcgccgcagcccgggcctttgcgggctttttccctctccaccctctgctgatcaaagtaggaagtttgcatgacaaccgcagtgaaaggggctgaatcacaaatgaactcgatttctgcagtgttgatctatccagcctccattgtcccctttcaggcgcagtatgaacccttccggtgccagcggccgcgctacattcacaggcgcgctcggggcgcacaaagggtctccgcgcttcaccgccatctggccacaaatctcatcagcggcgcggcggcgtccccttgaaagcgcgggcggagggtgcgcttgtgttcttgagacccaggttccattacaaaccacccagcatcgccaccggcgccccccgtttcaataaggaagccactttgtcaaaacattctaaaagaaacttgggaagaggacgcgtcagagaaataccgccgccgattaactatcagctgcgcctcccctgtgcacaggtaacatccctccttctcccccacgactcggctggagcttgattttgagctgctctcaaggcccaggcactcgaatcggaagttaa

SEQ ID NO: 333325 - DNA, 180 bp, Homo sapiens
  chr7:155580730-155580910
  hyper
cgggcctggaccgtcaatgccggctccgctcacaccatctgtgtccacgcagagggtcgggccgtgggagccgcgagtgtctggcccacacttctgttcttaacctcgcaatgtattcaggtttccccaggcggagcgctcagcatatcgacagctaaaaatccaaccaaggccgggcgc

SEQ ID NO: 333326 - DNA, 1464 bp, Homo sapiens
  chr7:155601495-155602959
  hyper
cgcctgagctcccgcctacctccctgatctgcgagccgcgccggcgagtgtcaccgccagcagccggtgggcttcccccagcgcgggggcgggggcgtcccagcttcaagacagccccagcccctaaacgcacctctctccactgtcctttcccccaagcttggtggaacagcccctccccaaccccatacctgagcgtctttcctggcggccccagagcgcacattaaatctatttagtgtagcggctcgggaccccactccaggcttcagatccggccctctggcctcctgccccttaggagccccctggccgccagcaccctcgcctggcacctaggcccgcgcggggagagcgtgtctgtctgcgctttcctctcccgggttaatattaaccggcagctcctgcgttccggaactgctccgaaagttccactggggacgatctcgccatggttgagggacttgggcggcagtcacattagagacccagagacagggagggagacagaagaagagggtcacgcacctggggcagagcctaggtggttatttaaaatgagggcggccgagcaggctccccaaacctcccgccggcctggggctcccctgccgcctcctgcaccccgcccctgccctcagcacccgagcctccgccttccccatcccttcctcccccacccttaactcctggaatcgggagaaggaaggtaggggagggatcaaccggggatacctcacagactgccagcccctacccccctcggttttaggggacctttgtggggtctgcctgataatcccggcctggctctcctcacccaacccccacttgggccgtccttccccctccttttgtgttgggaacgggaatagccactgcccaaggaaaaaagtatttgttttcgtttcgttcgtctgagggaagttgacagaaggtcagaagttcaaatgctgcctgtgcgcgcggcggcgagagtggccgggcgcggggccgctgggccctgcgtcccccggcagggcggacgggggtcggggggaggcccccgggctgggggctccggctgggacgcggaggcctagaggccaggcaggcggcggactggggatgggggcgcgtcccagggcaggccggcggagcccgcgatgcgccccggcccctgcgcgggcgcccccatctccgcgcccccgccgccggggacactacagcgagcccggcgctgctgttagctcctgcggtgcctgcgctcccgcgcgtggagcagcagagcccggcggctccagcccagcccctcgcgcactgaaaccctagccgcgggggatcgataacccgggagtaagtggggctgcaggcgtctgcctcgctgcgcggctctgtgcgcttgcagctttgcagcagggctgcaaggcccaagccctgggaaggtgtgcgagcccaggaccccttctgcggtattggcctccc

SEQ ID NO: 333327 - DNA, 560 bp, Homo sapiens
  chr7:155604534-155605094
  hyper
cgctccggtgttttcttcatccttaaatatgatgtcggggttgtaattgggggtgagttccttaaatcgctcggagtttctggagatcttcccttcataccttccgctggcgcctagggtcttctcggccacattggggataaactgcttgtaggctaaaggggtcagctttttggggtgcctcctcttcccgaaccccctgcccggtccgcacgccagtcccgagcataccagcagcgaggagacgaggactagcagcagacatctcgccagcagcagcatctcgcccatggaactgatgacttccgagctgtccccgtgcgggtccgtgcgcgagtgcgcgcggcgggtgtgtgcgtgtgcgctctctcttgcgctttcccttcctcgctccggctcgcccgctcgctctctccctcgctggctgcctcgctctttctcttcctatataaccttgcccgccgcggctgcgggggactctccaccgctccccacccagacaggggctggaatggcaggctgccggccgctgataacggaacacatcggagttgggtcgc

SEQ ID NO: 333328 - DNA, 691 bp, Homo sapiens
  chr7:156409159-156409850
  hyper
cggcgttggcgccccggtctttcctgcgttggcgctggccgcggggcccagcacccgggacgttggcggcggcagaagggaaggccccggccgccctgctccgctccgctacagctgcaggcctctgcggtgacgggtgggggcaaaaaccctgcagaaaagtcaccgtcacacgcagagtccaaaactcccctttccccgctggaaccactttctccaaggagctccgccccgcgctctccccgaccccgtgcgcccccagacctcgcgtcccccgcgctctcccccgccgcgccctcctgccccgcgcccctcctcgccccgaccccgcgcccctgcgcccgggctccagcccggtccctgccgcctcccgcgccccgcgccccgctcctgcccgcggcccgtcccctccctgcagcgcagcgctctgggttcgggtctctgccctctccacccgcctttcccgcgagtcttcttggcttccgtgtccccctccccagccgggcgtcacccccgcaccccgcatctgcgcccccctcccgctaacccgcggcctccgcaagggcagcgcgctcagccgggtgaacctggaactgtgttcctggcccagcgctttcataaaagggcgcggaatagtaagtcctagttcaaggaataaacacggatccccactggccatgccgggactgac

SEQ ID NO: 333329 - DNA, 1047 bp, Homo sapiens
  chr7:156432933-156433980
  hyper
cgactaacagcgcagcgaaggggcggtgcgctcgagaccctggaacgggaacgaccacagccaccgcagggaaacaaccggggcccaggcccaggtgggcgggcggctgaggagcgtggctgcgcccacaaagccgccgggggctgcggactacagcgaagccggcgcggggctcggccctcactacacgaggcctgggcgcctgcacgcccccgtgcttcagcccgcggctcccgaacacccccgccaggcgatccccaaaaacgcccgctgcgcgagcctcgacgggaacgcacctgcgtctagacgctgacgccgtgcgcggggcgggggccggcgagcatgcgcagtgtggtgtggacagggcgtggttggcaagcatgcgcaatgtgggccgggcggggctggcgagcatgcgcagtatggggcggggcggggcagggctggtgagcaagcccgcggggagcgagcgcggaggcgggcgttgctacggcaacggtgggcggccagggagttgcctgagggaaaaggggcagacgtccctgggttccggtgttcgcggaggagtcgaggcacggagaggcttcgggggagggacggaaagaagggtggcccgccaggcgggcggggtccatggattcggggtgagggccgtccgcggcctcgctttcgcctcctccgagccgggccggcgatggccgcagctgtgaggcgaggtcgggtcccgtagcggcgcgcagcctccttgggggactcggggtcctggttagtttccacagctccttctatctgaggggtacgaatttacggctgcctaaagccttagaacagtgatcccacgtcggtaattttagaacccggtaggaccggctgccatcaggggccccaggtgcagggtggtgtcagctttgagaggaattggagcctcgtcaccgcgcgcttcctgcatgagtggaacctcagaaaacggtcagcggggttcagaaggcaggagataacaccaagaccctacgtaggattgcatctttacgtcgtaggcttggtctc

SEQ ID NO: 333330 - DNA, 170 bp, Homo sapiens
  chr7:156701747-156701917
  hyper
cggcctgagcgccagcggggctagggggcgctgaggccacacggaacgccggcgactcactgcgccaggccgggccaccgtgcagaacgcgcgcggatctcacaccccaccatgcggaacgcgcgcgggtcacacaccgcaccgtacggaacacaggcggatcatgattc

SEQ ID NO: 333331 - DNA, 1169 bp, Homo sapiens
  chr7:156794976-156796145
  hyper
cggatgagggaagggacaggtccacctcctctcccttcgagctgtttctttactccctgacaccagggattaaccggggtctcctggctgcctctcacctggcagccggagctccaggaggggctggaaaggagccccctgggcctccgtctggggggcgtgtgtgaactgttttctcccgtcacaaaaaaggcttcctccacatgcgtttgcacgcccggcagaattcgcccacagcaaggcccccctttctaagaagggaggagaacccacattggagcaaagaaaacggtggccaagaggtgggggcctcggtagggcaaggaggcaaggctgggttccaggggacagggtcagctttgggtggggcccagagccccgggtcgcagtgacggccgccgcaggggtctccccccgcgtaccttcgcttctgttgaaggcagtgagatccgcaggcctccgggacagctagaggacagcagacatgtcccgtgggggaagcctgggcctgtctgaaaacaccgcctcagctccctccggggtccccctgcgtagacctggcttcaggtccggagaaccggattcttgagggctgcaaagactttctcccccatgcgcggggtcagctggcggctcaggtgcgattggaggcctgggccccgagggaccaccgccccaggccgagccgagtcagcgaccccgagcgcggcgcccaggggtgggggtcgcgcccgcaaggcgggcagagccgggcctcgagaccgttcattaggcagaatgaattgttcaccgtgcccggagtggatgaggacgagccagtgattatatttaaatttgctataattgatttggggaagagctactgtgacaagaacgaattgatcattaaatttattagcgagataaattccgcggcgactgagcggcctgctggaggcgcaggggccggcgcaggtccggggcctggctctgctggaggacgggggaggggcggccctattaacagcgtcttcctttgatgtcgctcttccccgcgtcccagaggaagcgcctgtcccctgggggtagagggacagaccctccgcggaggcctggggcaccccagctccaggccgagcccccactcttccctggctgcccagtgttggtgagggcgctgaggctgggcc

SEQ ID NO: 333332 - DNA, 1833 bp, Homo sapiens
  chr7:156796432-156798265
  hyper
gcccagcagctgcttctgcccggactcccagcagccgcgccccggccttggatgaggttgattttatggaaggggcccggggtgataatgagttgccagagaggatattaatctccccgcgccctgaggcagaggagtggctgcgctcgccccgcggtaatcacccaaatgaaacgccaggcccttctgaactcattttatccgctgggaggaggggaggggaggagggaggagaagggcacacgcaggtgctgctgagaaagtgacaaacagaaggaaggaggaaggcccgggagaagggataggagcggcgtccccgtcgcccgtctcctccggggccaggagaggccactgggtcatcgatgggggaagggggccgggagtcgcgccgggctgggtgggccgcgggcctgcgctcctgggcggacgagagcgcgggctgagcccgcatgtgtgcagcacatggcgctgggcctggctgcggtgattgatggcgcgcgctgcagaggctgattaacccggagccgctgcagccgcggtgtggagcgctgctgcagtccgccgctgtcctcgcggacttgtttgcacagagccaagaagaccgatcctggccagccaaggaaggttctgctaacagagagggccggggtcgaggagagagagaagcaccgcgcaattcggtgcgttccgggaaatgtgcctcagtagcgcctgaggtcacagggaccccacatgctactaacgcctagtcgttttaagcttattttctgaaacgtccaaatagcgtatttccacttctggagtgccaacgaagcaacagctagcaaggaaataggaaaataaatagagtccacagctccgcttccgagggacacgtgtcccgggacaggtgtgcaccaggcagccgggcatgcgctgacacctggccacaggtatttttgccaacacttcacattgcgactccccagtagcaggcgcggaggtggtcctgacacccacttgagactccgattttcaccctcagctgccaaccgccgagtagacaccctccccatcatttctacaagcaaattgtaatgccgcgggcataatcccccaaaactcgtgcacgctgatccagtacaaaaccaatttattttacattccatcgtgggcgatgggagaagctaaataataatttagcatgcatacgtagacgtttctttttatatataaatacaatatacaaaaataaagacagtacagttttgagatttccagcagtttgaacgctcgtgacataatccccccgaccccagagacgtaagcataaacccttttttctttttccaaatactctgcagaatggcggctccagaggcggtttcaagtttcataagtcaggtaacactgtgggtttccgccttctcggacgcggggaaaggggagacaggaggcttccccttgcgcggggtgggtcggttcttctcacacgcactcgcgcctcccccaacaccaaccaaaattaattttaaaagaaccagagttcaagtttcagccccctgggtctccctctcgctgtttcttgaagagcaggtgaggcgcccttgcttaaaagggaagcgcccaggaccggagccgcggccgaatccctccagccccggcctgggcgaggggtccatggggcggcggtcgagcctgctctcggggccgggccgggtgggtgcgggcgccggggcctccgggagaagccgccggccggggcgctccgtgcgcgccgcacctgctgggccgcggggctcctactggggcgcgggctggtggctgggccgcgggggcggcgagtcgtcctcc

SEQ ID NO: 333333 - DNA, 1331 bp, Homo sapiens
  chr7:156798275-156799606
  hyper
cggaggaggcggcgtggacgctggcgccgttgctgtaggggaaatggtcctcgtcgtcctcgtcctcgtcctcctcggggtcactgtccctcaagtcccgcaggcggcgtccgctgcccttgtctccgggcgctggcggccccagcagctcctcggctcccggctcctccgcgccgcccttccccgcgcccccgccgccgcccttctgtttctccgcttcctgcgccgcctgctctttggcctttttgctgcgtttccatttcatccgccggttctggaaccaaatcttcacctgcgggcacaagcgggcgtgagaaaccggccaccgccaccccagggcttcctgtccccggagtcccccggccgcgtgcgcctgggccccattgggtcggccctggaatggcctcagggtgagacgacttagaagcagaatggggagggggctcgtagcttcctcctccccgcaaccccccactcagcagcaaaccccagagctgggctggagctccgtgggagctaggactatgtccccaacgacccaggccggggacttttctacccgcgccctccgtctgcggaggaagggtcagggcagctggctacgtcgcggtaaatctcaggatgttccctcctctctttctggaacaaaatttctcgaatgcggcctggggatcaccttcttcagaatgaaaggaggggtggttaagtgctgattcttgggccccacccgaagctactgaatcggcgctctgggcaccttagatgaacccgtgcgcccgccgtctgaaccgtcgaggcgcagcgctagatgcctcagaccgcccgtgggtcacaagtgcaaaggtaacagtgtcccctgggaggccgggatgcgtcgggggcggggagggcgcgcacctgggtctcggtgagcatgagcgaggtggccacctcgaagcgcttgggccgcgacaggtacttgttgagcttgaactggtgctccagctccagcagctgctggctggtgaaggcggtgcgcggccggcggcacttccccaggaggttcgactgcgcctgggctggggaccaaagggcagtgaggcccacagccggctccggtcctcgccccagcccctcccgttgctgcttgtaccactacactcaaggccccagcgccaaggcctggccctgcagagggcggggctgttccctcactatcagtgcccactccccaaggaatgcggactcaggaccaccaagtggaaatggatagtttggagttaatgagaccaatttttttttttttttttgtctaggagacgtctgagtgtccctgttaaacagggcccatc

SEQ ID NO: 333334 - DNA, 1332 bp, Homo sapiens
  chr7:156801418-156802750
  hyper
cggcggctgaaagcgttgagccatatacatctgctcggcccgactcataagtagctgaccccgatggggcgagcggggagagccagagccccagagagccagagccccggagccccagcccggagagtccgcgtgtgccaggaaagcctgaggggcccaggcctctggcgaggtgtcccgcccggatggagaggaagctgcccgaagcccagcggctctggggtggggagaacaggggctccctcggccccaccttggaggggcattcgttaccttgttgggcgcccaggattccagggcaggcacctactgttgagagtccccccatagctggttcaagccaggccacctgcctcggccatcgcaccccggatccaacgcccttccagaggagggcagcgccctggtaagagccgggggttccctgggccttggccttgcctccccgggcctccgaagcccatttctcttgtttgctgctcctgaagcactccctctccctggaggggccgcgggtctctctaacgccccagtgggggacctggcccaagttcctttccccggtgataagccctgacccccattcccgggcctgcctaattcagggcgctctcggctcgccttcccccggcgacttccttctcctgcagccttcgggttaatcattagatctcagtctcacacctccaactgccccttcccgttaagagaggaagagaaggcaaggcctgcgcatggccattttaataattcgctgcccgtctcatgcctgggggtccgggcgagtcctcgcaggccccgggcagagccgaggcggcttcgcagctcttcccccgctcgctgggagccaagcgcagagaggggcaggcggtgccggtggaggatgcgcgaggccctcccgccacgcgcatccacgggggccgcagggtactcacagttgaagtcgggcatcttaggcaggatcatgcccgcggtggacgcgcgcagccactggtccagctggaaggtgccggcgcccagcttgatggggtcggcggggtgcgcggggtgcgcgccttgcacctgcgggtacgagtaggagagcgccgggtgctggcccgccagcgcagccgccgccgccgccgcggagtagccgtagaccgggtggccgtagagcgccgcctgcgccgggaggcccgcgccgccctgcgcgcccccagggtgcagccccagcgccaggcccccagcggcggcggcggcggcggcggcggcggcagcggccgctgcgcccggatgcgcgtggtggtggggccccccgtgcccgccgcccgtgccgccgccgccgccgcccgc

SEQ ID NO: 333335 - DNA, 350 bp, Homo sapiens
  chr7:156808873-156809223
  hyper
cgcccaggcactcctttagaacccacctgttccccccacccaccctagtgggaggaggagagggttacactgacagataccggcagctctgcaacccgggaacaacgcagacaacatacaactcgacagagtcacagaaggtggcgtccatcgcgcctggatggtgactactgccctgcgggctgctgggtgggtgaaacacacagggaagaagcacaaatacacacacagatgtggctcagggacatttgaatgcttcagtgtgtgaattttttagcgcattctgactcgaaattatggctgaatagtggcgcactaatgtccaagtccatgttcgataatggcaggaa

SEQ ID NO: 333336 - DNA, 205 bp, Homo sapiens; identical to SEQ ID NO: 233392
  chr7:156809440-156809645
  hyper

SEQ ID NO: 333337 - DNA, 1850 bp, Homo sapiens
  chr7:156810052-156811902
  hyper
cgccctctgcctcaccgaggggcaaaccggctgaggacccaggcacgaagagtgtcaccagctctgaccacaagccccgtagaccagggctgcgtccataatcggggttgatggcattagttattatattataacctccttgttgcgtgattctagtaatttattttcccacttggcctttgactgggctgggctcctcccagtggaacaacagggggtgtcgtgtttgcagcagaaacgcacactgggatcctttcttgcaacagctgggccggctgggtcttttctcttgtcttctgtacacaggcccctctccgctgtttctgcagagaccgaggtgggagggagaaagaccctccagccctctgctcccaccctccccgcagtctccggggccctgtgctgcaggcaagataatttggctaatgaactcgttaaagggcccctggtgacccgccccggcttcccctcggcccatctgggaaattccattgaaaggctggagaaggttcctcagccccgccgccttctgtcgctgctagaggcgcgaacccggtgactctgggccccttacattaaaataattacccggcggaacaggtggcccactcccggcgcctgggtgcatctgggcccccggagccgcagcccgggaggaggggagcggcacgcccaggggagggaaggtcaggcccgctgagccgggagccgggagggtagagaggggctttcctagggacagacggtcccggggcacccaggcctccgcggccgagcgggctgaggcctaagcagggaggccgtcgccttcaggcacaggtaagcgcagcccgcgcaccgcttgggacgcacctggccacctgcgctgccacccaagcttggggtatgcgggtgcccgagcagaaccccgaactcgcaccgggctccgaggttggagcaactcctaacactgggctcggagctaggggcttgctggaggggcgcttgccgcgccggccctcggggctcacagccgggcacgccggactgcggcgagcgcgtgggcgagcgtgtcaggagcgtgcgccctgggtgcgcgcgtgcgagagcgcacgtgtagggtggcttccagtcctcccttcccgcctgagaagcgtccacgcggagttccaggccgggcgctggggaaggaggtcccggggacgctgctgaaaagagagcggccagcccaggcgcggggccaagcctattgccaaaaacatattaccctgcgacattctgtaaatgagataatgatccataaacccggatgatagatgtggcgtgcctgcgatgtcttctctaaatgagctgctcgcatcgactgctaataatggtgagtttatggaagcgatttcagcgcaaactgcgagagggtcttcttactctaatcagcctgcctgagctaatggacgagggggtcaggctgagagttattgacacgcccgtgcccttaacctgtttcccaataaagctgattagtttttgtcaattcatcagctaaccactcttgctggaactgcatcaaagccttatttgctcaggggaaatcaacaagtcacagatcagctccattaaggggcccggcccggcaaggacagtcctggagccgagggacgccccgacggacctcgggcctcccccgaggttcgcagaggggctgacagcgtggccccccttaactccgagcaccacgacccggatgcacataactgtgtccggaaacttctctttctctgcaggtggagcagcgcctgtgcggctccgcgctatggctccaaggctccggccctggcgtctgggctcggtcggggacagtttccacgcgaggc

SEQ ID NO: 333338 - DNA, 2231 bp, Homo sapiens
  chr7:156812847-156815078
  hyper
attttgttgtaatatatctgcgaaccggggactcccgggcagggaggcaggattctcccggctggggcggtctgagtagctgggtctgagcctcgggctgagaagagtaaattctgcagaaagggccgcgtccgatcggcgcaaacgttcggttcgtagcaggagcttctccaggcggccaccgaacccaggtccaggactcggcactcctggagccctcctccccacgcagaccgcgggggctgatttaatagaatgtcgatagaatcattcgatgccttttagcttgtgatctttataaatgtccctctattaaattagaaaatgattctcttctcgtttaattgtattctttcgtttcttatttccaattaattagtcctatcgacgttgcaatattttaagtgacttgagtccgtttccagttagaatatatgggtcagcacatgcaattttatacccgacaggactatataatgtgggttttaactactcgttcctcatctgtcttaaacatctggccaggatgcgccacccggcctcctcgcagatccttcctggggcaggtgggcaccacgcgggaccctcccgggggctcccgcaggcgcctcttgctgcccggggccaagggtcgggcagcccatagcgtccggcctgggcctttacttggaattctttctgttgaagacttggtcccagcccagtggttctgggataagaagaccccgcagaggggcccagcgccgcgttcctacgagacacctgagctgcactgtgtttccacgggctaggagagcggtgactccccagcctccccgtaggcctcgctcgcaccgcagagggatggctggcccgtgccgctccgcggttcccctccccgggcggatccgcgcagggagagcccggcgggcctgggcttgggcctgggcctggttcgggggtgcaggccaagaggggcgccaggccgggctcccctacccgagcacgtcagttccaccccctcccttcttgctgccctacaaaactttaaaatcactttttaaaagaccgtgtctcctctcggcagcccccctcgacctcttcgcaggcgcctgagcagccccgcaccgaggggcgcacctttgcttttgcgagctgcgcggcgcggacacccgggctgcgctcagcccccacccccacaggcttcccagccgtctgcccgagttcggcttcaacgggagcggggctccacttttccttaattgacgaagtcacggattcctcccgggcggatttatggggctgcgcgttgtgccggcgcccgctgcttcgcatctgcgcgcccgcccggtgccgggccccgccctccgcctcagccccaagctcggcccgcgggcccggccacaggtgccccggcggccccgcctggcccgagggaagagggcagctgggaggggccccggccgccgcccgttcctgctgcgggtgagcaccaggtccccgcgggccttgcgcggtgccccccagctcagcgtggcgctcggcggcccaaggtctggggcgtggagggcgtcagcacctggccgactcgccggttcccataggctgcctcgccccgcgttttcctagcgggggatggcggctccccgtgtccgcatcgctgccgggccctgccaccccaaccccggccgcagtggctggaagccgtggccttttccgggctccgagagccggcggggcggttttcctccgggtttcctcccgccggggtcttgggagcccctcagcctcgccctccctgcagggagaaacctgtctactgcgtgaatttctaagcagctgatccttcaggcccaagactcctagagtggaaagggttccccggaatagtaagcgcgccgtcaccttgggtttcttcttcccagagcaaggagacccccgttttcctcatgacccgcgtcctaaaaggtggggaggtgagattcactgggaatcgtgaacctgcccccggcttctcccggggcagcctcccccggtcaggggaggagggagcccttcccttcaaccccgaaaggttccttcctggtccctagctttgctctttgcaggcagggatggggctggcacgccttgcggagaattttaccgttttaaatatggacctagaggccaggtcggaaaggggaaagaagctgcgccttgccgagggtcctgtggccggagcagggcctgactcctgactcccatccagc

SEQ ID NO: 333339 - DNA, 359 bp, Homo sapiens
  chr7:156870979-156871338
  hyper
cgggaagcgaacccacgaggtgcagagagcagagggctcccctaaatccgaagctatcccctgccctcccttcctcgcgtggcttcccgggcgcgctctgcctgtctgcggggactccaggcgtccttgtgttttcagctcccggctcttgcccgcgcgtgtggcccggctgggcgctcgggcttcctcctcccaggcccgcggcggcttcccgtcctcgcaggcgcgatcttaccccggccggacagttaggacgcggttgtgctgacctgaggcttggccctgactcccgtgcacagcgcccgagctccagaggcgggggatctgaacactggcctgtgaaccccgagaaaaccccc

SEQ ID NO: 333340 - DNA, 226 bp, Homo sapiens
  chr7:157129089-157129315
  hyper
cgaagtctccacgcgctcccgttcgccggggaacttagggtatccgggcttccctaaattgacaagcgggggccggcgccttcgcccgccttcgctggccgccgcttggtttgttcttcttctccttcggggacttctccgcccgcgcccgcgcccgcgccccagctttcgtcccgctgtgcggagatgccacccagctccaccgcaggaccgcggagcgagaggc

SEQ ID NO: 333341 - DNA, 409 bp, Homo sapiens
  chr7:157361395-157361804
  hyper
cggcacgcagaggcaggtaacaaacgaccagcctcagaagcagatgtgcttgctgcaaaccaccttcctacggcccagcagaggcacaacaagcagcgaattttttccagggcctcccgtgaacacggcaccctacgttgccatagcgacgccatcccagctctgagccgcaacaaagcggcagtgtctgtgtctcacctttggccatcttgttgagaaccatgtcgatcaggacgtaggtgccgctccggcctgcaccgtcactgccaacagaaggagagaaatgaaagtgctgccgtccacacggaagcccgacccacaacaaagctagtgacagttcatttccttcctgcttacgggggccggcgagaggaaaggatggcggatgtgagagggggaggaaggacgc

SEQ ID NO: 333342 - DNA, 851 bp, Homo sapiens
  chr7:157476570-157477421
  hyper
cgcccggccttggtcctggctgctacaagatgagaacaattagcaaacccctttccaccacctaatttcgcgtggtaacaaaatggatttttccccatgaatgcctggccggcctattcattatctctcttctattagtaattttctgctccgtattcagcctcccaactcttcatttcctcccgtctcccagcgtacacagtgcctcttatgtcaggccgggcccgtttttatcttgtaatcataaaggccaccaaagcaattatcgccggtcttgactggaaaagctggtcattaattagcctccttttgccttcggtgcagcggattagctggtgccgggactgagttaatggaaacgcgggttaaatgagaaaagacgcccggattttcctgcctggatgcgcggctcggaggaggaccgcgaggttctccagcggcgggaggcggtggagccgccgcggagagggagggaggctttggagagggagggaaggaaagggggagggagagggaaaggggggagagggagaggaggcgcggggtgggggaggggagtgagcagggagccgggagagggaggaggggcgggaaccaggggagcggcccgaaccccgtttggtccggaccccgcagccaccgctgggtctcgccgccgggtcgcccttcgcgtggagatccggtccgcgccccctccccggtctcctcccctcccctcccctccgcccccctccctccggcccacacagcctcttccagaaagaagtcactctagagccgcgcgacccagccccagagtccgccggggtccgcccaccgggtctcctgcgcgcccctccccgcccctcccc

SEQ ID NO: 333343 - DNA, 957 bp, Homo sapiens
  chr7:157482797-157483754
  hyper
cgctggggagaagtcccggaggtcctagactccttggggcggtctctgcggggcgctgggccaggacagctgccaaccctccaaatctgtgcgctcagaaggagctgccctttgcccgctcctcctcacaggcccaccctagacccacttggggatgatcccaggcgcagctctcccctgccggcccaagcctttgacaggagtcctgcggcgaggcagagaccccctgaactgagctctccgacgccctagttgcccgttagagcccccatgcgcgccctccagccttcgaaagctctcttcctcgccccaccacctacgcgcctggtgatgctctcgtgggcccttcctgctccctccgcccccatcccagcctctctcgcctcttccagggcccacccaaccgcactacgagcgcccgcgccccgcccggcacccctggttacctgcagctgggccggcgcccagcgcccgcgcgggaggaggtgggggcgtgcgccgggccgagcggcctcggggcgcagcagctgcgggtagcggcagcgccatcatcacagccagctgcttccctgcgctggagccacagactagcggggtcatccgcttctgaccacaaacttctagggcggccggaggagacaaaggtgccgcgcgtcgctgctccagcagcagcggctgcgcggcggcacgggctcggagcccgcaggcgccggagctctgcgcggccgctcggcccagctccgcgtgctccgccccggcccggcccccgggctaggcacgctgggccggggcgcggcgcgggcgggctcagggcgggctccggacggtcccggtagggccgccggccgcgcgcgtagcaccaaccagcgcggccgccgcgccccgccttatatccggcccggcgcgcacccggccggcggcggcgcggctcgcggcccagccaccggttgctatagc

SEQ ID NO: 333344 - DNA, 242 bp, Homo sapiens
  chr7:157594777-157595019
  hyper
cgtgtgctaagaacgtgtagcgaggcccaccgtgttgacacttccctgagtgtgcagcgtggtactgttggctctcaaccgtacggcagatgtcgagaccgcgttgaggccgcgtcgctgaaaccttgtgcccttggaacggccccttcccgtgcttcccccagcgccagacccggcagcctccatcctcctctcttcttcggtgcgttcaattgtcatagattccacgcttcagcgacgtc

SEQ ID NO: 333345 - DNA, 458 bp, Homo sapiens
  chr7:158379348-158379806
  hyper
ggcttccactccctcgctgccgtgaagctgccgccctccctttcctcccgcggctgccacggaggaaaaatgtcctctgatttcggcggcgctgcccgcgggggggtgcgggggacgcaggtagaagcgggtgcagcgggacatccgaggcccggcccctcgcggcacacgcggcggaacacgagcggggggcgcacccacgccggaccagggccgcgcgctccagggccaggggagtgccgagtggcggggctcggggcgtgaggcccaggagccggggtagaggcaggaggcggcgccggggaggaaactgaggcaggggcgcgagacctgctccgagcccccagtgaggacagagaggcgcgcgacccgtggccgggggcttgagacccagagcctgggggtgtcgcgctggaaccccgagacccccggagcccccgacccgctcgccaaggcgc

SEQ ID NO: 333346 - DNA, 375 bp, Homo sapiens
  chr7:158380261-158380636
  hyper
ggagctgccggccgcgggggacggacgaaggggcggcaggcaggacgcgtggcggcagcagcagcagtagcagcagcagcagcgggagcggcggccccatccccgcggcctggccggcggcgctcagtccatggccgcgcgggaggcggcgggaggcggccgagtccgggcccagggaggcgcgcgccgccggctcctcccgccgcgcctctcgcgctcttgcggcgacgccgggccgagcttcagcaccggacagcgcccggccccgccccggccccgcccccggcggcagggccccgcccccggacgcgcgtccgccctcaggccacgcccccggccagccccgctcgccccggccacgccccccgcccgccc

SEQ ID NO: 333347 - DNA, 195 bp, Homo sapiens; identical to SEQ ID NO: 233406
  chr7:158380863-158381058
  hyper

SEQ ID NO: 333348 - DNA, 504 bp, Homo sapiens
  chr7:158823238-158823742
  hyper
cggcgtctcagccccgcagaagccccgaaccgtgggcctcccgccgcgtccgacaggcaggggtggggctagatgaccgaggtctccgtttgcaggaaggactgggcgcgggagccgcggtggaactgcagggcgccctccgagccgttgcgggagaaggaggaaccgcagaccctgtaatcccggctcgcggacggggtcgggcaccggcttcgccattttcgcttcagctcgcactgcacctgggaggtgagggcagcgggaacgcccgtgagcctgggcaggtgcgggcggctgctatgggaagcgcggcccgcgagcctccagctctccctcccgcctgctcccgtatctgtgttgccagcagatggacagaaacagaaacggccttgggggcagaggctggagggagcgggaactggacggccacaggagggcgggggacgctgccagactctaagactgtgcgtgggtggttcggggatcgccactgccgcggtaagc

SEQ ID NO: 333349 - DNA, 1464 bp, Homo sapiens
  chr7:158936507-158937971
  hyper
cgtgataaaacccgttactttccaaggacccgctccgcaaagcgcccaccctcgagggaggaaagccgagctgcgcctccgcgcaaggccagggagtgtggctcgagccccgctgcagaccgggcgtcgccggttaatcaatgacactgtcgggtcagcagcgcagcctcccagctgcggaggggccgcggatcgatccagacctgcctcggctgcgacgcgcacgaaaaccgcgcgcaccgcaaacccgcttcagtctccaagaggaaagcaagaaacaaggctcgggtttttttctttcttttttctttcctttttttttaaggttcacagagggaataattcagaactccatgtgcgaaggcacttaatcaacaaacttatgagcagttagttcctccagtgcccttgggaaaaagcaactatttccaaaaggaaactttatttaaccgacgccacgtccccccgacactaaaactaaccagtaagtacagggagggaccgagaggcatctgcggccaacgccaaccccgatctccccgtgaaacgcgcagcccgcgcaggcgcccgcagctcccagctcccgggacggccccgaacgagctcatcgttgacgcgtccaggaagaaacgatcccgtttccagcaaaccccggacggtggggcgcggggaagggcgcaggcagcctcccaacccgagtcccgcaacccggcgggaccggagctcagcgcttcacgctctccgggaggaagctccggaccccgggcgaccccgctccctctcccggaccccgcccgcgctccagcacccgggaggaaggcgaagaccggcgggaggagcgctcttctcggaaggggagaaccgggtccgaggcgccgtggggcgggggtcgcgggcgcactcacgggggcgagcagccagcaggtcagcagcgcgggaggcagcagcgtccgcatcccgagctcagcgtgccgggggccgcccagcgcccgccgcctccgtcctaggtccccgcggttccgccgcctccagcatgggccgggagcgagtgcgcggagacctcgggccccgcagctgtagccgagcgcccgagcgcgggggccgccccctccgtcccggcagctggagcgcgctcaatgcacgcccgtcccccacgcgccccgccgctccgccccccgcccctgtccccgccccgcgctgccccaatcctcgtctccctcctcccccgagaacccccgctccgcgcccctcctcaccgccccccacttccccttccgctgcgccccgcgccctctcctcgcccctgggctctctgtccccgccgcgcgcgctccctctggtctcctcgacccccccagcctctctctccgttctcctcccctcttccctggcccacgcccccctcccggccgcgcctccccgatctgtgggcggaggggctgggaagcggggtgctcagtgcgc

SEQ ID NO: 333350 - DNA, 538 bp, Homo sapiens
  chr8:495481-496019
  hyper
cgtggccacgtccgctcgggtcaccaaggcaacggccgggagcgcagtgcgcatgcgcgccgctggcgctcaggccgcggcaaggctgaggggaaggtggagggggcacagtccgcggagcggcgcctgtaccccagcgcttcagggcatccctcggggcctgggcgccgggcatccgggactcatcccctccggcgcccgaggtcgcgggatagtgggggcgccgggaggaagcctcgcccagccctggtgggcggtggggccgctggggcctggggcgccgcgggctcggcccggactgacggcggtggggggcggggatggggccgtggtgccgggccgcgcagaacccttgggacccccgcggcgcccaggttggggctcagggcccggagaacgttttcccgcgtggctatggctttgtcagaatcaggagcgggagaggcgcccacagattcctgagggcagaaccgcctggttcccaggccgaaaggagccggcgaggcgacccccgatcccgggacggagccgcgggaac

SEQ ID NO: 333351 - DNA, 986 bp, Homo sapiens
  chr8:687561-688547
  hyper
cgcgccggccgccccccagtgcgccggtgcctccctgggcgccgagtgcgcaggcgccggccgtgaagaccgaccgtgcgccgggctcgagcgcggtctgagcgcgcggcgcctgcggcggcgaacggacggacggaccgcggacggacgtactgaccccaacccgcgagccccgggagccgtcggtctgaggaggggccgcttcgccatgtcgccccgcacctgctgagcccggagcgtccgaggatgtccgcgctgaggaaggtgcgagccgccgggggctgccgggagccgggcgcggggctccgagagccgtcgaggcggggagggcgcggtgtgtcggacccgcggggacgccccgagggcgtcagggttgggggcgggggcgagcgggggtcgtgccgcccgccggggccggagcgctggggaccccagggacagcctgtgctcgggggtcgcgcgttgcgctcctcgccgggctccgcgcatccctggccgcgctcgggggtgccgggaccctgggctccgggggtgcgggagcgcacggggccgcggaggtgtgaaattctccgctctgcctgcccggggtggagggggcaaagcctggggggtgccggcgcgccaggggctacgcgcctagctccggtggggcagctgcgagcgagtgggggcggcgggcagcagactgcatccccctccccccaagcccgggtggaaacgccgacggggactgggaatgaatgaagggtgccgggctgggctgcgcgcacgggggctcgcgggggcgggggcgaccaggatggggcccttgtgccgggcagcagcggctgccgagaccaggcggagtggagggtgcgcgcagcgagggggtggccgccgcccggctctccaagtgcgagcgaggagctcggggtcttttttaggggtggttgctaagcgaggcgctacccagcgcagggttttgtaactaagcctcccccggcagc

SEQ ID NO: 333352 - DNA, 155 bp, Homo sapiens
  chr8:798795-798950
  hyper
ttccagtgtaggaacgtgccagggtttgttccagtctaggatcttgtgatgtgtgttccagcataggatcgcgcggtgtctgttccagcataggaacgcgcggtgcctgttccagcataggaacgcgcggtgcctgttccagcataggaacgcgc

SEQ ID NO: 333353 - DNA, 323 bp, Homo sapiens
  chr8:1771715-1772038
  hyper
cggcgcaccctccccaaggggcgcagctctgagccgggagcaggctctgcggggaggatccagatgttgggggcggggagggcactcggtctgcccagcgacccctcccgaagtgagcgcggcccggggtccgcggggcaggagatgatccgggggcgggagcctctgccgcgcgccccctcccacgcgtgcgcagcctgggccgggcgttgggcagcgggagggggcgcgggcggccacgtggcctcgaaggaatgcgcgggcgcgagggcagggcgctgccgagaaaccggcaggctctgcggccaatgggcgcccggaac

SEQ ID NO: 333354 - DNA, 130 bp, Homo sapiens
  chr8:2970523-2970653
  hyper
cgtttgcatttccccaagtggtggcgtctcactgagctccgcagagacgggggcctgtgatctgccactgcaggaagtgtgcgtgtctcggcaggaagcgtatcccccctgccttcctttccctgaaggc

SEQ ID NO: 333355 - DNA, 1359 bp, Homo sapiens
  chr8:4848968-4850327
  hyper
cgaccgcctccagcctcacgactccgcaaacaggtcacgaattatgccccacgcatcaaaaactctgcgcctgccttcgccacagcgggagccgccacccgggcgcgcgcggcgcagctgcccacggcagtggccgggcgccctcctgccggagcgctcctccccgggaaagccctgctgcttgcaagcgcctccggtgggccctggagcgcgctgccgagccccggggcccagcgccgacgcccccggggggaggcccgaccttggtcacccgggctttgctaggcaaggggaacgcgacgccgccccaatggccagagcgcacaaacggcgactccggcgctggcgtcaccagcccccttcctgcctgcagccccttcccaggccggtacaggagctcgcacttgaccccgcaggcgtggaggagacacggtccctggtccctgtggggttaatgaaggagctccacggacccactgcctcgtgggccagacaatagcgcagtgagagctacgtccgagcgtcctggaccccctccgcgcgcacacacttgcgcacagcacctctccagctccatgcacgccaggggcctgggaccctgggctccacttctcggcttctacagccaggttctgggacctgcagcgcgcaagaggagctctcttccacggggctgccccgcagggcccgaggcgcccaggactttgcaacccctgccctgttcgccccagaatcatccagagcagcccccgcccactacctggccctccacaccctccctcccgcctccgcctcagcctcatcctagcgctgcagcccacccgcgtgggggcggaatccgcccggcacacacgtgtgcggattattaagcagccgagctagggccgccgcggtctccacgcagcaacctctgctaattgcgggggaaggcagccggagcgtgcggaactcgagggaaccgagagtgagctcagaggctgagttgcctgcctggaaaggaggaagccccgggcccagttaggcttggagtgcaggggaaagggcgggaagttttgcggagttgcgtggcaggtgtttcctctccacgcaggggctcggctggaaaaagccaggtcctgtcccttgggctcctgccctcaccccgctgcgacacacacgccccagcacacctcacagggcacaaccctcttttccctagactttagctgcctcgccttccaattcccagccagtccagtgctgaccagaggccgctgccagtcgggccctgctcagcaggcgctgcctccgcagccggcaatgtcagaggcaccggccaaggcatccggactgagccgggcgggtgggcagagggtcggc

SEQ ID NO: 333356 - DNA, 1647 bp, Homo sapiens
  chr8:4851007-4852654
  hyper
cgcagcctgtaggctacttagaagaaaacattccccaactcattcagggagaaaaccaagctcacagagccccaagcccaggagccacccagagaaactccttcccctgaccagcgtagaaggaggatacccgtgcgcccacagtgaatgtatctgacttggaagccggtccagaactcctagcctgtttcacgcaccttgccaacaccttacaacttgcaaggagcgaagtccgggggagaggaaagcgggggcgaccttctagaggcagctactcctcgccggctgaggacgttggagagggaaggaggagaggaggaatggggtgtatgggtgcgaggaggccgggccggcggagacctttgcctattggtaccaaaacccccgtagagagcccgaactttccaggccggcttcacccgggacgctttcccaggcgcgtcgggtccggggagaaagtcctgggaactgcccctcagccaccccgacccgtggagtccacgtctcggaggaggcaacaccgccccggcggagcacagttccagcccaactcgtattgggttcctttctccttgacaccctgtactgccgagaaaaagagatctctcctgtgagcccaagagagggggaaggaatggcggggtggggcgggggcccaggagggctggggagagcgcgatggaagctccctcccgtgcatcgcgttccccgagcttcggcgatggagcagcgccgggcagaggcggccactccgtaccctgcggtccccaaaacgcacactcgcgtccgcacacggggcctccgagggctctaccgcctccccggccaggagcaagtccgtcttacccttcgctgcagtgaggagcctcgcgcacagcaccagcagcccgagaagcaggagcagcgactggaatctcctccacgcagtcatgtctgcagatactccacacgcacgcgacaccgatggctcctccgaggaaggcagggctatgagcggagccaaataatcacccgagggcaaggcgagccggagagagagcccggtcccaagacccgccgcgcatccgacgcctcctgaaggtctgggcgcccggctcgcttccctctcatagcatcgggtcccgagccactgcagggctgagctgctccgagcgcggagacccgggctggcggggccggggccggggacgagcgccggccgagccgggcaggaaggcaccaaggcggcgaggctgcgggagggggagaagcggggagaggagcgcgcgcagccaggagagacctggagaggaggcagctggagagagagccagcgagtgggagatgcggggaggggggcgcgggggggaggagagatccagtctagagagaaaaggcggagagcgcagaagaagggctgctagtggcacaaggagccgctgccgtggaggctggactcaaccatccttacccacagagaggggaccgaggctgggcacggcgcagtcccagacagacagagcccagcctcggggcctcgggctgcccgcaccgtgctgcgcttcattcggcctcagcgcagcagcgcgcaggctggagaaaggagacttgttgggcgctcgggtgggggaagctcacgccgcacaccggggaggaacaatgtaatcc

SEQ ID NO: 333357 - DNA, 108 bp, Homo sapiens
  chr8:6673921-6674029
  hyper
cggccaccaggtggcagccggagacgggagctcgcaggctgacaaaggagcctggccccgtggctgcagctggtcaaaatggcagatggtccagaaggctctttgtac

SEQ ID NO: 333358 - DNA, 1530 bp, Homo sapiens
  chr8:6691849-6693379
  hyper
cgcggggtccgggctcaggcagcccttagcgcccaggctgggtccggctgtcaccaccccgagcgtcctgcggcagcctcccttgcacgaaaagccttcggtgctgcagggctggggaatgctgacacccagtccgtgcccagctggagggcaagggaggacacctggggtgggtgccgacccccgcaggtcctgtctcagcccttccagtccggggcgcggagccagggcgcttgcgcgtcctccgtgtgcgtcctgctcggcgcgcctcggaagcagcgggacctgcggggacgcccgcgaactcagggaaaagtcccaaggcggcgttcccagggtaccccctcttccaccccagggactctgcccgggaaaaagcttccgcagggagcccggcggaagtgggcggagacgctcctcccggcactgaaggagttacgcgttcaaaccagaagggcgcgaaaaatggggccatcttgctccgccgcggctggcgggctctgggttccccctgcgacggaggtggcctcgaagggccgcgtcccgccccgtcctaaaccccgaagcggagtcgccgtcctacagggccgcgtggatgcggagccctgtccccctccccccgccaccccttctgcgagcggcctccaagtcgcagggtccccctggacggccgggggtcgggggagagcccgggcgcccccagacttgcgctcagcacatcttggcatcgcagcactttgcaaagcttgtgatggaaggaagggcggatacatctcccctgcttctgcgaggggatcttgcatgcgtggggcggggggatcgtgcatgggcgggaggaagtcaagcaccagtcgggaggggggggaaccgagcatgggtggaggaaaatcatgcatccttggggggatggtgcatgcgtgggcatctactaaggacgggaggacgtgctctgcaggtgggatggccaccaccgtgcgtcaccggcgcgcagtgctgggcgcaggctggggcagtgcccgcccgggcataggcagcctgtgcggctcccggcgccggggtggggttaggggctgcaggggtgagcacagcctcgggctgccgcactcacgcgcgctctgctcggccgcctgcagcagggccgagagccccaggagcctcgcgtgcatcttccgtgccgaccccgcagcctgcgcccgccccttcccctgcacgcggccccgcgtcggggaggtttccggcccggggcccgactgcgggtggcatttctggctaagccgttaggcgcgaattgtatgtctggtttattcgtagtggccagcaggggagggagggaggatgcttggggtttctggcttccagggtgggtggggacgaggtggtggagtccagctcaggtccgggctcctgataagggcagaagcgggttctgcgctgcccccaaccctgtaaccgccaggaaagcgcttggtgagcgtcgggactgcgcaggttcctcgggaggtggctaaactggccaccgcctctggggcc

SEQ ID NO: 333359 - DNA, 201 bp, Homo sapiens
  chr8:8639885-8640086
  hyper
ggataagagctcaggatttgggtgcgtgggctgaagcatgcgcattaagaggcaaaaggacggcgcttgactggtataggaccttctaggaacattcaactagtaagggaagaacacctcaagtgagcatgcgcacaactccagtaatacactgcgcatgcgccccctcccaagcgctggcaggcctctgcgtatgtggac

SEQ ID NO: 333360 - DNA, 1210 bp, Homo sapiens
  chr8:9760527-9761737
  hyper
cggaggaaggtgttgacccacatacaatgagtcctgagcccagagaaaaatctgcacacacaagcactccgcaatgcgctcccaggcgaccccctccccacgcacaccgcatctgtgctgcacagatctgcttctgtcacagaatcagcttctgtttctctccctgagtctgtttgcatctctaagcccctgtctgtcacaggctgcacacctccccaccccacgggctccggtgcgggacaggcagccggagggagctccagacccctcccctcgcgcccgcggccgctgcgcggaggtctgcggagggcgcctggctcggtcggtcgctccttccttggcgggccctcgccgacccacggtgctcagccagccccattcttggcattcaccgcgtgccttaattgtatggacatttaaatcaaggtccgctgtgaacacggagagagaggcctttctcctgaggaaggaaaggaggaaggaaggaaggaaaggtgaaagaaaggaagaggggtgggtagaagatggaataagaaaaccaggaaaaagaaataaaaagcggcgcgtgtgcgtgcgcactgacagcggggagagggatgggggtggggaacgccggaggaagggaccacagcatcctccccgccgcagctcccccaatcacacagacaatgagataacagcgacgtcttccaaaggctctttgttctcccccatcctttcgcatccaggctttttcctgcaaagcggagggggtggagggatgggggtgtgggtggaagtgggagacggaggggtgcctcccccgtgttaattaccccggctcccctcgcccctttccccgcgcctcgcctcccctgcagctccagacaatgaaaaaacaacatcgaccccacctcgccccagcgcagcaacccacccacccatgtcgccctctgcttcgcccaggaaactgaaggggactaggaggaggaagaagagagcgaaggacaaggagagcagcggggactcggcagcggcagccggggcagggcgcgcggccgccgcctctttacctccatcgctgagtgggggcgcagccgggccgggcgtgccgcaggggcgagttgccgcggtccggggctgggacctggggattcagccttccggaactcgcctgctgcagtcctctcgctcaggtcccaagtggtggaggggggaaaggaagagagac

SEQ ID NO: 333361 - DNA, 2086 bp, Homo sapiens
  chr8:9762660-9764746
  hyper
ccgaataccctcagcgttccgcacgccgggcggacgcccttccgcagcggccacgcgtgttctgggttcagcgctcctgcgcgtcccttctcgccgaacccaaggtgctttgtcccggcggccacacaaggtcttcggctttttgttctccttttttaagagactggccgcagtccccagcgattcagccggcccaaccaaaggcagtggatctactgaaatgaaaaggatcgagataatacacaggcagatgaataaggggggggatgctggaggtgcaggaagcatcctgggagcggccgccacggccaagcccgaactgcttgctgccttcgctggggaaggcgcaggaggcgagccggcgctggtggtcgctccacctggcaggaggaaatgataaccatgataaggaacgtgatgatgatgatgatgatgatgatgatgatgatgagcatgatttaaaaaaaatcagtctccctcttggtgaaccagagcatgcgtgccggagggactgcactgctggcggcggcggccgggggaaggagagcggcgcaggaggcaaaggttgaggaggcagcaccctcggatgaataataacaccgcgccgcgcaagttgcggagccgcctggaaatccagcccttcgcgtgaactcgcgtcgagcgcggattgcaggggatgaggaagaagggggaggggaggggagggtggaggagggagggggaggggtagaggggaaggcagagagggacagagagaattgggagccttttaatttttccttaccaagccctaatctcgtgcgccgtcctctttggctgaggtcgagctcctttttaaaaattattactcctttaaaggattattcaggtaaaggaagccgcatctgctgacggttccgaaaacaagaggattaggagcccgtccacagatccaggcccgcagacccccaccccctctgcaccagcacacgtcattctcactgcccccgggtacctccctctccttcgtgctcggggagagctgtgccaaggaaaatgcggatttggggaaagtgagaagtgggagagctcggaagagcgggaaagccaaggccggaggtggcgattcgcacccccacactcacacgcgcttccgtttatccgtttctatcccgggaaaagggggcgcctgcccgagcccacgcgcgccgccgcatctgcagcggtcggcgccccacgctccctgaacgccccccaggcggcaccagtgccgggcagagtcccctcggcggccgcgggcgtcaaatcgacacctgactccacagctcccttccctctcctcttcttccacctccccgggggtccaggcaccgccgtgcgtccactcccggtctccacggcttaggcagacggagtgggggactccggggacccgcgcgtcctctcctcctcggccctggcgggaggagccgggctggggtttccgcgggccgcggcgcgttttagggctgccggggactgcggcggatgcggttgacatcactgcggcggctgccgggccgctgcggcgacctgagcgccggtgcagcctcccccaccccgcctgggcgggcgtctgggcaggacagctgcggggggttgggagaggagtcggggagagggggacgatcgccccatcccccgcccccccgcagtcaaggtgaacatgaaggagagccggcgcgcgtgcccgcgcctgggaggcgcgcggccccgcccctcccggagccctccagcgcgcccgggccagatggacgcccgagattagaggcgcagaagtgcgctccacgacgggcccacccgtcccgcggacatcagacctacttcggggaggcgccttttgttgtggtggccgtggcggtgtttgtgtctttccgggagcacagggtgagcttggccttcaggaatgactcagaatgaatccgcctataagagccaaactaaagacgaccccccgccccagccccccaaccataacccaacgcctgccatgagaaaccttcggactttccaaggggtcagtgcctcagccacgaggggcagccctgacccgcgcggttcacgcaca

SEQ ID NO: 333362 - DNA, 1360 bp, Homo sapiens
  chr8:10587216-10588576
  hyper
cgggaatattcgttaattataatttcatctgtgacagccttcctctgagatggcccaattgtaaggtccagggaatgctggcttttcccgcttcggtattcctagtaaacgcctgttccacccagcctcaaacgtttccgtccctgccctgtccatgcacgccggtccctgtcgccaggcgtcctggcctggccgctgccccgtctccccgccccctggggcgccgatctccgctcctgtcccagcagaggagcctccctgcccgccgcgcggtttcactttggaccgcgccaagtgcccccgctctgaatcctgggcaccgcgagcacccacgctcgcgcagatggccagccacgcgggcacgaagagggccctcgtcccgcgtgccgggtcttccccaggctccgcgctcgcacccgccctgcagtgccgccagccgcccgccgcccgcccccggcccccagcccgctcggccgcgcgctcactcacccagcatcttgctgagctcggcgttgtgcaggtccgggttctgcactgccagccgtttcctctcgtccttggcccaaaccatgaaggcgttcatgggccgccggatacggctctcggagcccttgtcccccgggggccgggggacggccggcggcgattgtccatccgacagctcggcgtccagggccgggcactcgagaccctcgggccaagggtaggctcccagcagcgaagccatggccgcacgcgggtcgcctcgcttcgcctggcggggcaggcgcggacctggccctcgcacgggtcggggcgtccaacttggcccgcagccgcgacccggcccctgatttatcagcttcgggcggccgcgtcctccaatgactctccaaggcggcgcggcccctccctcggtgtcggcgcgggtcccctccctgcgtcccgggccgccgccgggtccccgctccgacctgccgggaggaggacggagggagggagtgagggagggcctcctccccgcgcctgcccccggcccgcccctccgccgccagggcccgcccggggatctgcgcccggctgccccgggccgcctcccgccccctgccctggacccgcaggtgccgcagagacgcaaggcaggcgctggaggcccgctccagcccctgcctgcccgggccagactccaccgccctccctgcgcgtgtggcctcagaaaatcaacccaaccaggtttcgccgagcccgcctgggtgtgagagacattgaccatgaacccctcagagcagccgttcttaatactccgactgccattcctttcgaaaatgaccgggcttcggccaccgcagccccagtcaacttgggccgccacagaggccgg

SEQ ID NO: 333363 - DNA, 1157 bp, Homo sapiens
  chr8:10873138-10874295
  hyper
cggggctggctgcgttcgggacccagcgccccccaggccctccaaagactggttgagctcagaaccagaaggagcgagggagcagagaaagccgggggcgggctcggggtaagacaggaagggagtgagattaaggtgagaagtgggaggggaaggagggaaaccgagaggaattgagggtgggctcggcgtatctagagcagtccgcggaggacgctgaggctcgccggggaagtgctgtgcccgaggcgccccaaaggtgggcggcggtgccagctcagacccacgcctctgtccaagtcccgactcctgcggactcggctgcaggcgggctccatgagggcgggcagcagggctcagacgatccggctcggtttggtcagcagacccccggtaacgccccgcaccgtcggcgatccctgcccccttccactgcgcccccacaagccccgagctcgccagtccttccccgcggcgctccgctctgtggccccctcgcatcccaccgtgggggtgcagctcccctggcacagcccgacggtgggagagggcggccagctggactaaaagccccgtccccgggcgggaccttcctccccgcaccctgacgcggaggttggccgggggcctctgcgtccctctgccccgcgccctggatggggagggtctgggctccgcgccgcgaggcagcgcgacggctgcgggcgacttggcgtgcggtgctgaggaccctgggggagtgtgcgccgcggggacgccggggactcggggtcctagtgccaccggacgcagcgggagtagcgcaggtctgggggcggggtctctcgaggcgcagacaacaagctagatcctgagccctctgcttcaaagcgggtagcgccttcgcccacgccttccctcccaccatccctgcctggctgccacccggaagtccccgtccgcgccccgacagcgccgccctccggctggctgcagcgcgggccctcggtagggggcgttccaaggccccgcctcctcgtcactgccacggatgacgacgccccaggcccccggccccgcctccgcctctgcctccgcggccagcactggggagcgtcctggcctgcgcttgctccccaacccctccttgccccgctctgagccggcgcgtccttgct

SEQ ID NO: 333364 - DNA, 1232 bp, Homo sapiens
  chr8:11058136-11059368
  hyper
cggagaggcgacacaggcgctgcgcccccggcgtgggggagaccctcacgcctgggccaccgcgggccgcgccgtggacgtagccggcccccatcatgggggggccccggctggtgagcccctccacggcgcccagcccgccgcccgtgtagtcctgcacgaaccagcggaagctcaggctctgcaccagcagcgacggcaccagcacgaagaagagggtcagcccgaagtagacgtagtcccccttgcggtagtagtcgagggccagccacaggtcggtgcccacgtccccgaagaacaccagcagcgccagcacgatccacaggcagtcgagccacggccgctccacctgcggcggcggcggctccggccgcgcggccgagggcgtcgggggttggcggccggcgccgggggccgcgggaggctgcagcggctggtcccccccgtcggcggcggcgctgcggcgcggcttcctgcccaggagggagcgcaggcaggcggagcggcagccccagtagcacgaggaggtgttgcagcagtggcagatgtgcatcgagctgctctcgccgggctcgctgccgtcgccgccgccgccgcagccgcctcccccgggctccccgtcctcctcgccgccgctgcccaccgcctcgtccaggttgtgcagctgagcgaagcccacccccacgccaccgccatcggatttcgccgccatcttgactctcttcccagctccggaggttgggggggagggacggcggggggggggggaagaaggcagggaacggggagggggggaaacgaatggagaggaaggggggcggggaggaagcgggggagcaaacgaacgaggggggagtgggccagggaaccccctccgcttccgggtagttggcgtcacttccgggcgagccccccaatcgcacggcgcccgcagctccccagccctaccctcccggccaagatggccgccctcctgtgcctcagctgctgggcgggggaccggggggttctccccgccagggctccccttcccctcttccgttgaccccgaaacccatcaggttgacccctcggcgtttcagaatccggctggcccgagtgaggcggtccaaagtgatccctggagggggcagtgccagacgttttggggtccccttcctcagcgtcgcagctcacagctttcctcctggagaaacgccccctaacaccctcccggctgctggtggaggggc

SEQ ID NO: 333365 - DNA, 1162 bp, Homo sapiens
  chr8:11204526-11205688
  hyper
ttcttaagctactgcgcgcaccggcgtcccgctgggggcgcgcgagccccacccccagagatgctgactcagcaagtcgggaggggttgggggtgggacctgccaatctgcatttccaaccggcgcccaggtgacgctgactctgctggtctaccgtcttgggggtcacctaatttttcagcgatgcctcccagctggggaggccaagaagtgcctcgctcaaggtcttccaacacccgacctccagaccctcaatcctgggccagctacaccgcaaacctttccagctgtctctcctgcgccctgcgtttcttccccacgtcacttgccagggagccgctaaacagcaagaccgcgcgctctgcggctccagagtgcggatttcggtcgcgtgcggctctgaccgcgtcgccccatccctggcggggccacgcacggacgccatggctggcgccgcggagccgggcgatgcgcgcggactctcccggggccctgactgtccctgagtcctccctgcggggggcgtgcgcggcccgccccccgcggcgccacgcggcccctcctcggccggggattggtgcgccgggcggggcggggcggggcgggataaaggcgcggggtctggctgcgcggggtctgcgggcagctccaactctgggttcgtagtttgcgctgggtgcgcaggaaggtcagtgtgggggtcgcccgacatttcccccccgcggaggtgggagccgagccacatcttggagtggggactggccgcggagcgggttgcccagggccggccgaggtcggggcgagccctgcgcggcgctggagactctgcattcccgggcgcgcgcagggtccccggccgtggtcgcagagtcaggaggggcggctccggagcccggcgcggggagggcccaggcgcagtcggggttggcagggcgcgacactcgctcccctccacttttgaaagggcttcccacgccgagaagaggggcgggcatggccggcccggcgaaaccggtttgtacagactttgggaagccatcgcctgcggagggtgggaccccacagcttgtccacctgcccaggctgagacctcgtgtcctagtcctggatgccccacgggtttctcgtcccgggcagcggcgcacgggaggagaagactccc

SEQ ID NO: 333366 - DNA, 756 bp, Homo sapiens
  chr8:11537483-11538239
  hyper
cgcatgatgagaagaaagaaagattgggagaagttaatcagctcaaagtcacatcgccggggtctcctgccagggggcttggaccagttgctaaaggacttcccgccggagaaggtcttcccaagagagattcccacccagagcgcgcagcccgcggggaaaacataacgcgcgcctgtaaatgacgccgctcccacctaggccgctctggggccgcttaacgtccggaatgtcccgacccccggctcaatctttggtgcaaagcctgagtgggcaggcgggagaccaggcggtgccggtggagcaggctacttcagcagcgcgaggctcggaagatccccgcggacaggcgcgacaacgggccctggagccggggaatctctgcaagtaactaaccaggcccctcggattcattgccactttcccgccctcggcccacgaggctgaggagctccctctcatcgcctctccgttcctggcaaggccgaagccggtttgctttggatgcatttcgatcaatctggcgccacatgggccaggtcacctcggacgggtgtcgcgccgacgtccttcgtggtcgcacgctggtgggccaggaagcccaggctatgcccagccgggtccgagcggcggtcggtggcgtgacctcttgccacgcctggcgctgctgggaacgtgtctcgggtcgccctttgcgtcagagaccccccccttggggagaccggaatcctccagccgctgcgcacggataccctg

SEQ ID NO: 333367 - DNA, 846 bp, Homo sapiens
  chr8:11540276-11541122
  hyper
cgtagtagtccccgtttgtgcaaaaacacctcttggccgtggcgatgtggggagggagtgtggtccaatagtccttctcacttctcagaggttgacacagaatctaacagttaccctcttagaactactccggagaattcggtaggtagtagctagtttccacaccggggacctgctttgttaaatgctatgggtgtggggacaagatactgggttcagagaaagttctgggaagagtcttgaggtggaaacagcctcggtgcgcgggggtttctcgacagctctctggtgtctcttaccccctaggttttcccagccttctcgccggattgccttggaaagctcttggtgtggtggccactggggtttgctccagcagagataatggaggggctcgctatctaatctggacagcagcaggaacaatccattagacctcagcatttatccggagcgggggaggacggagggacggggctggcgtgctccacctggccctgggaggcgcagagctgccccacaggtggcagggggattaatcagagagttttgtgctaaatcaaaactcaccactgcgtattatgcttgctgatgccggtaaatagtaattctacccattgtgactgttaggaagtagcagaatccttttgggttggaggtatcgttttttttcttttaagaagttcaatgagctttacattgtctcattcaaactcacccatcaaggggcgcggttcgattccaactttcaccgtattccttgagactaggtagactaaatccatccccccattctttcattcattcattcggcaaacatttaccaagctttcctctgcgctgggc

SEQ ID NO: 333368 - DNA, 657 bp, Homo sapiens
  chr8:11550051-11550708
  hyper
tgaatctgatccttcgggccgcggcggctccgcctgggagggcgtggcccccgcgctggggcgggaaccggcttctggggacccgcggcctctgcgcctcagccgacctccaccgcgggtgcgtgcgggggtgcgggggtgaggggtgcggggctgctccgtcgggaggctgggagggagagcaggcgccgggacccacgcgagggcgcggacggacggggggcgggaagcgaggctgccgaggggaggaagcggggccggcgcagcgggcgccaggccgggcagaggcgggggcggccggccgggggctgaccccgagcgccgccgagtttgcgccgcccgccgccccgcgctcgcctccagccgcctggggttccgcggcggccgtcagcgcgcacctcatcaataaggcctgccaggcgccggccccgcggccatccatcacccgggctgcacccccggccgcgcaccgaggcttctgccagcgcctgcggggcctctgcgtggagtgggccggcagcgtttttctacccggcaacaaatacatggctttattccacttcttaatcccagtgtctgttaacgatgtggtgttcatttgttcctaaagagctgtaaggaagcttagaaatgattcggcaagctgggcgcggtggc

SEQ ID NO: 333369 - DNA, 931 bp, Homo sapiens
  chr8:11554731-11555662
  hyper
cggagagcccctgtccttctgtcaaacacacgcacaggactaacgagggggatgagtggaaaccagccgcaaagaaatggagtgggaggttcttctttaaaatccattccgttcagaacacagtgaacaccctttgacagaacaaggactatctagctattccaagctccgtgcctcccctttcttgagactgttgttacaagaaaccgatgatttctaacaataggaacctcccagctggggaagcggtgttcggaggggagcagcgctctcggtgggcacctgctgcagttggggagggagaggtggtcgtggaggccactttcccctccaccgccagggaagcctggtctgtctgaaggggtcctcgcctgcgccgaggatggccggacggccgggcctccggccccagcacagcccccctttcagaggaccccgggtcttcgcgcctgcggaccagaggctgttttcgcacttgggcttcgcgcttccttgacactttcctgtctctgctcgccgcgccaggtcgcggcgcctgcctgggcgtcttctccaactccgggtcacctcggggcgagggcaagggtgccgggccggtggggcgttccggccaccacggggcggaggagggagcggcctttgcggaaacgggccgagctggctcagggaatgccagatctctgggggacccaccagtcccctgatgtgcgcgttgaggtcttgggcctggcggcgctccagccgcgggtgtccctaccataaccactgtcctccccgggagctgggcaagaggagccctggactctgggttgacctcgtcccggtcgggttctctctcctcccacccaggcccggccgctttctggcgtccgtcctctcccaggaggtcctggcctctctctgcgtcgccaagtctcttgactcccagctc

SEQ ID NO: 333370 - DNA, 784 bp, Homo sapiens; identical to SEQ ID NO: 233453
  chr8:11560082-11560866
  hyper

SEQ ID NO: 333371 - DNA, 1377 bp, Homo sapiens
  chr8:11561282-11562659
  hyper
cgggcaccccgggtgacccagtgccccacacaagatcgagagttgagcccaagaggtcaccttcttctctactggccccgcccctcgcccgccgctgcgggatgaggaccacaggaagggggggcggggagggagaaagggaactcattaataaagctgaccctgggcaccacagcgaacccaatcgacctccggctgggttgcgggtgattccccgctccctggcggtagcacttgggcattttccgcggagaccccagagcctggactttgcctgctgggggagctttccgcacagtcccgcagcctgcgcccagcggaggtgtagccggggccgcgcacccccgccccgcccttgcacgtgactcccacaggccagtcagcgccctagggccgagttgctgggccggggacccgagccgcgagctggggacttggaggcggccggcgcaggggccgcgagaggcttcgtcgccgctgcagctccgggggctcccaggggagcgtgcgcggaacctccaggcccagcaggtagggcttttttcttccctttctttgctccttcccgcggtcccccaaactcggagcttctccgcctttgcttgtctggaggtagagaggtagctagtgggaggaaaagagacgtgcgctactcacttcaccgaaattgcccaacccctgctctgcttttgactttgccttagcaacttctttaagtcaaagtaagacttgggggcaaaacagagaaatattggaagcgcctttggattctttccgtgtgaacttgaacgctttcaatccctgtccccgtgtgcacattctccaacccttgtttgcatatcgcaggccggggcctgggtggtgatggtggccgcgtgaagttaccgggactgacgggcccgggacaggctgcacggcagctcgcacatggagggaagtagacggaggcttgtcgcccaccagcgactccggggacgcagggtggcagtgccaggcagctccgctgggcctcaggggcccccgggagccgctctgaggtgcggagaggctgctgagtggcggaactattcatgccctttctggccggcctcctcgccctcggggctggggtccagggactgaatgctcctctggaagctcaccaccccacctgcccgcgctgcttctacctgaaactggccaagggcccgagcccggaccggagccgtgacttccctccgccggccacggggctgcccggatccgccgggttatgtcgcttggctttgggctcaggggtcaccgtgggcagaggggggtgccggggtcgcggactgccaccaggttgaggaaaggaggggccttttggctggggaaagagcgtggtgggggacccgc

SEQ ID NO: 333372 - DNA, 140 bp, Homo sapiens
  chr8:11726011-11726151
  hyper
cgagttggcgggggtggggtggtggagagggcgccgtcgcttatttcattcattcagaagccgctgcagaggctgggggtggcgaggctgtggaccccacagaacagcctttagaagggccactttgttgttcagagaac

SEQ ID NO: 333373 - DNA, 1001 bp, Homo sapiens
  chr8:12808858-12809859
  hyper
cgcgctaaagccaagcgtcgtcgtcacccaaggtactgcgctgatgcgctgcgggccgaccaggtgctcccgccggggcgtcttctcctacgcaggaagggccacgccgagagaggcaggcaacaagggcacggctggaggccggaaggtcaccccgtccccggcggggcgggcgcggcccagcctcacttcccgggcacgttcgggcggggcgattgcagggaacggggcggggaggcgacagtccccggctccgccgcgcgccagcccgccttcgctgcccggaggcgccgcaggcctgggttcccggacagctgagcccgagcgccgcctcccgaaaggtgaaggcggcccggggaggcggggacggtgacgggggcgggggccgcgggcggtctcccgacggctgtcgcggggccagcccaaagcccccgatccccggtagctgcgcttcccgcgcggggcgccggagtagggcgggccaagctggcctgcggccgcggcgggaagaagggctagcgaagcacccccgaccgggcccaggcgccggacgccggggggcgcctcgctgcaacttctctttggaagccccgacacgagccccggcccgcgcgcgcgctcccccacggccacgcgcgcaccctgccgcccgcacccccgcgcgccctccgtctattttttcctcttcctttcatcctcacactctaaaataggtcaaggggtggaagttacacctggtgcagccctcggctctgatgcaaaagcagcttttgcccctggctgcgggacagcgctgtgactactcgcaacgggagagctgctgccagtcgccacaccgtgcggaaagcgccggcgaccggagcactgacaatggtctgcataggggagcggagagaagcttctgttgcgccctagatccgctgcctcggcgcccgcccgcagggaggagggggcgcgacaggtcgtctagcgcgtgccccggagcccgcgcccgggtctgg

SEQ ID NO: 333374 - DNA, 762 bp, Homo sapiens
  chr8:12989416-12990178
  hyper
cgcagcaaactacacgcagcagggtgctgcagagaggaggggtgcacctccttcggagggatcaaaggctcgccccaggactctggaggtggggacagcgacatggagtgggggcaggcttccaagaagctgtcgccttgttacgaaaatagtcgggtcgggaggcgagcttccttcctctctccggcccaggaactcgctcctcggcctccttgtccgggtcaagggggtgggcatccccaagggggcatttcagggacacgattcagcgacccatctccgggaaaaaaaccaaaactgtgtgtgtgtgtgtgtgtgtgtgtgtgtgtgtgtgtttcctagcaagaagcacgtttgcaagccacggggcttgctaaactaccccaacactctccaggtacctgcggccaccaaaccgagacttccctggccaggtctgagttaattcccagcgcttaaagtatcttacccaaaaatggttgaaaaggaaaacaagtttttggtgaactttcaggcagtgatgaaaaaaaaaaatttccaagcgccactagggtctaaaatgttcccaaacagtaaactctcccggagttcactttgattttggactaagctggtgaatgacaggagatcagtacgagcgcagagcagtccccagaggaaaggaaggtagaaggcggtgtcgccgcgcccctcgagccagagccgcgagcccccgcccggctcaaggaggaaagtgaaccagggcttcccttcacgggttgc

SEQ ID NO: 333375 - DNA, 777 bp, Homo sapiens
  chr8:15094312-15095089
  hyper
gcgcggggaacccgcggagcggcggggggctccaggctggtgggagaccgtgtgcggccggagcctccgcagatgccgcccctaccagcccggctcccgcctccccgccccctgcccgagtccccggacctgctcccgcgcctggggctagggcaggctagccgtccccggcagcgggggtacctctccagcccctgcactgcaactgcgggaggaaacactgcccgcgggcggtgggagggaaaaggggtctcacgaagttctgggataaaaacgggctgtcgttgcagatgcctctgtcacgcgaatctccgagcggaaatgcactgtccccgtgccgggctggggcacaggcgggatcggagccgggaagaggaggcaaagtggcggcgcagctcggacaactttgctgggaaagcaggcgacagcgggcagagctggtgccgctgccccccccggggagacgagccggcaagaggcgcagggtctgcaccccaaatgctgccgtcacggaccaggaggaggacggggtggccgctggcgggaggagcaggcggggagggcgcccagcccgggagtgcagcctggctcgggagaaccaccctccgtgtcctcggccccagcaggggcgcctgcgcccgggtgcgcgtccccccaacgccccctcgtcgtcccgcgggaccaccaactactccgcgccgctggaggagccgcgggaaggagaggggagagcagggagcgccgagaagcggccgcgaagcccgcccggacccgcac

SEQ ID NO: 333376 - DNA, 829 bp, Homo sapiens
  chr8:16884178-16885007
  hyper
cggaagctgcccttcagtcgtcaaagtgtttgccttaatttgcaatcgttatgacttgagccaaatgcttatacctcatttgtgtcgtatatgtgaagatacaattgcaaatcgttcacgaccttgagtcaagaccttgagtttcctgaggtcaggagaccgttagggaatgtgagtgtcccagacgggcgctgagcccagctcggagacccaccccgcccgtagcagcggcgcgggccccagagagccccgcactcggccgcgcctcagttacgctgactcggctgtgcccgcagtgtcgcgctgtcgcgtagccaggtgtcgccgggctggcgcggttatttatgactgcgtggttgggctgggggttcggggccggggagcagccgggatccgccgcctcttccatgatcttcccgggccgaaccacgggaccgctacgctgaaggtggcgtcgcgggtccccggggccgcgcgagtgtaggggtcgctctcggccggccgcgaagctcgcggcaccgacttctcgcgagatttcggcgacccccccccccgcccccgcccctccgttctctgccccctcccagctctggtgtgggcggcctccgctatggctgcgctgcgaaggctcttgtggccgccaccccgggtgtctcctccactctgcgctcaccagcccctccttgggccgtgggggcggcctgcggtgaccaccctgggccttcctggccggcccttctcctcccgagaggatgaggagagggctgtggcggaggcggcatggaggcggcggcggcgctggggggagctgagcgtggcggcggcggcc

SEQ ID NO: 333377 - DNA, 903 bp, Homo sapiens
  chr8:17354241-17355144
  hyper
cggggggaccaaaaccccacttagaactctgcttagaagattcggaaatgcccttgaggtttggtcctcccaggagagcacgaagtttatcctcgcgcgcagcctctcttccccggcccgcgcccaccggcctagcccggggctagcgcccgcccacgtgtgctcggctccaggcaaaccccgctgagcagcggccgcacaccgcccaccccggggattggtcagcgcggccggggcccggcgggaggcgggctcggggtcgcgttccgggagcgcggaggaggcggtgccgcccggccccgcgccccgcccccgccccgggtggctacacagaggggcgcccacgtgcccagccctccttctgcagcgcggccggcgggcgctcctcttcgcgggaccagcgaggcggcggccgctgctccagcgtcccccagccgcgggcccccgacgcgctgcagccggcagcccaccgccgccttcttggcgcgaccccaacccagccccagtaagttgctaggtctccagccccgccgagaggccgcgggcgaggggcagcccggacgctggggccggcggggaaggagcggggcgagggcgccctggggccggcggggaactagagggtcgagggctcccggggacgagtccagctgcgcgcagctgccctgaggccgcgctccagcgagtcttcgtcagggagtcggggccgtgggctggggctgaagccgtggaccttcgtcctcggggctgcgccccggaatgcgcctcgcctcgtccggtccctgtgcagccggctctgcccggggacttcggggaccgctggaactgggagaggggctggcacggcgacttcgcggggacccttcagtcactatttccagaggagctcggcgcacccctctc

SEQ ID NO: 333378 - DNA, 287 bp, Homo sapiens
  chr8:17940762-17941049
  hyper
cgtcaagaggctcggacgttacgcatgttcagtaaacaacagtgtaacctctggctaaatattttctcactctaggtctacttcctcttctgtaaaatgaaagagtcacgctcgtccctcactgtctcttgcagttaggaagtccgtagccctgtgacttgctcgtgggaaagagccacgggacaggcgatcccatgacttgggtgcaaaaggccacagggggccctttggggcctgctctgggctgctcgcaccgcccaagcttgggaccactcagcgtttcccac

SEQ ID NO: 333379 - DNA, 1070 bp, Homo sapiens
  chr8:18870226-18871296
  hyper
cgaacgcattgaggcatttgttgccagaatcccacttacagtaattttccagatctccgtcttccctacaccaacacctggacccactcaagagttattctggagcggaaatcctggatcccgctatcgggagaaccagtgtctagaaaatgaaatcgtggtgcccattccatcctctgcctagtgggcgtttaacatcctttgacatcgaggggaatggcaaaacgaaacatttattatttaggtcaccaacaacattctaaacccacgtcctctaatcggtgttaatgtgtttaaaaaaaaaattcagaacatcattcgccagaacggaaagctgaaaacggcggataaagttaaatgcatgtaaaacagaatgacttaaacatctgtaaaagctcctgggaattgcaccgaataatcttcccttgtccgtttgctcgctcaattcaagtttgtttagtttagtctttttttctttctttctgacagaaacgtgatagtccctaaatacaagctgaccgggcaaagaaagatcggcatacgaggtcctctttcatgttgccttcttttgatagcttttctccaaagtctgaggttttcaaagccgaggtatgaactaaaacccctaaaccttaacaccacaaagttgaccctgctgggctcctaaaaaacacaaagcaagcaagcgcgaagagaaaaatcgcaccctgcacctatccagacagcacaaacccaggtggccccgggatcctgggggacagagcggcgacaaagcaacacaaaccccacgtcgaacagcggcgccgcgtgcgcaccccgcgcccgcgccccggccccggagctcaccgctgcgctccttccttccatcttccatcgccagcccggccgcgcgccgaaaccgccgccgggcgctccggggccgcagcctcagggcgcgagtgccggcggccagcgccgcgtgctctttgttgagctcccgggactgccgagaggcggcggcccgcgcgcaccctggcggaggctggcgaggctgcgagcccgcggcagccgcccgcccggcccccagtaac

SEQ ID NO: 333380 - DNA, 446 bp, Homo sapiens
  chr8:18871513-18871959
  hyper
gcctcccgcagccgcgcgcccgccctgggcccagcctccagcccgcgagcgaaaacctgcctgttgctttgtcttcttccttcacagttttcccaccctgagaaaagtgagaggtgctttccctggtgtttcctctcaggaagggccgtgtgactggagccgcgagttgggcgccgtctcgccggggctggaggtacgcgggcttcgggacacgcacctaggcgtccctcggggtcccggcctctctgaccgggctcccccggcaccgatccgcggccggagcgtttagtcccggggacccgtcgagccctgaaagggccatttccccctgaggcgagtccccccaggcgccccgcagcctggcctcgggactgcccccaccgacagtgcgtgcgcggggagaggtcacttaaaactgcattttcgaacattagtgccccggaccc

SEQ ID NO: 333381 - DNA, 998 bp, Homo sapiens
  chr8:19171057-19172055
  hyper
cgcagcctcgccgacgagtggccctggagagcctccaggcgcccgggtggggccgcgattgcgccccgccagtcaccccggcatgtgggcgcggcggggcggcgcgggcgggacggctacaagagctgttttgcgtccgggccggagtatttgctcagcccgcctgcgccgcttgggacgcctctgcctttccctccctcccttccccgacggcttctggcggccaagtggatgtggcgggtgatcgagccaccctgcccaggggcgcccagcactggtaggtgctgggggtggggcgaggctttggggagagtgtgcgtggggtgggagtagggggaagggaatttcctcggaggttgcatgggtgcatgggaggcgcaggggccagagcgggcgggcggaagcctcacccccgcctccaccccttcgcggcgcccggggcgggctcaggtgcggggttgggcggcgagagcggccgcggcgggtgtccggtgtccggtgtccggtgtccggtgtctggagccgctggctaggtgagcggcggtccccggggcctgggggcttgcagggggtggcgggggaacttcgagggagagggtctgccggggctgaggaccttcggggaagttctggaatccggcagggacacgcggcgcgtgcttccacccgcggggagtgcaggccccgggagggtccgggctggcctagagtttctagactcctagcaggagcacgtcctcgacttgcgcatggaaatcttccaggagggaagtcccgggaaacggtggcagctggcgcagcacccccgcagcacgttccccgcgcaccggcacccaggggcgcccccacgtggggtctgggagcgcgcggaggccagtgcagcgccgcctccctcgggctgcagcggcggggctggcccagacccagaccgggtgcccagtgcgctcagccaagcggcgcccctgcccgctcctggactcgggggtcacgcgggcacc

SEQ ID NO: 333382 - DNA, 892 bp, Homo sapiens
  chr8:19614022-19614914
  hyper
cgacggaaacaaacaactttgcctccgcttcctacagctttcctctcctccccgcccttctagcccccatcccaccccaagatcatgccctcgaacagcttctgcccaccgatcgcacgtcccctgggcatgttcgggcagcggtgaccctcagccacatcccccactagcccggtcccgggcaggcgagcgcgctgcccaccggccaccctcgtcacgccccctccaccctctccatcccagccacaataatacaataaccgcagtcatcgcgcggcacgtggaaaggctacttttcagtgggttttgcagaaagcaatcagacagcggaaggccacgagaaacgctggtgaagccaaaccgaccccgggagcgcagcggccccggaccctccctggaagctccctccgcgtccccgcgcgcccacctggaggcgccgcgccctccgcctgccaagccggtccccggcccctgcccgtgccctgggcccccggcgggcagcggcggagggaggccaggcgcggcaccgtcctccgcagctgcacgagccaccccgaggtcgcggggtgggcgggcgcgagctaggcgcgcggggctgtggggatctgccggcgccactgacgcccccgcgcggcacaccgcgcccggctggcccgggaggggacccgactcacccgaagcgccctgctagctgcccggcccggctccggccgctgccgccgtcgctgaactttccctcctgcgcggccgccgcggactcggctccacctcccgctccggcagccgcggagcctccagggaccccgggggcggggagcagcggcggcggcggcggctcgggcgggcgggcgcaacagcggccaagcctggcgccccgccgcagggtaggtcc

SEQ ID NO: 333383 - DNA, 859 bp, Homo sapiens
  chr8:19796843-19797702
  hyper
cgacttgctcagcgccaaaccgcggctccagccctctccagcctccggctcagccggctcatcagtcggtccgcgccttgcagctcctccagagggacgcgccccgagatggagagcaaagccctgctcgtgctgactctggccgtgtggctccagagtctgaccgcctcccgcggaggggtggccgccgccgaccgtaagttttgcgcgcaaactcccctccacctgcagacccggcgggtggccactgccacccgaactgaggatgagaagaaggaagttggaaggggcggtggatgcgcccagggactctcccagcctgggctctagccccgaaacggtccccggagtgggatccaggaggggccgggagggaatctcctcccgatcgtgaagcggcggcgcccagttcccgctttttctctctgccgggttcccgcgctatcccttccactctggctgggaccgcgttcccgggctcgcaggctccgccggggaggttccggggtgtgggggccgggacggcggaggcggggagtaagggcccggctggcggtgacctgcagtcacctctctgccggaggggccctggaatgaaaggcgcgcgggccaaggtgacctcgccttggttggcactgcggctcagcccccgcccggggactcgcgggccgactgtggccccttctggggaagccggggcgcggggaggcgttccgggcatctcagccgcacggggtacgctcgccctcggcggggcccctcgctccgctgtgggagtggcagtgggtgtcggggtggagaaagtacgcgtggcgcggagtcctggggacgcggcgtcccacccgctctggggagcccc

SEQ ID NO: 333384 - DNA, 577 bp, Homo sapiens; identical to SEQ ID NO: 233485
  chr8:21881968-21882545
  hyper

SEQ ID NO: 333385 - DNA, 215 bp, Homo sapiens
  chr8:22089414-22089629
  hyper
cgggcagtggcgtgcgcttgctcctctcccggctgccaaggaggctgcttccatgccccgcagccagctcctgtctggctgtgcagcgcgtcgctgctgcccctggtgagacgatgttcccagctgagcagcgcaagaagagaggcaagagcgaaatcaaagcagcgtggaggagagagaggcagagaagggagaaagaacgagagagccagacc

SEQ ID NO: 333386 - DNA, 414 bp, Homo sapiens
  chr8:22299385-22299799
  hyper
cgtataccatgtgccttttgacccgctttctctagatcattgcaagtcactgctattactggaataaacttagtatgaacaagtcagataaatccattatatgatgtttaaaataagtttacggagctcttgacagggtaatggtattttattttccctttggttataaagacttggagaatgacgttttctgattcatatgtgtacctgcgttagatttctgttgttgttataagaacaaaatgtaaagggctctttgctctctaaatcttgtagagttttaggttatagttgtttctccctttaaactaagaagatggattacacataaccactaatttatgtgctgcttttattcagccgtaagtcttaggcacaacccttctctctgagattaacaatcggtttgaaagc

SEQ ID NO: 333387 - DNA, 934 bp, Homo sapiens
  chr8:22436799-22437733
  hyper
gcgcccctgtcggcgcggaaccctggcctcgtccgcggcccagctccctggagcctcgcatcagcgggggcgcccccgcgagctgcgctctccccggccggagcgctcctcctccagcccccagcccgcagggtactttgccctcggagcgaaggaggctccagaactggtagagccgggccatcgggctgggcacctccccgcggcgcccgcagcgcggagtccactgaccggctcaaaggtctgggaatctcggggcggccgcgagccggcctcggggactggggtgggggcggtgctgggaacagaggctaggcctgggcccaaggggaaggcagccggggatggagcggacagaccgctggtgctcttgatagattctcgcagcacttgcgtccccagggcagccccaggatgggtgctgggcagggtggtgcccagcctggcaccgcggcttcctgcctggattggctcctggctccagagctagaggctcaggaaatcccacaggggtctgtctgcaagggcacttccttgcccagcggaggggctgtggatgggaggcctgtcaccccggctgtctgtcgggcagcatcaggaatctgggggtgggtgtgtccagcttgacagatgaaccctggcctccttgccctggcagccggcccctgggggaggtggggagcccggtcttgcccgtgtgatccactttgccaagaacgaggtgggcagctaggaggcccatgtgaagactcggcctcaccccaccagtccttcacctggccagtgacttacacagtctgtactggtgccagcctgttccttgacccgtcactcctgcttcctgagccctgctctccctaggccactcaccagccctcccccagagtggagaggaagtaccgtgtgctgtgggttttggggacaggaagcaagc

SEQ ID NO: 333388 - DNA, 491 bp, Homo sapiens; identical to SEQ ID NO: 233497
  chr8:22562110-22562601
  hyper

SEQ ID NO: 333389 - DNA, 174 bp, Homo sapiens
  chr8:22722335-22722509
  hyper
aacaccacgggggccgctgggcaccgccgagcgccaggctggtgaactgacccgcagcgcaccccatctgtgtgggaaggtcggggcaggggacccagggcgggatggcggtgctggaccccgatgaggccccttcacggccactagggggcaggagtgcggggcgggcagcac

SEQ ID NO: 333390 - DNA, 510 bp, Homo sapiens
  chr8:22960460-22960970
  hyper
cgcgcacgaactcagccaacgatttctgatagatttttgggagtttgaccagagatgcaaggggtgaaggagcgcttcctaccgttagggaactctggggacagagcgccccggccgcctgatggccgaggcagggtgcgacccaggacccaggacggcgtcgggaaccataccatggcccggatccccaagaccctaaagttcgtcgtcgtcatcgtcgcggtcctgctgccagtgagtcccggccgcggtccctggctggggaagagcgcacctggcgccgggagggggcagggagacggggacacggcagggatgcctggccctggtcacctgcggccgggcatgtccgggcaggacgaactcgccgtcggagtcaggggaagaactgggtccccgggctgggcaggagggacccggccgcgagggagcagagaggcggtccccctggctgccccgagcccgcgaagggagggaagttccagaatcgagagagggagggagtcaagg

SEQ ID NO: 333391 - DNA, 794 bp, Homo sapiens
  chr8:23020923-23021717
  hyper
cgttatgaacgaacgaacgaacgaacgaacgaaagaggcaaccgctctgtggcttcctgaggttcactccggggtttccatcttgactccctccctccgctgattctggaacttcctctggggcagctcagtgcggtcctcgccgcacgggacagccagggggagcgcgcgctctgctccctcgcggcccggtcgctcctgcccagcccgggcaccccactcttcccctgactccgacggcgggttcgtcctgcccagacatgcccggccgcaggcgacccgggccaagcatccccaccgtgtccccctctctccctgcccactcccggcgccaggtgcgctcttccccagccagggaccgcggcggagactcaccggcagcagaaccgcgacgatgaagacgacgaacttaaggatcttggggtccaggagccatggtctggttcccgacgctgtcctggctcctggatagcgccctgctcgagcgctcgaggcggtcgggacgctttgtccccaaagtcccatgagaagggaggagggtggatcgaaagcgccaaaaatcaatcagaaatcgtccccgtagtttgtgcgcgtgcaaaggttctcgcagctacactgccagaatagaacgtgctcctccgcttttataccccggaaaaaaggcgtggtcagttgtactcccttcccgcagtcacttccaggcactcaggctgggtctcccccagcacctccaggagggcccaggttgtgtgggtgggtgcatggacggacaggaactggctctttccggcagc

SEQ ID NO: 333392 - DNA, 330 bp, Homo sapiens
  chr8:23082568-23082898
  hyper
cgccatcctgccaggtcaatccaagaagcagcgtgcttggctatgacaagacagaacttcgcattcggagttcagggcacccctgaccccgcccccttttcggggcacctgcggctcctgttggctaaccctgaacttccttcctctgtgaccgcccttgccgctctcagcttctgttcctcaaccacggccgccgcgtggatgccgctgcattcggagtcgttttgccacttggtcccagcgccaggcttctcggtcgggagttgacctcagcctttctgtgacccagttcctggcacccagcaggcgctcggtggacggatgggtggc

SEQ ID NO: 333393 - DNA, 904 bp, Homo sapiens
  chr8:23559444-23560348
  hyper
agcaggttactcttcgtgaacttcccggatcctcaagttcccagctcttcagcccccttcccgccctcccgtcctcttctctttcttccccaacagctgtcattaattggaggatggtaggcccgctagatcaccatctccattcaccgccgatgccccggggctgctgcgtacagatgcaagagcctctcgggcctctggggttgaagccccaaaagtcacgcgccttagtactgctcccacaccccaaactgccagccagccttggtgttcttcagtccctgtgttgcttggtgggtgaccggtggaggggtcttcttttgggggaagaacgtcccaggcggggcctttaactgggtgactgtggtgcagatcgcagtttcagagatccctccggaaagaagcgccgttgggtagcagcttccttccagcgccgcgtcccctccttgtcacgacctgcgggcggaggggaagggaacgagcatctggccctggttggcagagtcaagccgaggagcctcaccaggccctgacaccctgcagcgtggctgccagatggccctgcggggtggcattctggccaccgtgtccgaagcccgcgctggccagtggtgtgtgtggcgcaggacccgagggcgcgcccgcgtagcaggtgccgtagcctgcgccgtagggtgctccgctgtagcctccgtagcaagagtagggcgacactgctgcactgtaggggctggggaaggcaggtgcgccgggcccggggcccaggcagggcttgccatcgcgcaccaggacgggcacagctactcggcgcggcgttagagggtggccagccagttccagcgacttgtcctggcgctgtctcttgcatttgtagcgtcggttctggaaccagatcttgacctgc

SEQ ID NO: 333394 - DNA, 986 bp, Homo sapiens
  chr8:23566785-23567771
  hyper
agtgcctggtctacgggtgtttacaatcatcaccgggcacccacaagagaccctgaacttagaatatttccgcggtaggagttccgcctcgtccttccaggggatactgacgactcgctgggttctcgccttccaagtgctggaggggggaagtagggccacccggggtagaaacctaacgccagaaaccttccagcgccttatcagttggtggaattttcgtggcagacagtcgcgctctacctaagtcgtagaagaaaagacaccttgtgggggacttggcgtcggaagccttgagttcaaatcgtagccctaggtccccagccttgcccttcctggcttgctgcgaggatgaaatgagatttttgtacgtgaaaatgctttctaacccctctcgaggggtggaaacgtctccattcgaccagagtccgggtctgcggagcaatttacccgccgctttccaagagcaggctccccagcgtagcgagtccttgttatggaaagggtcgtttcggctcaggatgcgcgctcccggcgtagacctggggataggggtccctgtcgcgctcgccccacccctgcagggagcaaggccgtccttctgcagcaccgcgccacgcggcgggaatttgcagtgtcctgctttctggtttcagcttcttcgctcgcttgggtctctctcggtcacctctcggaggggcctggagtccctcctccctcctcctacttcagcgccagaagcattgaaagccgcccgcccgccgagagtggaaccggtacctcgaatctcgctcattccgggtcaattggaggcgcattagcggctgccttgcagtgcaacagaggctcgagtgacaggccacctgcctaagcgctggcgcccaggaaagccggggaggaaactaggaagggaggcgacagcagaaaagccagagagtccagagactcctaggcaggcctccgtgcagccccaacagcgtggtgcc

SEQ ID NO: 333395 - DNA, 202 bp, Homo sapiens; identical to SEQ ID NO: 233518
  chr8:24770328-24770530
  hyper

SEQ ID NO: 333396 - DNA, 1360 bp, Homo sapiens
  chr8:24770944-24772304
  hyper
agaaagggcgctggcgatattcgcaccaagggtgcgaaacgcaatcgggaggtgagaaatggaaagaaggcgaatgcccggctacaagtagcctgggactgaaaggggacctgggggaggggctgggcccagggcagaaaagtccaggttcccatgcggcctgggcccacgtggagcgggcgctgaatcaccgttcagccgcccccctcccctcctccccgaccggtgcccgcagtccccgcctcctcggccgccgcctccacggggcggggccctggcccgggaccagcgccgcggctataaatgggctgcggcgaggccggcagaacgctgtgacagccacacgccccaaggcctccaagatgagctacacgttggactcgctgggcaacccgtccgcctaccggcgggtaaccgagacccgctcgagcttcagccgcgtcagcggctccccgtccagtggcttccgctcgcagtcgtggtcccgcggctcgcccagcaccgtgtcctcctcctataagcgcagcatgctcgccccgcgcctcgcttacagctcggccatgctcagctccgccgagagcagccttgacttcagccagtcctcgtccctgctcaacggcggctccggacccggcggcgactacaagctgtcccgctccaacgagaaggagcagctgcaggggctgaacgaccgctttgccggctacatagagaaggtgcactacctggagcagcagaataaggagattgaggcggagatccaggcgctgcggcagaagcaggcctcgcacgcccagctgggcgacgcgtacgaccaggagatccgcgagctgcgcgccaccctggagatggtgaaccacgagaaggctcaggtgcagctggactcggaccacctggaggaagacatccaccggctcaaggagcgctttgaggaggaggcgcggttgcgcgacgacactgaggcggccatccgcgcgctgcgcaaagacatcgaggaggcgtcgctggtcaaggtggagctggacaagaaggtgcagtcgctgcaggatgaggtggccttcctgcggagcaaccacgaggaggaggtggccgaccttctggcccagatccaggcatcgcacatcacggtggagcgcaaagactacctgaagacagacatctcgacggcgctgaaggaaatccgctcccagctcgaaagccactcagaccagaatatgcaccaggccgaagagtggttcaaatgccgctacgccaagctcaccgaggcggccgagcagaacaaggaggccatccgctccgccaaggaagagatcgccgagtaccggcgccagctgcagtccaagagcatcgagctagagtc

SEQ ID NO: 333397 - DNA, 820 bp, Homo sapiens
  chr8:24812770-24813590
  hyper
cggtgcagcagcacggagcacactcccagactacagtggcgcccgcactcacgcccttcaagtgccccacccctcccacacagtggccaaggagccaagccctatccctaagagctgcgtgcagccgcaccacccctggtctccactttctgggcgcaccaactcccccccttgctcgagtcccccgcccccctgtgtttctggccgtgccgcacctgcatagcgctgatgtcggcgttctgcttgtcctccagctcctgcagctgcttctccagcgcttcattcatgccccggcatgcttcgatttccagggtcttggccttgagcagacgacggctctcggacacctcgtccttggcggcgcgcacggcgtcggtgttcttggcggcgctctcggtcagcacggtgaagcggctcttgaaccattcctcagcgttctgcatgttcttggcggccagcttctcgtactgcgcgcggatgtccttgagcgcggcggaaaggtcgggcttggtcacgtccatctccacggagatctgcgcgtactggatctgcgcctgcagttcggcgatctcctcttcgtgcactttcttcagaaaagagatttcgtccatcaagctgtcgatgcgcttctcgagctcggcgcgagcgagcgccgcctcgtcggcgcctttgcgcgcttccatcagccggccctcggcgtcctcgcggctcagcacctcctcttcatagcgcgcctgcaggttgcgcagggtctcctccagcccttcgcgctcgccctggagcgcctgcttctcgttggtggcatcttccgccgccaggc

SEQ ID NO: 333398 - DNA, 673 bp, Homo sapiens
  chr8:24814801-24815474
  hyper
cgtgaaactgcggcactactgcaggtattggtttagcatttttaaacctttacagcagttaatccgcctgttagtgtttctagattttcacatttcttaactgagaatgaagccgcagatggctttaacgtgttgcagtgtgtgggtggtggagggcagagaaagagttggaaacacagagactgacttgctgaggcagccgcgcgctccgcagccgggagcttcaagctgcctggatcctcaccaagctaaattcctgcttgctaccaccaaccgcagcacatttaaagtccgctttcctctttttacacatgtgtagcacacgacctgatgatttcgataagccttgcagttggctgattttcagggaagccgctgcggccagccctgagcgctgggtgtggtctctggggaggagaactcggcacccaggcttcttcaggaacggatagaaaatagccatagccgcgtgactcttcccccgatacaatgtaataacccgaaaacagatgcagtcaggaatgcatggatttccttcaggaagcacccagatgcttgaaactggcgcacgcggtagcgcacgtggatacaaccctacggtttgcagggcattttcacacgcatgatgttaggagtcccccaggtttcatggagggattgcagagatttacac

SEQ ID NO: 333399 - DNA, 359 bp, Homo sapiens
  chr8:24816325-24816684
  hyper
cgttttttttctttctttctttctttttttttttttttttttttctttttttccgcggctcctccctgaagcctttgactgcagaggaggctgcccagaaaggagaggggcggcgggtgctgcagagggatgcttcagagagaagaaaccattggggcacctgctgcctgccgtcccctgggtagctggaaaaaagaggaacacaggagcaaagggtgagaatgggaccctttcctgtgctgaacccggcccacagagtgggggaaggggcagatccacagcgtttaggcttatcgatctctggtctttttaaatatctcctggcctggccacctcatactccacgacagccttgcttt

SEQ ID NO: 333400 - DNA, 1733 bp, Homo sapiens
  chr8:24857495-24859228
  hyper
tgaactggtgcaggcgtgcaaagaaagctccgtgccacgcccggcagcctccattctttggtagaacgcagcgcagcaatagccgccaagtcccctcctgggtacagtacagctccacagcgcccctgctggtggcttgggaagggcgcgcaagcagagaaagcaagtgtcagagccgggactggcctcccagggcatcgcctacagcttgtgctctgagagtcggggtcatcatagctgcgctcttcgatggacactaaatgcgggacatctgttttacactcaccctccctccccgcgtggcaggagacctacactctcccgctatgcgcgctccgcggcagctgccgctgcaccattcattctctcctgcagaagttcaatattgctgcaaatatcgagaaaaaaaaaaaaagcgctgagagggggagggagggagggaggaagggagggacagcgagccagcggccactgcaaaggggcgaagggcagtcccgcggtcagtaagggccactgaactttctgcccaccggtcatccggagctgaggactgggacatggtggggtgcgtcggcgagggtcccctgaccctgcacaaacccaggggtgtggtgtggatgacccgggaagccgcacccagagctggcggtatgtcaggccatagagaaaaagggatgttcctaggctaaaggagacatcggggctggggatgacatcccaaaactcccagcgccggggagctcaggctcgggcggtgcctggctcccctccccggttcccgccgcaggaggctgctgagtcactcccgcctgagccacggccgcccccagccagccacgcgattggcgggttagcccgggcgcagcgccctcttcccagctcccgcacccccagggcttcccgcaggcagagggtgggagccccggcgagcgaccagttggggcttggtaggaaccccctaaaaatgcgccccacttgtgcattcgtgcatgggcgcattttgggagtaaacaatacataaccttcttcgcattcaaagggtctggactcaaaagagggctcagccttgctcctcgggagcaacccctgttttaaatctgggaaatggtgatgccagtggggaaagggcttctccgggcccggggctcccgagctcctggtgccagccgtgttgctctggcttttgtattttaactccgtgggcttctgtccccatccccatgtaaggccagtgcccccttccgcgttttgccgaaagtatcttcaatgcccgtttaaaaaactatgtctgcgatttctccatctctgctctttcccagttcctctcttttctcttcttcaggccccctcctgtccttcctcatcctttcactgagcgggttcaggccctagttactaccgcaggcaccagccacacccggggagatgtgtgctgttttgtgcaagacgctgcggtcacccagtccggaattctgctggtctacaccgagtgccgcaacaccaccaccacctccgcacacatacgccctccttgaacctcttccccatgaatgctttggcttttaaggaactttgtggcgtttctgctctttcggaggcagctgcccgaggcagcttcccaaggcagaacagggactgactgctgaggttccgcggggtcggggaggtggagaagccagttcccaagtggctcgtcgcgggtgttagagtccctcgttactaaggacgccgcc

SEQ ID NO: 333401 - DNA, 1675 bp, Homo sapiens
  chr8:25041594-25043269
  hyper
ttgcaccagctctccggtgataaaagttctgctttccaggctctaagcggtggccccgggagattcagtctgccctgagtccggcttctcccgctcgcggcgcgggttcaagctccagggggtgaaggcagaagtcaactgctcattcattcaacaaatatttattgcgcgcccgcttagtgccaggcaccggaggtgccccgagcaagaagccgctctcgctgatccgtttccgctccccaagtgtccggcgcgcgccgtgggagcgcagcccgcatccctcgcccaccggccgcccggcctgggcgtgcccggctcctccagcgcagccctctgtcgggagccggacccccgggacccagcctccggggtatcagccgggtggggagggcgggagaaaggcaaagtgccgccagcgtcaaagtcccgccggcccaggaagccgctccagggaagcgcgcgaggcggagccgcagtcggcccccgcccggcagagcgcagagagcggcgcgggcgggagaggccgggcgcccgcggctcggaggcggccccggcgggcggagggtgcggccggcgggagggactggggcggcgccaggaggggcgcgcactgctgcgctgcagcccggcccagcaggtgaccgcgggcggcgcgggcacgggcacgggcgcgggcggcgcggcgaggaggcggcccgcggagtccagcgaagtttggcggaacatggcggaagcgtctggggcacgcaggagcgcggggcggcggcggccggagcccgaggagctgtagcagccttagtcgccgccgccgcggggcgaggtcgccgccatggcccgctggatcccgaccaagaggcagaagtacggggttggtgagtgcgcgccccaccttgtcccggcccgacccacgcggccaagttcgcggacagcggccctgccaggtttgcgcagagcccggcggaggaccctggccgggggctcggcccggctgcgcagctctgggagccggggacggtaggagtcctctccagggagcgccgatggggaagtcgcccagggtttggggactccgagtgcttccaagtgcagctgagcttcgggaccgtaatcccgctcttgcatcccaatctccggcacttcacaccagggaaatgtcaacgcgaggggggcgcgcctgctgctcttttggggccgcagctctgtggctcgccccggtgcgcccagcgtgggtttcacctgggagtaggtgaccagcccgggtcggcacatggactggtgctcattgtcccagtgctttctgccccccgctttcgtaggttcttctcagacgccccttaagtgaggagttgagggtggaaagccgccctgccccctttcctccagagactgggatcttgatgacagttgtgagctggatggaaactagagtcgtggcgtggaagtgatggaagggacaggaagttgtggcacgggaagggggtggctggcccctggggctgtttgtgcgcactcatcccctaacggagcctgtctggagagggtgtaaggctgccttccggatcctgagtttcatcctggagacgagaagaggacattttattaaggaaactgtgccagaccccgtgctgggcacttggcattcagaacagcggtgctggagagccccgggttgtgc

SEQ ID NO: 333402 - DNA, 959 bp, Homo sapiens
  chr8:25900912-25901871
  hyper
cgggaaggaaggaaagcgagggaggcgtctttaaggagcccagctaaggaaatgcgcggcacagttggctctgcggtgctgccttatttcccttagctcgcaggcgggccagtcccgaagcgctgcggaaagccgcggccgccgcgctgtgcggtctgccggagggaaatccgcgctccccgggccacaggagggagggaaccgccgccggcccaagtcccggagcgataaaacttctgctttctccgctccaagggtagaggccggttcgctctacccgggacacctggccagtttgggaaagggatcatttctccgtgtgatgttggcacttaaatgtgggtggccaggagggcagcaggggaagcgagggtagtggaagaagttcatcggctctttgggggtagaagggctgcctctctcgcagacaaggacctggaggccacaaatcccaactcagtagtggtgatgagagagtgggaccgtaatgtcttcgtagggtggcaccccggacatggtatttactatcccagcacgcagacgcctaaacacaaagtcaacttcagggatccgcaaaaccagaggctggcgatccctgagccagtctagctgctggtggccttttctcgcctctttcttcttccgcaactctttctactgtgactcagtattttctcttcttttaaatctcttcttttctccagttccctagctccgttcgtctggctcactgttttatctttgagccgggaccctccagcctgtcccccctcccagagctcccggccgcctcgtcttcccgggcagccgctccggcttttcccgctcccctcgccgccgccaccctctggccgccggcctcccaggctccaggaatcgcccagcaagatgcgggaggtaggcgctcgcaggcggcgtggcgaagccaagagtggccaggaagccggctttcctcccgc

SEQ ID NO: 333403 - DNA, 780 bp, Homo sapiens
  chr8:25902869-25903649
  hyper
agcgccacggagcccggctgcagccgcgcgcgggccccatgaatgggttactacggccctggctgcgggaggcggagctgcggcccgataaggagcctcatttgcatggacgcgcgggattggccggcgcctggcaagccgggccgacgtcctccggcggcgcgcgccacgctctgcgttgccgggactccgggaggtgaaaggggacagaaagctgcgggcgtcgagtcctagcacgaaccccgtgtgcttgcgcaggattggggggcccccacaccctgcactgacttagggtagcaggtctctgcgggctggggacgcaggggttcggcctggctgcgggaagcctccctggatcctgcctctagatgtaggcttttgtagcctgccgggaggcacgttcgttcccggggttcggatctgtgtgcatgcttgtgagcgtggccacatgtgcttatgttttgcgcaaacgtcccccagagcacccagctccctgaatggctccccaggtctcctggagttccatggtgatatcagatgttgtgtgcggcttgcacgttgctgagagtggagaacatatgaaagaaggcgggggatggggtggggcggacaagcgaggggcaagtgctgctcaaatacagtgctggggaaaacggtccaggacctaaggaaaacacccgcgggcgggcgggcgcgagcggcagtcgcacccgtgtggaggagaggttgctgacagatcgaggcgggctgagtgcgcgagcggccggggagtattcccgc

SEQ ID NO: 333404 - DNA, 795 bp, Homo sapiens
  chr8:25903657-25904452
  hyper
cggttccctccccacctctccgttcccgaagcccccggtagtgggcggggagggacgggggagtcgtggaaacttcgcccaccgcgcgcggtcgccgcggtgctggccgcgggctggtggccggcaggcggtggcagcagcctcaccgaacagctgaaaccctagacggttttttaactgcgcggggctgctcgcggtgcctattaaacatcctcctggctgggtgtcattttcttgcttctccttttgtattctgatctgcgcatagatctgctgctgctgaaatctagaacaccagcgcgaaaacagatttgaagacaatgaatgcaaatctgtgctcaaagaccatctgccgtggaggagacaatcagctgttcgtagttcgagcgattgcgccccagtctcccggtctcattacggggagggcatttgcgagcgcctggactgcgttcagggcactttctcccctcttgggtctcagatttgagagaccagatcccttaggtgtaggtgagcgctcgcaaatgaactgctagagtttgccgctagaggacacagcgccttgcaactggtttgcctaggctgacaggaagcttgcacttcaagaaaactcggctctctcgagaaagggaccggtgcgcgcctccacctccccaagggacaaaccgcggcaccacgctgcgtgcgcgggattgcgactaggaagtgctggtccgaactgcggagattcgcttgaaaacggatagggggttagggagtttgcggggcgggtgcacggaccgtctctgcacaggc

SEQ ID NO: 333405 - DNA, 883 bp, Homo sapiens
  chr8:25907885-25908768
  hyper
caagcagcgccccgcgcgcccggggccctcctcggataagggaggggtgacaaaagtctcccgctcactgctgcctacccacccccaacccggctgccttttcctccaggcccccacaaacacccttggctttcagatccaactttcttcctcataatatactagtcaccgcgactcccgcctcccggatttgaggatgggggagactttggcggcgggggtcagctgcaaatatggcaccatctagaatttcattccatttagcactaggcaacctcctcctccaacacacacacgcactcgcacaccatcacgatcacctccacctacactggcacacctcactcaggtggcaagagagaaaatccaggaaagtcacttgcatagagtgcacggatttcaagaagtctttgacggtgcaaactggacttctaatcatgggatctctccaaacacagcccaaggcctagaaattccatttctggctcacggaaccttccacccccaccccctcacctgccgcgagccgggcaatcatttcggggcgccagtgggtccagggcgcacgggacatggcacccacggaaaacctcagagccagctgggaaaacagagatcgctctcctggccgggcagctccataccaccctcgaagggggacacaacttccacttactcttttctcccaaaggagagcagatgggggtcacagggcttgggggtcactgcgttcagacagtcaccccgcgcggtaagtgcttagagcaacgtttatagggcaatgctggcctcgccgcgtaggggtcgctggactaaatgcccagaaaccctcacaacccgtgatgtccactttccgtggatctgaacccgggcaagttcggtc

SEQ ID NO: 333406 - DNA, 41 bp, Homo sapiens
  chr8:25910878-25910919
  hyper
cgttactgcctcctagtggcggatacggcggcaatagtggc

SEQ ID NO: 333407 - DNA, 309 bp, Homo sapiens
  chr8:26148759-26149068
  hyper
ccccagagccccggcgctagtgctcgaggctgggacactgctaggtgcacacagccgcggcctggcgcaggcggtgcggacagagggtatgccatggcgagacgctggcgcggcgcaggccctgccggccgggacacggagggcggggcacaggcgcagcaggaagggggcgtggccaagagccgcccggccgctcccccgcccctccccctccgctctccgccccagcccggcggctccgccccctaggtgacgtcactggccaggccagccggcgccattttgaaagtggagtcgcctgcccctgcc

SEQ ID NO: 333408 - DNA, 576 bp, Homo sapiens
  chr8:26436208-26436784
  hyper
cgatggggagatggggacttggatcctccccgggtcttccgcccccacccaaaaagggctttctggagccttctccgggtccttggaaaaaggagcgggtttgagccctaaggcgtaatgacagcagagggatgctgaaaagggcagggtgtaccggaatggtgtggaaacgggaaggaaaaacagggacgaggtgatgagcagaggaggaaggcggggggcaaggcgggggcttcttgttggccaggaaccggttttgggtgccccccccccggttttctcgccctgtagttcggggctggggccctggcggggattcgggctctttttcacgtctcttttccgccccttctgccgctcaggaggcgtccgtgttggtgcatacaaagcggactgcagggtgggcgcggggaccgcggcgagcggccgggcgctaatggcgctgcgcgacgcgggagcagatggcccggccccggccagacaatgatcgcggcggccggagggctcggcgcagtgctggggcctggacttgttggtttgcaaaccacggggaaaacgtctgtgccgtgaattagc

SEQ ID NO: 333409 - DNA, 985 bp, Homo sapiens
  chr8:26723721-26724706
  hyper
cgcaccggtctgtccaccagccaagctggcttgagagccaggtcccgagcgaagccgggagggacccgaagacagaaagcgacccaggtctgtccacgacgcctttccaagcctcactgttggccacccgaggggctccagctgccagccgtagcgggactggcgggggacggggtggggaggacgtccctctgcagagggagctttgcaagtgacagtcactgcggattttgcaggcgtaaacattaagccggcatgccagcgggcaggggccgccttcgattttctgggctgggggccaccatctgcgtaagaaacctgggtttccacaactgcgaacctaccgcagggactcggcaggacagcgcggcgtgaggaagtgcccaccttgccttctggggttgggccctgaggtgggacctcgggcaaagactcttgttaaaatcgcaagttggagacctcacaggtggtattaaaaacgtgccactgcagaaacccttttcctcctacctcgagggtgataaacacagggttaaaaagacacttgttcagtagaaggcaacttcgcagaagatgtaagggaatcgggggtggggtagaggggccggtataaaacctggtggaaaaagcgggaggcgctgggaaaagtgggggttccgtctcaccagacggcgggggaggtctgccctcacccactcggccctgcgggacgccggccccggcgcactcacctgaagcgccgctgctgagccaccagctcgcgcgcgggggatgtggacccggcttcggtcccgggagctgcctgcctgctcttctctggaggcggagaggggaccgtgtctccgaggcaccaaatccttgtccttttgcacccgctgactcacccctccaccactgatgtctttaagctcctgaaccgctgtcactttacctgcattttttaaaaagagtcaaaataagaaaagaaaaaaaaatgcagataacc

SEQ ID NO: 333410 - DNA, 370 bp, Homo sapiens
  chr8:28347827-28348197
  hyper
tctataaatcccgtcgctggcatccggggtctcttaggcaacaatgtgtgggctcctgattggccgcgagatccaggagggctggctacaaaattgggcacggggataaaattaacaagtgtggcggccaagagcgtgggagggactgcaatgtctcaatataaccctagaatgaagacgcgtcgaatcctgaaacaagtagcgttgaaaaccttcattcaagacgtagtgtgtcccaaatcagccctacctacggagcacgcccagtcacattgtcctggtcactccggagctgcgaaatgcaggctccactgtgccaggttttaagagtggccaacaggtaaacagagggttggaggaaaaagaattc

SEQ ID NO: 333411 - DNA, 1886 bp, Homo sapiens
  chr8:29205985-29207871
  hyper
cgcggaaaaagaaagaaaaatcagcaaaatcgccttagcagttcaaccaaaggtcaacagcagcgtttccccagcagctgacaggtcaaatgggcaggaaacaactgcggggaacaaagccccccgctgtccggcaggggcgaacccggctcctccgcactgaacagttttgttgtgctttttggaggggagaggtttccgccccctttccagctcccttcctcccgggtggacaggtcggaagaggagcggaaaggaaaggaagggagggaggcggcgaaggcgcctgcgggggggaggagcggctctttgatgggtgtgggggggtctgaactgcctaccgggctcggaagcgcagaccctacccgcgcggaagaatgcgcggaatgcggcggcgggaggcggaggcgcagcgcggcggggggcgcccggaccccacgcgccctgcccgctccctagcccgagggccgcggacccaccctgccctgcaggtgtggcgggcgccaggtccctccagggactcggacagcacgcgatttttccaggatttccgactaccaaatgtgacaagacagtctcgccgccgagagtttcgccagggctcgctaaaatccggcacgcgccgccatcagatagtcgaaaatccgggctgaacaaaaggtgatcattctccgctgcccggatttgcaggcgctagaggaccggttccgcccggcgtcccccagatacccagtccttcagcctcccgctcccagagcctggatctagcccgggacggggattggccaccttccaagctgagcttggagttgggcagcgggaacgcagatacagatcgctctacacagtgtgtgcaacccaatctccctttctgcatttgccagggtcttgttttcagtgaaactggcaaggccaattgtacctcggcgcccacccctcttcaccttttctccacctctgggattctcccggtccggctcagtgtagggccccagcacgccaaaccaacaggcctatcttgtccccacgcgccccgtggtacttggaaactgttcccgggactcaagatggaccgcgcagaggagtcgcttcatcctcgaggctaggaccgttaatgtcaataaacggggcctcgctaggacggtgcggaattgcaggtgaccggagaaacccgtccgcactttccctgaggacttgaacctcgcacttgcacagaaaccttgcaaacccctacacaccaacacacacaaaggggcgcgcggggatccccgcaaccacgaatcacgccggggactccttcccgtgccaataaggcgcaggccgccaagaccccctccatctccccgactccagctagcgcccggagccctcgtttacctttgagcaggcagatgtcggtgcgctcggcgttgcggcgcagcgcctgcaccaccagcgacacggtgctgtcctcgcggaggctctcggcgcgcgggctgcgctcgtcgtagacgatgaccgccgagtagaggccggagcgcaagcgggcgcgtacctcctcctcggcgggcaggatctgctccaggctcacggagcccttagcccgccgccgcacgatggtgttacagcgcacgttgaccgaacctaggatgtagcccgcgctgtgcgccaggaacggtctgcagtccagcagcaggcacttgccgccgctcggcagccccagggtgccgtggctgccgctgccgcccgcgccgccgccattctcgtcccggttcatcagccttttgagcacactgcagtccatctcccgcagctcctccatcgtcaccatggtcgccgggaaccgaggcggctgggcgcgcgaggaagagaagagaacccgggccgcctaggctgcagaaaggggc

SEQ ID NO: 333412 - DNA, 638 bp, Homo sapiens
  chr8:29387050-29387688
  hyper
cgccatccgtcatttctcggcttcctcccacgcgccttcatgcggatgtgtaggtatctcctctccctggctgagtcaagtcactcagagactgaaaagagagagaggatgtggcgtgaagctgaagcctgcacccagggcctggcacctactgggttgggcttggcgctgcgtgcttgcatttccgcggatagaccgagatggcatctgggctgtgacactggctgcccagcttttcttttctttttttccaacagcatctggaagaggctctgggagggtccaaacaacaaaccacgcggcgttctctggtggctgtgctgggacgagtgggcggaaacagccgcaggtctctctcttctcttcagcctgaaactcactgcacaaataccagaggttttttttagagattagataaatttgcatccttctccccccaaccccgcccctaagccagaggaagtgcttgaggaagtaatgtgtttaaagaatgtgggggaggggagcttacattaggaagcaggactcttagcgtgtagccagaaaccccaataacctttaagctgttaacccttgaggatacggctcaatggtgtacccacgtggagttcattatttatctccgaaagccctgtctg

SEQ ID NO: 333413 - DNA, 91 bp, Homo sapiens
  chr8:30890541-30890632
  hyper
gccgcccgtcccgcgctccgcggccccaggtctccagccggcgggcactcacatcatctctgccatcaccgccgccgccgatgcccttcac

SEQ ID NO: 333414 - DNA, 1772 bp, Homo sapiens; identical to SEQ ID NO: 233579
  chr8:32405171-32406943
  hyper

SEQ ID NO: 333415 - DNA, 640 bp, Homo sapiens
  chr8:33371797-33372437
  hyper
cgttttaaagcctgtagccacaagcgtttgaaaattcaaattctagcgtcaaggtagaagcccccagctggcgtctggggcagccctgagggaggtgggtcgtcgggttggcggatccggcttgggcccgccccgccagtgtcggcgccgggtgcgcagggacagcagagcgctgtcttgggcatgggtcgcaggcggcgcccggaacgggccaggggagctggaggctgcagactcgggctcggcgggtgtaggaaccagtggtgtttgcttgggttttgagaaggcgcgagaagggtcgcgcctgtgcgaccgccctgtgttgggtcccccacgccgcgtcggcattgcttgttccctcttcctgcgctttcctggagggtagaattgcgtccgattggccttcagttcccgaggagctgcttccatttaggaccttgtgactctcatagcttccacggtttcgcaggagcccgaggaggcaaacttcatttgtgccactgcacaggcgggagcttcggaccctgggaggggtggcgcgagagagacgtgtcgccagctgctcggagagggactcttattcagcctctaaggcgtcaattgcgcctccagggttccaggagtccagagaaagcccttc

SEQ ID NO: 333416 - DNA, 1274 bp, Homo sapiens
  chr8:37552902-37554176
  hyper
cggacacacacggcgggcggggttacagcccccgccagcatcaccccccacccacccagtggtgagaagggagagaggagagagagcggccggaaaggaggacggggcgcagagctcagggtcccggagaagtcccgtcccaggcgggggaccccagggcgaggaaggcccagtcggggggaggggaggaatcccgggagcggccgagaccgaggcagcggcggcgcgcggcgcggcccctttaaggctctccccgcccaccgatggagccggcctcagcccgccgctctccccgccccggggtcccggcgagagctgcgattgggcgggcgcggcgatccctttgaagtgtggctgccgatcgcggctatttgacgtgcggctcgaggaaggcgaaggtttttgtgttgctagccggggccagcggcggtggcggcggcggcggaggcgtcggtggaggaggggaggcggcgaggaggcgcagctcccgctgcaccgcgatcgacgctgcggagcgagcccacccgccccgggagctcgcctccccggtgctcccccgccctccccgcccccccagcggcgctgcctcctccaaatgagcgattcgcccgctggatctaacccaaggacacccgaaagcagcggcagcggcagcggcggcggcgggaagaggccggcggtgccggcagcggtgtccctcttgccaccggcggaccccctgcgccaggcgaaccggctcccgatcagggtcctgaagatgctgagcgctcacaccggtcacctcctgcacccggagtacctgcagccgctgtcctccactcccgtcagccccattgaggtcagtccccggccgctgcccccgggcgccggccccattcctcccaccgcgaccgggaccctgacccagctcccagcgccccggggctcggtgcgacacccaagtctggtcacgctggcgggctgagtgaggaggggaagaaaaccgagggatcagagcccaccagggcttccccaggcttccccgtggaagggtctccttccacgctcgcccttcggagctccgtgttttctctcggattggatttgctcctggagtcccctctgggtcctttacttttcctctgatccccagtttccagccaggagttggtctctgctgggtcttccccgccccccacgccgggctgttttctttgaagccctggctgcccgggtcccacttcgcctctgtcccatccggtgagggcgcacggcgccctggcgctcccgatccc

SEQ ID NO: 333417 - DNA, 180 bp, Homo sapiens
  chr8:37595183-37595363
  hyper
cggctgtatccggagccagtgcttcctcagtgcggtgggggctctaattttacagttaaagaaaggggaacgttgactgagaacgaggaggaagcgagttgtagatctagccttgtgttcacacgacaccaggctggatatgagtcactcgcagggagctcagcttggtgaggtcctctc

SEQ ID NO: 333418 - DNA, 943 bp, Homo sapiens
  chr8:37655257-37656200
  hyper
cgggggacaggcgcaccccagagaaaggcaccgcaggcgcccactcacctgcacaggtgaagtggagagcacgcctgcagggcacccacgccccggatttccagcctggactagggttgcggactttggggacctgagaagggtgagagcggggaatgctcaggaaagatcgacgctcgtggcccaggagggggctgtggtcctaaccactacggtcgcgtcccggactgggctggaggagtctccggatttacctggctggccttgtcccttcaattggggtcatcccatccttgccccctggcctgccagcgccgcttccagccggtctccttagggcaaggggaggctgggctcagaaaagtcggcccttggaataccggcgctcctgggctgcaggagaccctggcgtccccatccctctagaggcccctctcccacggcgccgtttgtgcagtgagctctgtgctgggtcccgcgtccttgcctctcctttgcctctcctggaagtaactcgagctttggctgtttctccattgacttcgcgcaaagattgcgaagaaagaaacgcggctggggaagcggggttccctcaccgcagcccacccgggcctccttccgcgacttccctcttagtcagggcctcagtacgcctttgctttgctggcagcgagcgctgcagcgccgcagcccgaccccaagcctcctacaagggggtcgcaagtcccagcagccgcgcgagcattggcgacccctccccaccgcagagatttcctgcgccgaccacgtgctcgcagctccacgcacgccgtggatttgagggtcgggcccccgcggccgccgcttcctttcctgtcccaaatccagcctaagagccgcttccctttccctgtcctcctgaccccagtggcaaccgtttctccaccgccccttgcccgcagtc

SEQ ID NO: 333419 - DNA, 980 bp, Homo sapiens
  chr8:37756358-37757338
  hyper
cgccccagatacggccccttcttccaagaagacccaaagctggcagagctgggcgggacagccgcagaaggggaagccaggtgagaacaccagcaccggccgagggctccgtcccgaaaggccttccccgctgctgcccggcttactctcgaagggtccagcgcccagaccgccctgccggaggggtccgcgcccccaggccgggccctcccctccccgcccgcactcactgcgtcttcctgcggccctggtcgcggtgcagatcccgcaggtccacctcggcgcggcccaggaacttgtcgaggccgagcagcgcgcggtgcagcacggtgagctgcagggtggcggcggccgcgggtccggaggacagcagcgatggcagctcgaaggtggcctcctcgcgccacacgggcgcgcccaggctgcgctccgacacggaggtggcgtacttctccttgcccacctggatcaccgcgtacgcgtcgctcgtgcccccggggcccttggcccgcaggccccgcgcctgcagcaccgtcacctgcacgtgggttggggaccacacggcccccaggccccggccagccgagaccattagggacatggtgacgataacactccagaagcgaggagaagatcgccgcgactggcggcctccacggcccgccccggcgaccaggccactttaaggcttccggccacacccccgccaggccacgcccctcatggccaaggccacgcccctgcccgagccgcctgctccacctgctgcgccgcgccccgccccgccccgccccgccccgccggcctcagcagcgcgggcagctccgggcacccgggcgccggaggcggggctggcgcggccaggcaggcaggggatcacgtgcgcaggggcgggcgcatcgagaatctaatctgagaggtggtaggtgacggatggggtccccagctgccaaaggtcgcacggcgggaaggagctggcc

SEQ ID NO: 333420 - DNA, 406 bp, Homo sapiens
  chr8:38008224-38008630
  hyper
cgctgagagctggccaacccctcatcgcctccttcccgcagcgctcacccttcatgttgcgcatgtgtctgtaggagctcccagcgcacagcttgaatgtcgctagcagcattgtttcctggcaaatgtggcagtggtggggtcgctgccgctgctgctgccgccgctgctgctgcctcttctctcaagggtggttcttcgtccttcctgagcccctcaagcttcgcctctgagtcccgcagctgcagcctggacctggtgttctgcgtcttaaatgtcccccgctgaaggctgtgcatcatcatcaggagataaaaacgccatcactcactgtgcaaaggaaggggtcaaggatagagcgattgcctcacactgctgctttggccgtttgtggggagcttggggc

SEQ ID NO: 333421 - DNA, 1161 bp, Homo sapiens
  chr8:38323132-38324293
  hyper
cggcaaagacggccggcaatagcagaggctgctgaacctcggtcaccgagaggaaggtggatgacccgggcgtgggggtgattacccagaccaaggcgcgtcccacggggccctgctacttcgcttttaaacaagcctcagggaggaaaccgggagcccgggccaagggaggaaaatggccactttctgctaaacagtctcaaggctagatagtattccaaaaaaagcgctggtccggaggtgcaaagggtagggcacatctgcggaggaaacagtcaccttaattaccacgtctagagaaagtgcgatttcattacagcctccaaaactaccgcccaaagaaggaaaccagagaagtgttttcaatttgaaagaggctggaaagaagcgggtaagacaccgactctccccaccctcccggcaactttggaccacaaggcgctttcctgcctcaaagactattaccaaacacaactcgaaaatccaaccccgctttcaaacctgtagccgttatttaaacggtaaaacaccccactttagtttccgggggatgcggcccaaatcagtccttaaaaacacacagagagcgcctctggcagcagccgcccacgcccccggccctgcgcaccgggcttgctccgggaggggcgcgtgacgccaccgcggggcagccgagaggggaccgcgggctccgggcagggcaggcgctcccgcagctccagctataacacaagggagagaaagcaacgctttggttccagaaacttccatcgtcaaggccagttctggccagacgcacagccaaagagcccccctagtctagcggatgaaccgttcgcgagtggcaccccctaaaaccttggccccatctcccaagatgcctctttactgcgcaatccagaaagcacccggaccgccgccacccaccagcggcggcgaataacttggtgagatcttaaataactcgggatccaagggaactttcttttctcccccgaatctcaacgccgcatctccaagtctccagaaatgttaaggagggaggtggtcaagacaggctgaagaatctgagttttaatttgggggagggggaggggaggaagagggaagttaataatgcggctgcggtgtacccgtgtggggtgaaacggaaccagatgc

SEQ ID NO: 333422 - DNA, 1808 bp, Homo sapiens
  chr8:38324508-38326316
  hyper
cgcaaacatgggtcgtagcctcacttttctcccaaccccaaacataacggtaggggaagcgaggtgcagaggggtctgggccagagaagcatacgcatcgctgccgagtgaaccacaccggacaaaaaccctcatcccttcccccacctctaggaaccagattgggaccgaacggtccttccgcccccatcccacacctcggcttaacgaccgtgggttgtcctcccgttccccaaacttccgaccctttcagagaccgtccaagtcataagatcaccccttctggaaaggggagtcgtttttcgctctcagctcaagcagattcagccatttggtgacgacacctccttaaaacctattccaagagaagctaacctagccctccacgtcctccgcagttcatctcccaccccatccgaccccaacccgcaccccaggctttcccgggggtggaaaaggacttaggaatgccccggatttttagcgttgagcccaaagctacctgctgaattgggggtgaatccccaaaaggggaccaaaaagacatggagtggaatgcaacacacacacataacacacacaacgcatcccacctcgccgcccactcccgccctcctccccagtccaggaaaccgcgggcctcgccgccttcgccccgggcctgtccctcccgggactcactgaggagccgccgccgcctcgccagctcccgagcgcgagttggaggaaaagttgggcggcgggaagagcggcgggacgagcgcagggagggggcgcaggagacgcggacggagggaagggaggggagacccaaggggcgcggatcgcccgggagggagccaggaggtgaaaggggcgggcggcgagcggagggaggcgccggccccggctgggctgcggcgggcaaagcgcgcagccgggaggctccggcgccgggggccgctcgggacgccaagcccgccccagatccgggggcgccgcggctcttacctcgctcggcgtggaggttccgcctcgggagagtccgccgtggcttgtgcgagcgggcgtgtgcccgcgtccccggctccggcccgccgcccccgggctctgttcgggtcctggcggggtcgcaagagctccgcggccggcgctcgactcccggcggcgctcggtgctcggcgcctccagcccgggcgggaacaatggagccggagctggtgccccggaggcggggcggggggagggctcccgtccgccacccggggtctccagaccttgtgcccccctcctccagaacgcagcggcggcgcctcactttccttgcagaccgggctccatcgccctgcggaggccccggcgccgcggcgtgcccgactgcagcacgggtaccgtgcgccctgcggggcgccccgagctcggaccggagaaaagtccttgggttccgcggcttttcaagcagcggcgcgctcgcggccggggaaggcgaggtcgccgcaatgcgctacgaggggtctcggtcccgtccggacgtggccgcccagctcccggcacacccgggttcctccgcgcgctgcggctgcaccggcgtcccggctcccgctagctgccgcccgccgccgaggacgccgcgcctgtggccgcaagagcgctccgagcgctatgcgccggcggggcgcgagggctcgctctctcactcccacccgcgctggtccctcctccgcctccgccccctgcagctgcctgctgggccttgtagttccccagccgcggccccaaaggacggggagcgggccgagctgtccggcgctctgcccttctcttcctac

SEQ ID NO: 333423 - DNA, 1650 bp, Homo sapiens
  chr8:41165698-41167348
  hyper
cgctttgggtttttgttttttcctcccgtctcagaggttaaaaacttcgatagggactcggagtcctcctagaggagagggaagctcccctgttatttaaagcgcaaggctttgtttcaggtatgggaaaggcgaagttggatcccaggaagagcggctccggggaccacagcgagtccctgcgaggccaaggcgcagagctgccgctcccgggccagccccgccgtgcacctgggtcgcgaggggcgctgagcgatacctgggacagaccagacgcgcttaggaatcacgtgcacagcatgcgagcaacctcgggccctcagtccccagcaccgggacccagcggcgggcgggcgtagggtggcgcgggttctcctgcagctccggccgggggatggagggggcggctcgcgcacgtgggaggaggcagccttaccttggggcttggaggcttcggtggcattgggcggcgtcatggcgatgcagacgtccccctcggggaacttgtcacacttaagcatctcgggccagtagaagccgaagaactgcatgaccggctcgcacgagtcgcgcacggcctcgcagagccagcgacacgggtagatgggccggtccaggcagacgggcgcgaagagcgagcagaggaagacctgggtgccggcgtggcagttcttgttgagcaggggcacccagctgctggcctgctgcttcacctccgccatggtctcgtgctccagcaggttgggcagcaccatcttcttgtagcccacgttgtggcacagccgcaggtccgcggggatgtccacgcactgaggtggcttggtgtagaagcgcccgctctggtacgggccgatgtccgactggaagctcacgtagtcgtactcgctggccgagcccacggccagaagcgccgcgcccagcgccagcagcacgcccagggctgccccgcggcggcccccctcgctgcgcccgatgcccatgccggctctgcgccctgttctccgcgacgtcggggctgcctccgccgcctccccgcgcgcgtcctgccgcaaacttccagggacctccggggacaaaaggcgcagtccccagcgttgcccggctccgcggccgcaagctgctgcccggtccccccggccagtggcggccctcggcctgcggtcggaggcggcgcgggcggggaggcggcgctgcgggctgggtgcgccccggctcccggaggtgcggcgagcaggaaggcgcggggcggcgggcgcgcggcactgactccggaggctgcagggctggagtgcgcggggctcctacggccgagccctcggagccgccccgcgcagccaatcagctcccggcggggcgagccgcactcgttaccacgtccgtcaccggcgcgggagccaatcgcctccctcgcgagcgggttcggtttactagaaccagacgcggctcaacaccccttaaaaaacaaaaccaaaaatacataaataaaagggggaggaggaaagagacaaggggagaaaaagaaggggaatggatcacggcgtggggtggagagagaccagggcggacgctgtaattaactcgcattggcttgcagagaagcggggagcctggatcatacttgcaaacccatgaaattatgaagactttttt

SEQ ID NO: 333424 - DNA, 234 bp, Homo sapiens
  chr8:41168659-41168893
  hyper
cggtgattccacggtgcacacaggaggcttctgcagatggatgacttctctgtcatttcgtggccaatggaagatgccttgacactcaaaaggtgacatggaggctggaaggaaaacacagagaagagagagcaagatcgggatggccaagggttaatcccaagacaattggtgaggccggcctgtggagctgaggaagacattcctcacagagaataagaccgcaggagaccc

SEQ ID NO: 333425 - DNA, 838 bp, Homo sapiens
  chr8:41685769-41686607
  hyper
cgctccgccccgctccgcccgtgctgggctgtggcctccacaccaagcagccgccctgggccgccttccttcgtctgtgcgtgcagcgccgcctccttcagcttaggcccgacactccatgaactctcattttccaccttctccgtctccagcttccaagctgcacagggccaggccgaggtacgtgatggcgggcactgaattacagatcccgtctgtggccgccagcctctgtgtcctgccacctcctccgagaggacatcaccgccaccaggtggagcgagtctcctcctcggcgctccaaccacgtgctgtttattactctgtggggattcccataccgaggcctcttcagttcctggaacagtagcactaaaaggctcctgagtgcctctgttaatttgattgttctggttcgcactacaatgaccgggctggagagggggcgctcgtaatgaaacaggaactgctcctcgcgcccgctccagagtcctttacatctttggggagagggcatacggggagctacatttcattttcctgaagattttccacgcgaaagtgctggggagagagttgggcctgggaggctgcgccttcttcccgcgaatcccgaaaactgcgcggcaaaggcgggttccgcagaagtcgcgcgtgacccggggcgccgccctcctcggggcccattcggatctgccgcccgtcctctccagagcgccccctggcgccctctaggccatcttgattccaccgccgcagttgaaagaattaataaataaatcctagtctcgcgtctagaccggtccgtgagggtcccctgctcaccggacaccctgcc

SEQ ID NO: 333426 - DNA, 1455 bp, Homo sapiens
  chr8:41753753-41755208
  hyper
cgccaactccgccgcaccgggcgccgcgccccaccgcgtcccgggccgcccgacccctgcccccagcagccacttgcaggtgccgcggtcgctgggctttcaccgccgccccctcctaccttcttctttcggtcacgggagcggtttctccgcttcctgttggattcctccttctccttctgctcctggagggcctgcgcctcgatgtctttgattttcttcagctgtttggccgcttgagccatggcgggtcacggcgctcccgtccccgcctcctggacccctagcgctcagcgatccccgaggcgacaccccctaagaaggggaagggggtctctgctccacagaggggacagcgttcgtggcgccccgagggccggctgctgcggggtcgcgggaaggcgaaggcagttccggacgcggagggcgaggggcggctgcccgcggcccgggatggcgctgccgccgcggccggagctcgcttgccggcgcccgggacgggctctgggcagggcccgccgcctccctccctccgcctccctccctctcctgcggcggcggcggcggcgaagcgggggggcgggggcggggaggcggctcgtactgcggcggcggcgggcggtgagcggccgcggaaggggcggattcgggcgctcagcgcgggaaggcccgggggcccggccggcgcggcgaggctgggcgcactgggcgtccgcacggggtcatggcgagcgccgagcttccgcctttgcagagccccgcgccgtcgggcggcgggaacaaagcggccgctctaccccggaccccgctgcgggccgcagggccaagccgggggaagaggggaggctgcggcgggcggcgcgccccgcgcccgggcgacccggcggaccagcgcgcctggcggcggcgagcgcggcgacatcgcgggagcggaggctcggcctagagggcgggcggcagagggcaaggaccgggcttggggagcccccgggcggtggccgctgagggcccggacgcgctactcccgagcccggggtgcggttcctccccgggcgccctcggcgtggggcgcgcgcctccggggctccctggggaagagccggttccccgcgccgcacgctgggagcttgatttgcccctttcagaccatgtgggcctttcatttgcatatttccgaattatagatgaaaacgtatccaggatcaagtgaattgttttcctttgagtcctcttgggacagaaaaggaagtaggtccccgctccagccccgcccgtcccccatccccggcgctcccgcgcacgcctccctggggacgccgcctgcgcccgtgccccgcggggaagagctgcacttgggtccgcagcgccagcccagcctgcggcaggcggagggggcctagggctcagccaaccaccccgtcacgccgcacaggagccagccggggtccccggctc

SEQ ID NO: 333427 - DNA, 625 bp, Homo sapiens; identical to SEQ ID NO: 233632
  chr8:49292889-49293514
  hyper

SEQ ID NO: 333428 - DNA, 632 bp, Homo sapiens
  chr8:49309329-49309961
  hyper
cggggcacgtccccggcacaccatcccctctcttgggtgagagtctccgggtgactccccgcagctccccctgctctcacctccaccggcctccccccgccgtggttcccgcggtgcgccctccccaagtcccttcctcccactgccctgggtcccagagcacatccgccggcggcccccacatccctctgcctggagtcccggtccccgcgcacccccgcccccgccctgccttcacctgccgcaggccgcccgccagccccgctgaccgccgcccccgcgcttcgctggcgccagcctctcgatgggtcttgcactttgattatttgtgttagcagttaatttagcaccgtggccacgtgtgccaaagctgcctccacttcctccgggctcccaacaaacggcacttttatgagatcctttcaaagcggctcccaggctgtctcccgcctcctggtccccgcctctcggtgcagactccatttctctgccctccgccctccaccggggcgccccctctgcacaggccttatggcagctgcgatctttcctgccgttgcaggaaaggagctatttctggcaactctgtccctccacccagggcactcagcctgatctaatggagatttacc

SEQ ID NO: 333429 - DNA, 494 bp, Homo sapiens
  chr8:49468683-49469177
  hyper
cggtcggtcattagcgcgcgctctccccgcgcccagggtgcccccgtgcccagggtgcccccgcccggcgcctccgcggtcccctcccgcgcgcacctttccgagtgccagtggggcggccccgagaccgcaattgctctggcccggattgacgagcctccgatgcccatttactgcgcgcggcagccactctggagccgcggcacatctggatggagtcagctgcctagcgccaggggccagcacggcccagccagcggagcgcggcggtgagcgctagggaggccggcgcccgggccgcctccgcggccgaccccctgtccccacccgagcaggatttcctgatgtaaacacagcggctctgcgagaacagagctgctctcctgaatgtgtcatttagtgttctttatctgcttggggtcagcatagcgacttagaaaaacagcagtcttgctttgaatttaaacagcgaagaagccagagggtcctgttcc

SEQ ID NO: 333430 - DNA, 491 bp, Homo sapiens
  chr8:49782687-49783178
  hyper
cgcccccggctaaacacccccttggcgtccgcctgggggtccccatgaaagtccccgcacgccctccccggccccgccctcctcagagcgtgggccccgcgcgccgccaccgcccggccgggaggcgcggggctccctagaaggctcgggcatgtcggagggagccgcggtgcagagacttgccacgcggctgcccgggcggcgcgcgctggagcagctttgtttcctctgctcccgacgggcatcctgccctgcggaacacccacccgagccctgcgcgggaggggcggccgggaggcgcgcgggcatgcggaggggaaacagggctgcagcttcaagcccaggcaggacgcccttagtcaccttatcggaaagtgggcagcgccgcgtctccggttagtcagagccccaggtaaataaagagctcggtgtctgcggggctctggcctcagtggctcgctctgtcactccgctttccaatacacgcaccc

SEQ ID NO: 333431 - DNA, 447 bp, Homo sapiens; identical to SEQ ID NO: 233638
  chr8:49834211-49834658
  hyper

SEQ ID NO: 333432 - DNA, 1156 bp, Homo sapiens
  chr8:50822475-50823631
  hyper
cgcggcctgtttggttttccgtcccgagtgattcccggctcagtaacgtttctcctccagggagcccactggaactccactggctgtgccgcctcctcgcccgtcccccgcgcgcgccgcaggccggtgcttggagagcgcaatgtccccgggagggaagatcccctacctggaatggatggttccagaccagcgggaacgcgctctaatccttgatggaagcaagcgtgggaggaaagcacaacgtctaggacttccctgtagtgtcagaacaggaagaagaacctgagaagtcgccggggaagggaggccaggagcaggcgtccggccccttcccacagcccgggagaaattagtgttgcgccccgcccctcccggacccccgtccccaccacacacaccagcgcccctcaccagtctttctcgaatttcctctcatgtctatcaataacctccttgtgcagaaatctacactgcacaagttaggagtctgcaagggcgggcggtgttacagtctcgctctttccattttccccttttactccacatagtttcaaaggtccacatggccctggttttgaccagttttccaacagtttcaacgttatgtatttcaacttcccgtctcagttcactggcgtctgcacccgttgccgagtgtgggtggctgagccctgggtgacagcactcgggaccacgcacccatacccttctttatgctcgttgtcagccagttgccaagagcgggagtgaagagcctgcaaggcccgggagagcgcggattccggagtagggaggcgagggggcagcgtgggagaccagagggaaaatgggctgaaaagccaacaaaaaaaacaacgtaaattgggctttgctctggctttacaaaggcagagattgtcgagccctctgactgtctttgtgccttctttatcccgtcctttgtgaaataagccgttttctgcccccactgcaggagcctaggctgtgggcgactcgctagcactgccctgggcctccaagctgcctgctcgctgagctcagcgctgacactcacaggagctgcgttcgccggatcctctgagaggctctgcaacgatcccgatccaattcagcagcgttttaaaaggtagccgagtgcagatgctttttcctg

SEQ ID NO: 333433 - DNA, 799 bp, Homo sapiens
  chr8:53477524-53478323
  hyper
taatctcaggcttcccaaagcgagtgcctcgcccagctcctaggggaatccacggagccccaggcgcagggcaaaggatggggcgggatggggacatcgtacctgcgctccgggagccgctgggagtccggccggccccggccgcggggaggaaaagcaacggcttgggctccttatccgtgacgcgcgctcccctgcgcccccggggcctcccgtgggctccgtgcggggacaaagccagcgccagcaggaagagtgcgggcaaaggggcgccgggcttaaggggccgcatgttcgcaagccgggaggagagagcgggagactccgggaggatcccgacgcaggtccggagggtgcgcggcccaagagaaggccagcgggaccacagcgcggctacgcggccggccgcagtcttcaccgcgcgcctgcccttgtctacgtcccgggggtcggctggagctgcactgggactcggtcctcagtgtgccgaagcctaagcgctgcggggcgcggggcgggaacgggaggcggtgcctggggccacggggtcgtcccccaggatgagggcgtgtcccagcgcgcgggaccctcggaagtccgcgctgggccgggcgggcaccagcctcggactcagcgggtctcagggctccctgcgcaacgcctgcctcggatccggaccccgggctcgctctctggtcgccgtccccgggaggacccagtagggtaactgccgcgtcgccccggcggttctccctgggctctgtctcccgccgcctccaccccccgagcctcggggtcc

SEQ ID NO: 333434 - DNA, 785 bp, Homo sapiens
  chr8:53853387-53854172
  hyper
cgccttcctggacgccagcttccgcaggaacctccgccagctgataacttgccgcgcggcagcctgactcccccagcgtccggctccgcaactgcccgccactcctggccagcgagggaggagccggcgccagagtgcgggaccagacaggccgcctaggcctcctggggaaaccgactcgcgccccatacccgacctagcagatcggaagcgctgcgactgtgcccgcaggttgaccttgccaagccctccaggtgatgcgcggccatgccgggtgaggagaactgaggctgagatcgccacactgagggctccctaaagccgaggtggaggaagaggagggtagaggaggagggcggtattgctgggaaccgccccctccctgccctgctccctgctgccccacccgagccctggcagtctggaacctggctggagtcggaactctccgcgccttcgaagggaggcccgaggacgctgccggcgcccccaggcgtcggctccgcgcggcccctgctgtagctggcgcacagccccggcgggtccccttgtcctccgcgcgctctgggaagacggtcaggcgcgcgcgtttggcgcccacccctgtgagacccgcttggcctggcgccgcgggcggggaccgctgccgaggccgccagcgcctcttcaactggggaaaacacaacaactcgggatgccccatcggagtgtgtatacacctgtgtgtgtgtgtgtgtggtgtgcgcgcgtttgcggaggcatgaaatgcggggaaagaggctggc

SEQ ID NO: 333435 - DNA, 1114 bp, Homo sapiens
  chr8:54163303-54164417
  hyper
cgcccagcccccagcgctgcgctgtccccgcgctcaccggatgatcacgaacatgaccagcgagttgcccaccaagcccacgacgaacactacggagtagaccgccgtgatgatgaccgggatggccggggagatgtgcgcgggctccagctgcgcgtcctccgagccggcgctgccgttgctgtcgggctcggcccagccgggaaaccaggcgctgctgttggggggcaggcaggcgctcggggcgcaggtagggcccggctccccgcggaagatctggatcggggagtccatggtggggcgattgcagcaggaaggcgaggacaggcggcacctgcggcgctgcgggagcgaaagaaccggctggacgcggagaggcaaactttgcccgcgccctggccagcggcgctggggacccggagcctgcggactcccacccgggccgcaagtcgccgggggcaggacagggagaacggacttctcgctgcctttccggccagcaggcgcgccgctgggtgccagagaggggcgaagagcgctcgctccttctcccccagcccctgaggtgcctccctcaccaattctaggcaccggcccctggtggaactgtccccagactgcctgagtccccagggtcaagcccccttcccacctcccagcacggagctctacctagaactgcacctcgaaagcccaaagcttacctatggttcccagagacaggcgaaggcgaggttttttacgggacgccctggtaggtgctgaaccgcgcgctcacgagtcccgctcagctcttggcatcacctgctctcggaccccggccccgctctccgcccgagggctgctgttccgccgagcgcagcccccgcctctcagcgcacgtctcccactactggcggcggctctgcggggcggggcggggcgggaccggcgggacgcagccgggacgcggctgggcgctgggggcctgcgggcggagagctcgtctggtgcgcccgccccaggccggcaggtccctgccccgccccgcccgcccggagtcagcccccagctccccagcctcccagccccgcgtcccctccagccccgcaggctcgcccggcccactaactgc

SEQ ID NO: 333436 - DNA, 331 bp, Homo sapiens
  chr8:54570292-54570623
  hyper
cgcagctcccacccggcctcccctccgcagagctgggaccgtccccccaccccccatccttgctctgtgggcgccgcctgcactctctgaagcgcgaggctctgcacggtgtggggctggggcctttcgctccccttggctggctctctcctcctttgtcatttgcctttgtttgctgtgtgtgtctggttcaaagggcacgcctaccgagctggatagagtaaaggaagaatcagaaagagaaagcgctcagcgcgtgttgcttagcagcacagactcaaaacaggacaaagcaattagagaaaattatcacgggcggaaggggcggatc

SEQ ID NO: 333437 - DNA, 1727 bp, Homo sapiens
  chr8:54789114-54790841
  hyper
cgggcagctgaaggtctttctgcagataacttttctcagatcgaattttttggctacattgatactcttcggctctgtccttgccagaagttcggaaggattccagcgccccacaccttgcttgattcaccctcatcccctcccctaactggagaagccgctgggtcccgcgccaggctcgcggtggcttcagagtagcaggggagcaggcggctgatccggaggccagtgtggggccggcaagcggtgactgtctccagaggagcaaaggagccgagtcttgtttttcttggatcaggtttgggacttttattctgtctgaccatttccaccacttgcctcacaagagtctctgtctcgaagcacaggaccgaagcaaaatgcctaatgaagcgtgcctgaggaaggggcaggggcttgcaagtgacttgggaagaaggactggggcgaagggagaaaggaggttacgagttcgcacgttctcacaaaaccatttgaaaacatgagctggagacgccaaattctgggacccacgaaaggctttggagctcgctcgggctcctcgaagttgggcgtgcgtcgcagaacagtgctgggcgctctctttcagcattttcggcttttttcaagcccttgcgtagggtcgggaaggccgtgggtgggctcagtcaggctttaggtcgccaggaacccggctggtcctctctcgacttcttagcgtggggtcccgccggccctgccgcccgtggccgccgaagttcccgccctcgccgagggccctcgctccggagtggggcgcagacgcggccgccggcccgcagtcccccgcaggtgccgcccaggactagctgcccggcggaggccgagcacgcttggcggcagctgagcctccaccccaagccccagccggaggggcgcgtcccctgtcctcctcccgagcgagacgaacgctcagcagctcgttccctgggcgccaagaccgatttccaagtcgcccactttccccctcgagggagctgttggcgcttctccagaagcctcctcggctcccagctccagcccctaaaataaaagcaccttgccagagagcgggggaggggagcagctgaacgaggagaatgaaaatactgggagaacgaccccattctccaggaaaaggtaatgaggggaagtgaaacagtgtgaacttactcggaaatgcaaaccgagttcaactcacccaggagcaaacaaacgacagcaagacaaatcagccaccgcactcgcggcttcccagaaagggcctcatgaatgagaatgggttgctaggtttccttccctctctcctgacaatcgcttcccacaagacttccaccgccgaaagaatacaggccgggcctggtgactgcggagtgagggaaccgcgccaggcccacgaggccgctcgcgaccgctcccgccttcaggaccctggagagcggccgccgcgcccctgggacccacgcccaacccagaacacccgcgctcgcctcccgcgcctcaccaccccagcactttattcgctgcttcccgcctccaccttcattttttttggcaaccaccgctcttgtttttcacagacagattaaattgttttttgtttggcatgagggggtgtttggattggccgagctacattccggtttgtaactacactaaacgttagtgtaccaagaaactaagagcgtctcaaagatgacagtctgaac

SEQ ID NO: 333438 - DNA, 989 bp, Homo sapiens
  chr8:54792065-54793054
  hyper
cggccgaccctcggggggtcgtccgctgaggcccccccatccggtagccaagcccagggaagaagacgccaccgctgggcagagctcgcctatgccggtgagtaccgtggtctccactacgccccacacccagcctccccaggacaccagcctctcccgattcttcctaaccccaactgacccgctccgctggggctagcagtagggagggtggcaaggtcgggaaggccgggacgtggctgggcaagtcctaggacgggacattggcggctcccgggacaccgcccctccccgcgggaagacactccaagctactttttcctgggccatttcctttccatggtccaagaaaacgggagggagccctcgctcttccccgaggctgcctttcaaactctcagcgtgtcgctctcctccgcctactccgagcctcccccaaacgcgcctccgcctgctcccagcgctcgctctcccactcccctgccctctcggcaggcaagggaggaaatgacgtgatgttatttttgtgtcaggtcagtttccagcttcagcttagccctccgggctccagggaactaaccccgcggccccaccgggtcccactcccgaagggacgctgcgggctacggggacacgcggtgctgcgagtccggagagctgggcggctgggttccccctcccgctgccccctggtctactcctttccccggactccggagtccctggagaaggggacgcggagggcgactgccgagggtctcagcgggatctggagtcaggggttagttcccccccttatcccccgctcggttgctgggtggggcctccgcgctctggctagctgggagggggcgagggccgctttccagggcgggaagaccggaggcctaggctgcgccggggtggggcggggacagagctcagagaggcgccccgggccggggagaaggtagggggctgccctccagagacgcgcagtccacagacgc

SEQ ID NO: 333439 - DNA, 2275 bp, Homo sapiens
  chr8:54793072-54795347
  hyper
cgccccctccatgcctgccgcccacccccgctccttcctcccgctcccttcattcacgaggtccgagcacgcagtccagcacactctagtctcgctcggccccgcgcgccgaggggaggcgatgacacagagggcttcgcggacgccctctacgcgcgcctggcttcgcatccacactcttgggacttgctaatgcggggctggagcagtggggctgcggccggggtggaggtcgcgccccgcgtggggcctcgggggtacccctagcacccgcggcggtggagtgcgccgccgctggagggaggcgagacgtgggattgcccggccgggtaaaaggagtgagggggcggggaggaggcagagcaaggggaggaagaggccgggagaagagggctagagcaaagaccgagagccggagaaaggcgaaaggcgcggtgagcaatcgccgacgtagagagggcagccctccgcgctgcaatattgagaaggcacccgcgggacgcatgcgcacggcggacggaggcgagccggccggggcttcctccccggccggcagggtggacggtgggctcgtgagtatcccagttcctcgaactctctttcttcgtctcgggctcgccctgaggcttcgtgctggaaagtggccgaggctgggaggggcgcgccgctcgtccggacctcagggtgtcgccgttgctgcggggcgggagccggtgcgagtcgggggttccttcccgcagtgcgagtttgggggagtggggctgcgagtgcgtccgcgtgcgaagaggggcatcgcgccaccaggatcaatatgtcccgggcctgccagggcgtccgcgattccacctctgcggcttcgcgtcggtgtcttggtggggaacgcgggagtctagtctttagaccctagaaatcgcattgaccacccgaagcgtatttcggaaagaccaggcgggtggaagcgtcggctttctcacgggatagggagaggacaaggaaggggttgggcgcccggggctggtggtttgagcgccgctgggaagggtaaggagacagagcctcctggaatcgtagcgcctccttttaggagaagtgcaaccagggcaggggcaccgaggggcagggtgaggaagtggacgccccacgcgtggaccctagaagaccgactaggtatgggcgttcactcggagcctctgttcacgctcttgaaaaccgaatgaacagagaagtgccctccacccttcgcctgcgccagggcagttaacgtgcaggcgccgccgggattttcctggaacaaacccgggcacttgatcttccgcaccctcggagctgccctgggaagtcgaaacaagtctgggcgcccggactgcggagactggaaagcagggggcggagggcgggagactgggggcgggaagtggaggtgcaggctgcagctggggaccgcggtgggcgttggaggggagggtctgtgtgcgcggctgtcctccagcgctgggggagcggacgggccaggggcctctagggaagcggcgctccgggaccggggtggctttcccgtctctgtgtgcgcggcgatccccacacccagctcgggcggaggagccctgagagaagcggctagctgagagtggggtgggcgttttggggaaaggtttgcgtgcgctgcggccctaccgctgctagagaagtggaagagagagagtgggcgccgggagggggtctataggcgccgcgacctaccccatctccctccacgcttgtgggggagtgagtggggaaggggctttgggagaggcggcgcgcgggcactgaggtgcatcgtgagcttcccggacttgacagcatcaaaggaaaatcctggcgagcagccagggccagcgagcgaccccagcagcagggacgcggccgtgcgagagctcgcggacaggcgagggggatcccaggggagcagctgctgcccacgggccacgggcgatgcacggagtggagaagtgaacgtggtctacaggatttctgtccggaaggtggagagcgctacaggggaatctcctcgattcctgtccgtctcgtaacttggcaaaagctcgcgccactgccctccggcctgggcgacagagcaagactccgtctcaaaaaaaaaaaaaaaaaatggcaaaagcctatcgctctttgtcgaactccccacgttccccagtcacctggctggggttcgttggtgtcaaaaccccagccttggtgccctcggtgccagcaggaccctcgcccactggctagc

SEQ ID NO: 333440 - DNA, 1496 bp, Homo sapiens
  chr8:55366131-55367627
  hyper
gagatctaagaaacactccacggatgagtttctgaagagggaagtggaccgggaacagcgcatttcctgcttcgcctgtgcaaatcccaggcggggccaagcgggaacggggacacggtctaagagtcgcccgctgccagggaggggttggggggcagcctcgaggggacaccgcggaaccagggagggatgcgcatggagggagtgggagaaggcgtccaagtaaaatgcatgctccggtcatcgggggtaacgcgcgtccccaaatcccctctcgctgtcgccctttttttcagtcctcacggggagaggccggcgcagcagtggagcaccgcaggggctggatcggacccgcactgcagcatctgcagggctccgacctggtgcgggcctccaaggcagggggcgcgcggcggcacagccggtggccgcgattttccgggccactccttccccccttacactcccctcccgcccgcgaccttcgacctccatcctggacccacggggtactggcccggggacaaggaggagacgttaaaggtatcaaggggcgcggcaccgccgcctagacggcgccgggacgcgaggtgcgaatcggcggcgtccggctgcgctgccctacctgggaggtgcgggaccctcggccgcgctccaccgccgcgcgccacctcgtgctggcctccgggaggcagccgcccgcgcacgatttataaatgcaaaggccttattgttgttctttgttcagggataccattgtctagtcatccacgggcagcctggagttttcccagggtttgcggcgcgcactcccctcccccgcccccacagacttgctctccagcgccaacccggatctgcctaggtgcccacgggtccttcccgatcgacttgagtgtccttcctccagcccctgctttcccagcatcgaaaacacaaaagcctgccggaaatcacccagcctttgcctggtcactcaggggcccacggataagcgtggctctgattcctccaggtcagccccacggttcgccacctacccgagttaatttctgcgcccgctgaccaaaggccccaactggcaacgggcacagcttcttggtgcgctagtcgcttccttgcccagcctttagagcctcgggtccggcccaaggacccggggacgtgagcgcaattagtagccaggagccctgcgaccctggaccgtgcagtgctaacgcacccgaacggctatgcgagcggtgtactcggctcttacttgtgaaagttgtttcccccaaccccctgcgtaaatctcttgtgttgagaaaagcaaggcttgcaggaagccactccggatgtttgctgctttacatgtggcatctgtggctggctctgataacgtcccggggcaccacgtattaaagtgaagagactgaaatagaaggctccacacaccgcgcgcgggtcagcgacgtcgccgccctccacactgccccccgaaatataagacaagc

SEQ ID NO: 333441 - DNA, 2384 bp, Homo sapiens
  chr8:55370185-55372569
  hyper
tctaaacgaccttgggcaagtacgtcgattccaaggtacaatcagccctcccagacggcttttcgagtctccctaaccccggtgggagaggacgcggcgccagagcccagctccggctagttttcccgggggcaggtgtagccttgggcgcggggccgggggaggggcaaggggcgggcgtggggttggactgggacgtgggactcggaccacggcctgggcgtgggcctaacgacgcgggaccggcccgccctcgccgctccattggccacatctgtgcagaaaaggccccgcggcccaggggcgcccgcagtgtcactaggccggctgggggccctgggtacgctgtagaccagaccgcgacaggccagaacacgggcggcggcttcgggccgggagacccgcgcagccctcggggcatctcagtgcctcactccccaccccctcccccgggtcgggggaggcggcgcgtccggcggagggttgaggggagcggggcaggcctggagcgccatgagcagcccggatgcgggatacgccagtgacgaccagagccagacccagagcgcgctgcccgcggtgatggccgggctgggcccctgcccctgggccgagtcgctgagccccatcggggacatgaaggtgaagggcgaggcgccggcgaacagcggagcaccggccggggccgcgggccgagccaagggcgagtcccgtatccggcggccgatgaacgctttcatggtgtgggctaaggacgagcgcaagcggctggcgcagcagaatccagacctgcacaacgccgagttgagcaagatgctgggtgagtccgagtcgcagacccaggcggccgggcgcgctggcgcgaatcgctaggccgatttcttaaaccccaaactgttctttgcgagcctgacgcccaaaaccaggggtgtgtagcggccacgtcctttcttaaggctctgggttcccttcccgcttcccgccctccgaccctccaaagcagctttccgccttgctctccggctcccggattccccaggtggccgggggcgcgggtccaacggctctgggaaggcgacttcccggcacctccgggcggcgcgagagcacccttggccctgaactgggccggttgtgtccatccctcgaccccttccctagttaggtgtccttttctgtttttcgaacgaccgggtgatgggtgagcggaaagccgcttccaggagaccaaaagaaaggggtgcctttagaggacgggtgttccccaagggctcggactcaggagtcccagatctccctctttaacttcaccccggttgcgcaattcaaagtctgaggggggaggtgcgtccaggtggggccaggtggggcctggagcgggagcgcagccgataagccctgcgcccctctcccccttccttccactgtgcaggcaagtcgtggaaggcgctgacgctggcggagaagcggcccttcgtggaggaggcagagcggctgcgcgtgcagcacatgcaggaccaccccaactacaagtaccggccgcggcggcgcaagcaggtgaagcggctgaagcgggtggagggcggcttcctgcacggcctggctgagccgcaggcggccgcgctgggccccgagggcggccgcgtggccatggacggcctgggcctccagttccccgagcagggcttccccgccggcccgccgctgctgcctccgcacatgggcggccactaccgcgactgccagagtctgggcgcgcctccgctcgacggctacccgttgcccacgcccgacacgtccccgctggacggcgtggaccccgacccggctttcttcgccgccccgatgcccggggactgcccggcggccggcacctacagctacgcgcaggtctcggactacgctggccccccggagcctcccgccggtcccatgcacccccgactcggcccagagcccgcgggtccctcgattccgggcctcctggcgccacccagcgcccttcacgtgtactacggcgcgatgggctcgcccggggcgggcggcgggcgcggcttccagatgcagccgcaacaccagcaccagcaccagcaccagcaccaccccccgggccccggacagccgtcgccccctccggaggcactgccctgccgggacggcacggaccccagtcagcccgccgagctcctcggggaggtggaccgcacggaatttgaacagtatctgcacttcgtgtgcaagcctgagatgggcctcccctaccaggggcatgactccggtgtgaatctccccgacagccacggggccatttcctcggtggtgtccgacgccagctccgcggtatattactgcaactatcctgacgtgtgacaggtccctgatcc

SEQ ID NO: 333442 - DNA, 1153 bp, Homo sapiens; identical to SEQ ID NO: 233659
  chr8:55379017-55380170
  hyper

SEQ ID NO: 333443 - DNA, 550 bp, Homo sapiens
  chr8:55382673-55383223
  hyper
cgggaggcggcgcagcgcggggatcttgcgggaccaggccagagaccaggaccgtcccccaaccgttcgcggccgcgtagccctgggcggcctgggcctgcccttccccgcgcagggctttccctcctgccggtcgctgccccgcacatggctctggtcgtactcccgctccactgccaccactgcccacgccctgcgtccccgtttgaccgcgtggagccggaccccgccttcctcgccccgcgctgccccaggcctgccccgcaccagcagctaagcgcaggtctctactgcaagcccgcagccccctcatcgctgggcctactggcgacccccggcgccatgcgcgtgaactgtgggcgacgggctcgcccttggcgggcggcgcgcgcggtttccagatgcagccgccgcgccggggcagctgacgccgcctccaaagacgcgccctgctggacggcgctgaccccacgcagccagcggagtctcctgggaacagcccaggcgccggtgccgacttcaacctctctgctcaggcctcttgagttgc

SEQ ID NO: 333444 - DNA, 2149 bp, Homo sapiens
  chr8:56013636-56015785
  hyper
gtaaggagtaagggaggtggcgcctgctccgggctccgccactccccgcccgcgggccgggggtggggtggcactcggtttcccgcggctgccggccgcgccccgcgccgccgccaggggtgctgcgcttcccacctgccgcaggacgcctcgagggccggtgcggtgcccactgggctgccgctcctcccggctcagagctttccagccgccgagaacgtgcgagggaccccggcgtcgggcaggggcctgggccgcgaagggcgggagcgcctccgcacctgcctgagctcaggcacccccgcccgccggagaagccgggagccctcggaatgccggctgcctccaccgagggcgctggctcggggctcccagcggacccgcccgccctcagctgccggcgcggcaccaggctccgcgctccgagccccgtacgcctttctctcccctgcactctctggcaaggccgggcacgcccactgccgctgctggcctccgagcccgggcgcccgagttacacccattctccccaccatcgtcggccagagccgcgctcccagcccttctccaggtgctggcggctccgaccggaatacaaagaggcctgctcctccctggcccttgctgccgccacacccgtccgtgcccactctccgccgtcctccgcgagggctgcacgcagggacccctcctctcagcgcgctcctccccctcccccagtgtcgctcaaatccacccagcgttccgaaatcccgggagtgggggccttcgactgtcaccctcaggcccccttggccgctcctcccggcccttgggacccgccagggcagtcccccaacccccgcccgccgctcctctcggtcccggcccctcctccgggtccctcctcctccctcgcccctcccgagccagggtgggagcgacggcagctggaagagaagggatgaggtcatcctctccctcggagtcagctggtggaggagaggaagcgggaggagggagcgcgcgcgaggggaggagaggaatgtgcaggtccgaggagcgccgcggcggccgctgctgctcctgctgctggcggcggcggcggctcgggcggcagcagcgaagccgggacggcgaggagcgcgggcggcgggcaggggcgcgcgcggggcgccgcgagcagcttggctccgcgcaggcagccaggcggcgctcctgccggccccaggcgcgccgctagcccggcccagcgcccagcccggcgggcggcgggcggcggcggacggcaggcgagccgacgcaggagcaggaggagggggagccgcaccgcctgggagggaagccggggcgaggcgaggaggtggcgggaggaggagacagcggggaaaggtgtcagataaaggagggctctcctccggtgtggaggcatcatggccgctaaatcagacgggaggctgaaaatgaagaaaagcagcgacgtggcgttcaccccgctgcagaactcggaccactcgggctcggtgcagggattggctccaggcttgccgtcggggtcgggagccgaggacgaggaggcggccgggggcggctgctgcccggacggcggcggctgctcgcgctgctgctgctgctgcgccgggagtggcggctccgcgggctcgggcggctccggcggcgtcgccggcccgggcggcggcggggcgggctcggctgcgctgtgcctgcgcctgggcagggagcagcggcgctactcactgtgggactgcctctggatcctggccgccgtggccgtgtacttcgcggacgtgggcacagacgtctggctcgccgtggactactacctgcgcggccagcgctggtggttcgggctcacgctcttcttcgtggtgctcggctctctgtcggtgcaagtgttcagcttccgctggtttgtgcacgatttcagcaccgaggacagcgccacggccgctgctgcctccagctgcccgcagcctggagccgattgcaagacggtggtcggcggtgggtctgcagccggggaaggcgaggctcgtccttccacgccgcaaaggcaagcatctaacgccagcaagagcaacatcgccgcggccaacagcggcagcaacagcagcggggctacccgggccagtggcaagcacaggtctgc

SEQ ID NO: 333445 - DNA, 1387 bp, Homo sapiens
  chr8:56791852-56793239
  hyper
cggagaacttgccgggccatttgactctacgtcatcccctcccccatcaatgccctgaacagcctcctgtacacccttaaggaacttactttgtaatgattattaagaactcagcgagaccccgagcatcacctcggcatatcgcatcctttctctagagaacccctaatgttggaagggatcagagcgcacctcctccgctcctgggagcacccccttcctaataataccttggggatgggtcggaaggaaaggaaaggagacgcgagaggtgtagtcgatgtgcctgcgaagcccaggctcctctggagatccttccgtccgtccctacaggagaaggctggcccgggctgctccactccccggagctgcagactgagtcgccaggtttctgtgccttcaaagccctgcgcgacggccacaccaaacacccaaaccttgggcagggaccaaacggtcacttccccgccctccgggctcaatatgcaaatccgagcaccaggaagtagctgggacctctcggccgagcccagagacagccagttcctctcccgccgcgccgggccgcgctgccgctcgctccccggccgtggcgcctccgggccagacgcgctgcagcctccagcccgcggcaagcggggcggccgcgccacccccggccccgcgccagcagcccctcgccgcgcgtccagcgttcccggccagcagcctccccatacgcaggtcctgctgggccgccccgtcgcgccccccactctgaactcaagtcaccgtggagctccgccgccccgaaactttcaccgcgagcgggtgagtcctctgcgcgagcccaggggtgggcgcgggcacgcgggcagtgggtgcaggggccgcggctgtgccaccagccggagtcccgggcgcagggtagactcggggccgggggcatcggcgcggcccgcggcggcttcctggccgcaccgcctctgggctccggcggcgaaggctcttagatgtcttcagccgacgggtgaccgggcccgggggagccagggcgcggggactgaggctccgcaggtgtccgccgcggagccgcgcaggggagcggtgggaggtgcgggcgcgggggcgggctcaccgcgtgtccttcccggtgagggcccgagggccggctgctgtccctgctccggccgcttctcgcacacagtggggaagccgctgcccttgcggagcgggcgcgcggcggggatactggagaggactcctcggattgtgcaatctgatctcccctctggaccctgggtctcctggcagtgggagatggggctcggccggcgccctctcgaggcccgcggacagttgccctccctggtggccccgggcaggagcgtgacgtcgaggggctgca

SEQ ID NO: 333446 - DNA, 674 bp, Homo sapiens
  chr8:57069543-57070217
  hyper
cgaaaagtagaaaaacctatgtggacgcatcaacagatgctgaaaaggcatttcctagaagtcggcagccaaacttggtaattcttgcgtgtgataaaggcagccgtctgttctgctcagaaggggtttcctaacaggaggggccgaatgcaggcgtcacatccacgccgccccaggtcgtacacctaggccgtccgggctgtcccagagccgcaggccccgcatcatccgcgtccttagcgcggggcgcggagcccgcagccaggtgcggccgagacccgcgcgccagggaaagcggcgcagcggacgcgggagaaggctggtgggtacaggttgcctccgggccggagcgcccatgcagggcgagctgcgctccgcacaaaattgcggtgggggcgccagaccgccttgctccgcccctgagcggggcgccccggcccaaccccctgagggaggagggtccaggtgccgcagactcttagcccctggcccggcgtccgcccggcaggttctggcactcctcgttggtaagccccgttatttcgtgcgcagtgtttacagaatataaagttcttcaggaaacgatgttataggagaaacgcctggattttccccaaactatcagagagtatcttaactatcaaaaaaaaaaaaaattcatttcagttaacgtc

SEQ ID NO: 333447 - DNA, 606 bp, Homo sapiens
  chr8:57122656-57123262
  hyper
cgttttctcattgtcggttgagttataaaaggcttttgcccttcgaaagttttaaaaaataaataaatattaactccttggtccctgcaaagtcaaaatggacttcaggggaaaggcggtacatacttttacctttagcgagaaaagggggagcatcccggatttttagggattttttgcgattttttaaaaatttttatttggttatatgcctgagttctccctccattttggttgtttatgatactgacaacaagctgtccctgctctgtgccgatctcctgctttcatttagcaccccctccccctaccccccctcgcagccacacaccccgggctcacacctccctgcagaccccgcaccccgaccccggcttgcccacctgaggaaagggcaaaaacaaattcatttctccagaaaagaaaaacctcttttgaaaaaggggcaaagttaccccaagtcactcaaagtgccccccaaatattgccgactgcgggtttccgccaggccctttgggaagcgaccttcccccgggatgttttggtggaaaatgcggagagtttactctcaaaactgaatttatattaatttttcccttatttttc

SEQ ID NO: 333448 - DNA, 1000 bp, Homo sapiens
  chr8:57358311-57359311
  hyper
cgcgtactgttgcggaaactctgtctcacaaggtgcgcaacactcgccgcgcgcaacactcaccaggaagttgatgtcggccgggcgcactaggcggtagctgcacgtcgcgcaatcctggctgcattcggcccgcacggtcgccaggagcccggggccgagcaacagcagccaagtgcaaagtgtcaggaaccgcgccatggactgcgaggagagagggacgcgtgcttcgagcctgcctgggcgcagaacggggtccctcggcaggaccctcgccgcgacagcctcagcaggggatcgtcgagcaaaagcccgcaggaatgctcctttctggggccccgccctcccggccgacagcttttaggtagacgtggaggcgactcagatcgcctcgcggttcccgggatggcgcggtcgcccccaacgcgaggctgcctggggcacccggctcttttcctgggcgtccgcggcccagggcaagattccggagagaacgccgcagaccaggggcgagagagcgggagccgggggaggcaggacattgactggggtcacaaagaagaaccagggaacgctgttggggaacccatgcaatgaaatgtgaagggaaagagggcgggcagacgtccccaaacccgctcagcaaagacaagcttcgggcaaattcactcacgttgacgctgttcggatggagcaggccaattggaaaagccgggttcagacacgactctagagggaagagaagaaggcaagtgtgaggagggcgggcgtcggggagaagcgggcccgggtgtgctggcggacgtagggcctcaccgtcgcggtcctcagcgtctctgcggggtcacgggccaggctgcggggctctgagcgcctgcctcgccgtcccggggcttaacggctgctggagccactttataattagccccaaaccgaaggaggcgcgcgcgccccaatcgccggcgggctgcagctgacgcaggccctacgccagccccgc

SEQ ID NO: 333449 - DNA, 202 bp, Homo sapiens; identical to SEQ ID NO: 223393
  chr8:57360600-57360802
  hyper

SEQ ID NO: 333450 - DNA, 1252 bp, Homo sapiens
  chr8:58906804-58908056
  hyper
cgtgcggacataggtgggagtgggggatagggaggaaatggaggcgccgaccgagtggaatggggggtgggtcagggatggggtgggatgggcatcagtagcggggtggagatgttgagagagaggcagggcttggagtggaggtgcgagaagggtggggacccggaaggtggggtgggggcgggatggaggcggggcggggtgtacgaggggcgtgtacactggctcagggacacgcgctctcggccacagcaactggctccaagttccctccctcactctccggcgaagcctgcctgagccctcccactcggtgcagaccgaaccatcgcggccgccgccagccgggcccttcgcggccgcgcgtcctgggcccgttccgccagccccgtctgctctctacccgcggccccgcggcggcgaccgtgaacactcggcggcccctacagcccgctctcggcccttcgtccctcgcgggccccgactctccctccttgcagtcccccggagcctggctcccggctcgggccgcaccgccagggactggggtgagcggcccaggtaagactgggccgtgggggccgggagagagactgctgggcgggggttgggattcgggttcagtggtcgcgccgcgccccgactgcggacaatgcgggagctgcgcgcggccaggcggcgcggagctaagccggctctgcgcctgcagcttccccgcccggcccgggtctccgttgagcccggcctcactggcccaggcggaccccgtccggctttctgggctgccgggggaggcgcagcgccgctgcctgccccgcgccccctctgcgctcggcttggctgcacgtcccgggctcggctaggaggctgggcacggggccggggctggagccggggttggagccagggcggggggaagctggccgcgctgcggagcggaggtgggctccgaaagcgcgccgccggttgctgctggaggagtgggactacgaaggatggggactccgctcggccaccgctcctgaatggtctctaatctcggtgttaaatactttatgagagtatcaataccacctaatcctttgctgagaattactgctagaaatgtagattctgaggttccgaaagtttgtttttggttaccccctccagctcctcccgtggcctcaattgtctctattttctttgaaagcatacagatttgaaatagaattaaattctccttggctcactcgtgtctccatcacccagc

SEQ ID NO: 333451 - DNA, 2618 bp, Homo sapiens
  chr8:60030068-60032686
  hyper
gaggagcttctccacggggaagtgtgtgtgtgagagcctgcctgtgtgtcaacactgtccaagactcggagctgcgactcggtcgcgtggtgcggagtccagggctgagaaggcagcgcactaaatatctctgtatcaggtaaaaaagccgtttggtgatgactcgccaccaggcaaatgttgggagtcccaacgatttttcccgtggaatgcaccgagggtcgccatggatgtgcctgcaggggctgtgagtatcaggcagatttatcaccaagcgagagttgggcgtctaaaaggcccgcccagcgttttagagaactcaattctctctgccaacgttcatccaacgggactgcttagacacgtccaactagccctaggcgtgggcagtcgtgcccctgcgaccactctgggggaccggtccctgcgtgtcctccctctctgggatgagagagttcgagaagccgggagagtaaccccctccctcgtaccccctgactgtcctataggtggacccagccgaactccgcagcagcccaggccagcgccccacctccgggtcaccggcatgatccgcctctccccgggcccccgcggccctggcacccgaggtcagcgggccgtgggtacagctcagccgcggaccctgctccgcgagtgcgggagctttggacttgaacgcgacgtgctcgcccggctcccaacaaacttgcaatttccgcgcgcaccccttaaacaggaactgttccccaaaccttgacccagctaccccgctgtgctctggcccgcggacctgtgtccgaacccgggctcggctgccggaaccggtttgagaaaacaaaagagttgtggggcagttttccctgtggggggcaggggcgcctcccaggtccctgcaccccgactcccggctgctcccctggcaactaatccggagaagggaagtggtgccacgagcccccactgcccggggagggagggagagagaagggggaactgggaaataaactgaattctcttactctgcctccgttcctggaccccagacacacccccaaagtattccacggttttctcttattatttttttaaacgccccccggcaaacctaggcagggatccttagccgcgaacagcaggaaggaaagaatccgagcaaatcgtgtcactttccgcacaatcgcggtgtttggcaagcccccggagctactccacaatatttactacccaagcgcacgcaggctgcagcgggctgcgagccgagcgcgcccgggaccggcctccgccaagccggccccgccgcggcccggccaccgccgctcccctcccaggatcaagcagcaagaacacggtggaaacaaaagcagagcgttcaccttgttgcaatagtaggggtccaggcagggagaaggtcccagacagggagcgtcgggcgcagcggcgggctgggctggaggtggataaaatcttacgtccatttcactctcacatcaagcaactccttttctttttccttttttaaaaaaaagtgttcagcaaaacaagcttagacggaacagagtgaggtgtctgggctcaggagtaaaagaaacaccttccttccctcacatccgtttgtggtttgtttaagaagaagaggaaaaaaaaaaaaaagaggggggaaaagcgctcaactctcccccaagccgcggcgcgcacccgtcggcgccgagcgcgcagcctgctccaccgccgcctcttggtcccgccgccgccgctgccgccgccgccgggcaggtaacttcatgcgctcattgtcccccccgcccgcccccccatccccgcctcccgcgcccctcgcagcccggcacacgcgctcgggctctaggtactgggcgttttattggagattctgagttgttctgcttgtagtttattttctccaccttggaggcccgggatgtggggggtgggggggtggggcggggatccagaagggacagggcgggaggggggcgagcgtcccgggccgggcggggtagggagcgcggccggacgcgggctcgtcaaggcccaatggctgctgttcggaaccagaggccggggaccggagaaaggaggagcggagaaggagaaggaggagagcacggcctggctgggacagaagcggtgggaccctgggaggcctccgctgtgcccgtgccgcgctcctcgggaccagcgcgtcgcacacaaaggggctgccgagccagagccaccagcggcctcagggcaccgtggggagcgcgcagctagggggcgctgtggcgcaccccgccccgcagccccgcccccggccctccccggccccaccccactcccaccgccctctccgcggccgtccccacccctatctccgcgacccccactcctcctcggctgttccccaaccctgtcactgtgctcccctccctactcccggcccgtagtggaggtgactttcctgcgcagcgccgcttctgagggcggagaacccacagggagtgcgacccctttgcacgctgtgagtgggcaactgtccgagggactcgagccgatcgaagggtgaggaccagctcgcctgggggtggacggcctggaaaagccgcccctctttggct

SEQ ID NO: 333452 - DNA, 1018 bp, Homo sapiens
  chr8:61193218-61194236
  hyper
cgaattcttcacgctaacactgtcttcctcaggtgtttagtaaaatgtaccgctgctcttcttgactactcagaagacataaaaggtacagccacggcttggaggctagcccgccctccggaccgcagcaggtgcgaacgccagccctgcggaaggctcccgggtgagagcgcaggcggcggaagagcgcaggcggcgagcacgcctccctggagcgcctcccgcccgaaacgcaccaggggagtgggaaagtggcagagacccccgtgggaaagagggggcgtgggggtgctcggagcgcgcagcggcagcaggactcgagtcccgcgctcggcgagacactgacgccgccgcgggaccccggacaccccgactcgcggccacttaccttcctcgtagccccactccacaccctcctcttcttcctcctcatcctcttccttctcggggaaggcgacggtatcttcgatgaagctcaggtccgccatgggaaggccgcggggcccctcggcgctctcggcagcagtgcctgcgccttcgctgggcgcggggctggagccggagcggagcgcgcgtgggggagtgtgagcacgcgtgagcggcagtgtgagtgcgagagcgcctccgggtgtgaaccgcagtgtgagtgcaagcaggcgtgcgttcggaccgagtgttccagagacccgcgtgggaagcgcgtccggaggccccagcagagcgagggagcggctgtggcctggggagcgagcgcctggcgaattttatacccgaccggggcgtgtctggtacgcgaggatccgcccccttctctctctggccgttggggccaggggagccgacagttagaatgcgcctcggggcgactagtcccaagtcacggaaacctcggcgcatccccgcccgcccttcccccggggtcgcccccgccgcctcctggcgcttcctcgctgcggcgactcctgcttggccgcccgagccttccttccagaagcccgcaagtctcccaaggtcactc

SEQ ID NO: 333453 - DNA, 768 bp, Homo sapiens
  chr8:61822259-61823027
  hyper
cgaaacagagtggaggctcctttaatcttgacagcccgaatgctacaggggtcacagcacatctgctccggaggaaagacaaagggcaaggtggggccacggtagcccgcgcggggctcttggcgggctgggggcggcgtgcgccgagctgggcgcgagtggaggggccggcggctttgtgcgcccccgccagtgcccgcccgcagccccgccgcagcgtttaaccttgacttctccctcctcgcttctggcacgggaggaaagcctgtccagatgggcgtcctgagtgtgacgacgtcccctcccgcccccgcgctctcgcgcagatgtcgcacgctgccctgggtcccgccacaccgcccaccaaggccgcgggccctgcgcgcccggggcaggcgggcacatcccgcaccctctccgcccgcccgcccccggcgcccttcgcattcccttcttcggccctggcccctcggaccggagcgcccaggccagctcagggtgttcccgtgggggtctccggaaacaatggtgagcctgtgctctgctggctggggggcgtcgtccccgcagctggcgcgtccctccaggctgagcgcccagcgccccccgcggccctaagttgggccacctggcggggcgctgcggccgggccgggcggggacatctgaggcccgacagacccgcgctcatggacaagtgtcgcccgcgccgggcagggccgtggagacagaccacgcagtgacaggccggaggcggctcgagggatcc

SEQ ID NO: 333454 - DNA, 653 bp, Homo sapiens
  chr8:62200462-62201115
  hyper
cggaggcatttaggacccaggggaaagctaggctccgtatagaaggacagagaatcgggcgcacacgcctcctaccaaaatcacagccccttgtggagcccgagctctcattcacagctttctagagaaatctgagcccgaacctgccagaataggggatctcacccacccagttcagcagcgaggacacctgcagaaatacattcccaaagcaaggctgggcggccgtgtgaaggtatttgttaccttttttctcccctctgtatttgccgagcctccccgcctttcccccgctctttcgatgccatggctgcggcgtttcagcacttcggtatgtggacagctcccatctgcaatccctctgcactccatccctcccgcaccgcaccccgctccccgccgcctccgcggtccatcctcctcccggcgcccgctcagcctgcgcccccttacacatcagcacccccatctccaccatcaccgtcatcatagccaccatcaccagcgcggtaactatagtcacacaactgtgtcttgccacttagacaaagcccgaggtccgcagggcagagggaaagagctcaagttgacaggcataggaaggaaagttcaggtgaacaaacccctgaaaacaaagagagacgcctgtttgc

SEQ ID NO: 333455 - DNA, 1334 bp, Homo sapiens
  chr8:63160324-63161658
  hyper
ctgcagaacgcctccgctctgttttattaggtgggagagagcaggagagtttccacaggattcagagagagtttgtccgtatcttaactatccgagatcttctttccaaatccttctcaatttatttctgtgaagatatatttatacctattccggaaaccttctccatttctagaaaaagctacgcatcttcttcttcctcgacttctcttttctccctcccggtgaggatttcaaagggtatgtgagaaaagaaccttaagccaggtctccccgcggcgtcctggctagtcccggcgccctgggcgggtgcatcgctccgccgcagcgccccttgccacccaactctgtccaactttccctttcagactccagcaggggcgccctccaggcaaccggctgtggcgggcagaagcaagctcggatgggagacccccgagctgcgtgcccagcgccggctcaacagacttgcccgcgcagcgcccgcgggccccctcgcatccgggcaggttccggagctgggccttgcgctccccggcgcccgcccaccctgggtgtctcgcgtcccggcccttcctccccggaacccaagctaacccaactcccatcctcgccacctctggggcagctcaactaagccgtgtcccctcccttgcaaacgcgtccgaccaccctcccaacccccagcacaaccctcagcaagaaagcccagctgggtctacccagttacaccggtcaacgagggtctccatcgccgccggccgccctaattcacgctcattcatattcattctcttttctctctgtccctcttcctttctccccaaagactcttaactagacaggccgatcctccccagcggcactccctttcattcttcccttcccaccacacacacacacacacacacacacccggacccagacagcccactccactttccagacgcccacctcctacatactcccctcccctaaacagacattcacccactcgccatctgtagcctccttccaaccccccgccccgcccgcctggctccccctccccaagaaacagacctgcacagtgggacgcagggacccccgccagacgctcgggtcgtgcgcaccgcactgacctcggcccgccccgccgggaaactaacaaaggcgggcgcgagccccgagccctggagccgcgagcggcggccgcggggccgaggagcctgggccgggccgggcggggactactccggagtcaggaggcagcagcggcggaggacgaggatctctggcagtcagcgccgctcggacgccgccggcaccatgggctgctgcaccggacgctgctc

SEQ ID NO: 333456 - DNA, 384 bp, Homo sapiens
  chr8:65281383-65281767
  hyper
aatagaggatggccggtgacccagtaaggactaaaccttgcgctggtttattgtggcaagctgagaaaggggctttaggcccgggaccccaggcactgacccgcacacatcccgcggatcgcctattcattcgcacagccctccagtcgcccaggctcccattgtttgctgagcaacaatggagatttcgcagggaaagtaaagctcttttcagattcctctctgatgttttgcatttagggaaacaccgacctccactttttcccccgacattttccctcctggcatttaaagctgttcgttttcggggaaacttctgtgagtttcgcgcttgttcgaccaacaccagtgttaggaggaggcgagaccggtggaaaaaggaga

SEQ ID NO: 333457 - DNA, 866 bp, Homo sapiens
  chr8:65281846-65282712
  hyper
cgggagctgcctctagggagaaaggggaggggggaggggagaagaaaaaggaaagagcgcgtttcctcgccggggttaccggggtggcgcgggcttcgcggccgaggggctgccggcccggcccgcagctcctcgcggccggctgggaagtggcgggtccggctagtccgcgggcgggcggagcgcgccgtcgctgccagtgtccccctttaacattccttccccgagcctttccctgctcctccgctctccgagcccggggcggccccgcagacaccagcgcctctatcctgcgctccttggcgtacgcagccgggcgaggtcgcggcgggaatgggcgccgaggccctgcccgccagggccgcatctgcggcccgagacttacttctgctttgctttcctgcacctggcccggggcaggctttctagtttctgcctcggccagaggagccgacttccgcaggacgggcttggggcagggggtgccggtgggggcagcggggcgaggcgaggtcgcagggagacgaccaggcctgcttgggcctgggccgctccagccgcctcgcctcttcagggacctcgccccgggaccacccgagcggacccacagcttctgaggaaacagctgcctcgggcctaagggtctttgctttcccccaacgcatgcaagcgtgggtcgccagcccagcatgtctggcgtggaggccggaggagggtggggagctggcggtgccctatggccagacgagtaaaagtcggttagtgttttatgcgcctgggggaggcgaagggcgcgggcttgcggggcccgggctgcgagtattgggagggggcgcctcgtgaggccgtgcgaggccgccctcccc

SEQ ID NO: 333458 - DNA, 328 bp, Homo sapiens
  chr8:65282721-65283049
  hyper
cgtccacgcccttgtggcctcccagacccgctgcgctttggctaggcgtccctacgcgcctccaccttctccaggtgcacgcctgggcgcggagctaggctgagcccccagcgaggggcgtggggcgaggggcgaggggcgagggcgtgggcgccacgcaggccgcggagcctggtgggcggcgtgaagcgtgcactgcgcctgcctgcccggtcccagcctgccgcccagagctccccgaccaagccttgacagctctcggagcagcgagaagaagaagaggaggaaggacacaaagaggaggaggcggcggcgggcggcgaactga

SEQ ID NO: 333459 - DNA, 441 bp, Homo sapiens
  chr8:65283249-65283690
  hyper
gagcgacgaggtgcgcagggcaggaggaggtttgagagcagggcaaacccgaaacctggcgctagaaaggaatcacccgctcactttcctaggcatagggcgccaggcggggatcgaaagcgaaaagtgtccggaaaaaggttcttaaggctggggatggggtgaggtggggtggagttgatcgatttgggcccagggtggctgatgaccttattggacccgattctgtgatccccatcccgagagctgcacggaggcggagactgtggctgccgtgcaggtgtcccggcccagccatctgtatggggtgggggtggggtgaaagtcttggactaatggtggggtgcttgcctgtgatctctctcacgttttcctttgaggcctccactcggaataagccgccggcgagggagcggcccattcgtgggaaacgcgcccacc

SEQ ID NO: 333460 - DNA, 959 bp, Homo sapiens
  chr8:65289998-65290957
  hyper
cgcgctgagcagcgattgaaaacgttttggtcctctgcaggtttgaacagggctagcaggtctctctccggatttctagggctatgggtatatgtaattctttctctcatcgatcgtttcgattctcttgccggtcttgcagtttgcagggtcctaaacgaagaggggtggagattcgagagtgcgggtctggcgtgtggtccaagggagggggtgaggctgggaaagggggtgcagaatgcgggaacggctgggactgcacagaaggaccatctgcggactcgttttcactgctccagctcccgaaatcgtttctctggacgcggcagtatccgcagcgcatgcaccctcctctggacttccgcagcccagacctgcgcttacagtcatcgcgccaccccctccccccgggctgcgggccccgcgctccgtgggctcagggtcccctccgcgtccccctgaagcctggggacggaggtcgcgaccggccgactggggtcctgtcctcttgtcaccttgtatccctcgcatgctccctcccgcctcgtgtccctctccccaccctccccctcctctctcccgcctccctaacactgcgctttgattctgtttttcaggggcgcattctggggtctctgcgcaagaccagctctcagctctctctcctttcctcggactctggagcgggagcgggcctttccctcgggtcgaccacgccgtaggggacgccgtgaaaagagccgtcgcgcccgctgcctcctgcccgctgcgcagagggctccgcccgtagaggtcaacttccctcacccttttctctctcctgcttgccctccctccgcccggcccaggcgcttccagccccagactgtggccactggctgaggagtgcgagtcggctgcgctgccctgagcctaatccctcttccgggcccagacccgaggtccgcgctcctgggcag

SEQ ID NO: 333461 - DNA, 843 bp, Homo sapiens
  chr8:65488211-65489054
  hyper
cgccaaagtggggaaagaccacgcaggagccaggtgagaccctcgcggtgggctcggggacttgtgtgtgcacctcgcgctgagaaggctgcctcccggggctcagggtttgtcttcaaggtctgttcaaatttaggctaactcgtccccaaacagtagtgaggaccagtatgttttctgtaaaatagatacagacaaggaaaatcttttcgaaagaacgctatacgaacaagtttcaactttcccacagtcgaaatttttggaattgccaagcaacttggaaagactagcaagacggggggcccttggctcactgccaggaatgcgccagctcgcgctagtcccccagcgtcgtcaccctcgctgtcctcctcctcatgagcccacacatgtggacccagtctctctgaagtgagctttgtaggactcggcggcgaaggggacgagaaaatacagatgacaaaacgacgccgaaaggcttgacctctggggctaatctctctgcctccgagtagatcccgcgctcccaaatccggcgggggcgcagtatggtgaaccccacacctagctccctcagctgcgtgggtttcaagctgacccaggcgccaccaggcagccccgagtgggcgagtcaagtgcaacttcaaggtcaatgtgcctctgactggggcctggagagctgccaagaatgctgggcttggagcgctggggtcgcgccccgctactgcgccttggaccccgcagtggagggcgctgagaccgcacccccctccccgggcagttttcaggagagggtccagctggggtctccgcggtggggtccagaaacgatattccgggttg

SEQ ID NO: 333462 - DNA, 887 bp, Homo sapiens
  chr8:65489483-65490370
  hyper
cggtgctgtctgctgaatattttaaactcctttcaaagcagtaggtgtattccctcccgcagtaacaaaacgatattcatctttacacaaggtgctctggcgtttataatttggtatccaacacccggccgagaatgttccctttcctgatgctttggccaaccggcctcgataagccaaccagcccagaaccaggggcgctgggctgggtgttcctcggggacggcgcccactgcccgcttggtccctggagtgtcccgagctgcctcccatacccctgctgcggacagagtgggggcagtcctctgcctctgtttcccaactgctttggtaactcagtgactctctgtgaaactgcagagtcagaggacttcccttccgtagttttcattctaagcggtcatctgtgagtcagaagatttcgccgtggcctgatttcccaccctttctgcccgcgcaagccgaaagcgctcatgttggcttttcctttgccacttttccaacttgccagttccatcaggagcccggatccttgcccagcttcttggcggagccaagttcgagcgcacagatttcccgagctccagcggccagggggcactgtgtgagcggctgacgtcacccctccgcccggccgaaaccaggcggcgggatcccacacagttgaggagagggagccgaggccgtgacttagggctggcgacgattaaaccaagtaacgagacaccgggcagatgtgttttcattgccctgtaagataaatgcagtgttaagtgcctgacaacttcccagaagcaatcagcaaaagtttacgagtgcataaacctcaaagaccattccctatcggttgttataaggccggtatttagagcttccataaattcttc

SEQ ID NO: 333463 - DNA, 2224 bp, Homo sapiens
  chr8:65492354-65494578
  hyper
cggaaagtcccatccccaaatccagaccagtcatcctacgaacaggggtggagtataattctcgcccggaagggtaatttagcacaagctgagacagcagtggcgagggaagggcagtggggggtggggtgcggtgggtgggggcgtctgctttccacaggactcccaggcttcgccgccgatctacaatttgctgaaggagcaaagaacatcctcggctctaagtagggcttttagtgtgctcattgatgagtgaaagtcgccacacatgtcaagctaaaggcagttgttgggttactaacaggacccagcgccttgcaaacatatgcgctaagctgtgtatacagatggcaggcagaataatggagcaggcgccttttataaagctctagctgctgcctgtcttcagacctgggaaatgaaactattcagacttgcggccagatagcgcctgcgattgtttgttaccgttttaatcctattaattaaaacgttaacctgattgggtagaaagcgctgtcccaacaggcgagtcttcttcataataacctactcagagataatgatgtaaaagactcccccgtctgtggcggcggctgtttgatgggtccggaaatctcttgaaggtgaatccaagcaagataaacggtgcggagaggaggcgcggggctgggctcagagcggcggcggcggcggctccactccctccgcgcccaccctcccaccatgcggggccgcggcccatggtgagccccagcagccagcaccatcggctggagacgaagaagaagaagaagaggaggcggcgagcgcgggggaaggcgaaaaagaaaaagaaagaaggggagagggctcccggcagcaccaggaccgacgcgcgcaccagctccggagcccagctcgcgcgcgtctgtggggccgcctgactccggggccgaggcggcggcggcggcagcgggcgcggcggcccgggctgcgcgccggcgcgggaccatggagcgcgggatgcacctcggtgcagcggccgccggcgaggacgacctcttcctgcacaagagcctgagcgcctccacctccaagcgcttggaagcggctttccgctccacgcccccgggcatggacctgtccctggcgccgccgcctcgggaacgcccggcgtcctcctcctcgtcgcccctgggctgcttcgagccggctgaccccgagggggcagggctgctgttgccgccgcctggaggaggcggcggcggcagcgcgggaagtggcggcggcggcggcggcggggtgggtgtccccgggctgctagtaggttcagccggcgttgggggcgaccctagcctaagcagcctgccggccggggccgccctttgcctcaagtacggcgaaagcgcgagccggggctcggtggccgagagcagcggcggcgagcagagccccgacgacgacagcgacggtcgctgcgagctcgtgctgcgggccggagtagccgacccgcgggcctccccgggagcgggaggtggtggcgcgaaggcagccgagggctgctccaatgcccacctccacggcggcgccagcgtccccccggggggcctgggcggcggcggcggcgggggtagcagcagcggtagcagtggcggcggtggcggtagcggtagcggcagcggcggcagcagcagcagcagcagcagcagcagcaagaaatccaaagagcaaaaggcgctgcggcttaacatcaatgcccgagagcgccggcggatgcacgacctgaacgacgcgctggacgagctgcgcgcggtgatcccctacgcgcacagcccctcggtgcgaaagctctccaagatcgccacgctgctgctcgccaagaactacatcctcatgcaggcgcaggccctggaggagatgcggcgcctagtcgcctacctcaaccagggccaggccatctcggctgcctccctgcccagctcggcggctgcagcggcagcagctgctgccctgcacccggcgctcggcgcctacgagcaggcagccggctacccgttcagcgccggactgcccccggctgcctcctgcccggagaagtgcgccctgtttaacagcgtctcctccagcctctgcaaacagtgcacggagaagccttaaacacacccccgaaaaacacaagaccgacccaaaatctagaggaaagcgaaaagctgctccccaccccctttattttggtcctctc

SEQ ID NO: 333464 - DNA, 373 bp, Homo sapiens
  chr8:65499649-65500022
  hyper
cgaggagagtgtttgtgctgggacctggcaggactggaggaggaaaggagccgccttccagcaggtccagcatccctaggttgcaaacacaccaaatgacgtccacgcagcactcgcgcccaccgcgctgtttttgcttgcgcagtgctcccgaagggattcgggatccgcatccggagggattcgggatccgcatccgaagagcaccccttctctcaggacttcccctgggaccgacgtttccagtcacccctgcgggcgcaattgtccttcaaccgccaagctccttgggacaaaaagagaacttcaggggctctgcctcaaactgtccttcgagggtggctcgaggatcgggttgtcccctgtatggcag

SEQ ID NO: 333465 - DNA, 562 bp, Homo sapiens
  chr8:65710834-65711396
  hyper
cgcgtatgtgtgggaaaaagacagaagaagcctttgttattacaaagtcccaaaggaagccagtaccccgcagcaagttctgactgtctgcactggaaatcatggagggggactcccctcgccatctgggtcgcgcgcggcccgcggggcccagggcgcatgcgtggcctggcggccgaggcgcttacctggtgcgccggacaagcaagcagagggccaggagcagcagggccgcggcgagggccaggcccgggaggcccaaccgctccagcgaaaagcggcccgtggccgcggacacttctcctgccatccggcgcgcgctaggccgcggtgggcagcccggggtctgcctgcgaacagcgcggtcggcgactctgcagcctgcggcggcttctctcggcggcgccccctagtccagggccggagaggctggcctgcccgcagcgcagacaggaatgtcaccgtggtctcccaggctgaatgacaaaagttcgtggactgccccctccccgcctatcctccacccacgcgtaccgccccgttcccccaccgtttccgaccc

SEQ ID NO: 333466 - DNA, 1501 bp, Homo sapiens
  chr8:67024920-67026421
  hyper
cggtggaaccagctctgtctacagaaccccgggcttcagtggcgtcttcctaacccggcttgcctgccgggggcgttccgagaccctcggggccttcccttcaccccgcgggagttggaccggtggcgctggtaaggcctcccgggctcaaagtgcaacggacactgcagaaatccaaactgctggcattcgcggtttggggacgccagaggaggtaatgatttctggtttgttaacctcaagtgacaataatgccgagccaggcaggagctggacctacaatcttctgatgcgtggtcagacacgttatcccttgcgccactggcctaccacgctactccttcagtcgccgttggattactgtgtgttgagaacacactcggcaaccactttaaaggacaacgcaggctggtaaaggaaaagtacgacaagggggggcggtggaatcgcagggtcttggcatcgcggaccccagacacctgggttgagggcctttcccgggtcagtcaggctagcgagccggagcgttctgtctttctgcgcacgcgtagagcacacaggccggctctggggctctgcgctcctcggattacgcatgctcagtgcaatcttcggttgcctggactagcgctccggtttttctgtgctgaacctcaggggacgccgacacacgtacacgtcccttcgatagctcagctggtagagcggaggactgtagctacttcctcagcaggagacatccttaggtcgctggttcgattccggctcgaaggagacaagtgcggtttttttctccagctcccgatgacttatggcactttccttgggtgccttcagtgacacattgcattccaacgagcagtttgaaagtctagcgctttctccccattttgggcctcccagcctgcacggtaattctttttagccattcgccctgcgggaacgtgtccgggcaggttcccagcgcagctgtgggtctgcgcttggccgagcgactgccgggtcacgacttctgcgtcttcttaacccgtctttggcattgcccgggccccgagtcacacaggaggcagcgccggctccagggggccaggcggggaccttctcctcagagccccgggcagcttctgcgacccgagggctcgcaacggctgccgtgaggaggtggggggtccgcgggaagaggtatctggcgctcccggaacctgggaatcagaaagagagaacacaatactaaaaacacgaagcctaaaaatgacacaatgttatggagacaaggcggcacccgggaagctgtgcccgctcccttcgatagctcagctggtagagcggaggactgtaggcgcgcgcccgtggccatccttaggtcgctggttcgattccggctcgaaggagagacacccccccccccattattttgttgctttgaaccaaaaaagtctgtcttcagcgctcaatgttctgacccttctctaaaggaacagataataagccgtgcccagcc

SEQ ID NO: 333467 - DNA, 488 bp, Homo sapiens
  chr8:67026488-67026976
  hyper
atcctccagttttccttcctgtcccgtacggtttttctttcgattctcagcccaaactagagctgaaaagtcagacgaagtcaggtgaagagtagggcgagctccagcttaccactctaaaacttcccagacaatgagtggtgggcgctagcagtttatccttctagctttaaatttttagacccatttaattggggggaaattcacgaaactggttatttttgcttcaaaaatggcgacagattgccgtcacatgtattatcactcagaatcctttatgatttgtgataagatgtctgcatttccagggactcatctgaggctaagctgcccatagttcggggagacccacagggaaaacaaaacaagaaacagagaacttggaaacggacgctgattactttgaacgtttgctcaaccgaggaagcaggaactgttcggccccatctcaagtccgcagggcggactgcctggctctgggcagatcc

SEQ ID NO: 333468 - DNA, 780 bp, Homo sapiens
  chr8:67089303-67090083
  hyper
cgccgcgctccgcgagagccgcggggctgtcgagcgagcgccgaggcagcagcagctgctgcagcaacacgcggaaaaagttggcggtcgcctgttccggcgaagggcggctgccgctgcctccggcgaggagcgaggaggcgggcgaaaggggagcggccgggctcttgttgaggttccccaggcggaggaagtactcctctcccatgcggagcaggaccggccgagcctgcggctgctggggctgctcggactgcggcggcggctggaagaaatccaagggctgagggtgctgcggcgcctgccgagctcccgggaccggcccgcggctcaggagcgccctgcatggcgggcagggcaggagagccaccagcaggactcccgcggacacaagcagcggcagccgcatgttaggggcactcgctgcggcacagaggtgggcggagggcggaatgagagaggggaagagagaaagaaagagttggttagagttcgctcagctgggaggtgcacacggggtcttcctacgggactgccttagacgtgctgggctttggcctcagtgattcggatgggcgctgtccgcggtgctgaagcgcctggggagcggggaaagggggcgcctgcagggctccgcacctaagctcatgcgctcaccggccaggagtgacccttctttctagactctgaaaggacggtccctgcgtcctcttcctaacgatcctcaaaactaattttcccgatcctagagaagagccacagatttaagatcccacccgc

SEQ ID NO: 333469 - DNA, 583 bp, Homo sapiens
  chr8:67344497-67345080
  hyper
cgaggcctacggagcagttaccttctacggcaatttcaagggtggatggtgcgagcgccgctggggcagctggcgttctggttcttactccgtgggaaaatggccctgagcccgactggcttgaggcttagacaggtgaccccgcgaagcgggtgggcaggcgcggccgaggggcgggaggcgggcagcctccgtgattggccggcggagggggcggtgtagcgacccgaggagggaagaggactccaagcgccatggccgctgccgcccgagcccgggtcgcgtacttgctgaggcaactgcaacgcgcagcgtgagtgcggggccggcgggcgggcaggggaccgcagggtgcccacgcagccccctgggtgtgacccgctcagatcctgcgcagtcttctccgcttactttcaagaattcggagaatttggataccgccctgggctcccaccgcgcgccaggcggaacagcgaggtcacagagtgcgcgatgcagcctctcagggcgcagtgaggcagcctttactctgcttgtctaccgttaaagaaactgaggcccagagaggacctggtcccacatc

SEQ ID NO: 333470 - DNA, 2284 bp, Homo sapiens
  chr8:67873384-67875668
  hyper
accccggctttaaacgcctctccagccacctgtgaaccgcgaaggagccggctttcgcggcggggaccttgccaccagtaccctcgcgggccgaggtcgttctcccggtcggcttcccgcctcacccgaaaaggaattagagcatctacccaagacggtgactggcagggcagatcaaggtgtcctggtctcggccccagccccgcggtgcgccccgcccgcttaccttgaccgggtgcaggtagccatcgccgcgcagggcgcccaacccggcgtccgccggcgcctcggcgtcgtcctgcaggctgcgggtgagatgcgcgatgtaggtggtggccagcagcagcacgtccagcttggacagcttggtgtcgggcggcacggacggcagcgtgcgctgcagctccaggaaagcgtgccgcagggtctgcacccggctgcgctcccgcgccgcattcgccgccgccggccgcccgctcccggaacgcgagccgcccccagggcccgccggccccggcccggtccgcccgggacgcgagtcgcggatggcggcggccaggggcgcgggctcggcgctggcgctgagggggctgcccgctgggcggccgcggtccatggcagcttcccgcgccgcgcgcgctgcaaaggaccgaaggtgcggtgaggccggggggcggtcgggcttaacccgagaggcgcagccccctggttctccccgtgcgcccaccagcagcccaacggggctaagggcgctctcaagcgagctcgttttgcctgggacgcgatttgcttccggacgtctggggagagttgcggaactccggagttcttgggcttcctagaaggataagaagaggcgcagtgccggctttgcttttcaggggcaaattaagcaaaaggtctactctacccgggaagaaagatctcggaagcacagctcaggatcagcactcgttcgcgcttgggtgactttatccaacccggcacgcacgagaggtggcgcggctccttctcgccgacgccgcggaaaaccacggctcaccagccgccctcggcctttcacgccaggggggatttctgcccgaggagcgggggacccttagcctcacctcggggtacggcacccgccaccgttccgagcccgagagctgcgcagtacgcgtctgacgggcccctcacctttcctggagcggctgagtggagctccgctccgtcgtgagggcgggcgaggggcgtggagcagggcctgtgtggccagggccgcgctggtcactccatcctcgtccggccgatgcccaagtcgacggctgtttccaacctccgctggctgtgacttttatgcgggcgccccgcggccaggcgtgtgtgctccgaccggctaaggcaggtcgggcggaggacctggcccaccggagaggctacgccgggggctgaggcggcttagagggtcattaatcaaaccctccggcggggcgggctcgggggcggggcgtcctcctggccccgcccctcggctcactgcctcacgctgctttccccgaggcgcctcgctgagggcggcgtgtggagagtttggggtgtctgccgccggctgcggtggggccgggctggaggccgcgggtgaggcctgtggttaacctcgcgctgccgaggtcttacctcctcgagtccagtctgattccaggccgcttccaggccggtgcccagctgaggcgggaacgctgcagtttggttgagcgtgacttttaggctctgtgaggaaaagtcgagcgcgccacatcgaggcgctagccgtttattctaccacaaggtaaaagattcatgctgtcctagttaccctaaagctgggagatacactgcacttcctaccagaccccgaatgctctcagtgtctgtaattctttaagaagttcctagagcagacagcccttggatcgtgggcacttctccccggggacggggaccctgctgaccgcctccgctgcccccgcgggggccaccgctctttaattatttgggcgaaacattcttttctggttttgcacttgtggactcacgggaagcgtgacttgcagcgaggcaggacccgatcccaggcttctttagaaagcggacgctgcgccccaaggcctgttcagagccgccccaggaagccgtgggtccccgaccgccccaaaccgcagcggtttctgcaggtcctggacccgtcgccttcgtaggtgaaatctaagtacttttcagcaacataattagaacacactcgaaacaatgcctgcagttctcc

SEQ ID NO: 333471 - DNA, 1308 bp, Homo sapiens
  chr8:69242761-69244069
  hyper
cgctagagtaggcagggcagaaggtgctgaggagaggctcagaaggggcggtggggacgatcccctttcgaactgcatttgtagctgccaaggagtagccaacaagcaccagatttatgtgcactttgaaagaagcaccttcaccattggctttttaagcggcgctgtcgctagggagcggctggtagggcgagcagcctcggggagcagcccgggctgtttgttccgtcaccggggaaaggaggtacacacagtcgcgcgcgcacggacacacacacacacgcacgcacgcacacacaccggtggcgagttcgagccccgcggcccctgtccgcccgcgtgcgcccctcgacacagctcgcctcccgccccctgattcctgctgctgccgcccagaggagaaaggaacctctgcctcgaatttccccactgcgccgggcgctgcggagagcggcgagggtgggcgcgaggcggagaacgcgatgaatgagttctcccctcgcctcggagttgtctgagttggcggcgctgcgcccaggcttccggctctcagcgccccacgcgcgcgtggctccccgggctgccacccacgcccgcggccggggccgagccagccacgcagggcagccgaggctccggagctcctgtcccggccccagtccgggtaaaaggagggttgtccccagcggaggcgcacagccgcgcgttctccctgcactctcttcgcggtcccatctgttccccatggcgtctcatccgcaaacccggatccaggcttacctggagaagaacaagatcggtcccctgtttgaggtaaggcgctgtggaggagggcagtcccgttgtctttaggggaaggggtgcagtaatgaaaacagaacactcccaatcccacccctcccagggaaggagggctagagaaccaacgcgcgggagagggcgccctgggattcactggcattcgctctgtcccggccaggtgtcctggaacgcggccgggcgggcacttagccagttacctgaacgcggacaggtgagctcgggagggcccagcctcagcctggcaggggaagttttggccctctgactgtcctgcacctctcagctacatgttcaggacccgggcaggctgaggcaggcgacgcatacggatgcacacactcagactgtgttgcacacgcacactttcttttttgaattcacgctatcttgagtgttcgtgttggattttcttttttcttttcttttctttccttctttttttttttttttttttttttttttttaatgagggcggtaatagaaccc

SEQ ID NO: 333472 - DNA, 305 bp, Homo sapiens; identical to SEQ ID NO: 233723
  chr8:70404914-70405219
  hyper

SEQ ID NO: 333473 - DNA, 1917 bp, Homo sapiens
  chr8:70744866-70746783
  hyper
ctgctctcccgccccgggctgcagtccagtgccttcgtccatggcgcttagaattcagatttgatagctgatggcacccaagcactccggcacgtttcatccaccggcacgaggggccgaagccgggcccagtcagtcttgcccacctgggactggggctgggggcgcagggccgcgcagcagggcatcctcaccagctgcgaggcgcccagtgcatcctgatcacagacacggcttcaaggctccgcagccgcgtgccacagggggcaggggtccgcgcggtactgcgatgagccctactcggcgtccctctccgggcggtagcttgaggcaggcgcctcgcgcgtcccgggctcatcccctccgccgccgccgccgccgccgccgctgggcccgcggccaggagcgagtgcaccctgcgccgggggtgggggggcacttagcgctgctgtccgtacagcatcccacctcgctgcgccaggggtaccgggtgttcgccgcctgggctcgcggcaccctcgggagtgaagctgccgacctgcaaagcagaaagagggcggtcagcgaagagcggctgcggcttggggctagcgtcccagcgccccggggaccagggttaggtgaccccgaaccgtccctagagggacggaggagctagtcaggagcggagccccggaggactaggcagcagccggctgcagtctccagtcccggaacaataagcagcaggcggtcggcggagactctccctcattgtctgccgcggacctgcccccgtcccgccccttctgccttaaacattgcgtttgcttttatatgttaataattatcaacctggcagctctgactcagaggcagtgtcttttaatcgagtgaactaactgcagcctttccgtactcctactccattactcaaaatagaaaatgcccaaaagaacaaaggaaactttttcacagacacacaatgtattccctgtcccaatttttctaaaaggaaaaaagaaggtgggggtaaactacgtgtgtagaaatgtgtgtgcacactggtgtgcgttggcacgtgtgcgcgactagatttgaatctgtctgctccaccagagacacacattcaaagccgaaggcagcagcaaaaaggtcaacatgcttgcctctttattcccaacaccaaaaataaccccctgaccgaaagaactcttcaattacaaataccaggggcattcgaggctgtggcccgcactaagtcccagagcgcggtatcaaacgaaaccgaaaatccgtctgctttgccgagagctagggaagccacaaccaaacaaagagatcccggcacgctgtcagagagcgcgcgaggagcccacggagccggctgggcgcacgcgggccggcggggaggtgtgctattgactgagcgcaccccgctagcgtgggcctggggagcgtgtgcgcgtgcgcggccacacacacacacacacacacacacacacacacacacacacaccggcgtactggaacctctctcgcgatcccgcacccagcttgaattcagcaagaatcgaaaacaggtgtgcccccgtggtaagaccccgcccctaatcttggggacccccactccactcctccagcctggggcaaggacggggggcggaatatgcaccaggtgggagacagccgagcttcactacactgggtttcattttgcagcgcgcctttgtgatgctgctgagaaaagaaaggaggaagggcaagggagaaaggcagagaggctgggcggccaagggtggccgctccggcatctccctcggctgtgctgggccaaacccgctcccagattcccggcctgccagccactcacaatcccgggcttccccgccgctgccttacccaggcgccttcccggggaaccccaccagccgctgc

SEQ ID NO: 333474 - DNA, 739 bp, Homo sapiens; identical to SEQ ID NO: 233727
  chr8:70946876-70947615
  hyper

SEQ ID NO: 333475 - DNA, 1741 bp, Homo sapiens
  chr8:70981859-70983600
  hyper
ctcagcaagggaggcgccatccggaaggggaaggggggcatggcgggggcagcagacgctgcggcctccagctgccggaaaggttggaagtcttcctccacggtggccaggctgtttctgtagtgtccataggacgggaaaggcgtgtagtacgcggccaggttctgcgggctgctctccggcgggtagcacaccttgtcctgaggcacggcctcacttggccggggtagagccatcccgggaccgcacgctcggcggctctgcagaaaagcgggcgccgctgaggacaccgcgcgggagcttcccggggtccgacccgcgcctccccaccagcctcctccaccccagccagccccagatccaagggaacaggataaacgcccccagtccgatcccgccagcccgctcccacaattaagacaaaacgaaaaaacagcaatagaagcaaacacaaaaaagccccaaacggaaatctgccgggatcctgccctactctaaattccgggttagtgttgccttccccttccctctccaagcaccccttccctaagcccggccgccttcccacacccgctctccgctttcggcccccaacccggttcctgcaaaacccattgaagttccctttccttccttcttctcagtcctacaaaactcgttggtagggtctgtgggagccgcggggccctgccaacctcggggctgggccgggagccgagcgcaggcggtcggagggcaatggagcaagcgacagctccaggcgctcctgggccctcggctgggagggaagagccgaggaccctgggtcgcaccgcgcagatggagacgcgctcccagagcccccgggcaggtccagggaccccgcgacctgctctggcccagcggtgtgaccccgcgggtcctggcggtcctgactgcccgcaggggaggggcgcgccacttttggctgccctaggatgcgccgcctgaacctcttttccctcgcgggcagcgtccgccacattccccgggttcctcggaaactccaatcattctaccaggactattggggcctggggtagcccctcgggagccgcgtggacgagccctggccaggtgggagcgaagagcctcggcgactgccagtcctcccgcccccgcaccgccgggaaaggatggcgttttaatagacaggcagcaagttcaccgaggctgaagaatgaagccccttcagggccggcgggtcttgagatcaatgagcccaataagaaaaccaagcagggtcatgactcagaaattaaagaacacggggtcaggagaagaggtcagccacgacacaggcagcggcccgtctcctcccgatcctccaaaggcgcccttctcctagcctcctccgacctcagggatctgcaacttgggattcaaagcccccgagagggcagaacgaccatccaaaacgaactgcgccagcgagtgctgccgccctccccaacggccctggaagaccaccgccccgggccccaggcgcgtcctgtcccgtgcctacctccgacaccacctccaagagcgccaccgcggagcgggcgcctcctggacgctgcggggccactcgggctcggtaggccactcgggctcggtagacttcgggcgggccctgagggctgagccaggcttaagagggcgggcggggccgcggggcatcgacaggtcgagggtagggaattgacccggcccacgcagatccccgcgtcgtcttctcccc

SEQ ID NO: 333476 - DNA, 1278 bp, Homo sapiens
  chr8:70983606-70984884
  hyper
cgcagccattggccgactctcgactcgccctctgtcccctggggtcgctcacttaactcatcagttttccaaaccctccctgggaccctagtggcgagcactcgccgctggccttctagggcaggcagtattgccgctccaggcgtgcggagtcggggagaaaaaaaccgaacacgtgtgctacccagggcccccagataagcccctccgcgcgcacacacaccctgaaccggagtccagaaggccggactcgcgtcccggggtcgagccccttactctccgctcccagttcggaagatcccagcctgcccgaaggcggcgtctgacccgctggtggacctggtgggtgtctgttcctgatacctggggacgaggcgggagcgccttgagcgctgggaagcttcgcctcgcgagtccccggcagtgacacgtgggagcgttgggcccggcacccccgacgcttccgaggtttcgggtggtcgttttgctctctcgggggcttttattccttaagtggctttaaacgaccgaggatgggcctcccgcgccgccgcagctgtcacttccttcgggaaaggctagcgaccttggacgcgcaggctctgaaaaccaaggtccagacccataccgagcgcccaaagaccgcatttgaattctcctcgccggccattgagggagagaaaggaacgcttagttccattcacattcacagaaagaagcgccgagggtgggggaaacgcagtcttgccgggtgagccgggacaggttcctcgcctgccccccggccgctgcttcctcttagctgaatggggagcgacccgccccgggcgcggccttcggggctgaagactgaggtgcagcctcacccccggcctggcagcggcttggaagagagagggaaaggaggaacatctacccggctaagagacgccgccagagtccctaaagctggcgggggacggaggccggggtcccggatcttcagagcgcccgcagccgggcttctgggctcctcggtgcggggaacctgaccctgtagccttcgccagggcgcggcggggctgcaagaagggaggaaggagtgggactagagccttcgagggcgcgggcggcgtgcactcagccttgtctccccgcgcgccctgccgcctgcttgccccctttgctgcaccgggtggccctggtccccgcgcccgcccgcccccgacgccttcgcgtggttccgcgctgcccgcggccagccccgtttcgcttcgcaaggagcgtgttgttttctca

SEQ ID NO: 333477 - DNA, 311 bp, Homo sapiens
  chr8:71316520-71316831
  hyper
cgactgggacgggcctgggccgctgagttagaggcagtggggcctgggggctgcagacggcagggacggtgccccaggacgaagatcggggagagccgagttccagggtcgccagcagaggaccctcgcgcccgtccggccggacccttcggccagcaccctgcaccccctcgggcgcacctcaccctacccaactcccggtcctgccgctgctccccggaggcgccccgcatccgtcaagtcccctacggctccaacagggagaggcttctcccattgcagtcctagctccagaggggatggagaggcgc

SEQ ID NO: 333478 - DNA, 933 bp, Homo sapiens
  chr8:72459564-72460497
  hyper
cgtcccccgacgtcccaatcagttaccacctccccgaaggaaaacaaaccggcccttgacacatccctccacgtgcagcgcccgacgccacgggccttgggcggctgcacctctcccctgccggccacggctcaaggccccattattgcgcgcacccagctcccttccaggtgactttcgcgtacctggcggcggcgccctaggcctcggaggctgcccgggcgggctggggctcgggcggcgctcgctgagagtcgcggcgcccctcagccgcttcccgggcgccgatcgccgccctcctgccccggggtggggcccaggggcatcagcagccgcgggctctcggccgccgcctgggaactcagggtcagatttagtttcacaacaacgtctcctcgtcacggcaacccaactggaggcagaagccggcggggcggccgagcggggcggggcgggagcgcggccgccgcgagccacggtggggagcgggcgcgggggaccctggcgggccccgggcagcgcggctgcacttacttgtgtcacaactgcggcgacggggggctgaggaaccggttcttccaaaagcaaaccgaaaatgggtaacagagaggccggggcagcgctaagaggggttctgcctcggtgtttagggcaaaaaacccggctccggcttccagaaattcgagccagcggtggctttttctttctttcctctctaaacgctcctgtgcctccgggtcgaggggcgcccttcgcgcggctccgagtgcacagcgacaccagggctggcgctggagaggggagccctcttcccagcacccctcgggtctcccccgtacccccacccacagcccctttcctgggcccgacgcccctccgctctgcagccggagcctgggcctggtgcccactgccccgcggggtgtctcggac

SEQ ID NO: 333479 - DNA, 969 bp, Homo sapiens
  chr8:72468591-72469560
  hyper
ctcctgcgggcgctcgctctctccacgccgccgcccgcgcgcccgcggcagccacgagcgtcccgggcggggaaacgcgttgcctcccggcggcgcctattactagcagctgcttctgcttagcccttcgaggatcggtttgccccaacccacggcctctcccagggttcggtcttctcccgcccctccctcccttccccgcctctcccccaagctcctcagtggccgcggcccgtcaacactgtcgcgcagtcactggcgcaggttcccagctctcagctgggggtttcggggggagggagcagaaggaatgagacagaaggaacgggaggctttaagcccaccgagggaggttagaggaaggcgctgtggctgtgggattaggaggccacagacgggaaccgcgccgagctagactagctgtagaaggctgtctctccaccccgccacagcgctccgagaaggagcgggaggcctgggcaggggagaggcgctcctgcccccacccgcgccctgctggccacctgtggcgtcggggagaccacctgcggagagggtgcagggatgctgctgccctgacgaggggcctcccggggactagcgaaacgtttcgcctcgccggtgccgggggagagcgcatggtgacaccagggcagagtagccatggcggtcctctccctctttctggcactccactgtcagcgtcggctagaagcaaacgcccaggaagcactaaccgatgcacacaaggtttcgatggacagggacaggaaaatcggctctgcagcgcgggggagcgcaggctggaggccgggccactgaggtggccccggctgagcgactggcgtcggtttctcctcctagcgctaggcgggagtgggaccccgggccacagcaagagtcgccgggtgaggacgggcccggcccgtggcgcctagctgtaaagggccctaatgctgcgcgtttgtc

SEQ ID NO: 333480 - DNA, 853 bp, Homo sapiens
  chr8:72754395-72755248
  hyper
ttaaaaccctgtcccgacgcggatctcacgtctagacctctgtctttaaagcggatgtagagcgcgttctaaccgttccctaaccattgtgtcaccgcgaaaggccggggctgtgtggaaccgtcccgcacgtgtgcgatgaatctggctccgctgagaacggatccgtgggctgtctggcgcgggctggggcagcagccgagagttagtctacagagctagggcccgagggtggacctgcgtccgcgtctcgtcacgaaaggaagctctttttggagaggcaaaacgtggtcgcccagatccggcgcagctgtagccgtgggcgctgtgcagtgacagccacacccgccacctgtcacgatcacagttccagggaaaggggaagggtcaaggagaatccagcggaaacttcttcccatctcacgagctctcccttctctccgtggcccccaaacactcgcatttaacgaataatcccatcaagtgagttccagtccgatttaagcggtggttccacatagtctgttggctgcggaaacttctttggtgtcagagtccggtcttcccgagaccacgaatggccatgtctgtaaatcaaaaagaacgtgagatattagagagaaacgattgtctcaaaccgaaacagctctcctacgcgaaccccagatattcctgacttggagtagctaagattttatcagcattctgggaatttgcatgtcctctctctgaactaagattttcattttactggaggttgataatccgagacttgccatatccgttcacgcttcttcctggactttgcccgcaggataatttggtgaaactcatctgactttgaggttctgtc

SEQ ID NO: 333481 - DNA, 1450 bp, Homo sapiens
  chr8:72755554-72757004
  hyper
aagggagatttgccgtcagtctgcaacctggtggcagatggagatggaaccaagatttaccctggaagtaggatattagtcaatggctgtcactggggtacaatgttcagaacgatgcaaacagacacggagggttgattcttcttcagggaaatggctggccactcccttgatttgggagaaactaaactggccttctcgttcccagtcccagaacctccacccctttcgaattcttcccaacgggctgaccctgcccggcgcccaggagcgccctgggtatctcctggctgctctcccgaatccttgcgcgccgcgcccctaccaggttcactgggtgcacgtagccgttctcatagcggtcctcctgcaacagctgccgcaggtgagcgatgtaactggaagccagccggagcgtgtccagcttggagagcttagtgtcggggggcacccagggcaggctggtcttgagcctggagaaggctttgctcagcacgcgcatccgggcacgctcacgggcgttggccgcgttccgctgcgactgcttgcactctgcggctgagcccttggccgggaggggcttcttgccaccaccgcccgcgctaccacctgcgccgccgcccccagccacacggggccgcttcctcttgcagccttccgcgctgccggctgtgcccagagcgcagcgctcctcctcgccgtcggggtcctcctcctctgccgacgagttgtcactgggcgaggcgtagctgcgctctacgccgcggaggggcggcctcttggaggcggggaccgggtactcccgctgcagcccccgaagctccatctcctccggatcactcaccgagcccgtggacatcccgttgtcccccttgcccacacgcgtcctctttcctcccccctggccagtctcgctgtctccgccttccgctccctggcggaggcggaggccagagagcgctccaaggaagactaaaaacccaggccgggaagcgcggggtgagaaagcgaggtgggtggcgagagcgtgagcgcccctctgctgaccccggggagcgtggactacgagttggcgcccaagtccagaatccgcgcgcaccgcggtaagctgcgccttttgaaaaggctatctgtactccttggaacaaaccaccccgggcaaagaagagggggttgtaaagggggccaagaggtggggcaggggcgtggaaggggtggggaccgcttttctgcatgccgaagagcggttggtggaggcgggggaaggggacgtctctgcagagccgagatttgggctctgaagcccgacggcccttcaacatgtctgcgcaggataagtgagctttcggggagtgaaggggcacatcttgttcctaccgacggtgcttctacccccaggtaatcttagcagtggcaaagattaccagacacttagaaacgacgggattcc

SEQ ID NO: 333482 - DNA, 675 bp, Homo sapiens
  chr8:73163573-73164248
  hyper
gcaaccccctggccactccacgctttctccaaaccaagggctgcccgcaaggaaacctcgagccgaaccgcggccggacttcagaacccgtcccgacccgcgaacccccagggtaccttaagcggttccttgcagtcctccgtgtcgtcccgcacatcctcatagacaacgccctggggctccttcttttctccagggcgccacatcttcctcgggctgcgcttcattgaccccaccccggacgccatctggtgcatctgctccccacgagcgcgggcacctggggcgagagagcgctgtcagccggccaggcgctggggtccgcgcgagcccgagctctccctcgctgcagctcacaggcagcgaaaatctcgctccgcgagagccctggagaacttctggaaggagttctcaggcccgcgctacttacagtgcaggaagcaagcggggcgtgaagaggaggtagaaacacagacctccctagcaaagagggaggcggcgcagcgtctgccgaggactcgccccttcaggaacaaagtgactcccccgtcccgctgtcctgcagctgcagcagcgcactcccagagtcaagcgtgtcaggtcggtgtggatgcagcgaatttgttgtaatctacacattaagagcccccttgcctcgccctgccccctccaacc

SEQ ID NO: 333483 - DNA, 1489 bp, Homo sapiens
  chr8:73448692-73450181
  hyper
cggacccggctttaccctcaaacccaggaaagccgggtcacttggggctagggacggcccccgagcgagcggggctgcaggtgccgcgaggaaagtcagatcttatctgcgctcctagttatctccgcagctctttctccaggaaaataatcctggcaccaccactcaggagccatctgtcttcgccccagttccccggggtcgagcagtcagcccagggtcagggtcctgctgtgggcgggcgggaggacagccctgcagttggaagcagaagggccgagggaatcccgcgaagccgccggagcgcgtcgcggcggggcctcccggggctttcccggccccgggtgcgcggcagccgcgggggctgcgtccctctagtccagtgcagccgggtgggagctgcagagcgaagcaggtgggtgtggagccaggcccggggcagcaggagtggctggcgcgcggaagctgagggaggcaccccgccgaggtgtgggcggtgcctgcccgcgccccagccgcgccctgggcaccagagcgctgtccccggccgagcgcacagctccggcgccgcgaggcagagccccggcgtccccggcggtgcgctgccggctcgcgcagcccagccatcccgccccgccgcccaccttgacagccgggagcgctgaggaggaagagggggagggggaggaggaagagaaggcggcggccgctccagcccgcgggtgcgcggagcgcgggaggaggcggagcgggaggctggggtggccgcagccctgtgtgcgcgccgggccggctagctgcggggcgggggagcggcgccccagagcgccccgcctagcctcccgcgcgcagcctctaccctgctccgccacagacacacacccaccaagcacccaccgccctccgccctccgccctccgcccccgcggccgccgccgccgctgcgcctcgggcagccccagcgagcggcaactcccgggctggcgcggctcgctttctggctccttccgcgcggcgagctcagccccgctcgatttttcctcttctgttccagccctctcttgtctgggtggctgtggcggcggcagggggatggggaccccgtgtggggaaggggttgaagatcgatgaagattattgttcttttaaaggatgccttagcttcctcccgccgcctttcctctgagccttcctactagagaccgtgaaccagagtcagggatgtaaagacagggggaaagcacgccgggagctccagccagccggggagaccctcctctctgtggaggggagggggatttccagcgacaggtcattggcgaaggggatcgtcgcggggagaggctccccggagggagcggggaatcccacagccctttgtggtgcccgagcccgtgccgcctgctgagcggggtctgtgggagctaggtaagtggcgggggcattgctgctccccgaagggggtcttcctttaagaatgaatcatcgc

SEQ ID NO: 333484 - DNA, 683 bp, Homo sapiens
  chr8:74005172-74005855
  hyper
ccagcctccagccgcgggcgaagcaggcggggtcccggccgggacagcagcgcccggcctcggcgcagccggcctgggccccgggccacagccgcgacagcgcgcacagcgccatccacagggtcctcatggccagggctccggcggcgcctgcgacgcgacagacccccggggcaagcgctctgatcctcggctggccgcggcccgggagctgcccgagcggccggcgaggcacagccgggccctgccctgcgcccggcccccgccctccgcgccgcccctccccagccctggcggcgcgcccgtcgaggcccgggcgggtggcggggctgccctgcccaggtggggagggcgctgcagttcccgggacgggcccgcaatcgacggtccgggcgccacccactccccgctgccagctcgcgccccagctccagcccggggacctccggggcgcgggagcggaaaagcaggtgctggcggggcgggggtcggggtggggtgccggggcgtagccaggagcccggcgggggaggccacatttcctggctctaaactgtacttctaacgcctggggacacattaacgagcgggcattttcactctaaagccatgagaccaagagcactcgatgggcaccaaacgtgtctcagcagcactctgcgcgggccaccccgccttcgccc

SEQ ID NO: 333485 - DNA, 943 bp, Homo sapiens
  chr8:75896528-75897471
  hyper
cgggcttgggtctcgggagcccaaagcacgcccacaaaggccgagcgccctggcttcgctgcgttccggagaagcagggcgggctgcttctcccggatctggcgggcctctggccacggctggttggaggtgggggtgggcgaggaggggcgctcaagtcacgtgcccgcgctggggccgcaataaatgctcgcgaacgcgagagagcgacggaagcgctaggcgcctggttctgcgcgtactggctgtacggagcaggagcaagaggtcgccgccagcctccgccgccgagcctcgttcgtgtccccgcccctcgctcctgcagctactgctcagaaacgctggggcgcccaccctggcagactaacgaagcagctcccttcccaccccaactgcaggtctaattttggacgctttgcctgccatttcttccaggttgagggagccgcagaggcggaggctcgcgtattcctgcagtcagcacccacgtcgcccccggacgctcggtgctcaggcccttcgcgagcggggctctccgtctgcggtcccttgtgaaggctctgggcggctgcagaggccggccgtccggtttggctcacctctcccaggaaacttcacactggagaggtaagggcgattctaaaatgcatcgctgagtcgtcaagctgccaccctttcctatctccctttgccttcttaaactgtacttaaaaaaaaaaaaaagccaactgtacagagtggttgggcgcgatgggtgggtgggctacccggaaagcagcgacgatagaaattagcgggagctctagttcttgtaagtgactttgttggtttcacctactttctctgtcgcgcgctttccatttgagttcagagaaagaacagtgtgtgccttcacacttgagaggaaaagctctcaagttgccggggagctgctggcttcttc

SEQ ID NO: 333486 - DNA, 837 bp, Homo sapiens
  chr8:76316330-76317167
  hyper
aggcccagcgggggcggacctcgttggaggctacggtgcaggtcggagaagatgaaatggcctagcatcccccttcccaggggctcgagtcggcagctttagagctccgacaatctgtgccctcgctttgggctgcgccagggagcaaaaaacctctgcttttttgaaagaggccggggcaacaaggtagagagccgcggccagaagcagccccgggccataaacccgaggcctggatggcttaaggctgaaaccgcctccgcccccaccctcaccctgctggccgagccctcccccctcctagccacagtgaccggaatcccagacttcccttctgatgcataaaacattcagtggcctccagggagtttttgaaattctggcggaggctgctttatccgttgtttcgccccctgggtcaaacactggtccactgggtgagttggaggagcgagtagctcagctatagattaaatttaacctgagccccggtggccgcgtcccgcccgcggtcctttctatacgagtagctttgaaggtgtcaccgagctgtgcccaaatctagaaaagaatgggaggagaactgcatgagcttttaattttcttccctttttccccccttcctgcgtgtaaactggggtaagggtgggcggtaatccccactgattgagcccgcgcggggaggtaaggactccggcgtgggtgccaccgcggttgcgaaaaatcgggttctgaacccggtcagcaggagtggcagcgccccagcagcacctaggcaggaagaggacacttcccgttcgcgtttggtgatggtttcatgtaccaggacatgggtgc

SEQ ID NO: 333487 - DNA, 639 bp, Homo sapiens; identical to SEQ ID NO: 233754
  chr8:77585201-77585840
  hyper

SEQ ID NO: 333488 - DNA, 221 bp, Homo sapiens
  chr8:77586176-77586397
  hyper
gttcaggctcccagcgtaaggaaaggaggaaacgacaagaatccctaagagaaaaagaggaaaaagctgtgtgctgctgaggcggggcgtgggaagacaaccacagtcaattggaaggagcccgagtcagggagcaattgctaggacttcggacagagagggcagaagattgtgtagacaggcggtcaaccagagcagcgcggggcaggacccacgagcgc

SEQ ID NO: 333489 - DNA, 710 bp, Homo sapiens
  chr8:77589904-77590614
  hyper
cgccgaagaaaaagtctagaagtggaaattaccttttgtctcaatgttaattactccttgcctccaacactcaacacctaaccacctggtagtcctttttggttctcccctaactcggtgctcaatgtcagggtccgagtgctctgcagtggatgtggctgggctggggttgccctgtaaagtgttgaagaggatctagggaaagttctcggagcggcagggaaacctctactcctttcactttgaaataaaaagtggcccaacgttccgtgagggcggcggcgggttcgcgcagagtttagggacagtggaatgggggtggggcagggagtgggagtcagggtcaaaggcgtccgcggagacccgagaggagcagctgggtttcctggcgctgggagcccagaagtagggcgcaagcggccgcggcacagcggagcagccaggtccagccgctcggatcgcgctcgcgccccatagcggcccgcgggctgggctcgggctcgcccgcctccccgctcccctgccagcggcgccgcgctccgcgccccggggcccaccccacgcagtcccgccgccgcttcagcccaacagccctcctcacgctggcgcgctccgaggccaagccctggaggaaactcttgactctgcgctagaacctctctgccccttccctcagcccattaacccccgaccctcacctccagcctctc

SEQ ID NO: 333490 - DNA, 1361 bp, Homo sapiens
  chr8:77594109-77595470
  hyper
cgctgagggagggagggggcactgagggacctgattttccactttctttaggggggctgcgtttttccggatttaacttttggattaagtggcggaggatcatctacgtttgcttgggcagttttctctccttttccctgtcttttcgggttttgccttccccgcgagccccgggcattctagtggctgggggaagctgtcagctccgcaacggcgcgggcactgccaggggtctccgctcgccccgcgcccctgcaccccgatcgggatgactggtcctccgcactcatcctctgaaagtttggacgttggtcggtggggctgggagcccctctctccctgctctttccctgctttaccctccaccccccaccccaccttattcagcctcgtttttcttcctccttttaccacccgcccctcttccccttctcaagttccccgaaggtcgcttagtgtgcggggctggcggaggcccgggggttcgtgagctctggggaggggattccaagaggctggggtgaacgctggggctggggctgcaggtagacacccgcccaccggagcgggcgcggcaggcactaccgagggctgctctcggcggcgcgggcgcgggcgccgcggaggaaaggcaggtccgttaggaggcgggatcgcccggcctctgggccagggacccgcgaggcggcggctgcttgctccgaacggaacgccgccgggtgtgcgttagaccagcggatagacgcccgcggcttggggtcaagaatcttttcctttttagcaaagggcaaggggtgtgtgcgtgtgcgtgtgcgtgtgtgtgtgtgtattgagtggctgtgttcggctgtgagaaccgattcattcttcggcccccctaaaagggttccatgcctacaaatgaacttcacctccttcgtttctccaagcatcaagtgcgccttctggctgggagcagctaagggaaaagggactggaatgcgccgggtctctccttccttctacttctatccacccccaacccccttctcgctcctcttttctatcagaaaaaaataataaaatctctcatggaattgtataaagtttctctgccgatgtccaagttacagaaggttccctattctaatccccttcccctagaagacggtgcactggtttctatttcttttgttacctgtgatccgggcggggggctcctttcggccgctcgggctggggtccggcccagagaggaggcttctgcgggcgcctttggccgcgacttctcacttccgcgcggttctggtgaggttttagctaccgttcggtgagacaccctccttgtaggtaccaaaggttcagatcgcaaacacggaccc

SEQ ID NO: 333491 - DNA, 679 bp, Homo sapiens
  chr8:79428304-79428983
  hyper
cggggtgacgggggagcgctcggaggaaggacgctatgcagagaaagcccccctggctcttctctctcaatccataatccagcgatgctgcagctgtaaaagcattaatagaaaatcaatccacaacctcgcggggcagcgatcgtcgagcgccgtttccaggctgccttccctggggtcgggagcggccccgctccccccgtggctggcgcggaatgtggtgatccgtcccggggcggggatgacttcatgcagccggagctccgcggcgggagcggaggctgctgctggcaggtggggcgcgggccggcgcgagctgaccgagcactcggcgggcgcggcgggactgcggcccgtggcggcgtgcgcggggacctgcgctgactaggtccggggaaggtaagcagcccggcaccggtgcgccctggccgcactgcgtggagctttccgcttggttaataatggggtttgcagcacggagggaagaaggggagaaccccgctgcattctgcaatgagaaaaggagcaacaactaggatggaaatgttgggcggccaagtgcagaggttggaggagcagtgttactgggcaaacaaagaaggcgttcttgcctctatactcttttgaacgtgatctaccatttcagtgccagattcgcgtagacagtgaagaggactca

SEQ ID NO: 333492 - DNA, 1054 bp, Homo sapiens
  chr8:80524710-80525764
  hyper
cgcgaaatttccgttttgtgggtcagacagtgccaaatatcggcaatttcataagctcagagagacaagacagtggagacacaggatgaccggaaaagattctggattcagggccttcatccgcaattggtcttgtgccttgagtgcccacggttctggcgctcagtggccccggggtgaaaaggcagggtggggcctggggtcctgtggcagctggaagcacgtgtcccccgggacttggttgcaggatgcggagacagggaaagctgccgaaaggactccatctgcgcggctccgccctgccctaccctccccgcggagccggggagacctcaggctccgagactggcggggaagaggaatatgggaggggcagttgagctgtatgcagtcctggaacctcttttttcagccccgcagtccacaacggcccgagcaccccttgatgtgcgcagacccccggcgtggctctcagccccagcaccgagcccctcccagccaagcgggtggctctgcagaaaagctggctcgagccccgcccggccacacaaaggcgcggccccacccagcccgggcgcgagaccgcagaggtgacccccttcccagggattcagggagggctgtctcttctcgcccacccacggtccgcggagctcggggctttttttcccccagcccaagccccccgcccaccctctgttctctatgattttccagaatggagaccccgcgaggggcttctctaagggagaccctcgctcctccagcggggcgcggctcggccccacccctcccagctgaggcccagagccgcctaccgctggccgggtgggggcgcacgtggcgactgggtgtgtggagcgcagccagccctgcagagccccgcgccgcgccctgcgctcccctccccggagttgggcgctcgcccccgcggtgcagccggggagaccggtttctgcgcagtgtcctgagctacccccgctttccacaattcgcagttcactcgcacgtccagaaaggttctgagaatgggtggtgggggcgatctcgcctc

SEQ ID NO: 333493 - DNA, 672 bp, Homo sapiens
  chr8:80695898-80696570
  hyper
cgcccaggctagaagggcccggctcttggccctcgctgtcctgcccgctgtcgccgctctttggcgcccccgcaacagctccctctcagcaggacgcggaaaggtcagggtccctctctctcgtatataccacaaagaaagcgcgttccccgcggcgccccgagagcccttaggcagacgtcccgcagagtcccaagtccctacggtgggcccgcgggctcctgatctgtccaggcccctaaactatcacaaggaggatatttgatgaccgtctttcttccctcgctctctcccaacaaagggtaactgacctctcgcgtgacctggccagcgctgagattccctcaacacgctttccccctattgtgtgcagacccccacagggcggaggcgagcggcgcgacccactggacggacgcggcccggagctccaggcgcccggacctggcgggccctccctgggcgggcgggtggcgcgtcgcccgccgccgatccgggcggggtgaggggggcgctgtaattgcagcgcagctcgggttcccacgctcctattgttggcgactttgtttccaattcccatcacgtgtgctaattagttagcgctgctggctggctgggaggcgtgtggctggcctaaaagcagaaagatcacttcctgtagggagccgggcc

SEQ ID NO: 333494 - DNA, 804 bp, Homo sapiens
  chr8:80803351-80804155
  hyper
tttgagtacaaatcgataaagctagagattcaaagactgcctttataaaactggagaagatgcactctggccataggcggagggggcagcccggggcccctgtcaggaagccaagcggcccggggcatccctggaaggctgccgagggggcagcgccttctctggggacggcttcgtggagagtccgggacgggcgagacagaaaaccgagccctatttgttattagtatttttttttttatactctcaaatgccaccggcacattcttttaaaaaaaaatgaaaggaaagaaagaaagaaaaagaaaataagagaggaaaaggtcctgagaaatgacggacgcttgaacctcgggcccgggaagaccagcgccctttggcggctaggcctcgggggcgtgcggagggcgggcccccgcgcggccgccgctttcccaggccgccaggggtgaggaggtgacgctgcgggcttggtggcggctggtttttcacacaggaatcctcctcgccaccgctccctcgaaggccgccccccgctccacccccagcactgggcgcccgcgcctcccaactcagcccgccgccgagcagacggcgcgccgcggtaattgggcacaggggcctttttcagagtcgctcagtcgataaatgaaacgtcagctcccctgtgatcccgcgtgtgtggggcggcggtggctgcgagccggggcgcagggccggccggcagccgctgctctttcacagccccagaccctgcgcggcctgccggcggctggcgacctcccttcccctcccgaggcgccc

SEQ ID NO: 333495 - DNA, 2529 bp, Homo sapiens
  chr8:81397833-81400362
  hyper
cggggcggtgcattttctgtgaaatgactactgtccggggcccgaggtgctgcctcgcacaatgcatcaaaggaggttgtgtccgtggtcgtaacctcttcgcgtgaaaggcaccgcctggtccagtctttgtgaaggaacaaaataagttcacttccttgggcaccgccacccaccctcagcaaatgacaaggctggagcgcagctcccaccgcacagttatttgcaaagtcccaggtgaactcgtggcgagagaaggaaaatgcgcgtcccgggcgcgggtaggtgcgtgtgggcagcggggaggcggccagaccctgacactcgccagctgtttgtcctccgcgtagcccggccccggccgcacacgcccgccccctccctgagacccccagcccgccgcccggccttttgtccccaacccctcggccgacttccttccccgcggccgcacccccgcccccaggccggaggcgcagcccagcccctttcccggtcccctggcgcccccaccccaccccagcccagccccaagcccagcccccctcccccagcccggcccccaccctttccccctccagcggttactgctaccccggtgcattgtgggcgcacggtccgttgttcatttgccattcgacctccgccagggcctggtcggacggaaacgctccgccggctttattgtcgcttcgttatgtggcggagccgagcagtttagcgtgcctctcaccctcagcgcctgcgaagccggcggcggcgtcgggactcctcggcgcgcggaggaaggatatctgtgtggaggatcggtgtgtgcgcgcgcggctttaaagagggggcagcggagggtctccccgcactccgctgctcaacttcgaaggcctcgctcgctgcaggctcgctcctcacctctccgccgcccgcccccttctccgcgcgggacgctgcccggagcgcggcggggcgggggtggaggacgagagagcggtcggaggcgtcggcccggcagcggcagcggcagcggacgcgtgcagcagacccgggagcgagcgcgagccgggctgccgggcgagagggcgaggccgagccccgcgagaccggaacgccgggggcgggggcgagacagagggggagccgcggggagcgcgcgggacgcggcccgaggccgtgcgcgagccggggcaccgggcggcggcggcggcggcgcgcgccatgtcgttcagtgaaatgaaccgcaggacgctggcgttccgaggaggcgggttggtcaccgctagcggcggcggctccacgaacaataacgctggcggggaggcctcagcttggcctccgcagccccagccgagacagcccccgccgccagcgccgcccgcgcttcagccgcctaatgggcggggggccgacgaggaagtggaattggagggcctggagccccaagacctggaggcctccgccgggccggccgccggcgccgccgaggaagccaaggagttgctgctcccccaagacgcgggcggccccacctcgcttggcggtggcgcggggggccccctgctagcggaaaggaaccgtcggactctggccttccgaggcggcggcggcgggggtctcggcaacaatggcagtagccgcggccgccccgagacctcggtgtggcccttgaggcatttcaatgggcgagggccggcgactgtggatctggagctggacgcgctggaggggaaggagttgatgcaggacggcgcgtccctgagcgacagcaccgaggacgaggaggagggggcgagcctgggcgacggcagcggggcggaaggcggcagctgcagcagcagcaggcggtcgggcggcgatggcggggacgaagtggagggcagcggtgtgggagctggcgaaggagagactgtccagcacttcccgctcgcgcggcccaagtctctaatgcagaagctccaatgctccttccagacctcctggctcaaggactttccctggctgcgctattccaaggatactggtcttatgtcttgcggctggtgccaaaagacccctgcagatgggggaagcgtggaccttcccccagtggggcatgatgagctttcgcgagggacccgcaactacaagaaaaccctcctcctgaggcaccacgtctctaccgagcacaaactccacgaagccaacgcccaggtacagtatatcctgctcctacttttttgagatcttttagggaaaggtttatcagcactcccttcacccccacccacccccgaaaaaaaacctcaaaaccattttcctgggtgaagacatcgttccagttgagaggtgcgggaagcttaggcgtgggggtttagaaagcctgggaacaagttttataaaagttctgtatgtgttgtggggggaaggggatggaatgacaattgtcgtggcgctggattttcttttttatgactcatttcttatcagattgaatcaaaaagaaagtgaggttgaaggttttaacctaaaaggctgactttgcggtaaaaaaatttt

SEQ ID NO: 333496 - DNA, 234 bp, Homo sapiens; identical to SEQ ID NO: 233768
  chr8:81478189-81478423
  hyper

SEQ ID NO: 333497 - DNA, 915 bp, Homo sapiens
  chr8:81785915-81786830
  hyper
cgtcatcctcctcctccgcgccccctcggggcttctcctccacacgcccgagccccctccgccgcctgctcccgccctcctcgtcctcgtcttcctcccctagaagcagcagcaccggcgacgaggcggcggcggcggccccggtggcccgaggggggccggtcccggcgctgcgcggcggcggcggcagcggcggcctccagctctccggggcgggcgccggggccgggcccgggacagggggcgggagcccgggtagggcggcttccttggcgggcgcgggcgccggcccggcaggctgcagcgcggcgcccccccggcggctgcccaggctggagcgcttggctagacgccgcgcctgcatgcctgagcgcggggttgcgggccgcggcgcggggccggagagtttgtcacctcctcttcctcctctgcctccgccggtggccgcagggccggggactcgcggccgcaaggggctgcaggagccgccggccaggacccgcggctgccactggctgcagaggcgcgggcgccgccttcgctggaccggccggcggggacgccggcggccggcggctacggcggggcggcgcggcggccgcgggcgggggtgggtgtgagcgagcggcgcgctgccgcctccgccgccgccgccgccgcccgggagccgcgggccgcgctgcgctccatgcggccggcggccgagcccgcgcgcgcctctcccggccggctgcgcccgcgcgctccgggcctaccgctgccgtgcctcggcgcgagctgtttgtgttgtatgttttccaccaccgcccccctcttcgcgagccattcctcacaaccctccggtccccccgctcagacaaaacccggactggattttttttttctcttacccacagtctccgaaagtctggcgct

SEQ ID NO: 333498 - DNA, 1369 bp, Homo sapiens
  chr8:82192428-82193797
  hyper
cggcggtggatatgttgtcaaacggaggggtgcaggagaggcggggccaggcctccaggtgacccctctggcttcctgggcctgcagaggcgccgaaacgtgcaggcgccggcgtccatgaggcgtggggcgcgccgggcgagtccctgcttgcaggaggcgcccgagaggccgtcgcgtaccctggcaagaggagctggttagcacctcccgaccccgagaaggcccagggggcgcccggcgggcggggcggggaccgggcgaggcccgcctcccattggccgcatagcgccgcccagcgcgggccgccgttataaagcagccgccggcgccgggtgcctcacagcacgctgccacgccgacgcagacccctctctgcacgccagcccgcccgcacccaccatggccacagttcagcagctggaaggaagatggcgcctggtggacagcaaaggctttgatgaatacatgaaggagctaggtgaggcacccggcctggcagcgcctgcaacgtggcgtgttgtgcggtcgtctgtccctaggtccccgtcagcgtgccagattctggggcaggagatgctcggcggcctacccccatcccctcccatcttccccaccacgcggccgttgggtgcagcgcgcgcagcaccacgcgggcaggcggcgaggagcagggagcgtgcgcgcctcttgcccgcccgcgggccgcaagattccggaggtggtccaccccgtggtccacctacctctgcttctttcccttcgcccaaacggcagcccttccgcattgcttcctgtcctttagcgcgcgcacccgtcacctcacgctgcacttctttcgaccccctccaggcgaccctgtatttcccttttttccccctttactcatccttccccttcctgccaccattctgtctctcccatttaccccatcgtggcagcacccactcccctttccctccctgtcgcatcttttgttccctgtggcgcgcaggtcaccctccgttttcttcatggggacgcggtgctggcgcgcagtttcccgcagaaatcctgtggaggggtctgagtggcgctacagcttcagcttgcattcctctgtcagccccgtctcccccaggtcctctgctcgcccttaccagttgagccgaaccctttggattggtaccccatggaacaccagggcccccgagaagcgtggcgctggcggtgccgacctgctgctggcactgccgggccggggcgccgcagtgggcgggtggcctgtgggaggagcgcaatgaggcctgggggtggccgtgtgttgccatcctggcctctgccacttgagggtgaggaggaaggaggcagtgggctttgctggaaaacc

SEQ ID NO: 333499 - DNA, 749 bp, Homo sapiens; identical to SEQ ID NO: 233780
  chr8:85095302-85096051
  hyper

SEQ ID NO: 333500 - DNA, 924 bp, Homo sapiens
  chr8:89339057-89339981
  hyper
cggctacaattgtgtctttgagcgcgcagcatcgtgctttgtgctgccggggataacggattctgggtctcacacgcatccgtcacctaaaacacccttaaactgaaccagggtctccacagctggaagggaaacaacgtgctgggacccaggctgctctgagctacaaggatcccaggagtgaaggaaatgtttcagggagcagcccaggcagcggggggaggaagaaagccctcgcactcttacctccacattgaaatactgctccgttccgcagactgtagcacataaaatccaaagcaaggtttgcaagaaaaacacccccgaatgatgcacgaaatccaaccgtcttccagtgctgaatgtgagtaagatcatagtgaactgtgcttcaatggatggacgagctccccttcgttttctccctctctccctctccctccctccctcgtttcctttcaaaaaaaagtcctccgggtgggtaaggagcctgcaggttcacccacagccgggcaaggggaggagacaggggccccgcgctcggcagcccccgagaggcagcggcgaagacagggtcagcagtagttcctgttcaccatcctccggggtcagtcaccgggaacgtggcgcctaagttcaccggcggttccggctcaaagagcctagtcgcagccgcagcagcagcagccgccgccgccgccgccgcctccagcccgtgcgtcctcctcctgcactgcctactcctcctcctcctccgccgccgccgccgcccccagctcctgcgggaagggcctccgccgctcctcactctctcgcctctgcttctccttccctcctctcctcgctcccctccagaatgttcatccgtaatctacataactcctccttcccggggtctgcctggctctcggggcccttggcgcg

SEQ ID NO: 333501 - DNA, 140 bp, Homo sapiens
  chr8:91014317-91014457
  hyper
cgtgattttcgaagttttcacagttctgcaagtttccaacttgtgtgtaaataggtagaaagaggtagggaaggatacggcgcccgtccaccccttaaggagtgagaggggatcaggccgagcgagcactgacctttgac

SEQ ID NO: 333502 - DNA, 350 bp, Homo sapiens
  chr8:91094841-91095191
  hyper
atcaccgtcagcgtcgaaatggagccagatctcgaaaaactgtgaggctgtgatgagggatgactgcaggtgggattctgccattgtacagcggggtgtgtgtctgggtgtgtgaatatgcgtgtgtctgtgtccgcgcgagggggagtgagcaaaagctcagcgtgtgcgcgagtcagggctgcggagggagacctgggcgcgggcgctgccgggcgctgtcctcggtgctgctcagctcagcgttcctccagagttctctccctacaccccgcacccagttctcagtatttatcccgacggccccaagccgggccacgcctcctccagcctcccattcctcactcccc

SEQ ID NO: 333503 - DNA, 518 bp, Homo sapiens
  chr8:91657148-91657666
  hyper
cgaggctccgcgttaggtatgttttatgtgtaggacagacttcccaggctgcgatggaaagtaatcgtaactcctgccgtcaatgtcacttctctgctggtatttatctgatagagcgccctcctagggccgccacaagaccgctcaaaaacagacttggagagggataggccagcgggaccccacttaccgaaaacactgcattctgaagcccaaaaggtatgggtgtcagtctggccagcgccaccactttcaggccgcttcctccctccactacgcgaataaccgcgctcagcttctcgctgctctggatcctggcggccacccaggcggtgaggagccgcttgcagaccacatgggcgatgaaggtgccgatgaggacgcccaccatcatcagacccatgcccagcacgaagccgtacaggtagccagcggccacgttgagcacgatgtagccccagccgcaggggaaagagaccacgatgaagcccacgacgaagagcaggacccccagcagc

SEQ ID NO: 333504 - DNA, 626 bp, Homo sapiens
  chr8:91803656-91804282
  hyper
cgtccttaccttgcgctttggctgctcaggacaaacgccctgccattcgtcccttctctctgtccggacgccctcctccatccctgcacttggggccgtcgtggggctggtaggggtccccaggctatctccagccgtggccgatggccgtgccgggggcagagcccgctcccctccgcgcgttgctacgtgcggggatgacatggatccagacgccgtcaactacgggaaggaggaggcgagagttggagcgcgtgggagcgcagaggccggaggagggagggggggacaccgagcgcggagagcgcggagagcgcggagggaggcgcgcgcgggagcgaacaccctcccggatccagagcccggcggcggcgaagcagcagctgcggccgcgcccttgccagagccggtgcgtccgcctagccccgctccgcctgaggccgtcagggctcccgaggatggaagattcccaggagacatcgccgtcctccaacaactcctcggaggagctcagctctgctctgcacctgtccaagggcatgtcgatcttcctcgacgtaagtacagatggtgggagctgggcggttgcttcccagcacctttcttttccccgaaaggaaggggtt

SEQ ID NO: 333505 - DNA, 1072 bp, Homo sapiens
  chr8:91996920-91997992
  hyper
cgtagctttgactaaaacaccagcaatgaaaaccttgtgccaccgggtggagggggcaaatcgtcttgaaagcctcccaccgcctggcaccaggtgctggggcagagccaaggggagctgtgtacttagctccttttttggcgatggctttggtctcggccacttgcccctccgtcgggctcccctggccccctacactttctttcccctcatccgacgctctcgctcccatcccactcccattcagggtccacagggtactgaaggggccctgagagatttcccgacccacctcagagcttctcttcctcgcctcaactttcccggggtcgggcctgggagacggcgcccacccgcctcctccacaccacggggcccgacttccgtcccccagtgtcgctcatcctccctagccacttaccgactcaaaatccacggggatttcggggcagcagcgtcgccgcgctcagcccacacgcggaggccgagcgccctgctgcccgtcggggaacggctcctgccgctggtccgctggctgaccgcggtggcggcggcggggggcgaggggcggggggcgaggggcggggggcggggcgggaggcggctccgaggggcacgaggcgggcccagggcgggcgcggggcgtggcctcgggcgctgagcctcgagagcagccgcacccctgccggggtagaaccgttaaaagggtggcgcgcgctttcccgggcgagctgggcgcgtggggttggagcggcgccacccagagccggtcgtctagggtaggaggccgcgagtgaggcgctgacaggctagccctcgacggggcgcgcccgcgtgaacggccttgggggccccagaccgtggccctgcttgtgcgaagactgggaggcgccaggcgggccgcctgctgggggcttggcggcgggttccaggcagcgtctgtgagggaggccgcctctgtgagggaggccgccgtcgtgctgacgactgagtccaccctactcctgtcccccgtcagagctgctggcaggcgctgctttccccttggtgcatttagtgggtgtcgggattc

SEQ ID NO: 333506 - DNA, 1049 bp, Homo sapiens
  chr8:94712366-94713415
  hyper
cggacgcgtctggtacgagactacaagtcgcacaggcggagagggggcccccgggcctctggtttcacgtctccctcctggtccccggcggaccggcgtcttttctcccctgctcggagtagcctagcagcgctggaggctggctgtctggtaagcgcggctgttagagaggatggaggcgccgtagccccgcggtgcttctcacagccttcgccggcagggacgcgcgggacaaccgcgcaggcggctctgcaggggtgggcgcgccatcacccctctcggtccctgcctgcttggcgctttccgagccccagccgcgctcaggctgcctcgggcattgaccgcgggggcgcgcgccccgtttccatagaaacgcccggcctgccgcggcggcgcgaggggcgggctttcaggctcccggcggctgcttgcgccccagcgcgcgcccaggcgccttggaatccccgtccttgggcccccgcaaggtccccggccgtgcgcgaggcagcatgatgaggcgcaccctggaaaaccggtaacagcccgagcccagctgcccagggccgcccacactggagggctggggtgagggaagtggaagcctctgtccatggggcctctgcgccgaattccgaccctgagtgggaggctgcacggtccccgctgtgacctggggcctaattccttgggctgcagccaccgccggcggcgaagaggagcccggggcccggccggctgccacccacccacgccaccgggtctcgggtccccacactgccgcgggcagtgcggaagcctaggaggcagccgggcgcccaggccgcgctgcgcggagcagccggagcagccacctccccagttaaggccaggcccacccggcctgggccttttcctgtgcctacacagtccggatagtgaggtcaggaccccatggagagcagtccgcgccgggagacgctgggtcgttgatgggtttacgccttcaaagctgcagaatgcccggggaatgtttgcatgttaaattaacgtgaagccttctcatctctaac

SEQ ID NO: 333507 - DNA, 261 bp, Homo sapiens
  chr8:95003763-95004024
  hyper
cgtctgcacagagctcccggctccccgcggcgggggcaggagtcaacgccgtcagttacatgctcgtcagatgtgcacgggcgccacacacgatcctgctaacgtggtcggagaaatatgacctcagcgcaggtgaagcgtgggcagctgacgccacggtgatgtgtgcagatccggtggggactctgacgcagccccagggcaaaaccaacctgctttctaccttcaatccagcaggatgcccgtcatggagaaaaaggc

SEQ ID NO: 333508 - DNA, 484 bp, Homo sapiens; identical to SEQ ID NO: 233807
  chr8:95246499-95246983
  hyper

SEQ ID NO: 333509 - DNA, 764 bp, Homo sapiens
  chr8:95651257-95652021
  hyper
cgcacggggttccgcgtccctgtgaggcggcacctcctgggcccagcagagctgagcacctgggaaccgcgcaccgagagccccacggggaggtggttagggggaaccggctcctccaggcggcctcgcccactgcaatgcaatctgggtggtttttccaggtccctccctgcctcgttccgcgcccagtccctgcccccgcgacgcccgagggcctggacgggtagctcggagttaccggggctggggaggagcgaggctactgcagtaagccagccggaacccatttatgactccgcactctgaagttcaggacagggaagcacccacctctggaactcaagcagtggacgagggaggtcccgagcgccgtcgcagcgctgcgagtgtgggaccctggccttcgcccgctctcaggggacgagagctgccacctgtatcacgggaggccccgcctccgcctgcaccttctcctaccaggaaacgagacggcgcgggcctcgggctcctctcccccctcccgggagctgaacccccactgggaaagccaggtctccagcttcccttgacacgcgtcttgaaaggttaccggatttgtacccggagtgggttctgcagggataggtgcatggttgcccgtttcacatcatgaatatgaacggggctggacacctagagccgaattattaatacttcagacagaattctgttcccaagaacaaatcgctttgagatataaaacccgagaaaacttcacctctggc

SEQ ID NO: 333510 - DNA, 1126 bp, Homo sapiens
  chr8:95652434-95653560
  hyper
cggggtcccccagctgctttgcgcgcgataactgcgtcctggggagtgactaggtggttgggcgtccagcccctggcgtccggctctgccgcgcgcggggttcctctccggaaggtgggcagcgcggcgggtttgggacgagcgtgcacccgggctccggcccggagaagggggggctcgcaggatttctcctgctgtttgcactgaaagttgtgttggctcaggagctgcttttccggggatctgcagttgcccccgccacctcctggctgcggttggcaggtccctccctcagcagttcgtcctccgcctgcgccgcgccctgggcagctccgcgccccgggcctcacctctggcctcctttcgcctccctgcacctggccttttcgcttgaccgttcagaaccttcggcttcgttccctgcagccggtattctccgagcccccctgcacctctcagttacctccagtgggaacccctccccccagcgactccgagccctttacctctctgagccctttccccgtctggcctcgtctaccctctgggtgtcaaccgcctcttccctgcccctcacgtctccccctcctcctcccctgccctcgcctctccattcatccagccattgtctcccgccccttcctccccctcccgaagcggcctcctcccccaccgctgccacgtcgtggtttgaaggagccaatgggccggcgccgccaggtgtctcttacctgcaccacgtgggggagggggaaggggcgggcaggtaaagccacatcccaaaacagaaaagctttcagccattgcgtgcctcccggggggggcagccttgctccaggctttttgcatagacgcccgggcaactgaatacaaaaagggcaggcctcctgcgccctccttcccaccccccttcctgccctgggcgtggagcaccgaccaggtgtgggcttgggtggttggttaccgccttttgcactagcagtagcaaggaaggggggtgggcgctctttctttttctcttagaagagggtttagcacaggttttttcgttctcacttccacaccaccttaccgcctcccgaccccccctctccccctccccacctatcgtcatgacggcctctcc

SEQ ID NO: 333511 - DNA, 1231 bp, Homo sapiens
  chr8:97156910-97158141
  hyper
cggggtggagccggggtccatggagttcatcagcgtctggatgatggcgtggttggtgggctccaggtgcgagcgcagcgggaagtcgcatacaccctcgcagtgataggcctcgtactccaggggcgcgataatccagtcgtcccagcccagctccttgaagttcacgtgcaggggcttcttgctgcagcgtagcctggacttcttgccgtgccgcttgccatggcgactggcgaaggccgtgcgccgccgccggcggccgggcgagggcagccaaggcctggcatccggggcgcccgacggcggcggccacgacccctcggcgcccgcgcccgggcccgcagcctcggccgagcccagctgctcgcgcatctctgcgaacaggttcttgcgctgggatctggtgaataccaccagcagggcccgctcctggggaggccgcaccctccggccgaagcccagactccgcaggtccgggggcggcggttgctggggtccccgcgcgcgcgcctcggcctccccggcgtccagctcgccccatgcggcccgcagctccaagcacagctgcttccagggctggtggcgcaggccctgccacacgtcgaagacttcccagccggccggcggcgccccctgcgggtccagggtccgcgcgtccagcagtaggggcgaaaggcaagggaagagctgcacgtggagcggcccggctggtggcccccagggcgctgagggcgcctggcgaaagagccgcagctccgcgcccaccagctcttctttgtctgagagcatggacacatcaaacaaatacttctgtctccggagaggagtgtgcgagagatcgtctgcgagataaaaaataattacagtcagtttcacttaagggggagatcagcccggtgctcttcggccgccccgggaggaaaagggcggggagtgggggcaggtcggccgggcagtccagcttgcccggcccagggcctgaccaccccggctccccatctggctggtgcatggcgcggggaagggggcgcgccaggacgggccccctccttcgcgtcagctccggactctcagggcggaagtcggtggctgctggcgaggcggcggcggcggcctaccgggttttccccccaaaaggcttcgtaaccactaatgtgccctttgtggtctcaagcctgggccgcgtttcccctagacctcctctgggctgggctggctcgttctcgttgac

SEQ ID NO: 333512 - DNA, 114 bp, Homo sapiens
  chr8:97166422-97166536
  hyper
cgcccctggcctctttcacgcccactctcgggtccctaaaccatgccccgcccccaggcgccggggccactagcgccgccgcgcgcgcttccctaggaacgttgtccagcgccg

SEQ ID NO: 333513 - DNA, 640 bp, Homo sapiens
  chr8:97166797-97167437
  hyper
ggcattccacacctcgagggctcggctcgattcagtcccctggtccaaagagtgtcgtttgacccgggttattcaatacccgaggggttatcgaactaatggctttccttttacttaaaagcccccagggattactgttgatttgctctaagacctttggtgcacgcagtagtcctagcaggaaacaaaagttctcgttctgccctgtttctatcataccatcttcctccccacagtctccacctcattcccttcttccttctccgccaccgccccagaaagacgtcaccactttcgaggaggtgtgtaagaacctcaaggactccagctaagaaaaacatgtggtgttagggcctccgatgcagtgccctgcgttccccgcgggtccaggtgacacgcatcctctccggtcggaaagaggagctttcaagtcctgattcaattggggggtggggagggtggagaagagggattcgccaggcctgtcgtgatctgtggtctgagtgacttttttcttttaatgcgcagaaaccacaaggatgtttgagcacgtttttagatcccctcccccatcggcaactccaccgcgcgaactcccagaggcccgagagcctcccgcgttgaggaaaacgctatgtcc

SEQ ID NO: 333514 - DNA, 426 bp, Homo sapiens
  chr8:97167794-97168220
  hyper
cgtgcccgcgctcatgcaggcgcaccctcatacgcacacacttgaacgcttagcaagtcttttccaaggctgttccctctttccggggaaataaagcctagattggaaccttctgcccagcttcctcatttggccgtctggtctgcattagtgtttttataagggactcaaacaaatcgaatacaaggtcaccaaataattaacagttgtgaattccctccgtccccattaaaatacttccctgcttatatttcattttcggtttgccaacgacaacagggtaccggcaaaagcactgctgagttgattacaccactctgcggctcaggtccacccagaaacccgctgttttgcataacatgaggtaccagatgaacttcaatcgcgaggggactatgcaactctctgaatgccctccccgcagcc

SEQ ID NO: 333515 - DNA, 839 bp, Homo sapiens
  chr8:97169620-97170459
  hyper
cggggtaaggaaggctttttacagatactgtacaggagcaagtcgcccatgcctcctggactgacttcggggctcctttccttttcttcgctcctccccttgggggacccccggctccaccgagccaggccagccccactcgacggcgatttaaacatcccttaggcaaggcgccaagttagcgctgctggcccagctctaggcgggccgctgctctttcctcctcgccaggccgtccacgcgttgggggaggggaccctaggggggttggcgcggttaagagccccacgtgagaggggcggaagtccttgccaggagccggggatgcgcggctggcgggtcccttccatcacgggagacgagacaccgtttgatgtgttatgacatgaaccctcaattagatcgctgagttgaaacactccaatcaggggcccgatgctaagcaagccccggaaggtccagcctgaggtcaccgccggtgacacatcaaatcaaaatcagtgagagggaaagtgaggctttccctttatcaagctggggctgcagccagcaacgcaccccctcctctgcgcacccctcccgcccgtggctccgcactccttcacccccgcgcggcgtgcgacaagccgcaccgccttcccagtcaacgaactgcctttcttcgcattttctgagaacccggagacgcggaggagacagcgcctttgaagatgctgtccgggtggtcatgcagcgtctcctcccgctgtggaccgctcgcatccccagccctccaccgcattccggggttgtagcggtacttgtggatctcggtcctgctagtctggaggccttggctc

SEQ ID NO: 333516 - DNA, 327 bp, Homo sapiens
  chr8:97171019-97171346
  hyper
cgaagaagccacatgtctttgcaaaggtgactttagtagccctaaaatcatcataaaatacctggcgttaatttgccctctggacctttcagcagctcatgaacctcgctgacctcgggctgcagcggcgagaccctcgagcaaggaacgcgactatgagtgagaggcggggactggagccggggaagagctcggggctgggggcgggggggccgttagcctgctctaaaaagcttaagagatgtgcgagcacccagggtagcagtggctgaagcagcttccgaatcccgaaccccagcgctgcaaggtttccgggcaaccccactt

SEQ ID NO: 333517 - DNA, 389 bp, Homo sapiens
  chr8:97171599-97171988
  hyper
acgctgcagatcaacgccggtggcaagaaggggccgcaagggtttccgcagacacccacacatgcaggcgttcccacagagggtaccagggatttcccagacccccaccagccctcaggaatagcgtagagagaggaacgtcgcctggctgagaaaggtggatgggcatacccatgtacctttgtgtattaagtacccacaacctccgaacttagccgtccctgtcccggcccgcccaactgctgccgccgcatctgcagaaaccactcgtgttgaggcctcggagcagccgggagcaccacgctggagcaaaaaagccggagggcgcagggctccagcccggctgaccatcccacccagcgcagggaccaacggaaaacccgcgcggc

SEQ ID NO: 333518 - DNA, 1485 bp, Homo sapiens
  chr8:97172008-97173493
  hyper
cgacgccgctcgcggactagttcctcagactgtgggactccctagtgccggctttgcccagggctttccaaggctgtctcatgccctagatctgccccagcagctcaggccttggactgcgaacccagtatcccgagacaccgattccatcagtccccatcccgacccctctccagccgggttcatccgcctgctgcctcccgtcctccacgtttcccccaccagccaccaacaagcggcaaccacgctgccttctgcaaaagaggaagaaggaaagaagggagagagaaagaaagggggggaaaggaagggaggtttagagactggaatagaatccgcagccacattcagaaacttactcgagcttgagaaaaacaatttaagaaaagtaaaaaggaagtgtccagagcaggaagggaattcacaaatgtagcctccagcgggaacagctccctggctgccgagctccagcgggaggggagtcgagcgttttctttgccacttacctagtcccctgtctacaaagctggtgatcgtattagccgacttggaagactggaaaaagctggcattgatgcccagcttctcagcgatggagtaagtcctgtagattgacagcatgtactcgtggggcaccacgcgcggacccctgcctggcggctcctgcgcccggggctgctgagcccggggttcgtcctgaggccgcggctgtggttcctggccctcccggcccgcgtcactgtcgcgcggcgcccgctgcatcttgccttccttgcggcttcgcatgcccttggtggaacccagctcggcggacgacgaggaggatgagatggaagcctgctggaaaccgggcaaatcccacagaaaactgatgaggaagacggccgagagcaggaccctgggagtatccatggcgggcaagtggctgcgtctccccaggaggcggtggcggcggcgcaggacgcgcggggcacggagcggctggacagcggccggggcccggctcctcgggcggactcggagtgcgaggagccgggtcccagccacacaaaccccggccccgccacgccccctcccgcccctcgccgggaggggaggaatggggagggagggcagaggaggggtggggagggtgggaggagagccgggtggtgcgggccggaggtgtgggggagaggggccgcggtgcgccggtgtggcaggaagacgcagcgcccccgcgggacgcgcgcggggttgccgggcggtgcgcgcggcgcgggccgcaagcgctgaccgggggaaggcgggcgctgccggcccgtggccggggagcaaaggctggcccgccgcgccagggtccccctcgaactcccggaggtgtggtccctccgcagcgcggccccggctctcggtcctcgccagccgcctccactttcctgggagcgagcggccccggaggagggaagcggcggcggcgcccccaagagacagcttggagcaggc

SEQ ID NO: 333519 - DNA, 2216 bp, Homo sapiens
  chr8:97505592-97507808
  hyper
cgtctctcgtttcttcactaattgttctctagaaaagggaaagtgaagaagggaaagagaaaagacaacggggaagaaaagagcatagaggagagaggaaaagtggggagagaaaggaagaaaaggactgagaaaacgcaggagccctggcttgccggtgagcagagccggcgcagccacagcgcggagccgcggcgcccactggtcctcggagctgccaatcggcgtgtaatcctgtaggaatttctcccgggtttatctgggagtcacactgccgcctcctctccccagtcgcccaggggagcccggagaagcaggctcaggagggagggagccagaggaaaagaagaggaggagaaggaggaggacccggggagggaggcgcggcgcgggaggaggaggggcgcagccgcggagccagtggccccgcttggacgcgctgctctccagatacccccggagctccagccgcgcggatcgcgcgctcccgccgctctgcccctaaacttctgccgtagctccctttcaagccagcgaatttattccttaaaaccagaaactgaacctcggcacgggaaaggagtccgcggaggagcaaaaccacagcagagcaagaagagcttcagagagcagccttcccggagcaccaactccgtgtcgggagtgcagaaaccaacaagtgagagggcgccgcgttcccggggcgcagctgcgggcggcgggagcaggcgcaggaggaggaagcgagcgcccccgagccccgagcccgagtccccgagcctgagccgcaatcgctgcggtactctgctccggattcgtgtgcgcgggctgcgccgagcgctgggcaggaggcttcgttttgccctggttgcaagcagcggctgggagcagccggtccctggggaatatgcggcgcgcgtggatcctgctcaccttgggcttggtggcctgcgtgtcggcggagtcggtgagtgggccaggcggaggatgcgcgcgccgtttagggtgtttgaagctacgagaggagcccgcagggaataggggagcgccacctggggaacccccagtccccaagtatacaccggagatccgctgggacaaatgcgctcgtccggtcaccctttccccctcttcccttcctcagaaaagcgctgctcgctggcgttaccccgcggtccgcgggaatgggggcaccgagaattgcggtttggtctagccgcagaggcccctgaagtcactcccaacttcttcgccctcggcgggtcttgctgcgtggtctgggaaggacggaggggaaagggtggcaggaggggggagcctgggtcgggcccgcgagggaacggctccactccgcgcgctcctcgagaccagggatgacctggaaacttcggggtcccttcctccgcacaccatcccccccgcgccagctttcctgtttgactgcatgcaagttctggggagatgggggccagatttaagagacccgcgagtgtccagagagaaaagtttgcaaaagttcttttgtttgatgctccctgcggctagggcgaggtaaccgacactacgtggaatcgcagtaggcgatccctcaaggggatactgggggaggcacggaacgcgtccgaaaatgctgggacgccggccactggattcccagtcctgcggcgaccccctcctcgttgaggggtggaggttgcaccgcggggcgtcagggacgggaggacattttcataggagttacacgggagtgccgcaagcagggcgaggcggggtacgtgtgacacggcgctcggcttcgggtcgcctggccgctgggggacagaggcttccctcccgccacgctcgccctctctggccctggcggggcgcttctggggccgggaggagtctcgtctccggcggagcgcctgccggcacccagcttccctcccccgccctggcggtgggaacttgatttctccttttggtcgcgcttcgggggctggagcttgtttccccacgtcgcccaatgagcgccctctaaagggaactgcctccttggcctcctctcgtccgcagctgcctccacctgggcgccaggagctctgtcgggccaggtggaagcttgagcaccccagatttcgtctgcagcctcagtgccctctggggtctcagggagtgcggctgtttctggcccttctggttccccacgtcctctccctttgccatttaataac

SEQ ID NO: 333520 - DNA, 335 bp, Homo sapiens
  chr8:97657762-97658097
  hyper
cgctcattcgggggcgtgacgggaggacctggctggggagcggcgggttgggagcctgtggctgccccttcggtgacagtggagtcaccgagcctagaaatggggaagctgtgacgtgggggtggtggagggtgctgcgggacagcagcgagcacggccctcagccgtccttcccaacacggtttcacttcccctcagctccagggctcagccccaagccgcccccttcatcccccatctgcaaacaatcctggtccccctgagcctccaatatgccttatgcagttcttttggggttcctttcgcattttaccgtgtactttcgcttttgatgc

SEQ ID NO: 333521 - DNA, 452 bp, Homo sapiens; identical to SEQ ID NO: 233827
  chr8:98289902-98290354
  hyper

SEQ ID NO: 333522 - DNA, 188 bp, Homo sapiens
  chr8:98787253-98787441
  hyper
cggaagcacagcgaggatgtccttgacacacatcctattttctgggaaaagattactaccacagtaattgagctgtgaagcggagacaaattgctctcggtggtggttcaaagtactgcaattgactggaatagcaccgcgcagttttccttcctctcgtgcaagataagagtgataggagctgtatc

SEQ ID NO: 333523 - DNA, 192 bp, Homo sapiens
  chr8:98787788-98787980
  hyper
cgcaaggaactagactaaaagaatctcgacccttgaatggagttacacgaacggccagatgaaagaaggaaggcccggacctccactcagggccgactaggggactggcggagggtgcacgctgatggatttactcaccgggtgcttggagctccagcagctggctggagcccgcgatgacgtcacggactc

SEQ ID NO: 333524 - DNA, 573 bp, Homo sapiens; identical to SEQ ID NO: 233832
  chr8:98788321-98788894
  hyper

SEQ ID NO: 333525 - DNA, 931 bp, Homo sapiens
  chr8:98880996-98881927
  hyper
cgcactcccaacccgacaggcccctaaagctgcctgtgttccgtgcctgcggctccggacccctggagtctgatgcccgcctgggctcaggcacggacggagtggagccaggtggcagcaggcagggcgcgccgccagagtgcccagctcccggggctgcccacagggtggggccgccctcgccgccgctccctctccgcgccttccccatccccaaagaggacacccctccttccgcccggcccgctccccacccccgccgcggcaccgcctccccagccgcccgcccttgcccagcgcctcccaggcagccagcgagcgaagggagcgctctgggatgggacttggagcaagcggcggcggcggagacagaggcagaggcagaagctggggctccgtcctcgcctcccacgagcgatccccgaggagagccgcggccctcggcgaggcgaagaggccgacgaggaagacccgggtggctgcgcccctgcctcgcttcccaggcgccggcggctgcaggtgagcgcggcgcgctttcccccggctctgcgcggccgggcggcctcgaagtgcaggcggaccgacccaccgacagaataccgagcctgggctgcccgacgcgcaggcgccctccccaggcccgcactgcagcccccagcgccccggggccccggcgccttcgacccctccgaggacagggggagagggagggcggcgctgcccgacccctcggccgggagagctgggcgcgctccctgcgcaggacaagccgcgctgcagccgccccggagtgccccgtgggggcgctgtggcacgcagcggggacgcccagaccccggccaccgcgacccagggaaagggagacctgttgagcgggtatgcagggtgattcctattccacggacagccgatggctcccccttccctcttc

SEQ ID NO: 333526 - DNA, 677 bp, Homo sapiens
  chr8:99076662-99077339
  hyper
ctcccgctctcttccgctttgcgctcccaggctccttccacctcctgccagctcccttcctcctccaggtgcgcaccccctaccattagccccgctgcgcgcttgcgctctacgcccaagggagccgggctgcagagctggagaaacttccgcggctacgggtgcagttgccttcggttcccggttccgggccgacacccgcgcagggctgagacaggtgtctgcgctccccgcaatgggctgctccagcagcgccctcaacaaggccggcgacagcagcaggttccccagcggtgagcagggtaccggcgccgcccgcgcccgggctggggactcgggtgggctaactccccaggaggtccaaagggtgtgtcccgtggccaccccgcctggcaggagccgggccttgtcccggaggatgcgagcagaacccgggacaaagcgcgatttccttccaaatctggagcggcgctgctgtgaccgcgggtgcggcggccctggtgcgctccgcggcgctcgctgcgagacgcgcggggcccgaggccgggcgctggattcaccctgtccgctgatgggatctcggggagttggtgttgaggccctaaggcggttagcctcggcattgccttaaacacaggagaaatgtcctatcaaggccttctaccaaggctgggggc

SEQ ID NO: 333527 - DNA, 134 bp, Homo sapiens
  chr8:99182356-99182490
  hyper
cgggagagcggggctccccggtgtagtccgggaaggtgcagttcccaggtgtgaccgcggggtggcgcggtgcgccggcgccggcgcttgcagacttcccgggagagaaacctccgtgcagccctggggctgac

SEQ ID NO: 333528 - DNA, 1123 bp, Homo sapiens; identical to SEQ ID NO: 223446
  chr8:99438692-99439815
  hyper

SEQ ID NO: 333529 - DNA, 1384 bp, Homo sapiens
  chr8:99951812-99953196
  hyper
cgggagggtagcgctgctcagctccagccaactcactgccgcgtaggaacggaggtcatcggaaatcaagatttccgtttgaattttcccaaagtttaagcgttggcaagtgcgttgaaaaacacacacaatatgaaagcctaataaaaatataggtttgcagaccgtgccctagtcttttccgaggatgttcttttctgtcatccatcgtctacccacgttgagcacgacagccgggccagtcccgccctgggcggttggggccttcccagaggggcccggtgcggagagcccccctctccccggatgtgtctggggcctgtccttcactgcgatgtcatcggtaaacctggtcttccttgtcacggacactgaagcgcttggttcgaaaagcaccatgaattcgaagcagccttggacgcgggatcatgggcgttagcctggctctctccgacgaggcaaactgcaggagatccccttccctggagtcaccggaaggcgaaagcacgctctgtgcccgcgcgccgccccgggagcccgctcctaccccctcggcgtgcggcgcgggcctggagaccgcggagcccgagccgtatccagcttgtgcaggagccggtgcgcccttccgcccgctcctcccccgggaccatcctcacgctccagggtcgcggaggcatcttgcgactagcgaggggctgacggtggcctgggtggccttgcgccggctctgggctccgccgctgcggcagccgagggcctcagctgggaaatccaaacccgggctggacctgggctcaaggaggtttctgtccccaggctagaccaccacggccacggccacgcaacttgccctgagaccccgtgctcggccttcccactgagctccccttccctgtgactcagtgcctcgcaggctggtggccggaagggtgcctgcggctggctggcccggcccgattccgggtggcggggttcctgcagtgaggaacgaccctcagctcccgcagacgcgggaaggcccccgcgccatccgtgggagtggggcagcctgtctgcacgcggtcccctgggaaacccctctgcatctcccgcccggacaaggtccccggccttggaatctgcgccgccccgcacgcgaccgcctgcgaactccctgcgctggggtcagaactggtatctttctcctcctctggggaagtcagggcagcccggagtggcgtcgtgggtccgaaaaatccgtctcagaaacccaccaggagaaaaggctctggggtgggggacaccatgtggggctcccacaaaggacccgacggtgggtgtggagaagcttattggccctgagaataggcccaggccctctccacaggacccctaccgcacacgc

SEQ ID NO: 333530 - DNA, 1157 bp, Homo sapiens
  chr8:99954061-99955218
  hyper
cgtccttggtgtcgcaagtccagagccgcgaggacagcagatgaccgggtcagcggaaatttcagagccagccagcagctcaggtccccggggccgcggcaggaatggaacggctccgcggagacagcctcgggggcacagccgggccactgcagactccgggacttccctctccgcacacccgaaacccacaactcgcccgtgggccgcgtggcctttctgcgccgagggctgctgggggcgggcggcgagcctggcgggtgacctgctcttgggtgggccccgcaatgcctgcgccctagacgccggccgggacgaggggctggctgggtctgagcctggagaaacacaagggtcagcccccagtgggcgcagaggtggcccaggagggcccgcggacggtgctgcgctgcgctcagcctccgggccgctccccgcgttcggcgcgcacctgcccatcgaggcggcagggccagcaggcggcctaggcgcggccgggccacgcggcatcccccaaagctggagctcgccgactcttccctaccttttcaagagaccgtagtcgtgcccagaacgccggcgtggcccagactccattttggaacttcgcaggctggcgtggacgaagtaaacacatttatggaaaaaccccggggttaggaggtttgcggaaagagggagcagctcgtggggttggaaattctgcctacccctcgggaaaaccaaacggttctgcacccaacgtacacatacttaagggcgggaaaggtgtgaagcccgctgctggggagttgcctcccctttgatgaaaaggaagtgcgaagcgtaggaacgctcttcaggtcaccaccccgtgagtgggaggcttggggagtctgaaggaagagaaagctccctccaaatctcccaaactgagaaaagctgcaggaggaatgaggcagttggagagagaggaccgcaggcatcccgcagctgaggctcaggactgagctctaaaatgaaagcacccctatgggacccaccaggcaaaacgttaaaaaaaaaaaaaatctgaatgcttaggcattctgctgcttccattctgtgtgtcaaatctactttgaagcagttaagtactgcaggatattaaacactcgaatctccgtttcaagctcact

SEQ ID NO: 333531 - DNA, 1300 bp, Homo sapiens
  chr8:99956460-99957760
  hyper
cggctgcgtctctataacagggaaacctcgagcaaacctgtgcctttaagactcagttgctatccaaacagaagtaaacagagtggaccattagcagacgccgggcgcggaggcggagccagggcgctgagggccccgcgcggcggcgggacgcccgcccgaaggggaggcggggccgctactaaagcccaagactcccggcctggggcagcctggggagggacgcgggcggggacggagctcggcgtgcttgctgctggagggtgatggccctgcaaggctgtgggctccgacctcaccgggagtcgacagcgagaggttcgccgaagagcgaggttctgggcgagcgctgaacgccggccccaagcaccccgggtctttacacagtccgcgtccacagactctgacgaagacgtggatctgctctcgctttagctgctcgcggtcctccagatcatgtccgcgactcctgcgactccgcgcggaaaaaaaagtttgccaggcgtggactcaatgacctttccaagctgtgcgcctcgctgcctggaccgggtctgagcgcggctgcccaggttgacctttctgcgggaggtgagtgttcgctctgggaaggggctgtagctgccctttggaaggaagggtttgggggtgtaagaggcgttcagattctcggtctggtgtgccccaaattcagatgtgaaaatagatcatggggatgcaatcccagggcactgtatttctcacttccttgggtccctggcacgcgactcccagctaacacccaaccacacacatttctacatactgtttcttaattttgttttgggatatttaatctaagcggtcagcaagacttcttataaaagctggtctacgtacactgagatcaaaccccacaatcccatggtgtttctgctcctgccctagcaagcctgggtcgacttgtcccggggcagccgcggcagcgcagcgtggacgggcccggacacccggtgcctgcccagccagcgacgctgaaggcacatttcaagagggaaatagttcagtcctcggtaatttgtcaacctcgtgctggctttaaaattctcctcccaccttctagtcctgactgagggggcccaaaagcaaactccccgggggcttaaacgctcggattcctgagaaacggcaagtgagaaaggagttgcagttgtacgaagaaggagcgaggaaaaggtgtttgtggagggagccccggatctgtcttcctacctgttagccgagaacaaaagggggctggcgtttcccgaagcgaaagggc

SEQ ID NO: 333532 - DNA, 1154 bp, Homo sapiens
  chr8:99960222-99961376
  hyper
tctggcctcagggacgttctccgcccccaccccaccccctgggagcctgaaccatctggaagggatcttagtcgggggttgggaggagagcccgtggataggaggagggggcgattctaggccgaatccagcccctgaggtgtcacttttctttcctgcggcccgtcaccgctgatagatggggctgagggcagaggaaggaaaaagaaaacctccgaggtcagtgcggggcgaggtgagcccctcccagggccctctggcccaggaggatgaagcgcgccggcttcgctcttgcacgccggcttgccatccgggtaagcgcgggaaaggcggccacagggcgcggcggcagcgcagcgcgtgggatctcacgacccatccgttaacccaccgttcccaggagctccgaggcgcagcggcgacagaggttcgccccggcctgctagcattggcattgcggttgactgagcttcgcctaacaggcttggggagggtgggctgggctgggctgggctgggctgggtgctgcccggctgtccgcctttcgttttcctgggaccgaggagtcttccgctccgtatctgcctagagtctgaatccgactttctttcctttgggcacgcgctcgccagtggagcacttcttgttctggccccgggctgatctgcacgcggacttgagcaggtgccaaggtgccacgcagtcccctcacggctttcggggggtcttggagtcgggtggggagggagacttaggtgtggtaacctgcgcaggtgccaaagggcagaaggagcagccttggattatagtcacggtctctccctctcttccctgccatttttagggctttctctacgtgctgttgtctcactgggtttttgtcggagccccacgccctccggcctctgattcctggaagaaagggttggtcccctcagcacccccagcatcccggaaaatggggagcaaggctctgccagcgcccatcccgctccacccgtcgctgcagctcaccaattactccttcctgcaggccgtgaacaccttcccggccacggtggaccacctgcagggcctgtacggtctcagcgcggtacagaccatgcacatgaaccactggacgctggggtatcccaatgtgcacgagatcaccc

SEQ ID NO: 333533 - DNA, 182 bp, Homo sapiens
  chr8:99963508-99963690
  hyper
cgaggtggctgcgggtctgcctccgaagttatcagtgtaatcgggcctctgtgtatgcctgcacgtgtattttcatgattggaagattaggagcacggatttgttcctgcaagtctcctcttttgttgtcatgagagtgttatgttaacgcttgtgataacgataagacagaaactattgaa

SEQ ID NO: 333534 - DNA, 1133 bp, Homo sapiens
  chr8:99985867-99987000
  hyper
atgaagcctctccacgtggccgacttcccttagagaagtcccacaagccctcagccctcacagcctcgcccgcgacgccgtgcccacccctcccctggcagccccgagactctgggcgtgtgcttcccgctccccgagggccttaggcccagcggacgcccggccggagcctgatgccggcggcctccccctccctcagcgaggcacgcgcgtccccaggaccgccggtgccggggcctttaaccctggccgccgacgccgcggggaaaggaagcttctgcggctacagatggcgcaggccccaggtcgcagagaagccctatccaactctgcggactggccctgggagaaagggcccgggagttgcttctccagtcggtgaacgctccgttgagccacgtctatgcgcttgctcatggataagcgcactgggggactatactgcagtgtgaccgccagtgtccccagggaggctgcggaaaagtagaggcaatgagacccgagcagaaatagggacttctcgcggcagtccgcacggaagcagctggggagcatccagctcgaccctccccacaggcccagggtcgggacaccgagggaaggcgcggcgcgcgcggcaaggccaggggcgcggggctgggctcggccggcacaagtgctcggaccgcggagcgtcctcggtgaggcgttcggtatggattgggtaggagcggccctgggcgatgggcctgacgtcggtgggcgcagttgaggccactgcaaggccgctggatcccggatccgcacccgagacggagcgggggccacacgggataaccgagggggcgaacgggagtttcgggcctccgctccctctccgggtgggggacaggtcgccgagtccgaggtcgggcgcgaaggccactcgcattttcccgccttccgcgagcaacccaggggccctgcgggaggaggagagggtcccgggagtccgcccttccctgcgccttcgggaccggcaggaggcgctgcgcgggcgaattaaaagaaaaggaaaagctcgtagtggaggtgttaccgcatcctgcctttggacgctactcttagttgagtgacccgattcggaccttaggggcgttagggtctcctccacc

SEQ ID NO: 333535 - DNA, 492 bp, Homo sapiens; identical to SEQ ID NO: 233850
  chr8:101118152-101118644
  hyper

SEQ ID NO: 333536 - DNA, 457 bp, Homo sapiens
  chr8:101661596-101662053
  hyper
cgtccctggtgagccgagggataagtgagcattgccaccggccccctccctgcccaccctgaccccagccctgggcgcaccacgtagcggccccccagcgcgtcggaccgctgctgggacaccgggatacagaaatgcatcttcatggctgagcggtgtcttgggagtagcgctgggaacccgacctgcggcggcgggcggtgcgcggctctgaactcggcagcggtggacgcagcgcggcctgccacgcgactcagagcgaaccccggcgcccgctctcgccggccggggacatctacaggtggggccggggccgggccgcgccgcctcccagtccccgccccatccagccccgccgctctggtcccgggataggtggcgcctggggctggggcgcatccacggccacccccaccccggacatcggccactgttggcattttctccaagaaggccc

SEQ ID NO: 333537 - DNA, 116 bp, Homo sapiens
  chr8:101821988-101822104
  hyper
cgctgtaaacgcacctttgcggaacacagacgacacaggaaagacgtttggcagtaatactacgacagcgaggggcccgggaagcccgcggaaacgcaggaggcggccaggagagg

SEQ ID NO: 333538 - DNA, 317 bp, Homo sapiens
  chr8:101920213-101920530
  hyper
cggagtgagaagctcttatccgcaggcaggtcatcctgacatctctctgcgagtctagctgagtctgggacttctacgggttttgaagggaggaagtgtgtgctgattggtccatgggtggccatcggcggggctggaaaaaacaccaaaagttctcactcccgcggtggactccactgggaaccgacaggccccaggcctcaggtcgtccctgtcttcaaagtggggcttcaccgggaccgcccctttccacccgggaacctatctgcctcctgctgccattgacaggtttgtccaccgcaatgccctggctatcc

SEQ ID NO: 333539 - DNA, 339 bp, Homo sapiens
  chr8:102092939-102093278
  hyper
gaggcttccctgcccgcctcggcctcgcttacaccgcaggtgctgtgagtcacccacctgcgtggtgagtcaggggaggaggccgagaaggcaggtgggcggcgcggcagggcgccgggcttcgcggggaggggagcgctgtctccccacgcgcccctcccccacgagcggcttccagaaacccgtttgcccatccccggcaggaggcctccgcccggcttctcgctccctcttccctctccccgaccccctcccgggctgtcagccgactgccaccgtcaccatggctacgcggctcccgctcagttccacagtcagcaggagtcgagcaggggaggc

SEQ ID NO: 333540 - DNA, 586 bp, Homo sapiens
  chr8:102504317-102504903
  hyper
cgctcgacccacaatccctagtgtttgcaggtgttgcattcccccaacccctttcttctcttcaaccagtagcctccaccttcccatccctgctttggagaaggaggaaaacgcagcttgagatctactcgaagaactgaccctcagctctcacaggctgccgccgagctgcaagcatgccgccgctccactcgggtaaacttcggagtgagttacctgcactcggagaagggccttacctgagcgcgcctctgccaatggcagctcacctgagggagctccccagccaatcatcgcgcagctcgtccctcgggcttgtaccctttagtgaaagaattcagctccttgcgagaaagttacctgtggccgcccaagtccgccactttctgctctgtgtctgcccattgccacgatccaggaggactccgcgccgcccggccgcctccgagctcgggccccatgtgaggggcccccccttatcccacctttccggctaggtgagggcgcgagcgggcgagcgagcgagagtggtgaggggggacggaaaagcagaattacctgtagctcttgttctgccatctcgggc

SEQ ID NO: 333541 - DNA, 860 bp, Homo sapiens
  chr8:102505557-102506417
  hyper
cccgcgtgtggccccgatgggaggcgaggcgctgggaggccggggggcgcgggggcggccggcgccgtcccccactccctcgacatcccgccttcctcccccctcccccgcctccctcccccgggtccgcccccgcattgtttggccaccttcctcaggtgcccggggggaaaggacggttcgcgaactgggggaactcatgtgaggcctcgagttagggcctcggcggggcgcgaaggggcgcctgccactgagcgattcacccgcgcccccgacggcgtctgcacgcccctcgagctcgcggccctccacgcagttggccgccacctcggacgcggcaggcgggactgcgtggggcgcgccgagccttctcggggtgctctcgccgtcaaggccgagggctcggggcggcgggaacgctgggctcgcgtccttcccgtcccggacaggcactccagacgcgtcggggagccacagcctgcgcggccggagccgcccgcgggtcactgggcccggtccggccgcgtcctgacggcctcccccctggccggcccccgccctcggaaggctttgtgcgagccgggggaggtggggcctgggcgggcgcgggagggagccggaggtgggtcccgcggcctttctcgggattcggcggggacactcccttccccctcctctcgggcgcgtccgggcctgggaactggctgcgtcctattggaagtgcgcggggccgcccttttgctttccccggtaactttgccgtggcgttgcggccaccccgaggggaccttcctgaaggtgtctcgccggagagggccggtgccccaaggccgcgggccgctgggcctgtcatggagaag

SEQ ID NO: 333542 - DNA, 825 bp, Homo sapiens; identical to SEQ ID NO: 233870
  chr8:104152744-104153569
  hyper

SEQ ID NO: 333543 - DNA, 2917 bp, Homo sapiens
  chr8:104510995-104513912
  hyper
cgcctggaagagctggcgagcccgcccagctctgttcacccggccccgccccgccccctccgggagggctctccgggcggcgcccagccccgagcagagcaaaggacggcggcggccacctccgttctccggccgctggtttctcgtctttcctcgtcctttcattgaacccatctccgtgcttcgaaaatctgactctaacccgatctcttcgcgtctccgcctcttctttctagagtgagcgccaaaaagggcctgacagacagaagcctttggccccagcaccggcccagcccgtctctagacgattcttgctcctttcaccctcacagcctccagtggtcgcttcatcttcgcaccctcccggccaaccctaactctcctcgtctctcctcgcgctgtctcgcgtcctcccctcaggatccttccgcacattctcagcgtccagcgcggtttcccacaacttcctcacgccccgctcccctcgccctgtccccgccctcgacaccacctgcgttccccactcgctccaacctccctcccccgctatccccacttgtgggcctccagctctctgcccctttcctggcccccatccctgacaccccagggacccttcctccctcctcacgttctccctccttccaggatcccgccccgacacttcggggccctcccgctacgcgcactctttctcctcaggtcctgacacctgggcgccccctccctgtcacccaccttcagctccagccctgactctcgggcgccttgccacccttacgctccccgccccgccccggtccctcgggcgcccccactcgccgcctctacctccctacctgctacacctggcacccctgcccccacccctgctcatactcttcccccgcccccgacacctcgggcgccccctcacacgctcctattctccacacttccgtccccgaaaactcgggcgccctctcccttcacgctcagtctctcctccctccccgcccggccccggacccagcctggagatcgcgctcgggaggggcggctgccgcccgcggggcgcccgcggtgcccgggcctgggcagcgaggaggtgacgccgcccccgcgggatgagcccgggaggcggaggggcggaggaggtgctggcggcggcactgagcggcggcggcgcagggcgcgcgggccttccgcgccgactccatcgacccaaggggcggcggcggtggcggcggctgagcgaccctgggccgggcgcgtgatgaggaggggccggcgccagaccccgctgcacgtcggagctcgcctggatccgggcgttggcagccgaagggccctggccccgggactctccgccgctagcccccgtcatatcttctccgctttcgcttctccactctagccgggggtggggtgggtggggttggggtctccgcgggggtttccggccccgcggcccgctcccgggtgtgcctggaggagttctccctctgtggcgcgcgggagccctgtgatgcgtcagccggcgggacggatgagttgcttctccgggaaaccgtcctcgcttcctcacgaccctctcggctcccgcctgggtgcccctcgggccggcagtactccgcctccgggcgctcgaagcgagttccccgggggcttgttcgcaggcaccccttcccctccgaggcggcgcgcgcgctcccggccctgaccgcggccggacacactcgcgccccggtccgcctgtcgccctcccgcctgctccctccagtcaccccacccttagctgtccccgccaccttactccaccaccctcccccgcctctccgcgcactccgcgtcccggcctccagttcccctttcccttgaaccgctcacttcacagcccttcgcccccgggaagaagaaacatttcccgaagcgcactcctcagccctccttccccacgcgctcgccctcccctccccctgcttttcttgggggaggggggctgtcgccttggattgaaggccattgatttgtatgtatttgtcccagcgctggaggctgccccagccgccgcgccggtgccgccgctgccagtggagttgcctccccgcttccctagggtggttcggctccaccaaacatgtcggctcctgtcgggccccggggccgcctggctcccatcccggcggcctctcagccgcctctgcagcccgagatgcctgacctcagccacctcacggaggaggagaggaaaatcatcctggccgtcatggataggcagaagaaagaagaggagaaggagcagtccgtgctcaagtaaggacctggctccatattcccgcctctctccctgccctccgccccctcgcccactgccctgcggccgcctgcgcgccccagttcgccgccctccctcccgctggcggcgcccaggccacgagggctgcggccagcgccggccgcccgggctgttttaggggtgtctgagagcaggggtgtgtgtcggggagggagggcgccaaggccggctgaggtgagggtggcgagccttaggcggtgtgattttccttggcgcctttccggatttcctcgctggtcatcttggctccggggccccagcgggactggggctgaacccaggctctgtgcgtaccctctcctttcccgccgcgctgaggcagtgactggggcacagaatccaatatggccgtgcacaggtgctccctggacggacccgggcgaaggcgcgctggcaggggatgcggacgccaccctggtcccacgcctccgcggggcggctctaccagcaacgcgggacagagcagggctgcccacagtggctgcgagcagcgggcggcggcgcgggctaggggcctaagctctgtcgcggtcgggtgggtgtgcgtccgccgccatcttccagcccctccccctcggc

SEQ ID NO: 333544 - DNA, 807 bp, Homo sapiens
  chr8:105235364-105236171
  hyper
ccactccctggccttaaccacgcggagggaagaggaaacagcaggagctactcggagcagctgcccgggacctgaggcgcgcgccccggagccaccagcccaccgaggtgcagccgcgccgccacctccccctccggccgctgattggcggggaccgcagcatcagcggcatctccctgcgcggggagggcagcgagactccagcagctccagcctccaggattctcagctccctcccgggcgagacctcggacgttcactgcgagcagccgctccgcccgccaccgcctccatctcctcctctggacccctctccaataaattggaggtcccggcggccaggaaagccacgtctcctccgggctgggtcagggaggcaggggccagagcctcagggtcccgtggcaccaacctggcttctggcccactggtcccggaaccgctgcggacgctgcgccccagccgccaagacgccgcgtatcttgtaccgcgggaaaagcgggtcctcgtccaagatgggccggcagggcttggggggtgccagcgctgcggggcgctccatgcagcgctcccagagccggagtagcctgtctgcctccttcgaggcactggccggctactttccctgcatgaactccctggaggaggaagaaggaggtgagacaccccttcccccgtagttggtgtctctatctgtttagaaagtcggtggctggagggttggccggggcagagagaactccacgtagcagtgtcccagcccctctgctctccgggactgtgccgggggcgacagccctagagcac

SEQ ID NO: 333545 - DNA, 531 bp, Homo sapiens; identical to SEQ ID NO: 233876
  chr8:105478766-105479297
  hyper

SEQ ID NO: 333546 - DNA, 1736 bp, Homo sapiens
  chr8:105600489-105602225
  hyper
cgcccggattcggcagagcccttgcccccgaggtggagtggggagaagtcagcgggaagccttttcagggaatcgagtaggacaagggctggcgcggtgggaatctcgccggtgagagaacttcctaaccccgggttgagggggcggggggaaggaccgtcccggcagcggcgggggcgagctcctctgctttctcacagtcaagcatctttgtgtgtggattgtgccaggctacgggtcctggagcaactggccgcgggggccctcgaacccaggtcgggaagtccgcccgccaccccctcgctccgccggggccctcccggccgggccccccagcccctctccaccacccgagggtctggaggtggacgagtggagaaaagcatctccgtgtggggacacccgttccgccacatccaccccctcaccggtctttgtcccgccggtagccagggtctccgcgggagtctccaggggaacccccgtcctggaggcctcggggcccgggtcgcctcagctttgttcggtcagcggggcgcggggacgcggacacttaccgtacaccccagcgaggaaaagcaagagcaacgcagacctccaccgcggagactcttttgtgctccagcgacaggccataaccacagcagatggagagagagaggaggagacggaggaggagggaggagaagctggaggtagacgacgccgacgccgccgccgccgccgccgccgccgccgagccaccggctgctccctgcgctctccgcggctgcgggagggggaagggaggggccgccgccgcccgcgcgcgctccctcctccctcctccctccggctcgcctgctcccaccccgggcggtgcgagagccccacgcggggcggccctcctgggggcaagggcaaggagctcgcgcgccagcgcgagacgagagggtggcggacgccggactccggcctcgcgccgctcgggctagccggcgccgccactcgccagactgagcgcgcgcccatccgtgcgatcggcaatcccctggcccgcctgcctcggttccctccccgcgctccgctggactttccaagtttcgggccgatttccacgcgacgggagcccaaggagcaaggcagcgccaatcgatgacagagcgtgcgaacgccggctgctggatgcccaggggctggagcgcggggtgtgtggaggagcacggtcgctgtccgagggctgggctctggcccagcgggtggggggagggggggtgggataccagctgggaggctgaaggtggttccgtgttgggggaggcgtggatggtctgaagctgacaacttgggagttccttcctctatccggtacccccaagtctccacttgctgtcggcgcggagcttcgagtgggggtgggctcaagttagtgcggccaacctggcagctggtcggtcaaggggcagtgtggactcccacgctcaaggtgcccggaatgagtcgggcaaggcttgtgcagagcccctccagtctggcgtggaagcgccaagaggtcatttgacatctcacgctgggtcgggtgcagctgggccaggatgttcggcagggctggagccgactttcagggtagatatattgaaaggaggattcgcccatcacgctgcagtttccctaaagctcttttctcactcccagcaaatgggagtcctcctttacttagatccccagaacacttttctaagtacgtctgtagtgac

SEQ ID NO: 333547 - DNA, 1394 bp, Homo sapiens
  chr8:106330407-106331801
  hyper
cgttgacgcggtgacaactgcagaaggtggccctcctccaagccgtccccacgcctcccctccaactcccacccacccctgcccccatcccccaccaccgcctggatcccccgcacttcgcccgaccaaggccggggccgtagtttgcatccggactggatttggatgcagccaatcctcctttggctgatggaatagtctcccctccccacagccccggcgcgcccctccctcgcgcgcctcgccgcctcccgccgcagaacaggagctgcgcggcccggagcggcggcggcggcgccggagtatccgtcccgcacgccggggcgaggggcgagcgagcgcgctcctcctcccgcgccctgcgcccccgcgctccccctctcctcgctgctcgctctcccgtccctccctccttctcttccttctttccgtgttatttttctcttctctttccccttttctctctccctgaccgttcgcttgtacattcccattctccccccgtcgctctcctctccccctcccctcctcactgtcacactctctgtgcccccgtctctcttctctcatttgcttgctcatctccgaacgtgaatccgcggctcccggaggagcccagcgcccggagcacctggagtccggccggcggcgggccgagcctggccagcggcggcggcggcggcggcggcggcgggagccgagggagcggcagccgcgaccgcgggcaccgcgggagccccagcggcagcagccgccgccgagatgtcccggcgaaagcaaagcaaaccccggcagatcaaacgtaagtttgcgcgcggggccgggagttggtgggattattgcccaggagcggggtgcgcgggacgggaaagcggtgggtgggtggcggggctaggggagatccgctcccggtcccctagatgtctcaaactttgcctgagcagtcgaagggacaactagacagtcatagacagacagacggccagcccgagcctcgggcaggagagaggctgcgaggagcagcccatgcttgccccgctcagccctcgcgctcccgggctgcttttttaattccgacccgcgcacgctgcgagtccccggcgctgtcgtccagccggaggggcagtcccgctcctttagacgcttattattgttgttgtcattgctttgtgcgattgacgtgggactactcttgggaaccacttttagtaaccagggtagaaacttctcagaaaagctgggcggtcgagacctcggggcgagggaggtaacttccccacgcggtggaaaatcagagcgtcagggtcccgatcctgggcggtgccagagccacaccaaacccgaagcgaaacaaaaagtaggtgtaaaagttcgcgcctctgcggcgggcggcc

SEQ ID NO: 333548 - DNA, 1947 bp, Homo sapiens
  chr8:107281820-107283767
  hyper
cgctccaagctgccttgggtccctttctaggctgtcagacttcgccttcctttcctccttgtttttcccagcaaccaaagcatctgaagaacatttttttcctccgtaaatctgaacaaatttccttgcagctttccttgcagaagcttttttatcgctttaacaaaactttcctctgcttctctagggagagcctagtattagagctgcccgacaggcgggaccccgaaatcggggcagctctggcttagtccaggctattcgagtgggcgcctgaactggaggcgccgtctccaccgggatggggatcctagtgcaggcagacgcctggcaggactcggcgagctggggtccccaccgcggtagccagagcagaaacccgaaccccagccagaggggccgcgcgcggggaggggtgcgcgctaagccagcgtggcttccgcaggagctatttttagcggtgcgtgcctccccccgcccccggcgtggtagcctccggctcgcggcgccccacggctcctctcagtctcccccgccgctgccggctcttggtagcttccacgcgggcaggtccggaaactgagcatgtctgcaagcgctcagcggcgccggcagcagcggggctagagctgggctgcgtcaggctgagcccattcacctcgcggccacaggagctcagcgccggcgccgcgccgcccagccccgccgagaggggcgcactcgccgccgcggggcccgccgccgctcaccgcagccccctcctggcgacccgcaagtaagtttgtgaggctgctgggcgttagggcgagggcttggcgcccgggggagtccaggagggatagcgagaggcgcggctggcgcccgggagagccggctggcctctgccccctgtgcctggcgcctctccgagccacttagccaatttgaaagcgggtggccattgggatgctcgagcggggacgacgggcagagcaggagggcagaactagctccagcgggggcccagagggcggacttgggaagaaggaaagaccgcgcggcgagggaggagaccgggcggcgagggaggagaccgggcggggaggctgggtttggggcgcgggagcccggccagggacagccgcagaaggaaagtgggggtgtcgccgggggatagagtgggagcagcgtgagagcagtgttgggggcgcagagtggagggcaagcgtgtcttgaacagaacggcaggaggatgggtggaaagtggggcgcgtggaaagcggatttggacgagagcaaaggacgccggtggaagggacagtgggctccggaggggcgagtggattcggataatttggggaatcagtaaaaggctagggggcacatcatgatggagtcagcctggaatctgtctcccgctagagtacccgaggccacatgttgggaactggctggggaaaggatggatgtagaaagtggcctggagggccgactggaaaatcgctgagggatttgggtgaagagggggggagctgtgcagtatcgggcggaggaactgggctgctggtagggcctgaaaggttcaggagagggttggaggcttccccgtgccgccccttgaatagtgatttagtactgttatctgaggttcactttcacccctggctcctcctccgtctactacccggcttggacgcacctcggctcgctgtaggcgagctttaggagatttaaatagacattaggcagtggggaaggtagtcgtttacggggggagctgctcgggcttccgttcagtggttcccggcacgctcagggtgcagtgtagggtctgaatgtgtgtattgcgggggtagggggagtggtgtcagttctaggccacaggaattcgtggtctggccccagaggtgcggtgtttttggccgggaagtcaggcagaagtctgcagcgtgcaactcgcagcggggc

SEQ ID NO: 333549 - DNA, 1702 bp, Homo sapiens
  chr8:107669381-107671083
  hyper
cgcaaactaaatccctcaataacgttgcctaaacaggactgggatcatagaatgtccaacactaacatgagttcataatggcacaacgaacttaaaatgttactattcatgttttaattatgattgcagtcttacgttgaaggtatctccgccgtccttaaacataaaaaaaaaaaaaggaaatacaagctgcaaaagttttatgtaatgcactccaccctcttttttccccaagccaacacacacccttcaaactttttgacagttattttcagacccctcctaggctcccgaactccatgcaactccagcagtctcccctgggccatttttagcctctgctctgacctggcgggaggctgggtgtccaccctttcccctgcagtcctgaaagtccggtccgagcgcggacggggcggggaggggctgggcgggccaggccagctccattggcgccaggcgggtgggggaatgcgctgagaggacccgtccagcttgcttaaaagccatcagttttctgaccccgcatcggttccaggaagaatacacctatgtgacaagctaagttctgcctcattttgcatttagaagccacaagaaaaacttttcgaaaacttttgtccgtcttttgctcccccgacgcgtggtttcctgatggtccgtccccgggcagagagagggacgccccctcctcctccccgcctcttgtgaggcgcgcggagccgcctcccctgggtcaggtctgatgggccggtgggcgcgctagtggtggccgccaccgccgaaaccgtcgacctcctgggccccagttccgcgtccagccccgcggcagcatggactacctgacgacgttcaccgagaagagtgggcgccttctgcggggcacggccaaccgcctgttggggttcgggggcggcggcgaagcccggcaggtgcgcttcgaagattacctgagggagccagcccagggggacctcgggtgcgggtccccgccccaccggcccccggcgccgtccagcccggagggacctggtgagcccacctttctttcgcctcccgcgcggccgacctgggctgagggctgtggggaggcggcggtcgtggcgccgggcgggggtcgctgcccggctctggcaggtgtgcctgggccggggcgggcaacgtggccggggtggcggccgccgggggcgaggaaggaaggactcgttcggctctggggagggaagactttcagctgcgtgccagctcttcctgctctgctcttcctgctttcctcacctagacttgattttctttccccgccaagtatttcaaggggacgatccattctctctttccctcccactgggaggtgaagactgaaccagttatgacgtccgtgttttcagtcttggattcttgaagagcgctgtgcctgctttggttttggtttgggtcagtctttccttaatatttctcagttgttaggattcacttcctaaccgaaaaataaaaagccagatacttctttgtaaaataaaacacttcattaacattggaagctagttgacattttgcgtcgtgtactttttgaacggctgcacgttgtcttgtggtggcagaacctagaaactttctcagttcctgtttattttgtgttgtgttggccgatttttttcaccacagtggctttgtaccattctttaaaacagtcatttgtagc

SEQ ID NO: 333550 - DNA, 218 bp, Homo sapiens
  chr8:108509538-108509756
  hyper
agtttctgggaagagaaatccggttccacgtgtggagcatctctctgcagagcgtttgtgttgtactggtctgtcgtactctcacgacagttgccatcgtgttctggaagaatgaaagtgtaggcacattgcccatgttgaatccggttatatcttctcccactgttttctggacttcggcgctgattgctgcaccctatgtgagtcagaatggcagc

SEQ ID NO: 333551 - DNA, 924 bp, Homo sapiens
  chr8:109093657-109094581
  hyper
cggcgacaaattctaattgcgcaaaagtccaaagtgccgaatgaaatagacagctctcaccaggtccctgggaaggggctgctgcgcgcccttcctgcgcgggtaattcgatgtgcgtgtggtgagtggtttatgtttaaatccacccagaaaattgaatcgtgtctagccgcccttcttctaaaatgcagttggattagttgcatctccagcggactccgagacagaaatacgcactaaatctgcaggaaagcgagttccccgaaacctttctggaggcttccacccgccttctccgctacgcacaagtgatggagagggagggagcagttaaaaagccgcaagtgaatttcattgagaacagaagcctccaccggtgtggctgcttttgcaaagcaaatggagagagcgaagtggggcctgttttaaaaacaaacctctggaggcgaggactccccagaaaaccagcgcgggaattgctgcttaattcagaaagttcccatctcgtcgcagtttccagaaaaaagagatctatgttggcctttttctggaaagggaggtcctccccctcgacttggtacccctcccaagctccggaatacagacacacgcttgggtacacccacacaccacacacacactatgctaggtcaagtccgaagagatctgaggccgggtttggggcgcacgtggatggggaagataaaacaaatgagctacagggaagatggttaggaggacagagagaagaacaacgacgacaaaaaaaaaatgcatgtcagataagaaatacgtcctaaagagacaagtttagatgaggaggtggggcggcgaacatgagtgcggaccgcacgacttagccctgagcgcccgattggcgcccggctcgccgagctcccagcgcgtctcgctccggctccccgc

SEQ ID NO: 333552 - DNA, 756 bp, Homo sapiens
  chr8:109799189-109799945
  hyper
cgatttcctttgcagctccctaatccggggtttccattctcagtggagaatggataatcccaggggaccagctaaagactcttttcttccgtcctctccctctttttcctctgatctgcttaaaagcccagttaacgacattgcaccttaaagcgaggggacacgcactttccctcgtccatctgtcatcaattaaaagcattaatatttgctttaaactgacacaggcaaggctgatctcggggaggcgacctctggatgcgccctgtgcgagcaaagccgggagagcgagccccaagcacctggcagcggtgcccccagcaggcgccgaggaatccggctatccatttctggtgaactctgcgcccactgaggcattcgaggtacggatgtgtccgcctagtactcggagacgaaggagagagagcggggatatgcgctccagctctgctaggctccagggctctcacccttgcattcaaagcctccaccccatcccactccccgccactcaccttctgcttcggccacccggtgcggctccagcaccgcgcgctctcccggcacggttcccggagaaagtcccccaatcaccagctacggcacttgtagcctctgcacgccgctcggctccgccgggtgggcagcgcccgccacggcgggcggggtggggcggggcggggcgctcccggagcatcccgggagttgtaggccaggggcggtccctgcatccctcctgtctctgtctcctcccac

SEQ ID NO: 333553 - DNA, 284 bp, Homo sapiens
  chr8:110552612-110552896
  hyper
cgtttcacgtcacgccgggcgccaggcgtcggcttgtataacctgaaaacgctcctgtttttctcatctgtgcagtgggtatgatttttttttcatcaacaaatttcacgtgggtaatctgaaatgaaaccacttaagttatgaaactctttccttttgagttattctggagaccttactccgccttcggaaccgccccagtggtgtcacatacttgagggcctgactctcggttgccagacatggcacagaatgttcgattttactaccagctctcacactcc

SEQ ID NO: 333554 - DNA, 1282 bp, Homo sapiens
  chr8:110986113-110987395
  hyper
cgcgcccgcctccccgcccagccgccgcgtgcctccggggtacctgtccctgcagcaggaatcgatgctgagctcatcgatgccccagtactggatctcctgcaggaaggagagcgcgcacagctgctccatgacatgcaggcggccggtgcggtagtagtgcaggacatatcggaacgcctgcgagctgcggtcgaagaagtactcgttgtccacggggttggcatcgtcgcaaagctccagagggctgggcacggcggccagggccccggggcggcggtaggaagccaccaccacggccagcttgccaaggcgcgtgtgcgggaagcaggacagcgcctgctgcgagagcacgaagcggctgccgcccacgttgaccgtgaagcagtccccgagcgccaagggctccccttcaccctcgctgcagaagacactagagtccagggaggtcagggagccgctgtccagcggcgagtccagcagcgctctgccgctggaaggcatctctaacccagtcgccgcggcctgagggcgccacaaagttggggacacgccggaagctttggtcccgcgagggcggtggcacggcccctggtggcggccgggattccccgggctcccgaaggggttacctctccttggcgcaccctctccacccgctgtgcgccttcctcctcctgccgctagggagccgggagtgcgcggaagcagcgcacaagtggcagaaagaggagacagggagcagaggaagggtcgcgctaagagagaggatcaggtgaggtccaagcccgacacagtccctgtgcacactgccggtcgccctggcccttcccaaacgttgtcaccccgcctcccaacttcgcaattgcgattcccagcccaggaggtgtacagattgaatgactcgctacttggtgggtggaggggttggggaagggaggaaggagggagatgtggggcggaggaggaggaagaggagagaagatgactcttagctgaacgcaagcaagcaagcaagcaagggggatggcgagactcactcctgcccgcaggagaccaaaacaaaaagttcagaaagcaaaggaagtggtaaccgggtcccttccaacttgagaatttatattcctcccttttcttttactgctgcttcataggcctcccccggggtgttcgctgggggtgtgagcaggtgggggagggttctctgggtgagggggccgcaccattttctcccaattcactctcattctagtctgatgatcactgacgctccattttcttc

SEQ ID NO: 333555 - DNA, 640 bp, Homo sapiens
  chr8:110987616-110988256
  hyper
cggagctctcattttagaaggaaaggcaaaaagacaaggaatagaacaagcgtgggctggggcaggaatttaaatagtaacgacggcctccctcggtaaagggagaagccgaggccagcgcccaggtgagactagaagtgtacccacggggcccctggaagctgcgctccagccaacctgttggactcggggtgaggaggtgggggtgggagggaagagcaagtgactcacctgcagctcccggcacatctggtctgcgcacaaccggcgccgcaggtaacgtactcttcttttgatcctcttagtctacacgtgaggtctgactcgaccggtccaggagggaaactgtgttccagctgagctctacccagcgcctgctgccttgccttgccccgcctccacctccctccgggctcctggcccctgcgcttacgctaagcgtgtccgccccgcccgctctagctctgagagccactcgcccagtgcttccagcaccagcagaggggagtggcaggatctaagggagggaggtgagacggcgggggtggaggcggggggtagtgaggtgcccggtgacactcaatattacattcatcctgaatacacttgcagaattactgcatttgattcccgtttcccc

SEQ ID NO: 333556 - DNA, 823 bp, Homo sapiens
  chr8:114444394-114445217
  hyper
cggaaagtacggtgctgcaaaaggacatttcagagcgctttcaacaagctaactgtccagtgaagttcagctccgaattctggtaaccgttcaagccctgtcagtccggtaaattgggttaacttagcaactcggtggtgcaaagcctccccaaagacaagaccgcattcagggagaagagaaccagcctcatgcctgagccgatctttcttcctttggttgtcctccttcattattattctgcaatgcgcagcaatccctgtgcgtgcccctgtgtcagccccttagctggtcactccagcggggctgggagaagaccactttggctactcagatggcactatgctgtttaatttcttctgctctctccctcagagtctaactaagcccttgcagcacttgagccgggggctgccctcctgctggcctttccgtcgtcgttgaacggatctgggggacggggacgttgcagaggagccacaatccccactcgttgtttccccaatgtgctttccgaactccccgagtgcgtcttagataagttatttgagtgaggacagcgctgcggtccgcctggagaaagggagcttcctccgcacttctacttcatcgtgacagcagtggtcgcagcgccactggccatctggagtcctgggaacattaaagcgctgttacccgccaggcgtttccgcctaggacacactcacacccaccctcggagactcctaaaggtttctccgtgtcaattcatgtgtcctcctcccagcagcacacacgcacacacgcacatcaacagccaagtcagccacccagtttcaacttc

SEQ ID NO: 333557 - DNA, 924 bp, Homo sapiens
  chr8:114446946-114447870
  hyper
cgattatatcagtccaaagtaaattaacgcgcctttcctttctatcggcgcatctcattcggaaaatacggtaggtgcgggcagccggggctctaattgcaggcggcgcggatcagcgttagtcaggctgtaatgctcgccccgcttcggagacttccctccccctcatctgcccccgaatgtgttttggctcaacaggtatcacatgaaaactcgcacttaaaccctggtcatcttctcacaggagccacccttacatttttctgccagggctgctgctggctattcgcgcctcccccacgcgaagcgcgcgtctagcaggcagccccagggccatccattaaccaccaactcccagtggcaggcgaactaagcataaatgtgtggctcctcacccgtcgagccagcgacaaagaaaccttgtaagcaacctgagccgtgctttgtacatttggcagtgtagttgtgccacttaggacaagcttttcggctcagagctgctctgaggccccagagagaaaagaaaaatcaagcttcaaggagcaggttgggattacaaggcagttgctgccacagagaccggggcgactgacttcctggcattttgggatgtaaattaaaattctagacatgccacccatcattggttatagtagagggaaaggtaacctctccagctccctcctcccaaaacatgaattatcatttccactgaatgcaaatgagctgccttccgtggggggacagccagctgcaagctggacaataaactgtttcatagagacgcggcccgattgcagttcagagaggcactcctttacaaaggaagaagcgtccagtttgtgttgacagccctggcgcgcctgggccaaaacagcaccccctttcccgcgatcccccgcccccccgcgacacacagacacc

SEQ ID NO: 333558 - DNA, 1366 bp, Homo sapiens
  chr8:114449054-114450420
  hyper
cggctttcccctttgcggatccctttcatattattcgcgagctcctaattcctgctcctcagcccggcgcagtggagttgttgctgttgttggtgcgcggtcacagctcggagtgaatggtgtttctgggataccacagcaaccttgacgaggactcaaccatctctccaacgggggcacaaagtctccgctactctggattctgtcttttcttgtgcgttttttcccctccaccaaaatctaccccaattctggctcgttatagcaaccaccagaaaccactagtgagcctcttaaagcccacctctgctctctgataaactccacacaatatttgaaattaaggggcttgctttttttccccgaatagatcaattctgcctgtaaaagcagcccaagaaataatgttagtgagctctccgttgcaggctgcgaatacagaagcatgtcaaaggaatattttaatcggaggatctgtgttgcttttggggaaaccgtgacgataatgaatcgggctccatcgatgcccacgtcgttataatgggacatgtgttactactgtagttgcagtatatttcaggcaggcttctcccatttattatcctgtgatttaattgaaaaaggaaatcacagagaattttctcaataaattctgccttcacacggaaaagaatgtatttgaacacatgtatttacatactcaaataactacgtgtaaacccttcaccgggtttttatgattcgggaaacggatttcatccgtggcctgggcgggggtggggtggggagggaagtcaatgtcgtttcctcaaatagttctccctttcatcctcccaacccccttttcagtttgtgtgtgccgcagttaaactactttatctgtggtagttatctagaacaaacccatttgtcttaattctgaatcggtaccaaatatgtaaataggaggtttctttcaaaacgaaaaatgtatgtatctatacatctggatctgcttcccccatgcaccacgcaagggttaagattgcacaagggaagagttcttgcgccatctactggccgtctccgagccgcccgttcttccttcgcatgtataagggaccctgtttttgccatcccttggtgtcaggggagctgtgtccccgggaccagtatgtcgtgctccttgatttttttcgaccacggtcctggcccaaatctttcaatgaacaagttccttagattaggcaactgattggtgatctgaccttttcgggaatctggtcccctctcagcagtggggagtgccacagcgctagttctgaaacaggatattgctgttgcgtgtggctccatttaactgcctcaggctatcatgggcgtgagc

SEQ ID NO: 333559 - DNA, 519 bp, Homo sapiens
  chr8:117950439-117950958
  hyper
tctttcagcagcagcggtagagcagtgaccaggcgtctccgcgatgggccccggggacttccgccgctgcagagagagaatttcccaggggctccagggactcccaggtagagcggagctttggttcccacctcgtcccgcgtgcgacttcttcggggacggcaggagcacggacatccaggaggaggccctcgccgccagcccgctgctggaggacctcagacgacggctgacgcgcgccttccagtgggcggtgcagcgcgcgatctcgaggcgcgtgcaggaggcggcggcggcggcggcggcgcgggaggagcagagctggacgggcgttgaggccaccctggccaggctgcgggcggagctggtgagagagcgggctaggcggacggctcccagggctccctctcccgggtcctctcctccagctgcagagccgctggccgcgtagcccacccgacgccttggggggcccctcaggtctggacacggcgttgacgcccccgcctccccagcatc

SEQ ID NO: 333560 - DNA, 192 bp, Homo sapiens
  chr8:119123513-119123705
  hyper
cgggagagagcggggctgaatatctcgcacccagggcgggcgagcagcggactgtaattttcttgcatgcaacaagacggaggaaaagaaagagagaggggagaaaaaaaaagctcccgatacccaatcaatggcaagacgaagtgattgccttgcctctcggattcctctcggcagcgtggaaaatgagcc

SEQ ID NO: 333561 - DNA, 853 bp, Homo sapiens
  chr8:120220368-120221221
  hyper
cgatcaggggtatgggggtgcgcatggagacgcccgcggagcgctggcgctggccagcggagcaggaggtgaggtcggcggagctgggaggaccgcgcctggcggctgcaatagccgcacctgtgcacgtgatcgcgagcggctcgggcgccagggcggagcggcgctcacctgggcccacgtgacggggcggggctcgaggagccccacggccacgcctcctcccgcgcggcgcgcccggagcccgcggagctgagcggcggcggcggcggcggcaggagcccgggaggcggaggcgggaggcggcggcggcgcgcggagacgcagcagcggcagcggcagcatgtcggccggcggagcgtcagtcccgccgcccccgaaccccgccgtgtccttcccgccgccccggggtcaccctgcccgccggccccgacatcctgcggacctactcgggcgccttcgtctgcctggagattgtaagtggggccgccggagcgagggtcgcgcggggagcgaggacaggcggcggcatccttgtcccccgggctgtcttcctctgcgtccgcccccggcctccttcccttcgacgtggctttgtcctgcgctccctcccggggtcctctcggtgccccgcgccgccgcccgggccctccctcctagcacctgttacgcgggcacctgctcccccgcgggcgacggaaattgcctggggagggcgagtaggcggcccggcagggccgaacattggggacgtggaggaaagaaaggtgttggggctcagaggcgcctttagaaacccagggcatggccaggggccgcgcttggccggagcgagctcctggctctcggcctc

SEQ ID NO: 333562 - DNA, 885 bp, Homo sapiens
  chr8:121136702-121137587
  hyper
cgggtggggaatcagcaggttatgaggtacaaccacacgaaattgcctacattcgtctttttgtaacctacagaaatgtccatttcgatacctccagctgattcccctgcaccttaaagtttgagcatcgctgctttggcgttttagagcccttggacttgttcacaagaggaagagggagaagaggaggctcgaagggggcctttatagtggatacctgtttcactcggagctcagggtctttgacgcgggaaggcaaagtctgtcttttggaaatggggaagtgggcacacagcacctgagaacaggagggctcgagacctcccaaagagagcagggggcctggtttgggagcttgcagtagcttctgccccagtggaagggaaagagcctggctcgctctcggcgcgccacatccggctgccgcgcgcacctggggggaccgccaggttcggggtaggcgagcgcgtgagcggcacggggctggcttctccacatctccggtagggcggggatgggggagaggaggaggagagaaagtgggggcgttatgggcttaggcctgcctcccacctccccacctcccgcctccgcggccaccctccgctctataattggctgccggcgggccttcctttcctcttatctgatcctgggctcccagctggagaggcggaggcagctccagggggctggaagtggaagcgcagcggcagaaggagagggagagagaaagagagagaggctaattaaaaaaggatactccgagggaagagagcaagggcggtgcgccgccaaggaccaactagcggcggagcttcgatcttgcctaggcgcggagagctcccaacctgggctggaaccttgcccagcacaggtcagttc

SEQ ID NO: 333563 - DNA, 596 bp, Homo sapiens
  chr8:121823361-121823957
  hyper
cgccacccttcccccccccccaacacacacacacccggccccctggggtgtgtccgcatgtggccgagtgagtgtgagtgtgagcgtgcgggtgggaagccgagcaggtgtgtgcgcgcccggcgcggcccgcgcgctgttaaccccttaccttccagcagcacttccttgcccgcgcgcttcaacgcctgcaccgcctcgtcgtgggtggcgtcccgcaggtcggctccgttcacggacaggatggcgtcgcccacgtacagggcttgggtctggtccgccgccagccccttgaagatcttgctgatgaggatgggcatcttgttctccttgccccccttgatgctgatccccagcccgcccagctcctgcttcagcaccttcacgccacgcttctggttcgagatggactcgggcacctgctcgggcaggtcggtgaaagcggtgcggaccccggcgggcgagtccgggggctgcgcgccgcccgcgcccgggtgcccagccccggcgcccctgcagaacgagccattggtggcggtcccgatgccgttgtacgccgcagcgccctcctcgctgctcagaaccagggcgtcctc

SEQ ID NO: 333564 - DNA, 376 bp, Homo sapiens
  chr8:121824316-121824692
  hyper
aagaaggagagaccgagacaggggaggggaaaaaagccagcagccagttgcaaaaccccaaagcaaggggagccgcggagcagctcagcgctggagagagtccgtgggaggaggcacgctggcggtgaagggcggggacccacaacccagcggccgctcacctgttccagccgccgcagcctcggcggtcacacgccacccgcccgcccagacctcccctcctctgtccccagagcgcacgacgccgcggggacagcttcccgagcgccttccccgtcccgcttctctccagcccaccgcagccccctttcttcccagctcccccactccgtgggcgcccacactgcaccttcgccgggtgcgtgcgtcccgcctc

SEQ ID NO: 333565 - DNA, 608 bp, Homo sapiens
  chr8:124172800-124173408
  hyper
cggcgacctcccggctcccagacctggctgagcccggcggccgccaggggacgctgtgcccaggggttgccgccgctgccccgcaggtttcggctttttccaaattagcctagggacacaccgcgccactagccggtacagggtaccaggcccgatccccacgccaaggtggccccatcacccagacctgcccagggaagggaggtagaacaggagttgggggtgggggcggtgcagatatttcgctccgtaaagtgtctccagcttttaaagatgtatgtccccaattttccaagaccttctgagccttcgagtggaatgaaactcgaacggcttcccagctgcggcgatgaggtcccgctcctgcagaatcccggcaggagcggagactcgggaggggaccgctggctgcaggcgccctgctggagtccggaacgagggtggtcagggtcgcctccccacggggtcgcagatgagggagtggggccgcgcagggaggctcctgcaggccgtgacccccaggcctggcccgtagagagtgactgatggcgaggacccgctggggacccgagggcctcagcctgcgcctgcgccggggctccccgacc

SEQ ID NO: 333566 - DNA, 79 bp, Homo sapiens
  chr8:124778505-124778584
  hyper
cgtaaaggaaggacattattgctaaacgaaaaggtgaggtgctgtaatgagtgtcacatgtggagtcagtctagtgagc

SEQ ID NO: 333567 - DNA, 334 bp, Homo sapiens; identical to SEQ ID NO: 223479
  chr8:125985497-125985831
  hyper

SEQ ID NO: 333568 - DNA, 971 bp, Homo sapiens
  chr8:127569937-127570908
  hyper
cgcctggccctggcaaaagcccattgcatcagcagcttctactgcttccgcctgcgccctacctgccaagcttgggcaggaagagggaaggaaagagaaactttacgccaatcccccccctcctctgctaacttcccctcccaccctcgggccctaactagccccggggacgcctcctccccaccaacgcatccatccccagaggaacaagcgaggatctcagagcgcgacctggacaggtgagtcaccctacctggctcacctgcagcgctacctcctcccggctcgcccgcccttcccccgcgcccgccctcaggctcgggttacctgcacaaactcacccgcggagaggtgaaggccgtggggcctggggaagggctccctgccgcgccccgagacttctagggcgagtttgaaggtgtaggctcggcagtccctcctctcccggcgcgggcggcagcgaggctgggcagagggcagcgcagcgggcagactaggggcatgtctttcccccgcggctgcgtagcgccccgatacttgaaggcggggggcaatccctgttcacaccgcgcttcctcccgccagctggggctgctgcccctcctcagccagctctcgggggaggtggggcgcgaggaggagaggacggcagcctcgcagcctggcggcaacagctcccgcttgggccgggcgagcaacaagcaccggagctggagggacgggattgtagatccggctccgggctcccgggcgggagcgcagcccgtggcatttaaagagacaggcgctcactccccgagctcgggtctttttcacattgcgccgagcggccgggagccccgcccccgccccgcccactcgggcctcgggactccgcccggccacgcccccgcgccggagcgggtttaaatccccctgtaaataatccacccgccgcctggggctggtgctgtgagctctgcttgccttcc

SEQ ID NO: 333569 - DNA, 278 bp, Homo sapiens
  chr8:128806660-128806938
  hyper
cgggagcgccgggaccgaggacgcacgcggcgggccgggccgcgcgcgcctcccccctcccccgaggcccgagcgcgagccgccgtgacgtcacgggcaacccgccagccccgcgctcctccgggcagagcgcgtgtggcggccgagcacatgggcccgcgggccgggcgggctcggggcggccgggacgaggaggggcgacgacgagctgcgagcaaagatgtgccccgggacccccggcaccttccagtggatttccttgcggaaaggatgttggc

SEQ ID NO: 333570 - DNA, 1205 bp, Homo sapiens
  chr8:131455079-131456284
  hyper
cgctctcagaaaacgcagcaggtcccaaaatggtacaagcagaaaacacaagccacttcacggtccgcccaggagccaaccccaagctccaagtaggactccccccacccccttccctttcgtttctcttcttttgctttaggcaagtggcctggggcctgccaagcagcgccgggtccgggtaggggccgggggccgcggggaactttcctcggctgcaccagagacaatgccgggagggcgccccatcggcggggtccgggccgccaagcacgtcgtcccgggccctcccccggagggggacgcgaaaccccccagggcgggccccgtccccggccccactgcaggggccccctctcccgagctggaggcgaggagacctcccccccccaccgggcggcctcgcccggccccgcagagcctggccgcgcgtcccgcacacgccccagcccagggccggcgccctccccgcggagaaggacaccccgctgcgagaggagccgggagcccgccccgcgccccgtcccggcgcccttcttcgcgcgagagactgggcagggggcgcccgcgactgtgggcgactccgcccggccccgccgagcgcgcccgagcgccccgcaactcaccgggacctggcgggccgctgggcattattccatcgcgggttcggccgggcgctcgcggctctcgggtgggaaagcgaactgcgaccgggaagcgccggctgggcgggaggcgcgggcccggggctgcccagcgcacagtgctcgcccgcggcagcggccaggccaggcgaggcgcgggagccgagcgcggcgcaggaaggggcgggcgaccatgtgccgagggggaggaggccgcggcgacgcgagcggctcgcacgatcccgctcggcggcggagggcgcgggtttcaggaaatccaaacacttcgacaggaaatcggaatcctgactaagcattcccggccccgagccgctccgcgccgggggctcccgcctcgcttaacccttggcccgccggcagccacgaggggggcgtgggaggggccccagacctcggccggggtcgggcgtccttcgccttccgccccatgccccggccggccggcctcctccccgcctgaggtggaaggggtgggatttatccacagaaaaccctggacgcggaaggtgcctttctaaggccgggacagcggcaaaggac

SEQ ID NO: 333571 - DNA, 2397 bp, Homo sapiens
  chr8:132051950-132054347
  hyper
gggtccatgggggccgaggccaggctcaagtgtaggaccaagagagtgagtttggtcagcacgtccagcacgttcatcaccacttccgatttgcgcctttggcccaagaaatagcgctggtagaggcgttccaaatcccgagatttgaaggagttgcgcagggtggggaaaatgacccctcggtagctatagcccccattaagaaagaaatccgagttgctaggggcacagtcaaggtgcaggaagcccaggtcgcccccgcctccgctgccgctggcactgccgctcccgctgcgttccgggaagactttggtgccgcaggtgctgtgcgctcgctctcccgggcccagcgagtagaggggcagcgccgagtcgcctgacagctgcggcgcgtggtggttggggccgccgcccgcagggtccgaggctttgcccgagcctccactcccgctgccgctgcctccccggtgcccgtgaatgaagcgctgctccgtgatgtgtcgcaccgccgtctgccacagcagccgctgcggccgggaggcgctcctgccgtcgccggccgggggcgtcgggtggatggtgtagagttcctcgctgcctgtaaggcagcgcacatcggagagctccatggctctgggccgcagggaaggaggcccagaaccttggggaggcagccggaggaggggttcctaaagactcaaaggcggcctggtaggagcttggcaaggatcctttttatcctaggctgccccgttgcaggagccctgcgctagggctccctgtaggtcgggtcatactgtgcccaggggcaaagggcacctggaagatcgcggcggacctcggcgtccttgcgtgctgctctcccgccagccggcgcagcttgggtacgcagcggcagtggctatttgtcctcaggagccgcagcgctgtgagccacgcagccccttcctgggctcaggctccttggttgattctaggctcagcgttttggcgcagcctttgctctccaagagacgcctaagcgcctgggcgccgtgcttctgctgcgcgtcgggcgggtcctggctgctgcactgggctttggacgcccactgctccgcggctgcagggggcctggccggcggtgaccggcggcagcgatgggtgcgaagttagcagatgtggctggaatcatcgcccttcggagaactccattgcgccgggatggggagcaggggcggagctgggggcgggggcaaagaaggaggaggagggggtcacggtgaggtggcggggcgccccgcgacagggttggagaggtggtagcctcggcgctaacaattcaccaaatagttaatttggaggaaggggtatgctgaggctccctcctaggctctttcctagttcgggagcaaggactgacagcgcagcgctggctctggccagaagcatccctcccggagggggtgtggggactctcgctccagggtcccagcctgagctataagacgaggtcaacgctttcagctgtgctttcgaagggtcgcagcacacagttctcatcccctttatttcgttctttggagtccatttggctcggagctaggaggatcaggagaggcgggggaaggaaaaagtggtgagggctccaaagccaagagctccgagaacgaagagaagccgccggtgcggatatctgaggctgagaaccgaagcttggcggatgaggcgaaggtttggaggagaagggaggcccgaggccgcgtggaagtcgacagagacgcctctggatctagggaagcgccgccgcgtgccaccctggagctctgaaacgcaccgcgggcgccaggcgactgggagaaatttggagacctgtcagagtggtcagacacccgcggtgacttaaacccgcccccgcgccaagccacgcccccggaaccgggccgggggtggcggagggacctgccatccagatctggccaggacgccccaggtcttgtaggcagaggcacgcgcgggccggcgtgggagaggaccactgagggctagggccggcgggcgcccccggccttccctgggcgcactgcgatccagcgttccagctggccgcgccagccggttcctccgctgttcttttttaggcattggctcttgtcctctgcaggtgcggagccaggactcgtaggccgctttgcgcacggactcggagagcccagcgcgacggaatacagggtttccttttcgcccttcctacccgtgcgtcttttggcaaagccaactttcgggctaaacgcaaaatcccccaagaggccgcaatcatagaggcagtcagtttcctacaggagcctctttactacctcgatccgaagggggtggagggtacgggacatcaaaatggggacgtcccctgcctgcctc

SEQ ID NO: 333572 - DNA, 267 bp, Homo sapiens
  chr8:133491923-133492190
  hyper
cgcacccctcccatccccaactaaactcagtggcgatcccaacagaagggatccacccgaaacagaaacacagagctcacgggaggacccgctttatcctcttcaaccctcacattaattggaaaaacccacataattattttaagcttccaaaccaacacccctagaagatgtcataaatgtgcacccgcgcgcgcacacatccgcccaaatcagcaggggaaccacgcttcgttttttaagcccctagtgtggaacacccggaga

SEQ ID NO: 333573 - DNA, 1533 bp, Homo sapiens
  chr8:133492250-133493783
  hyper
gcgtgctgaggacgggctggtctccccttcagcgggaaagcatccatgggtcttaaagccccagagacttctcagctccagccccgaccccaagtccccaagcgcgccgccgccgagggcgccccgagcggccgggtactcacaccaacgcgtggtaaagcagcgcccagccccgcggtctctccagggcgtcgtagatcaaagtttggatgcgccggtacttggcgttgtttctcttgactgggcggctcagcggggtcttggccaggagcccgatgccctgcggggtcctccgctgcccctcgtcgcggccgccgccctccagcagcagggtcccgtctttgtcggctccggccccgagcgccaaggtgacttgctccacgtcgccgggcgccagccccactttccgctcctcgtcgccggccgccgccgcgtcccctccggctgggttagccgccccgccgcctccgccgcccccgtcgccgccgccgccagccgcccccgccgccctgcgcgccttgagccccatctgcctcgcccccgccggccgcttcgccttctccgctgctgctctgggaagaaggggcgctcggggtgcgtgaacgaggcggcggcggcggctgcaagcccgggaactccaatgccatgatccgcgcgcccctccccacccccccccaaaagcaggcaaaggcgggccccctggggggcaggggaggccaggcagggggtcagggggtcacatcccgcgcgggtcagccgcaggaccccgagggtcgcgggccgggggctgcggagaagctgggagggcgcgcgaggctggcgcggaggcgctagggcgcgcggcggcgggagcctggaaccggcgctccggggcggcggcggcggcggcggcacccaggccggcgagcccaagacagcatcgcagtttatttacaagcccggtgccagccgccctcccgcccgccagccacacgcgccgccgccgccgcctcctccctcctccgcgctcccacccgcgcccctccccgcccgttccagcctcagcctgtcagcagcagcagcagcgagcgcgccgcgggccgagagcacgccgcgtccctccctccctccttccccggggtggggccccattgtcccgccccgtcgcggcgggaggcccgggcggcggcgccccgcctcttcccgccgacccccaccgctgattgtctggggacccaggatcgcctgggctaccgccgcccccgttgcaaccaggcagtgcgccaggcggctgcagagcccggctcctggagctcccgtgggcgttggggcttcccctggatggggcgtgacggcgggcagttgggggaagaagaggaagggaggagggactggggggttgtcgcccaccaaacattggctctgtggttgcagctttgtgaatttccctcaccccctacccctgctcctcggcttcagaggtaaaagccaagttgtcgggttggtcaaggccgggcgcaccgcgaacgcacctgctctgtggtagcgaagctc

SEQ ID NO: 333574 - DNA, 1981 bp, Homo sapiens
  chr8:134582236-134584217
  hyper
cgtccgggcccctgccagcaccttccaccttggggccttgtcaatgaacactgcgttagcacctacgacgtgccaggcgccctggcgactattggaaaacccggctcccctctcaccccgttttcctcgttggcgagtcggcctcgcctcctcctcccgtctcttcctctcaccacacacacccagccgcagagcgggggtgggcgctcgctgtctccctggagaaccagctcgtcgcaaacttgcggggcttggggacccgcgagggggagaagtcgggagaggccaggggtgcccggaaacaatcacgagaaagccgggcgaatgcctgatgcagggacgcggcgagccagtcactgccctcagggtcacggctgactccctctgcgggactcgcccagcccgcgagacgcagtgacctgcccaacccccacccccttgcgcgcttctgggtgcgcacgtgtcccctcgcccaacacaccaccgagccccgcgcatggtacggccgccgaggaccctagcgtaggagggaggagcgagtcagggctccagctgacgagcagagccagacgatccccacacgcttcctgggagacccggctgcaaggccaggctaatgcgcgctccgacgtctctgtgccaagccggggcgcaagctcaacccccatctcaagttcagccgcgcttcctcccgcaaggtcacgcttaaacactcgcgcagagaaaggaggagcggaaagttgcgccaccgtcccgattccaaactaactgtaccctcaccagagcgcctcgccccagggtcaccgctgtccgtccccgtgcgctcccagaaggggtggccctgcccccacgcaggtcacacacacgagagacacaggcaagttgctaacttttgtcagattatttcttgggagctgcgacgcctcacggggttggggcggattcagagtttcgagttgccactaacacgactccggccgtgctctccttggcccacccgcgtcccccactgtccgccacgccgcgttcagctctcttgtcccgggtgtcaacttcacccccagatccggagcagcgcgctctgacggcgtccccggggccgatagccacctcccggatctgcgcctgcttgcagcggattgggggactcgatccggatactgtcccacggccgctcgtccagaacactggcggcctccgcggtgtcccagcctgtgaccccaaatccgctcgagagcgcctgagcccggccacccagcgaggtctcctcccacgggcggccccagcggaggagatcccagcccggcgccgggtgcaatgtcactggggctgctttcgggaaccgctgcccgggacttggcgtaggttccccacagagctccaggcagctcctccagtgtcggccgaagacccctaagcccgaacctccaccccgaccttcttcctctcccaaagccctgggtggtcgccgctgccaaggaaggggtctcccttcgaatgtcttccactagaatcccggggtcttcagtcccagctccactgtcacaccctcctagtcccctccccaccccttcagttcccgggtccagacaatcaaccttccactccgagaatccacaggaaactgcccgagccccaactcaggcggacgcagcccccgcgcaccccgagcagggttcgcctccgcgcgcgcactcaccacggctggagacacgctggagtttccgggatttgggcatgaaggggttcggaggagaatacaggggtgtgggtgtcccggacacttgcccccttcccagctcacatcgcctcttccttctctctccgctcttcttcctcctcctcctccctccggtctagggctctttgtctttgcaaagtgtcgaaactgtctggcatagtgggctccgccggcggaggctggagccgaggaagcgaggaggcgggatgagggtgggagagggctcgggaacaccttccc

SEQ ID NO: 333575 - DNA, 1267 bp, Homo sapiens
  chr8:136469252-136470519
  hyper
cggtcccgctgctattcctcagagcgcgactggggcgaactggggcgcccttcccagctccagctcggcccttgtcccctcttcccaggatcactcgctgggtgaccttgggcgagccacttgacttctctgagccccagtttcccagtccgtgcatctgaaaggctgtaatagcgtcgtggggctccccactcggccctcagggccaaaggtgggcgccggacacgcgggaggggcccttggacgcaccccctctcgcaaacgcccggttagtcccggcggactcgcagtggagagcggccccaggaggcggcgggcggcggggcggtgggcgccagtgcgcaggcgcggcgcggcagggcggggcggcgggcgcggggcggggcggggcggagccgggcggggcggggccggcggcaggcgctgggcgctcggcgcggtggctcagagtgcgcggggcggcgcgcggcgtgcaggtcgcagctgtggctcgggtgctggcaggtgctggcgggactggcggggatcgccgtggactgcctcaggggcgccgcagcccgctcggcccgagggcccgcctaaccgcgccgcccgcgcccgctcctcctcggcccgcgcccggagcgcgggggccgccggcgctgggtactcggcggccaccggggatcggggctgagcggtcggttcccgcccccgtgccgccgccgccgccttccggccgaccgcccggcttggccgctgctgccgcgtctggcccccgggtccccgccgctgggggcgcgggcggggtcgggggttgccgggcgccgccccccgtgcgcctggagtccacatcccgggcccggcggccggcgagcatggaggagaagtacctgcccgagctgatggcggagaaggactccctggacccctccttcacgcacgccctgcgcctggtgaaccaaggtgaggcgccggccgttaactgccggccggcggcggttgggggccgggtggaaacgcgggggcccagggggcccctccgtgccctctgctgtcagcggacgcggcggagacggaggcccgggtggcccccggggtcgtttgcacggggacctgggaggctgtgggacacctaggggaagaccctgatgtgaattttggggacttggaaggagaaggctggggcgcatgggtgagacttgaaggaaatctttggggactcgggcacacccaggggaaacttctgggtgggggacagcgaccatctgggggcttcgttgggaac

SEQ ID NO: 333576 - DNA, 624 bp, Homo sapiens
  chr8:139509098-139509722
  hyper
cgagcggatgctgccctcgcccgccgccgccggtgctgatgcggttgctatggttatggaaccccgcaactgcccccctctccgtgcaacagctgcccggccgcggcctccgggcagccccagcgagcaggcgccaggacgcgaggctgtcagcgcggtcgggggaacgcagccgccagcgccgcaagaaagcaaggaccgaccggctgcgcccgcgccgctgggctggcgcctcccgggctgcgctcacctctggcgccctcactcctctccttcctccgccgggacgcggccagaccctccgcgccgcgccgcgcgccctcgcggccgggagagcccgccctgctgctcccgctggctccgctccgcagccgctgcgcaccgcgtgggtagacgctgcgcgactggctggcggcgcggctcacgcgctcccacctcggtccctctccgccgcgaggccctgatgggagcccggggcgggccgcccggcggccaaaccccgcccgctcggccgcccgggtgcccagggcgcaggctgcggccccgcgtgcggccctcccagactgaccggcgcgagcatgctcagtccccgcggcggggctcccctctcgagccaagacccca

SEQ ID NO: 333577 - DNA, 218 bp, Homo sapiens; identical to SEQ ID NO: 233954
  chr8:140643195-140643413
  hyper

SEQ ID NO: 333578 - DNA, 1771 bp, Homo sapiens; identical to SEQ ID NO: 223494
  chr8:140714565-140716336
  hyper

SEQ ID NO: 333579 - DNA, 1631 bp, Homo sapiens
  chr8:142138208-142139839
  hyper
cggcagcgggcggcgcgtccggcctttgtccccccacgctctccagggtaggtccagggactgccagatcaggggaccctttgcgtcctggagccttgggggctggatgacgtcgccgggcacctgaggaccccgcccattcctccctcggttccccagggagcgggcggccggcggggctgggcggggccgaaggaaggggccgcttgctccgacgccgcgcacgcgccagggcccgcaggcgggttaggaaatgacgaccgcgcgcgggtctccagcagcacccgccctaggaccggccccgcccccaagtcccggtccctagggccgggcacgccactccaggccccgcccagaacctccccgcccagtcaagccccgcccccaaactctgtctccccgcggtatcctctggggctctccaggccccgcctcggctcgggccccgcccctccaggccccgcctccagccccgccccgcagacggcgctcgcagcgcccccggcccccaggcggcgcggctggtccccaggggtctgcgggcgactgcgcggctgaggcgcccgagtgcggtactggcggcgggcggcgggcagccatggcggaggccgcgtcgccgcacttgtcgctgccctcggggctgctggagctctgcgcgctgctgggcgccccccgggacagtctccgaagtctcgagcaggtgaggggcggggaaactgaggcggacgtgggccacgagtcggcagccgggacagcagtcggagagcgggcgcccgggtgccctgtgggttggcgcggactttccgagggctgagtcccggtcccccggcggtgaccccgcgcgcctgtggccggggatcgcgcccgagctcaggcaggtgccctggagcagcgccctgctcccctcccctcttctctcctctccccgcccggggcccttggtgtgagacatgtcttttgagagctgcgaacttggtccgccggccgggaatctgggggtgccgcccctcggagagtctctggggcctctctcttcagtcgctcccatcttgggcaggtgcttctgaaggtggggtgcaccagacaacgggcggaagccgccggagcctcacggtctagcgggcccagccctcgctgctgaaatgatttcattctttatgctgggatgtgttgtcccctgagtagtgggttttgcaccaggcacagaataacgagagagcaatcttagagttagccgccggcctcgcgtattctgcatgaacccctttgcgatgaagcctatagctatttttctcccttgcggtaccacccccacccccaacccttcctccatctctgcaccctcgcagccaaagtgacaacttcatctcccttctgctgggaaagcggcagttttggaaattctcgttttcctttttcttccccagcttttcttaattctgtaacgctggctttccctggaatccatctgtgtctctggtttcctcctggtccgcctgtctgtgacaccgtgactgggtcatgttacctagagatcccggcgtcactggccagccgtctgcacaggtccgttcatctctttgcagacaacagcatagaaaggcagagaggcttctgagtatttaaatgac

SEQ ID NO: 333580 - DNA, 890 bp, Homo sapiens
  chr8:142317707-142318597
  hyper
gcgagtggtgtatcgctggttgaattctcataagttagagatagcaggcaggggttagaaggacaagacagggtcaggaccaggagttagaggcgccaggctcctctctgggtagagaaaccgaggaactgggggcggggaggactgatgggtgcgaaagcgggccgggtccaaatgaaggcgcgcgccccggggtgggggccggggtggggggaatgagggaggctgcagggctggggaccagggcaggtgcaatccggaaagaggaggcgggaaggaattggggggccctgaggagccagcgcaagccgggtgggggcacgtcccctcccccggagaaggtgcggggctggggctgcggcgcggacccgacctggaggccgaggctgtgcgggaggtgggggtggggaggctgcaggtgcccggcgcccaggtgcgaggtgcagggggcggcggggcaggcggctgcgggcggcaggccactcacctgtctcctccggccggggccgcgggggcggcggggcggccgggccgggccgggcaggggctacgggggcgcggagccccgggcgcaccggggtcgggaggcggctgcgggtccgggcgggggctgctccctcggccggccggccgggcggtcagtcagcgacgcgggcgcggagagagcgctgcgaggctgcggccggcgcgcggagacaacgccgctttatcgggtcggaaacagccgctccgcgccgcttccgctgacgcagcgccggcccctgcgcctcatgactatgcagcacccgccgccgcgggacggggattcggggggcggggtctgcgccgcgcgcgctcattggcctccgctgccgcccaccccgcccccgaacggccgccccgcccccgcc

SEQ ID NO: 333581 - DNA, 789 bp, Homo sapiens
  chr8:142427489-142428278
  hyper
cgggcggtggggctggtgggctgggcagggggtctgaactggagggactcgggcgccctcctcctcagggtgcaggacagcacctgcacggcggggccgcatttccatttccaaagctgggcgcgctctgtccaggcctccccaccaggagcgcggcccggcggctcctgccctccggacccccagcccacaggcccgtgcagccccatgagggggccagggggagctccgaggttctagggagggcgcgcaccgggagagggcgccgggccggccggcgggaggaaggaggggtcccgggcggcagcgcccccggccctcgccgcgccccgcacttccctttcctggctgggcttcctcttccccgcgcccgccctgcgcggcccctttgtttcccgggcagggcgcggctatatttaggcggcaggtgtgggagcccccggcagccgggtcgcccgccggtcacgccccccacgtgacgcccgggcgctataaatagccgcaggcggcggtggcggcagcgcctggagccggctccgcggcggaggggcggcgccccgacccagggccagcaccgtgggcaccgccaggccggcgcgtatggaggcggtgggacgcctgcggcgcgggtgagcctggcaggtggggacgcggcggacccaggccttccgggaccccagccccgccggggaggaggtggcgccctccggagggctgggcgggagccccgctggcacccagggagggggccgcgccccttaccacgaccccacccgcgactggttcccc

SEQ ID NO: 333582 - DNA, 767 bp, Homo sapiens
  chr8:142528227-142528994
  hyper
cgcgcccggcctcctggtctcccgcctgcgcgggccgctcccggccctccccgccctgccgggcgttcactgtcccctccgcccgcaggtcccgcggcgcccccggagcccgccttcccggacatctacggcggggacgcgcagctctgggaggcgcatttccgcggcatcgggcgcgcctaccgcgcgctgggcaagcaggacgacttcgccatccgcgtgctcaccgagaacttcacgctgcccttcccgttcgcctggccgccggggtccgaccccgcctgcgggccgctcttctacgacccccgcgaccgcgcagacttcgacttcctgctgcgcggccccggagcttcgcccccagcgctgctgcggcccctgcacgccacggcccaggcagcgatgcgcaagcggcgcctggagcggctggccctgagctgcgcccgcgcgcggggcccgggcccggcctcgtcctgctgctgcccggccccgccgccgccttcccggagcccgaggccagcgcttccagcgacggcacccccaggctggcccaggccccgccgctgccccgagagcgaacagaataaataaagagtttccccagctctcccgcgcccggcgcttttctgcacacactccgacaggcctgggcggctgggcccggcggggaaggggggcggtgggacggtgggacggtggaccaggaacccaactgggacaccgggccaggccgggcagcggtgggcctgggaagccgcatgggtccgaag

SEQ ID NO: 333583 - DNA, 69 bp, Homo sapiens
  chr8:143483659-143483728
  hyper
cgcgctgccccacacagccgccaccagacacgtgtggctactgagtgtcggacatgtgaccactggcac

SEQ ID NO: 333584 - DNA, 975 bp, Homo sapiens
  chr8:143530860-143531835
  hyper
cgccggcagccgggtggggggaagcagctctcgcctctctcctcctccttctcctcgtcctcggcctcctcctcctccccgcgccgccccgcccccggctcggcttggctcgcccccccccccccctcgccaggaaggggaaaaaaggcgagaagagccgggcaggcgagaggagcggagcggcggcggcggccggagagggagcggcgggcgcaggcggcggcggcgggcgcggcgttggcggcggccccggcggagcgagcgcggagccggagagccgggagcacaggcggccgcgccgcgtcctggcccggcccgggcccgcgcgccagcatcgtccgcagcgcgggcatccggaccctccgggcgcccggggggctccagcaggcgcgggggaacgggagggggcctgcgtgcgccggcgggtgctctccagggggcgtcccggcgaggcccagagcgggccgggggcggcggcggctggaggagccccccccacctccggtcgggcgcccggctcagccgccggcgacgcgaggcgctcgcggggatttgcaactcgccggatcgagtcctcgccggcggggccgctgctgctggggaaggtaaggaaggctccggcggggggctgggggcgcggcgggtgggggcgcagcgagggtgggagggggtcgggggaggggcgggcgcccagacttcctaacttcgccgtttggggcttcgcagctccgaggttttgcgctcagagctcaggagtttggacccccaccccctaccccctcagccccctgccttctccagcggtggcgatggaatgtggcaggtccccgcgagcccgcattgggcaggctgaggagggggcgaccctggacgcaggagaggctcctcggcgccgccgcctcctccccatccacacaccacagcctggcacccctcttcatcacatgcacagggcaggctggggagggcgttccc

SEQ ID NO: 333585 - DNA, 2885 bp, Homo sapiens
  chr8:143531858-143534743
  hyper
cgctggcgggggtctaagggagccccccatggcccccaacagccacacatagacgcagcaggctccggagagcccccgagcgtgtccccctcctgctaatcacgtccagggccccctacagacattgtaagggcccgagacgtcctccccccacgcacagagctcggggcaggcaggagaaaaccccagactccttctcgaagccctcgctcgtagaagccctcgcctgtagacctggcattggcagtggagactccctggaggtactctcccccacttcgggcggagggctatttttgcgccccccacccccacgcgaacgcctggctcttccctccttgtctacctttccactgggtcggacaggccgcgcggataagccgctctcaactttgggccggccctatgccgtctccgctccaagcgccgagcactcccgggcgccgagcactcccgggtccgcgtcgccggtgagcagaggccgccggccctccaccgtcgccgcgctagcttggagccgcgcggagctgcctcgaggaacgagcacggcccccgccccctcctggggaggctgggagctctggacccggccaggagccctctccctaggtccccgcggccccctgggcgaggtagagagctcctccggcctcgggagggggcggcggagctgagaatcaccgcgaagcgatgcgaccgggagggcttgacggaggctgcggctccgagcccgcgtccctcctcctggccgcggcggctcctgcttggccactccccggcagcctgaagagaacgcctaatctggcaccccagccccaggccgctgggcaccttacccctttccacttttattttgggcttctaagtttcttggagcgcaggcgcctaggctgggacccgaagagccctaagccagccctctttcagcacccgtccccgccgcgacctccccgttcttcctccgggtctggggcgcagattcctgggctgcaactccggagtagttgaaaggcaggaaggcgtgtgggcgggtagggggcctgcactcccgccccagaggagccgcttgtcgtttgtgttggggagggagctgggaggtctgctctcccgctccatcctgggaacccacggagaccctcggtactctccccacagacacaaacacacgccccctcggagcgagagccgccgcgggggaacagcagaggccgcgcgggcggaggcgggggaaaggggagctgggtcccttttctatctgggagggaggtggtatacggtgtgtggggtctggggaggcgactgtcacgtctcctagaaccctcatgccttccactcgtctgcgaccccggctgccgaggaggcaacgagggaggtcgagccgctccctcccgtgggcggcagcgaaactctgcgcccgcacgccggggtgccgccgagtccggctttgagtacccagcaaggtcaagcaggcgaaggagggggcgggggttcctgggcgcgcccccgtccgcgcacagtcggggccttggaagggggtgtgcgcagcccgccgagtcagtcccgctcgcctgccgcccgcgcccggtccccggaggcggacgttgcgcgcgttcggggatcccggagcgcccggcgccccacgccctcccttcggctcgctagctgctccttggcgctgctttcagacttgttgcgcctcgatctggggggcagaaggctggcccgggagacccggcggctgagggccgagccgcgaagcccagggatgcgccagagaggcgcgcggctccgcgggtgggcgctgcgctggggggctcgagcctggggtttgccgcctccgatcccagggacgggcgcttgttcctgccggggtcccgcgcaggggcggatagagggcgattcgtcgcctcggcctcaggcagcactcatccggatcccgggctagggagggggcgcagccaagttgtggagccctcggaggcccttccctctcccgcaggctccggcccctctcggacctcggtggccgcgtccgtgaaatggggacgcgggctctgctctcggatcccttccagcccccgaccctccgcacttgtcccgagatccaacgtgcccggtccgcagcgtgctgggtctgcggcgtcagggtggcccgagtcccgagaccatctgcgcttgcggacacagccgcggggcctggcatgaagggccccagggagggcctagcaagcgcccggggtccgagcagcctcctgcggcgtcctccgcccccggtcggcccgaccccgcctccgggagtgggtcgtggggcgcggagcccgtcctccggggacgccgcggggctccaggcccaggcggccggcgcggggccgcagtggcggaaggcggagggccggcgcgctgccgctgactgccgggagagggcgcccgcaccgcgcccgcgcggccctgcccgccccttccgtctcctccgcgcctggcccgcggctccggccccatcttgggcagccccggccgccacctccctcccgcccgcccgcccgcccgctcgctcgctcgctcgccgtccgctcccgccgccgggtcccgtgacgcgcctcgcgtctcggccggagcccccctcgccggcccggcccggtccccgtgtgcggtgcgctggcgtgagcgcgcgtttgcgtgctggtgtccatgtgtggcgcgcatgcacgtgcgtgcccgtccgggaggctgggggcacgtgtgtgcaggcatgcagacttgcacatgtgtgtgcgtgacgggggcgggtctcgcgccggtgtggccccggatggcaggatttagtcaaaccccgttttaccgtcggctctggctctgggctgcccccgggtctgctctgtgtgcac

SEQ ID NO: 333586 - DNA, 295 bp, Homo sapiens; identical to SEQ ID NO: 201622
  chr8:143556723-143557018
  hyper

SEQ ID NO: 333587 - DNA, 420 bp, Homo sapiens
  chr8:143695487-143695907
  hyper
ggtgccggtgcgtccgccgcacgtgctccagcatctcggcccggcacttcccgatctgcaggatcacgttgggcttggccacctgcccgccccgcggcccggggtaggcgtggagcccgccgctggtccggtggtccagctccatctgtgcgcaggtgctccggcaggcggcaaactcctcggggcggacagagggtggtccggcgctggggtccggcggcctgggtcccgtgcggagctgcggggagcgcctgtctgtcgctgcgggccggcggcggggccggcggagcacgcccggggaggcaggtccggctcggctgctgcggagggaggacgccgcgcccgagctctgcgctgagtcctggccgccggctctttatgcagccagcgaggcccgtgggcggccggctcgccgagccc

SEQ ID NO: 333588 - DNA, 347 bp, Homo sapiens
  chr8:143859063-143859410
  hyper
cggaccgccggctcgccgggcaagcgctgggaccccgaggccagtccaggcatctggatctccgacacagaggcagccacgcagtgattccctggcgaccctcagactcacgtgttcagcccggacactccgcaggctatcttcaccgcgtcccgcggcagcccagccttccccgcagccgcctccgcccactcgcccgcgccgcgtcgtttgtcggccggcaccagccttgcggccccagctccgccctcctgcagcccaggcccagcagctccggaactggcgccctttggcgcacccgcctcgctgcccatggcctccgcctgcctcccctgcgctcagctccc

SEQ ID NO: 333589 - DNA, 1303 bp, Homo sapiens
  chr8:144240980-144242283
  hyper
cgcgggccccctactcaccgggcgccgagcacagcaggacggccagcagcgccaggccgaggcccttcatggctgcaggcagcatgctccgggtgggcctgggggcggcgcgggggcttggggcgcgggtcctctggggcgcaagcctggaggggagaagcatcggtcaggagaccccaaagaccctctcctttcccagcctcaggatgcaaccttctccccggaatccaaggccggggtccgcccggagctcgcagagccccacccccagccccttctccagagcgtccgccgtcacagcatccccgccgggagacgtctggcctctggggcgaggtgacagctcgagacgcctccgccccgcgccggcacctgtgtgggggagcggatggggggcgtcctcttctccccggggagctgcaggtgcgtccggacaggaatgagcggcaggggcgggagcgggtgggacctgccactggggggaggggcgcgtgccaggtccccacccccacccctgggctggggggccgggaaccccgggccgagtcccctcccttggccttccgcgcgcgcctcggcgctcaccgcggatggggcgtggagcgcgggcctcggggtcggggggctcactcacatcccgggggtgtccgcactccgggctcgggcggcgtgcgcggcgcggggagctgtgcccttcggtctccctgcggaccggaatccgggcgcagcctcgtctttcggggaacgcagccgcagacgcggaccccgcgcgaggggcggggcggagccggggcgggggccgcgcggggggcgggggcggctgggagacgcgcggggcggggggcgcccggggctcgcggcccccacgcaggtagctggcccgggccctccgcgcccccttgctggcgcgcgcgctccctcgggttcccgctccctccctcgcggcgccccctgctcctccccagcctccgcggccccctacccaggcgtgggcaggatcccttccccctctgcttggctgagatccccttggaatttctcggaagaacgtttactgcgaaaggaagcaaaatgcacaaagacgcagagagggggaggtacccggcgcggcgccacgcgcaggtccgggttcgcagacccctggggtcagactcccgccctggggccccgccctccccctcctccccgcccctccccaacctcatacccgtttccccgtttccccgtttccagtggctccaggccgttctcctcccctgagcatccatgaagacccccaccagaagccgcagccccaggggct

SEQ ID NO: 333590 - DNA, 447 bp, Homo sapiens
  chr8:144328118-144328565
  hyper
cgcggggctctggcgggcctggcggctcagtgcgatctgggcaggcaggaagtggagtgagcacagccagcggctgggagcacatcccggaggggctgcctgcggcgggaggagcggcaggggccacgtggtgggggacggctcgccagggcgcgcacgcggtggcggcggcggtggaggcgttgcccgcctagctaggggcccgcggcctggagaggcgtcggttctccttccgcgctgaaggcggagacagcgacttcccgtggaggcaagccgtgggcgccgcggaggcgggggctgggggtcggcggaggcgggagctgggggtcggcgggggctgggggttggcggggagcgtcctcagggacaagtctcccagcacgcggccgcgacctccccgttgggggtctggagccaggagcccacgcgcgtcggatccggagagtc

SEQ ID NO: 333591 - DNA, 104 bp, Homo sapiens
  chr8:144417159-144417263
  hyper
cggtctaagcctgcacggggctgcggcagcaggaccactgactgtcctgccggcctccccctggtttccctgccttcgtggtccagcgccccttcacgctgggc

SEQ ID NO: 333592 - DNA, 982 bp, Homo sapiens
  chr8:144511528-144512510
  hyper
cggccgtgcccttggccccgccgggaccggcctgcggcggcgaaggctcccgcgggaaaccggccccgcccgcgctcccggggccgccccggcccgccagcttctcgtatttctccttgtacaggtcccgctctttggccaggcgccccacctccagcttcagctgctccacctggctctggagttggcacttctcgctctccagaatgtgccgctgctgcacccgcttgaagcggcaggactgcgcgtagccgcggttcttgagcgtgcgccgcttctgcttgagccggatgacctcctccttgctgaagccgcggagctgccggttcagctcgcgcaccgacatggacaccagctggtcgtcggagaagcgctcctccaggcgcacgtggtggcccgcgccaccgccgtgtcccgcgccgccatggtggtggtggtggtggtggtggtggtgggcggcgtggtgatggtgggcggcgtggtgcgcgccgtggtggtggccggcgcccatgtcgtccgctccgccgccgcccgcgaagcccgggccgcggaaagcctcgtaggctgcggcggccgccgggtggtgcgcgccgtggtgcgcgccgtggtggccgctgccgatgagcgcctccaccgcgtcctcgggcgtcaggttgagcgcctcggggttgaggtgatgctggtagccgctcatccagtacagatcctccagcgccggcttccccgaggtgcccccgacggcgccggggcccccgctcggcggcccgggggcgcccccggcctgagacgagccgccgccgccccccgcgccgccgccgccgccggtgcccgggctgggcgcgcagaagctgggcgaggagggcacggaggagcagggcgtgctgagcggcgtcgaggacagcgagcctggcggcaggcggtggcagaagcgctcggcctcgggaggctccttcttcacctcgaacttcatcaggtcgaagtc

SEQ ID NO: 333593 - DNA, 310 bp, Homo sapiens
  chr8:144636562-144636872
  hyper
cacaaacgcgcacacgtacgtgtatgcacacgcgcacaaacatgcacaaaacacggacgtgcatgcacacgcgcacatgtacacaacacgcacgtgcatacacatacgcacaatacgcacgtgtgtgctcacgtgcacaaacgcacacaacacgcacgtgcatacacgcgcgcaaacgcacacaacacgcacgtgcatacacgcgcacaacgcgcacacaacactcaggtgcataaacgcgcgcaaacgcacaacacacacgtgcatacacacgtgcacaaacacgctcaacacgcacgtgcaagcaccc

SEQ ID NO: 333594 - DNA, 393 bp, Homo sapiens
  chr8:144640377-144640770
  hyper
cgccaagccaaggttcctccggacgcgcgaggctggtgctccaggcgggctggcgggaagagggggcaggaagggggccggggcgggctctccgggacggttccgggagggcgtcctgggcgggccctgcgtcaggttgcagtttcacttttagctctgggcacctccagctcctgctcgccggacggctcccagggagagcagacgcgccagacgcgccaccctcggggcgccgacggtcacggtgagctgcgccccgccccctcccccggcctggctggagctcccgagtggggccggccgctggctcccgggtgggggatgctggccctgctgccccagcgttcgcccagaaggccccgcgccgcacacgggggcggaagctccaggctt

SEQ ID NO: 333595 - DNA, 91 bp, Homo sapiens
  chr8:144641074-144641165
  hyper
cgcagctggggtggggcgacactctggctgggttttgcagtgggtccctggtgacactctggctgggttttgcagtgggtccctgcaccac

SEQ ID NO: 333596 - DNA, 93 bp, Homo sapiens
  chr8:145692498-145692591
  hyper
cgcggcggagggggctgctggcaggtaccacctgccccggccttcctggctttcacagccctgctcggattcttgtctccttcgcagtctggc

SEQ ID NO: 333597 - DNA, 892 bp, Homo sapiens
  chr8:145697859-145698751
  hyper
tgcaccaggtagggctgcaccgctctccgagaccccgccccgtgcttccacttgggggcggggaccctgcacctgaccagcccttcgccccgccttccagatgctgaaactggggaggagcaaccgggccaccgccgccaccgccatgaaccagcgcagctcccgctcgcatgccctggtcacgctgacgctgcgcgcggcgtctccaccgcgcgctccaggcaccgcaggtaccacggccggtgcctgagccctgcggagtctccagagcacccgaggcccggccttcccccatgtcgggctcgctcgcccctctaggcacgctgcacctggtggacctggcgggatccgaacgcgcacggaaggcaggggcggccggcccgccgcggggagacccagacggcgcccggcgcctgcgggaggcccagaccataaaccgctcgctgctggcgctaggaggcgtgatggccgcactgcgggcccaccggccgcacgtgcccttccgcgactcgcagctcacgcgactgctgcagccggcgctgggcccaggcaccaccgcggtgctgctgctgcaggtgggcgccggggcggggcaggtgtgtgcgtgccggtcgccgcccacccgggcccgcccacccgcgcctcttgcccgcagatctccacgcggccggaggatctcggggagacagtctgctccctcaagttcgccgaccgagtgggtcaagtggagctggggccagcccggcgccgcagggtcccgcgctcctccgggacgccttcttccctcagcaccgacactccgctcaccgggaccccctgcacccctacgccgtcccctggcagtcctccatgccccagtcccgacaacggctcgggctcggctctcgcgccc

SEQ ID NO: 333598 - DNA, 429 bp, Homo sapiens
  chr8:145733644-145734073
  hyper
cggacaccgaagggcgtcacgggcagtggctggcggtgtccttctgagctaagctgggtcctgacctttcacacttccctcctaacttccatggctctgtcaccgccttacggaggagctgaagccacagacacagcaaggttggggtccgcaccggaagtatccagtggtagacggcggaacccttaagaaacggacgccttcatgcgggcggctggagaagcgggggctgggcactgcagcaaccacgcttcggctgacaccaggaaggaagcacgcctggagcggatccgaaactactgagaggggccagggctggccgtgggcgcaggccgatccttacattcgaggccggcccagctctgtagcttccccctctgggcctctcacccgcgcaggacctcggtgggagcgcgcacgtggcggggc

SEQ ID NO: 333599 - DNA, 320 bp, Homo sapiens
  chr8:145747534-145747854
  hyper
cgtcggcactgccggccagtccttgctcttcccacctttcggaggcccaagatcctactgtggccggccagggccagcgagggaccccccccatgcagagctggaggttggggtgatgtcttttcggaagagcttcaagggaggtgttggggcctccccggccaccttccattgctaccccaggattcccgagtgcaacgttcccggctcgcgccccacacacggctcagcgcacactgcgcggcttccacctttactgacggagcatgcgcgaggccgcaccggccaatctccggcgcccacgtcatccgcgcgcccgc

SEQ ID NO: 333600 - DNA, 526 bp, Homo sapiens
  chr8:145910996-145911522
  hyper
cggggaccgcagcgccggcccctccgccatcttcttggcccgcgccgcccaccgcccgttgcccgcgctctcaccggccggctgcgcgcgggccgcgccgccacagtccctcatcccggcccgcgcgacgcgcgtgagccagccgccgctccccggcctctctgctgctccgccgctgctgccgcggcagcccgtgctgtcggcgtcctccgccgccgccgccggcccagtgcgcggcggccgcgcgtcctcccgtcaccaagcgcaaccccccgcctccggctccgcccccgcggcggtcactacccgccgccagggggcactgcctcgcgaggccgcatcacgcatgcgctggcgcgcggcatgccgggagccggagtcccgcggagggcgcgcgcggcatgctgggagccgcctggccccgccccgtcgccgcgccagaggcctcccgcgcggacctaccctgtgagttagcggtgtcttcccgtctctttcggtgcagagcagttaccatctgacacgtctc

SEQ ID NO: 333601 - DNA, 85 bp, Homo sapiens
  chr8:146125638-146125723
  hyper
cgtagagaccaccggacagagaaacctatgtccagaagacaagttacgaactgaaaaatctgcgagtacccacccggcggaggac

SEQ ID NO: 333602 - DNA, 786 bp, Homo sapiens; identical to SEQ ID NO: 223535
  chr9:113512-114298
  hyper

SEQ ID NO: 333603 - DNA, 194 bp, Homo sapiens
  chr9:117982-118176
  hyper
aactgctggctcgccgcctcctcctcgtcttcatcttcctcctctcccaggacatcgattttaccgtcttccccatcggagtcccggaggctgcgctgcggtgtggagcgaaggcgctcagctcttggcaagttcatggcggagcaggtgcttcagtcgcaggggatgtggcggccggatcacctggccccggc

SEQ ID NO: 333604 - DNA, 958 bp, Homo sapiens
  chr9:214559-215517
  hyper
cgacttgcctacattccctggcagcctcgcagcttcgggcagatggagcttccggcctgcgcgcagtggtcgcctgtcgtccgcccgcgctcccttcggccggaggtcggcggccccgggcagagcgcgccgtctgccccagtatcgggaggccagttccgcgctgggcccacgccctcctcgcccgccgctgcctgcgcgccaggccgggtggcggagccggccgtcgctgctccgagctcggaccctcccccggggtgatttcggcttagaaggtggaaatgcggaagtttccagcgccgaccgacagacgaggtttgcgcttggctgggcatgttccgcggctactctgcggcgcgccaggcccccgctttccgcaccccgcgaccctagaagccaccgaaccgccggcgggccatggccactctgccgagcgcagagcgccgcgcgttcgcgctcaagatcaacaggtaagacgccccccgcggcgcgcaggttgcggccggacagcccagcgctggtgtgaagcggagcttcgctgcaggggccgaggccggacgagtccattcgcgtccgcggcggggcgcgcctgagacctggggcgcccggttcccgaggctgcggcggtggagccgctggacgcgcggcggctcctgcgctgggcccggcgaggtcctccccaagaatctcggtgctcctggatgtcctcagccgccggggatcccttccccgaacaacctcgcccgctccgccctccaggttcttacaggtggccgggtcccagaagggtgataggcgcctgggtaaccgtgttgggcgcgccacggagtgtctcataaacggctccttcctttgaggcaagtctgagcgcggggggaagaagtgaagtggctgaaattagagttgcgtttgaggcaggctgcaagccttctgtcgtcctgagcaaggctccgtcctc

SEQ ID NO: 333605 - DNA, 878 bp, Homo sapiens
  chr9:503936-504814
  hyper
cgcatcctcccctttccgccgaggactctgtcctgcagccgagccagggcgaatgcacggaggtcacaagggaggtgcccttggaggcgggaggtttctggccgccggggcgaccgtgctgacgaggcacctgcaggaaacagagctctgcacgctccggtccccctcacccggggagggagaggaggtacagaggcgctgggggaggacgtcgagcaggccagcctcgttgccagaacccccgccccagccggagatgggagcaccgcaccgtctcacgggggctggatttcttctccccttgcgggtgtgtgtgcgaggatggacgtggtaaatacgggttggcagaaggagcgaaccgcggtggaggaagttcttctgcttagttctcgccgcggcgaggcccgcgggccaggcgcggcgacgaaggtgcacgaaggtgccccgcgggcctggtggagttgcagcggcgcgcaggcgcactgagggccgcccgcggccggctccgcggtacaaagagcgcccccgcggggagccgggcgtcctctgggcggagggagcagccggggcttcgccggcccgcgccgttcttctcacgcgccgctccggggcgcagccacagctgtcgcccaccgcgggtgagaggcttgctggtccgccccggcttccccgccccggcggcggccgtgcggttcgggctttaattctggcgcttgccagccggggccgactccgccccctgcgccccgcccttccccgagctccgggtccgcggcggagcgagcgagcggccggcaggttgggaggagcggccgaaggtgagtgacgcggcggggccgtgccgcgccccgtgccgcggcgaggttgtcccggagcgc

SEQ ID NO: 333606 - DNA, 888 bp, Homo sapiens
  chr9:504833-505721
  hyper
cgggctggccccgcgcggagccgacttggcgcgcgccggggttgcgcggcggccgtggcggtggcggagggcagcccccgcgggctcccgctcgtgcgggtgaacccggcggcctcggggcggtcctgggggggggtccgagaggtggcgtcggccccgcggccgtcggagtttggcgcgctctgcagcggcggcgctcggccggtctggaggagggagaggcgcgccgggcacggagcagcgagaaagttcgggccgggccggccggcgggagggtgcgggcgcctggctaccccggcccggcgctctgtccctcggatgcctctgggcccttccctagcccggggcggaacgggggaccctctctgaagcggctctccgtggagttggatgttgcccttcgcgggagggagtggcggtcaagacccctttatcctcggccccagaggggcaggtggcctcgggtcgccctccgccaactccgaggtggcttcggccggggctggagggcggggaggcgggggaggggcgtgggcgctgcggcctctggggcggcccaacccggcgcgggcagcgtgggtttccgaggtcccgcggttccaggtcgagggaaggtgtaggggccctgaagcgggctggtccccgaatgttgcgttttctgtgccgctttgggcaacacgcagtggcgctcgcggcagccacggctccttgaccgttcatctccttcacccgggtcccgtggaactttcagaggcaactgttcttggtggctcttgcgggtcagcacgagccgtgctgcacgagcgtgacctagtgaaggccttgggcgagttggcgttaacaatttatggcgtccgccagcgctcgctttccgcacgtggcctctgc

SEQ ID NO: 333607 - DNA, 877 bp, Homo sapiens
  chr9:841339-842216
  hyper
cggctctggtcttgacctggggagcccagcttcctcggtgcaccgtgctttggcaaccgggtcttggcgcctccgagagcggggcgaggggtgccacgcgattcccaggccgctctgtatctctcggtgcgcttgcagggaccctgcagcaaagccctggatgcttgcagccggtgcaagtttgcaagcagctggagagcggtggctggagtcggggggcggtgggcgtggccacgctccctcccaggcagtcccgggaatgttctgaaaagtatccgaaagttctgagtcgcgcgcgcgccaaaagaaaaggcacaaccccccaccactccgggcgtggcgtgcccagacctcgccactccagctgcgcctccggctgcagcgcacacgtctcctgcgcctcctcctccggagcgtcgctgtccgtcgggttcatccctcgcagcagtctccaggcgagagagggggccagagtgctcgcacttctcctaggggcaccatgcccaacgacgaggcattcagcaagccctctacaccgtcggaagcccctcacgcccccggggtaccgccgcagggcagagccgggggctttggcaaagcgtctggggcgctagtgggggcggccagcggctcgagcgccgggggcagcagcagaggaggcggctccggctccggggcgtcggacctgggtgccgggagcaagaagtccccgcggctgcccaagtgcgcacgctgcaggaaccacggctacgcctcgccgctcaagggccacaagcgcttctgcatgtggcgcgactgccagtgcaagaagtgcaacctgatcgccgagaggcagcgcgtgatggccgcgcaggtgggtgcgggcgtgcgggagccc

SEQ ID NO: 333608 - DNA, 993 bp, Homo sapiens
  chr9:842552-843545
  hyper
atgaagtccccccagcatggccgttgccatgcgggtcctgggttgtggagagatgcggcggtacttgccgacagcggcggcgcttggggtcctgggctcccggccacgctacatcgccggtctgggagcgccggagacgcgtctgatcccgcccgccgggcagagttgcgggcttcgctcggctcggggttccccacgatctctcaccctgtgtttcggcggagttgcgggggttccctctgctcccgggtccctgagatccctgatcccgctctcagggcagggaattccggggttcgcccctctgggcttccccgcgatcccagagcccgcgttccaacagaattgggagggtttattgcgctagaggagtcttcaggatcttcgctcccgccctccgaggtgaggctagaggggagggttcgactccaagggaatcccagggatctctagccccgctcttctagcagagaattaaggaattctctccgctttggggtcccaaaaatctccgaccgcgccttgggagcagagggtttcggggttcgatttcctcgagcgtccccagaatctctgactctccctccttgctgagttgcacttaaattagaaaggatcttggagggcggcagcgctggctgctaggttagcgggaaagggaggctcggccggctgctgcttacgcgggtaacctgtcggaaagccttgtttgtttttctggaaaagtcgctgcaatggacacagcgttgcgcggtttccctgcgcgcctggggcgctttttgtcttcgccctccgtggatggaggctgagcgcctcagccattttgagagctctggaaattttattagcattttaaaatttgcattctcgaccgaagattaaagtgcaaattactttgaagatgttttaaagcacgcttaagaattttaaagaatatgcgcaggtggaaaaaagcgcgccagggtttgagatttggtccgtctgtggttttgt

SEQ ID NO: 333609 - DNA, 1638 bp, Homo sapiens
  chr9:969533-971171
  hyper
tgcccttcggcgggcggctgtagctgtagctgttgtgacggctacggcggaggctgcggccgcgcggggaatggagccggaccgcggagtcgtcacctccaaggtgtttctagtggcctcctggaagatgatcccgcgcccaccttgccggcgtgttcgcgggcccctgcccactgccccccctctttctttaggtctggcttttgaggatcccggagtcttgcagctcccgccattccgcagataacctccgcacacttaattgtgacccgcggggtggtcggagaagctccgcacgcgtcctcagtgggaaagtgtcccctctcagcactgcccccttcagtccccctgcatttctggaaagtcaggcaaggcccaggtaggctgccagtgcactctcagccttgactgagcacctttcgggcctctggtgagccccgagagccaggtttggctcggcagagcgggcttgggctgcgcaagcaatgcgcatcgtggccgcctgcaccctgggaactaggcctgtccagtgggcagcatcctcatttttgaaaaggcccttctaaacccaccggcctcgcctaacgccgtttggtgctgcatccgagcggcctcacgcggtcccctggaagggccactcccagcgggagggcggggcccgggacctgcgctggccacgcagggtctcaagctgaccggaagacccggcttttggcctgtgtccaatagccccagaagagaggggtctggagccttcctcccacgcgtagtgacgctcaggtgtcctcgggttgttagtcttgacccaggagagtgcaagacaggcccaaggcctggggggattgcgttatgaatgtccaattctaaacacaaggtagagcacagacagtacatcctcacggctggattttaaccgtattttaataaacacattcgagggggtgtcagtttccccaagctctgcccccttccgcgggcgggatccatggtgtgtgcagtgtaagagtgcgcagaacgcgtgtgttcaagtgtgggcgtggcaggcgtcgtgtgctcgccccgcgcactgtgcggatcgcccagacagccttgacaggtttttgcagatgtttgggtgctacggtgtggggaaacccaggcaggagcgccaggcctaattctcctggactcttggtgagcggccgctactccacgaggggctagaagcaaagggggcacgcgcttttccccaggccgcctcttgctgccgcagtggctgagggcgctgatgacccctccccgcttccagcggacttgacccgcgggctgacaacccaccgcgacaagcaggcggctgggttcgcgccgccgccccggggcccttggctcaaatttcacctcgagtcctgcagaccctgcgccactgaattggggcccaggacgcccttggtgacactcgccttcttgctgccacaaccaccgtcatacccgcagccggggctccctccgctaaccacgcttggagaccccaatcggggacagaggtgggagtcagaccccccctggcctgcactgccgtttccctcgattcttgcggaaacaagactcccgcccacacataaaaatgcagctcccggccaccgggcgccggtggctcac

SEQ ID NO: 333610 - DNA, 988 bp, Homo sapiens
  chr9:971867-972855
  hyper
cgcctgccctcgggagcgggtcgcctccactccaccacctgtttaagttcctccccctcggcgcccctccagtccccaccccggccccggtccaaaaaaccagcaaacggaacttttccacagttgaaagccgcggcccgcgaggccgggctgggaggggaaagcggggcgtgtctggggggcggggccccgagcactccggaagttgccccgcccaggaggctcctgggaaagtgaggagagggcccgggcctactttcgtcctggtgtggcgcccctcagcctcccctcctcccagttcccgcgcctccgcagggcgcctcggcctggcctccaggcaaagttcgcgccccctgttcctggggtgtcggccgcgcgggccgtttcccttcattactcccgggcccctgaatccgaacgctttcccagaagcgcgcaaatccgcttgctttccccgcggctgggctttgttcagggacagcaaaggaggaggcgggaggctggtgaggttttctggaaaaggggcttgtcccgaggaggaagtgccccagatccctgagagccaacgctctggggagaagaaactttccttctcccttgaatgttgctcagattacctaaaattattttttcagcccttgtgttctaaagtcgcagggtaaaggttatcttaagacttaacatcagcgctgctcatttgtacgttggtggagacgtgccttttttcctttgcacttaaggtggacagggtctgcgacgctcccttccaggacggtgtggggaagcggccgacgtccccagccggactcacgccctcctactactgggcgtcggctccgccgcgggcgctcccgacagggagctggagtcggacgagcggctgcccccagggcctccaggaaccgcggcccagcggggagcgccccaggctagcgcttttccagttcccttcgaaagcgcggggctgaggtcgcggcgctgggccctc

SEQ ID NO: 333611 - DNA, 130 bp, Homo sapiens
  chr9:975281-975411
  hyper
cggcctccccgaggggacaagggcctctgtgcccatgaggggtcggacattgcagcggacttgcctacgctctcatctagcatttgattccccaccaggagatgggcttggtgcacgctctcagaagcgc

SEQ ID NO: 333612 - DNA, 437 bp, Homo sapiens
  chr9:975826-976263
  hyper
agggaagaggatatcggtaactttgggggcgccaatgtggcttctgtgtctgccccttgaaagtttatacccggcgcttaacaaatcctttacaggagcacgtacgtccctgacctttcaggatactgttttatattaaaacatggacaggagggtagaaaagtaaaattcgcctgcaaaatggcttgtcatccttgggccggcagatctccaaaaccattttcttctaaagcaacaaaagagaaaaaaatacgttctaaaaggaaattacgaaaagagcctaactttcctaaaccaacatcacttcactcccctatcctaaactccacccaggtccggggtgcaaccgcaacactcccgtaggttcgagttctcccggagctgagcttctgcggccaaatgtcgggataaaagcggccttgggctcggaaaaacgc

SEQ ID NO: 333613 - DNA, 545 bp, Homo sapiens
  chr9:1042427-1042972
  hyper
caagtagggcccttcgtcattcttcggagtagccgcttgagggctggaaggagcagtgatagaaaccccagagacgcagagaccctccgaacttcgaactcgatcactgtcctcccccgaccgccgaacccgctggagaagcgggcgcgacagggcgatgagttaacgcggagggagcgcggaggccgcggaagccgggggcgctgggtctcaggcccggatgctgagcgcggaccggcgtgtcctccccacagcgcccccgcgcggcctcctcccgctgcgccccgcacggcgacccgccgcgggtagccctggcgtttggccacgccgtcggctgaggaccgctagagctggggggagatcaaagcattcctatggggcccaaagagcctgggattgcagtgttgttagcctggcctcgccgcgtcaataaattttcggcgaaagttgggagcaggagtggaggcttggggcgggggttggtggggcgcgggggttggccggagggagggtccgggggtttcttgcacctgcgctcctgccgc

SEQ ID NO: 333614 - DNA, 746 bp, Homo sapiens
  chr9:1051558-1052304
  hyper
tgtttccccagagtgagggccgccaggctcaggccccagcgaagccccgagcgccatggccgacccgcaggctggctccgcggccggggactgggagatcgatgtcgagagcctggagctggaagaggacgtctgcggggcgccgcggtccacgccccccgggcccagcccgccgccggcggacggggactgcgaggacgacgaagatgacgacggggtggacgaagacgcggaagaagagggcgacggcgaggaggcaggcgcgtcccccgggatgcccggccagccggagcagcgggggggaccgcagccgaggccgccgctcgcgcctcaggcctcacccgccggcaccggtccccgagagcgctgcactcccgcgggcggcggcgcggagccgcgcaagctgagccgcacgcccaagtgcgcgcgctgccgcaaccacggcgtggtgtcctgcctgaagggccacaagcgcttctgtcgctggcgcgactgccagtgcgccaactgcctgctggtggtggagcggcagcgcgtcatggccgcccaggtggcgctccggaggcagcaggccaccgaggtgcgtacccgcccggcccgggcgtctcaggccacagtggaggtgggggagttggaggggagcggggcggccgtccacaccccccgcgcccagggccttgcggtgcctggcactccctaggaaggatggtaagaacgcttttctgcttgcactggcgagcagggtc

SEQ ID NO: 333615 - DNA, 899 bp, Homo sapiens
  chr9:3181024-3181923
  hyper
cttctacacgcgcgcgccgggcaacatagcgcaccgcgggtacacgcacgccgaccggacacacgcagtctcgtacacgcccaacgagcgcacacacccgcactccatgcacgcgcgatgggcgcacacactcgcatccctacacgtgcacacacccgcgctccaattaccgcgctagcgcgcaaaagagccgcaacttccgagtgggactcggcatgcgggggcagtgcccggtacttcaccatcagtcaccttcgcgtccgcctcctcccctgctggttgcacctccagccgcagagatttccggctggggcaccagaactgtccaggccgaaagagctgctcctccgtcacaaagcgcagttgcacactgtactgcaggcgcgcggggacccgggccggagccggggtcgcagccatggtccaagcgcctctgctcctgagccctagcagtgcctcccccgcgctgctctgggcaccgagaaactgctggggcaagggggagggatttggaagcgcgcaccaccttccccagctcccgttgcaagttcagtcttcgacctccgagacgcccggtgacttctgctggcacctgctgccctcggcatcacctccctcatccccctggagggcacgctggaaagctgcaactccccaccctccgcacaggagcgccccgtagacgcgcagatgggcccagccacccagcggggcggcagccctgagcacacaagtttggagagcgcgcgaggcacctgaaagtggttggggtttggaagcaaaagggtgacacctgctgttcgctgggaccgctctgcgggtgtgggcgtcggtttggaaacgtcctttgcctgagctctgcttggtgagtgggcactcgctcttggtgtgattctggc

SEQ ID NO: 333616 - DNA, 375 bp, Homo sapiens
  chr9:4297365-4297740
  hyper
cgtctctggggctcggtttcctcatcaggtgaagccagggtccactctagctttaatagtctctcctcgagattcccggccccatactaaagggacctggtccactggggggagctgcagaacttccctcttctcacaaactccagggccctggggccccaactctcgggagatgctgaagtcttggaggaagttggttctgccggctcggggagagggtgcaagagcaaccctctttgtgaaacggggccgcgactccacgagtcctgtctctacggaccctactccctgtgattccggaagcacctccctaccccttccccaggtttacatgctccagagatgagggccaagcggataccggggcaaactagc

SEQ ID NO: 333617 - DNA, 1389 bp, Homo sapiens
  chr9:4298792-4300181
  hyper
cgggccggtacccgcgaggagtgtaggtaccctcagcccgaccacctcccgcaatcatggggacaccggcttggatgagacacaggcgtggaaaacagccttcgtgaaactccacaaacacgtggaacttgaaaagacaactacagccccgcgtgtgcgcgagagacctcacgtcaccccatcagttcccacttcgccaaagtttcccttcagtggggactccagagtggtgcgccccatgcccgtgcgtcctgtaacgtgccctgattgtgtacccctctgcccgctctacttgaaatgaaaacacaaaaactgttccgaattagcgcaactttaaagccccgttatctgtcttctacactgggcgctcttaggccactgacagaaacatggtttgaaccctaattgttgctatcagtctcagtcagcgcaggtctctcagtgacctgtgacgccgggagttgaggtgcgcgtatccttaaacccgcgcgaacgccaccggctcagcgtagaaaactatttgtaatccctagtttgcgtctctgagctttaactcccccacactctcaagcgcccggtttctcctcgtctctcgcctgcgagcaaagttcctatggcatccacttaccaggtaaccgggatttccacaacaaagcccggcgtgcgggtcccttcccccggccggccagcgcgagtgacagcgggcggccggcgctggcgaggagtaacttggggctccagcccttcagagcgctccgcgggctgtgcctccttcggaaatgaaaacccccatccaaacggggggacggagcgcggaaacccggcccaagtgccgtgtgtgcgcgcgcgtctgcgagggcagcggcggcagggggaggaggaggcagaggcggggtggctggaccctcggcatcagctcattctcccctgctacacacatacacacacaaataatgtttctaaaaagttcagttgcgactttgtgcctcgcctgtcctgttcatcctcgtcctgggccggggaatgcttctgggggccgaccccgggatgctggctaattgctgccggcgggttccgtcgccggtgtgaccctggacggcgcggacggcgtacagggggtcccgggaggggcagtggccgcggcactcgccgccggtgcccgtgcgcgccgcgctctgggctgcccgggcggcgcagtgtggacgcggctgcagggagaggggaagggggaagagggagggaggaaggcagccgggcgaggagtgtggatgtgtgtgcggccgcgagggccggcctgtagccagctgcttcctgagtgtgagcgccggagggggagggggaagagtgggggcgggctcgcgggtcactaggctggccaattcgaaggcc

SEQ ID NO: 333618 - DNA, 384 bp, Homo sapiens
  chr9:6412586-6412970
  hyper
cgcctccgccaggcgacgggaaaccctcggaagtgggtttccgcgcgaaagtagcattgcggccaggcgggaaacgtgttcgcgaagcaggagggcccccggggcctttcccgggcgacccgacccgccaggccgcgtggcgggagctttcctgttgagcgcggtggagcgcacacatttccttcagttctttctcggaagtttaggccgcacccacccgcgccccctttccaggattatacaagtgcacgccagggtttcttatttttggtgtgtttttgagaccaaagaaccatatccgctaagcctgaggaggcacccgccccctcagctctgaaacgaggcctcaaaacggcaaccgatgtggtagccgcgcaatcttcc

SEQ ID NO: 333619 - DNA, 1812 bp, Homo sapiens; identical to SEQ ID NO: 234038
  chr9:6644339-6646151
  hyper

SEQ ID NO: 333620 - DNA, 1424 bp, Homo sapiens
  chr9:8857015-8858439
  hyper
cgttcccttccctacggaatgaatgtgtgtgttaagtacaccagattcccgcagctgaactacgagctttgattctgccacgggaaggtctcccaaacaatccccctcctctatggcagctgcgtagactttgattcctgctatttctccttctccccactagttcagaggaaagaaagaaaaagaaatcgccccctcaccgtagtcagccctccttaaaacagtaatccctgcctttaaaaaaggcggtggcaggatccctgggtaagggtggattgccccaccgctccaccatttgcccccaatactacgcccaccctaggaggagagagcgggggtcgcacaaatacacatacccggacacccccattctctagagtcgcctctctcccgggtctgaggtttcaggcgagaagtgaacccagcaggagaggacctctgcccgaggaggtccagaggagcaaactgtgcgctccggtgcccgggcgccgggctcgcggaaacgcgagcgtgtcgctctggctcgggaggcgccggcagccggagccgggcgcagggcgattccggagcagcaagaggggaagacaccgcggggcggacggggtcagttccagggactcacctggtcatgttggccccgggcagccgccgccaccgcctcccgcgccgccgccaacactttcctccagcgccttcgcgccccgccacggccgcgccgccgcctccgggcggccaatttaatcccgcggagcagcggccgccgccgccgaagcccccctggtcgccgccgccgcccagccctcgtgcggccagcccagtccagagcgaggaagtggaagagagtcagcgagtgagtccaaaaacccgaaatccagcatccaaggcagcgcgtccccccgccctccctccacccctacccccttttcctcctcctccgcctcctcctcctcttcccgggccgtcctcttggcccttctgagcccgcggcttccgcggcggtttctcctcctcccgctcctcctgctcgccctgcgcccgcttctctcgctgccgccgccgccgctgtttgtctcctccccctcctcctcctcctcctcttcctcctcctcccgctcctcgatgctccgccgctcgcggctggggggtccggggccgcgtctcctctcctccctccgcctctcctctttcctccttcctgctgcctcttcttttaaagcggattctttggccacaaatagcaactcggctgcccccctcggtgcctccctccccttctcttcttccccccaaaagtgaagcgcacgcgaggtaaccagaaactgaggctcgtggggggagaggggtgcgaggcgacgcctgggaaagggcccgagcagagtcgagggccgggaggtggggtggccggtgcagcccagtctttggac

SEQ ID NO: 333621 - DNA, 807 bp, Homo sapiens
  chr9:10612635-10613442
  hyper
cgcgctcggaaagccggcttgggtcctgctaattattctgaaggcaaagtacctgcactctccccgccgaggctggctggcggcgccgcgccggaggggaggaggctcgggaggaggaggagaaagagcagcgggaggactcgggctgggaggggagcgcagggttggggaggccgatgagcggctcccggctcctcggagaagcagccgagacggcaaggaggaggcgaggctctgtcggggcgaggcgctgcccccacgcgctccggccgccggctgcgggcgcggctgggcggggagccgaggcggccgctcccgcactcgctcgctcgctcgctggcgctccctcctcgtctcgctcgcactcacaggcacacaccccacgtctccagcagctgccgctcggcctcacgcactcacctgcatttccttaacgagccacttgatggctgccagcggcgtgggccccgctccggcgggcgggggccggggcggggagaacgcggcgcgggatgctccgagcgcccgctggggagagaagcggcggcggcggcggcgctgcgggcgcgccagatggggcgggaggaggggagacccggcacccaccggcccagagctgcctgacgcggcctgggcggaccccgccgcccgggtgcctaggcacgattccagggatccagggtaaagcggttcgcgcgggaacaggaggatatgtcaggcacaggctattccccatcactatagccacagaggactggtccagatgcggatcccgatctgtgcttcttcaggtgttcgcgtgctttc

SEQ ID NO: 333622 - DNA, 1138 bp, Homo sapiens
  chr9:13278637-13279775
  hyper
cgcccatcagcgcggggggtgaggagactaagggagagacaagaccaacgtgctcccaccaacgggagcggcggttaaaagggcgccggtgccaggggtgagggacggggcaccggtaccaattagcggctcgcctcggggtccccgcggctaaggcgagaacgcaggaccaggagcattgctgcccactctctaccgcaacccgcacatcccgggaccacgtaacggcggatggggcgtccgggagcggcccctgcaggggagagcaacaggctcccgcgccctggaggcctggtctgcgctccgggcccccaggctaacaccccacccccagccccccgacaccaagactgtgcccctctgggtcaaggaaaaggaaaaacttttaaacctcttagtcagcgagagcaaaagaaaggggtggcgggggtgctgaaaggtctaggattatccaccgcggggctggggggagtggagacttgcgagtagcaaaggaaacttctagaccccatccttttaaaaaagccacagcagcggcttccgcgaagcgccgggccgcgcggggtggggcaagcgcaccgccccaccgccccacggcccgccgccacccctacccccacccccacccccacccccatccccgcccccacccccacccccaagcgccgagcccagggcgcccgcgcaccttccccgccggcgcgcgcgcagggcgcgggggcgcgcctcggcctctgggccggggctcaagcgccgcttacccggctcgcggcgcccgcccagggccgcgacgcgagggggcggaggactggggagcaggggtcgccggggcctctggatgcctcgcctcgcccacgctcactgtcttctcttctgaagtaacgacccggcgaggagcttcggatcaaaacgcacagacactcacgcgtgactgagaaacttaatcccgcggtggcccgacgccagcctagcgctccgccgcgccccctcccccagcgcgcgccgcacttgcgccgaccggggctgccgcggaggcggtggcggggcccaggctgctggggctgccgtgacgcctgcgaccggcggggcggcgggcgcgccttggccaatcaggggacgcggccgagcaggcctgtgc

SEQ ID NO: 333623 - DNA, 2395 bp, Homo sapiens
  chr9:14313401-14315796
  hyper
cgctaattgtccgcaacaaaacaaaacaaaggcatttcgggccagagagaaagctcgagaaagcgaccgagacatgtacctgagtgagacagatgggagaatacatcatgacttcgccttaaaacgcactttccgggagatgcccaagaaaatcttcgagaagcaagaatttcatctattcattttacagtcatctgagccccgcgatgcgatcaatcaggacggggctctgcgctggatcaccgcaacttcacaacaaacccagtcctccttaaatagccaaagattcaagttcactcggcgtgctagatttccaggggtgaaatccaatctacacttttaaccctcttgcagtccgagcgcgctggccgtgcttgccgaggccgccgccgccgccggtgttggctgcttttcgcctgggtttggggatttgttttctattttgcagttgttgttgttgttggggtgtagggggtgcgcgaaggttcggtgtgggttggattggggtggtggttggtggtaaaatgctttttcaaaaaaggcggggaggggggcgcgggagggcgcaggagggcgagcgggcgggcgggagggagagcggggagaatgtgtcaccgcgctgggaaagttcaaggttacagccccaagcactgcggcaggatcccggagtggtgatcgcaggcgaaactttgccgcgagccgaccatgtgtgtgcgcgaggggcagcgtgagcgagtgcgcgcgggtggcggggcgcgcgcgggagagggccggggtgggggcggggtgggatgggggagaagggagaggccggggtgagggagggggcgcgagcgctgatctctggggcggaagaggctcgcggcgcgtggtccccggcagcagcagccgccgccgcccgcgccgggtcttcggcgcccggccgcccgcccgcccgcctcgccccgcgtctgacccggccgagcgtggaggctgctgttgccgccgctgcccagagcccaggggtatcaaaacgatctcctgaaaaattccaaacgataaatcccgctctcccgctcggctccaaactcctctcttttctgctctaggctcttttttttccctccctctcttgctttctttcgttgcaaaacttggaagttgaaaaattcaccggttccaccctctggaccccgctcgagctctctccaaatcagacttaaggattgttttattatttaattacacaatcatcgctttactcctcctcctgcaaacgcgcattccttttgcaccagcctctccacaccccccgcccccccaccttcctcctcctcctccttctccttctctccccccacctctccctcatttgttaaaggtatcctaccggtgctacagaaccatgactttttttttttttccaaaatagctcttctttccgctgccctccccacaccagcacacacatacacacccccgaaaacccgccctggaagaggtatttcggtgctcgctgcggactcttttaagccgcgggaacatccgagtgggagaagcaccgaaaccgtctgagcccgagaaaggaacgagtggaaaattccctcacacccaggccgcccccaggccggggctggggcgcggacactcgcacccggggcgggctcagtccgcggagcctgcggctgccgggaaaagggggaggccgagcaggcggggacctgagcgaacttgggctcaagtagttggggcgcgccggcgtggaccaggggggtgcggcgcccagcccccgacggccccgcccggagcccgggttcgcggatagggagggggtgcgggttcgtcccgggtctgcccaccaggggcccgcacccgaggcagtcgcggcgcgcggcgcttcgccgcggtttgccgccctccccgggggtgccccgtgcacgtggcctcgctctgagcgggaggaccgggccgagccgccgccgccgcctcttgctccctccacctcctccccgcgcccggcttcgctctcctcctcctcctcctgcagccccgctggctggctcccaatccccaccccccggggcccggggcgccggcggaaagcgtctccctacccgcccgggtgcaggcggggcggggccgcggcgcgcccggggctgcggggcgggccggcgggcgcgcgcgcgccgctgcagccctccagaggctgcgggccctgagccgctcggcgcccgcgccggctccccaccgcggcgctgccccgcccccaccccgtcgcccgtgcaggctccgagtgaatgaacttgattccagggattttgaagaaggcggttcgccttgcaccctttctgcaccccccgcccacatacacacaccgccccccaaatccagttttctgcttggggtggatggggac

SEQ ID NO: 333624 - DNA, 1405 bp, Homo sapiens
  chr9:14347634-14349039
  hyper
gatccaagtctcttcggtcaggtccgcccaaggtcccagaggcactggggggtcgggtgactgtgcggagtgtaaaagacatttccttaggaaacagacaaggcagggccaggagttccgcggttttttttccgtgcagaaatcactacccggcgacggctcagggcggtagagggcaagtcttatctgccaaggcgggattagattctctcgccgagggtcccagtatcccgccgcccagcaagggccgagcgcgcgcgcgcgccagggagctttggagcgacgcgcgtagtttcgcgtcgcacgcggtgtctggtctccgcgcaccacgtgcgctcgcggtccttggcggggacgttggtgctagcgatccgacagagcacccaggactaggtttttgtgatgccctaacctgggcatttatgctgggggcggaacgaagtcgcccaacccaagttctccctgcaccctgggaaggaaatgtggtgcgccctctggggcgtgaggccgccgcggcccattctacacacctactggcattccgcttttccttactgtgcgccaggggaaggcataattcaattatatcatacaactgcagcgcacccttttccttttttgctttgaggggaattttccaattcccaaataaatacctatggctctaaagccgagttgggttctgtagtaactaccgggggtgaaaaaaaaaaaagaccccaaattggctgtgagtttacagcctgaagcagcttatttaggctcgctgagcgccgttccaaacggcagggctcacgctatttcgggagaagttggagggtggagagaaaacaaggttatttaaagtgactcccagaacgcagctttcgttcctagactctttaggtgtcagtgcttcggctccagtttagcacggcacaggcggcccagcctttgatatttaagccaggccagcgcccgggtgaaactacctgttgggggattctgccgcctggaacccttcttcttctgcgcaatactggcagcagtgggatggctctgggggtgccacgcgaagagagagggcggaagagccgggagcagcggacagtcagctgcatgtggcagtgcctagcgagctgctcccgcgcctctgctcgctctttgaaaactggaaacagccccctgtgctctgtgctgggcccctggctgcggagatgggcccaaactcggcacgattctctaagttcggaaaccacgaagcttgcgccttcatgcgtgtctaacattaaaaacaaaaaaacctcctggcggcttcctgggctcccgcccccaccttgcgctccaacacccggcacttttccctgtaccgaaattcactttactacttcttgaaattcggaaaactccaccgacgcttggactc

SEQ ID NO: 333625 - DNA, 224 bp, Homo sapiens
  chr9:16133902-16134126
  hyper
cgcgtgccaagcaccgggatcccagctgacccgagctcagagccctccaagagagcgccatctagtggagaaaacacataacataaataactgtgataagccttgcaggaggaaggaccgcaggcactaagtgagcacggaagagggaggagtaaattccgcacagattacggggcaggttcaccgggctcagtcagcctgaaaaggactttaatactctaacc

SEQ ID NO: 333626 - DNA, 155 bp, Homo sapiens
  chr9:16154671-16154826
  hyper
cgcagctcctcgccgctcggccatctggcgcgctcccgctccctccacccttctgtcgctcacctggtggagcgcggcccggggacggcagggggcggctgtgcggctccgacgccacgctggtgctgcagcagcaagcgccgcgagccagccac

SEQ ID NO: 333627 - DNA, 138 bp, Homo sapiens
  chr9:16192269-16192407
  hyper
cgaggggtggagagagtcgtccccggaattgcatggcttggggcttggtccagattgcgtggcgaggagggtaagcaggcccagcagagggcgccaccgcgctggctctcttctcccgcgcagtgcaggcaacggggc

SEQ ID NO: 333628 - DNA, 789 bp, Homo sapiens
  chr9:16871284-16872073
  hyper
cgcccccccccccccccggggagctgcgggcgtggaggtagaggtggccgctagcgcccagctgtcacacacacacaaaaaaaaattgcggggcgggggtggggagcggagcaaggagaggaggctgcgaaacgccgaggaaagggcgcgaactttattccgactgcagcaaaccgcggcagctctttccttttcgggcactcgggcgtctctgtcccctttgaccagttcctcctccccagccccgcacgccccctcctcccctgccccttccccagcgtcccagccgcggccgacccggctccccgcgaccctctcagcccagctcctccgcgcgccgctggggagaaggcgagtgaggcggaggaaaacccagcggacagaaacctgggacgcgaacgtgctgggagaaaaggccaaaagttgcgcgcagctgggggaaaaaagtttttctggtggcggagcgttttgtgccggcccagacgccggcttgcggcgagggcttccttccctttcccgtggtctgggccgcgggcctcgggctggagaggaaggaggctgtcgcgcccgcgggggaaagaacagtcacatctgtgggtgacactcagccgacccaagtcaccctgccctggagactcagaaacgccgactacagcctaagcgcgcacacgcctgcagctgaacgatatttcttaaatacaggcaaaacacactccccggccgcaagaatggggcgggggtggggggggagcttaatcatcatcatctaactaacgtacactttgtgcc

SEQ ID NO: 333629 - DNA, 1225 bp, Homo sapiens
  chr9:17905991-17907216
  hyper
gcctacccagctgtcgtgggtccccgtcactcccgggcgcatgttgcaaaacaaatcaactccatgggaaaagctccatgagcgcccaggggacaagtccccacggacaaacatgtcataacgatttcagttttgtcccattacgtgaggttgtaagtttcttcatcattcccccctcccaacaagcacaaaatcgtccccagcccctggagcatcttgcggggctcccaggtcagcaacagcactcggagctccgagctccagggaaagcgctcagggaatggctcctaggactggttcctgggaaagcgccagcgtccagggagagatttccttctccaagggccggcagggtggcattccaagcgcgagcaaggtgggcagtgagcgatcctccctttaaaaaagaataaataaatagaagccagcgcgcagccccgctcgggtttcccgaagcgcacaccgctgtcgctgccggggcggctggatgtctgcgctccccgcctccgctgggctgacacgggaggggaggagcaggagctggaggggtgttgggggtggggggagcgcgaaccatctcgagccaagacaagcagcacattcacaaataacgcccccacccccagcgcacgcgctcccattcaaagcagacccgctccgcggccgcactgaagctccaaagccgcgccgcctgccccagcgcagctctgtctcgtggggcgcacgcccgagcccgcctgccggccgccgccgcggagccaccgcaatcagcgcaggaggcggccacctcttcgagggaggggtctcgcctgagactccccttggtccccgccatggggaccatggcacgactggaggcgccccagtgccccgggttcctggcccgcctcctcggtggcacctggtgcctgctctgtatcgccggacaggtagggtagcctgtgcgtcttgcgtccctcccggggactctgcttctaaagcctgtgctacagcgaaaagcgctacagcgtgggaggtgctctcttccgcgaaggtccatcctggggctgcgctgccgcccaggctggggacaagtggcgcggggttggggctaaggcgtaccctggggtcgatcgggtcgatctctgcgtttaggcttgacccagcttcctgggaccctgtcctggcttttcgcccttacctgggtcctgcttccagccaggcagagccggggcgagaaggcggc

SEQ ID NO: 333630 - DNA, 428 bp, Homo sapiens
  chr9:19127135-19127563
  hyper
cgatagcaatcgccctaaatctgttggcaggaaagaagcctcaacgcacaaaggcaagggtcgaaagcgcgggttcagcagaccgcccctacccagccaggacctggaagccgcgaggcgagcggggggtctcggaccatcacccccgcgtcccgtccacctttgagccccgcggggagcagagcagcggtcccaaggccccggggagccccccaccccaactgggcgccgctgggggcccgggaccggttcgctggggcacccactgggcgcgcactcaccgacggactgcagcgaaaggcgaagagcaggcgcgtcccgaagacgactccggctgccacgacccggtcaaagcgtggggcccgcgggcgcccgggctataaaccccgcctcgccgcccctccccaagcctccgcagcacgtgaccc

SEQ ID NO: 333631 - DNA, 973 bp, Homo sapiens
  chr9:20620372-20621345
  hyper
cgcggctaaccccagaggactggtgagggctggcttgggatgaataaacactcgacacctgacggtcctttctctgcggtgactttcaccaagccgaagtggcgcgcgcgcgggcaggcgggagccgggacctggcccgcgcggcgccgcgcacccggatcccgaggctacgccggcgagcgcggcgcggggggcggggagcgggacagcgggaccgcccgggccaagcgattgtttcaaagacattttttatcaagacccttttgtattcgagccctacctctttttggcctaggaaagctttcgtgcaagtggaagacgactttctccacaaagtgctgtatgttactgtgctccggaccgcgtacgaacaccatccagtcgtgggtgaagccctccacggtgggttttttcctcacctgggcgcggtgccccagctccagcttcacctgcacggcacactgcgggcagggggaggagagacagccgtgaataacaggaaggcgaggtttcggcagtgaacgttgcgcctgacatttttttcctccttcttgaaacgcacataaaaggaaacggcggtgccctctgcatccacgtttcacgcgcgtgggcgcgcacactccacacccccaaatatacccgcccgcccggcccggcttggccccaggcgccccgggccccgcatctacatcggacaggattgtaacggaatgttatccccagtcgggaagggggtcggggaaaagagggagaacacactcagccacgacaagcacgacaacaaatgcatcggaaacaaatcagaaggcgatgccggggcggtttcccggcgtgggaggggaggtggctgggacccagggggaccgaagggctcctggcgagccccctccccgaaagtaccgcggcgacaggcacacgccgaggaagtctttgtgtacgtgtgtgtgcgtgcgtgtggagcgctgtgccaggc

SEQ ID NO: 333632 - DNA, 371 bp, Homo sapiens
  chr9:21031427-21031798
  hyper
cggtagcgctgcgccttgctggcgggcggggggtgccgcccgcccgcccgccgcagaggggagctcccgcctccaggccctccacccgcgccccctcccctcgggattcggccgagcgccctacctgggctgcagccaggcgggcagcgccaagggccccatgggccgccgccgccagggcttccagcgcggtccaggaaggagtaccggggaggaggcaggggcggccccgcggctgggcgcggaagggcggggcctctccacactcagcagtttacaaaaagaaaaagcccgaggtcgtgcgttggggaagagatgaaaacgaagttctcgaagtttctgcagcactgctagagcgcgtcagggcgcaa

SEQ ID NO: 333633 - DNA, 435 bp, Homo sapiens
  chr9:21395928-21396363
  hyper
cgcttcctgattgttcatgattttcccctttctccgaattcgggtctttctccgcagaaatggccctgaatctctaacactgactacggcacgatctgattttgagccgtcagtcccctcaatacactggcacattggtaaaacggtctcgctaaaatgttccatgagaaaaatgtctcgggggaggcggcggtagagctctccctctgtagtcagagccgtgaaaggcggcgtttactcgctgctcacgaggcctgcggaccctaatccccaagcgcccgggcctccactctgcggaccccaagcgcgggtctccttgaggaaggggcgaccgcgggttagggtcgctggtgggtccgttaccgctggtccggcgccctctgtcggctgtttgtaacagcaaaggcagctttgtgcgctgttagcagtggtcgc

SEQ ID NO: 333634 - DNA, 535 bp, Homo sapiens; identical to SEQ ID NO: 234072
  chr9:21402536-21403071
  hyper

SEQ ID NO: 333635 - DNA, 957 bp, Homo sapiens
  chr9:21559133-21560090
  hyper
cgctgtatgaaagcgctctccgccaacacgctcatggacacacacaactccttcctcgaggtttagggacagagagcgaacctgtgacttcgggccaggatgacgacctgagatttggacaagaggaggcggcggttccgcgaagagccaagggcggccggcgctccgggatgcgccggaccccgcggcgcatcctcgtttgggcgccaacgggcgccggcggtcctcggacccgggtgtcgactgccgtgtgcccactgccgtgtgcccaggccccgaagcctcctcaactccttgaggggcgcctccctagccagctcagcgcgcagcgggaccaaggctctcccagcttacctgcgggtccgagtaggaggacagaagcgccgcccggcctcgcccaagcgcacacgaaggggccgcttcccgccccccgcaccccagaccaggcggctcacggaacaccgcctcccagctctggcccgggaccaggcggtcccccagccggcttcggcgccgcggccggggacgcgcgtcttccttctccaggcgccggacgtggaacctgcgagcccctggcggcgccccaagttatgcacaggtcgcagctgctcaccaagctcctcctgggaggccgccctggtccccgagaggggcgcgcgggagtggacgttcccgcaccttcgccccatccacacctgccgccgccgccggggccgccagcgccgtggctccgccccggctccgcccctcgccgcccccggctcccgctccagccgccgccgcgaccgccgcggaaaggagggggagggaagaggcgcctggacggggctgcgggagcggccgtgctgagcctcctcccttgggcccggacgggacccaggtttctccactgcaacgcagctcccgagtgacggaattttgtgggggaagcggcggccactacgctcgcttttggca

SEQ ID NO: 333636 - DNA, 864 bp, Homo sapiens
  chr9:21964937-21965801
  hyper
cgtaaatgagacacgtgagatctggaaggaggtggaggtgaagaccctcccacctggcctgcatccagagtacttggggtgtggcactggcgtgggccccaggaaggatcccagccagttttggtgctggaggcccggccaaaggaagggctgctctcccgtcccgcgggctccgaggtcgccgcacccgggcgcgcctgggcctcgtcacccgcgctcgtgacgcgtgcttacaaaggaaacttttacaggtttcggtgggcagggccttttattgcccttctgctccacagcccccgtgcttaatcggttggttgggaggtttctttcgtccgtggttttggaaagtccccgcctccaaaccgcagtcccgcagtcagttctgcagcctcagggcctcgaacagccatgcttagaatccgtccttctttcctgctccatctacccttcccctctggcttcttttttttcactggagaaagcccacccgagtctctcagcctgcttcggaggttactgcggcctcctccacgggtagttctgggacccgggtctagtccgcggttccggagcaggtccctccctggagtcgtcaggcccagtatgcgtgtgctcagtgtgctcgggaaacacgcgtgggctttaacagcagatctccataaaagggtcccggagatagcctctgcctggcccgaggcccagtgcctcaaagcggacgcctttgcgctcccggaggtgctcacaccacagcggagcctgctggcgagtggagcgtaggactgcgaaccagcaatctcccgagaagcggcgagggggaggggaatgtctgtgaatcggttatccctcccacccccagcagaagtc

SEQ ID NO: 333637 - DNA, 543 bp, Homo sapiens
  chr9:21968174-21968717
  hyper
cggtgactgatgatctaagtttcccgaggtttctcagagcctctctggttctttcaatcggggatgtctgcagagggcagaaagaaaacaggcgttagaaacctgaggtcaaagatgtgtggcacatcccgccctcctctcttgccgtccctaccggcattgaaatacttatggataaagttctcgcaatggcttcacgtgcatgtacccgccgccaccgctctcccacacctccctggtccagcagctagtccactgcccgcctggctgctccaggcgcgccgaccgctcaagcgctccaggtccacccggcggagggcagagaaagcgcgaccgcgcggcccgcagggttgcaagaagaaaacgagtgttatataatgagtctcagtggttgctcacaatgccaggcgcgaaggcgtgaagatgtggcctttcccttcccgcatccccaggcatcttttgcacctggtgcggagtgagccagccagcttgcgataaccaaagggcgcctcaggctctggcgctcctcggcggaatcccgta

SEQ ID NO: 333638 - DNA, 75 bp, Homo sapiens
  chr9:21974169-21974244
  hyper
cgtgaggcaccgcgcccggccgcttctgaataatttcgatcaaaatttatattcgatatttattccaacatacac

SEQ ID NO: 333639 - DNA, 1137 bp, Homo sapiens; identical to SEQ ID NO: 234078
  chr9:21974499-21975636
  hyper

SEQ ID NO: 333640 - DNA, 231 bp, Homo sapiens
  chr9:21994209-21994440
  hyper
cgggcgcccctggcgctgcccactcccccgtgagccgcgggatgtgaaccacgaaaaccctcactcgcggcgggccgcacgcgcgccgaatccggagggtcaccaagaacctgcgcaccatgttctcgccgcctccagggccgagctcggcagccgctgcgccgccctttggcaccagaggtgagcagcgccactcctgcccccttaactgcagactgggacccacgcacc

SEQ ID NO: 333641 - DNA, 748 bp, Homo sapiens
  chr9:22446681-22447429
  hyper
cggattccccgccgccctcctcccagaaggtccccactccccgccccgggccctcccccggcttccgcgctgggccgggagcctgggtgggcggggtagcctctctagccttgccttcttggctggaggcacaaaggcattaacttagcgcccggggtctctgccaggctcacgggacagctgcacctctcagcgtctccagctccaggacgcggtcgtcccaactccttccgagtggaaagagtgtaaaacttttgtccgtgcgcgggtggagctcagtaggaccacggcgcgtcctgccccggcttccccagcctcccagcagggttagctgcggtcagcgcactttccacttgggactcccggccagaaatttctcgggaatggagcggtcacagtgtggcagcagagaccgaggcgttagcggccgacctcacttggcccctgggctagtggtggctgcccctccgcccccgtccccggcgttgccggtaccatcggggatgcaggttcccccagcgttcctgcggccgcccagcctctttctgcgagcagcggccgcggccgccgccgccgctgccgccacctcgggaagcggaggctgcccgccggctcccgggctggagagcggggtaggcgcggtgggctgcggctacccgcggacgcccaagtgcgcccgctgtcgtaaccatggtgtggtgtcagcgctcaagggccacaagcgcttctgccgctggcgggactgcgc

SEQ ID NO: 333642 - DNA, 501 bp, Homo sapiens
  chr9:23831118-23831619
  hyper
gacctgggaagaaacggtttttatgcttccgatgctcggaggctctttcttatattgaagatttatgtttccacttgtgtgcgatgcacgtctaatttgaaataataaaaccgggctgagcaaccagtcaatcagagccatccagggcgctccgcacgccgccctgccccccacctccctccggtctctaactctttccctcctcctccccctctcactctcctggccctccccgtcttccttcctccctcctcggctctcacacgcgctcacacttttacccccacgtgtgttcagatcaaacccttgtcccacagagcaagtgccggcaccgggccacggtgacaaaggcggagtttgtatcagaagaagactgaggcccggggagacacagcggctagagaaacagctgtcttatcagcccgctgcagagatggagatggcttgagaggtcctcaacagataatcacttgaataggtttgcaatgcgccaaacttcac

SEQ ID NO: 333643 - DNA, 113 bp, Homo sapiens
  chr9:23849766-23849879
  hyper
cgggtttctttttgttgttgtttaacgaccccctcctcccagcccccaaccctttgtgtgtgaggattccccttcaaaccacccacagaccgagcagacgagaagaaatggta

SEQ ID NO: 333644 - DNA, 1370 bp, Homo sapiens
  chr9:27528537-27529907
  hyper
ggcctcgctggggtcgggctcctccactttcccagctgggatcccctgccggagctggcgtgggggccggggagggggaccagaggggcttccttctctccccaagccccgccagatgttggaaaggcaaacaataggggaaacgcggagaaacaaaaggccattcgccacgatctcagtcggctgcgtagagagatctctgtggggagggttaggggagagggtcaggaaagagcgcgaggggggggatcccgagagatttagagtctctggtacttgccaggcaccaggggtcggcgctttaccctcccagcaggggtctgaaggtgggaaggggcaatcaaagaaaacttgaagggttttcaccttcttccccagttcagggaaagggaggggctgggattccagatgtttgacagttgttggccccaaagttaagcgcgatttgtacggcctttacacgctccccacctccgtgaggcatcgtcagccccgggggcgacctggctgacggtgcggacttcccctacgctgccccaagccgagactcctccctcaggatcaggacgcccaagcgttgtcccccagcccaggcgcacttttgtaaaagtttgtcttcccgccacccacagcccaacacgcaccctgcaggcgtccgcggctggggatgggctcggagtcttgcaccccgaaagaaggacgatcttattgatttatatcttttcaaatcaaggacaaatcaagatcccggggtggaaagtgggcgacccttgttcctgccgggaagtgcacacgaggagccggccagaaacccaggcgccggcaggggtctgaagaggactccagccccggaagcccgtggccggcgggcagaagaccggtccgccgcctcccgcaccttcttgcacccgcgcccaggtgcgccccaaacctcgccgcccgcccgggcgagatcgggagcgagcagccaccgggctgcgccgcctcccctagcttggagcgggttcttactcaccgtggggttttacctccagcccagggcccggtcggctcccttcgccgggtcagctgcagccagcgcgaaagaaaatggtgagctcggggcaggtggggcgtcgcttgccaatccacgcaagggactctgccgccggtgcgcgaggtcccggcgagccaaccggcggacgggcgagcgcctggctccagctgcagccgccgtcgctccggagcagccccctcatgcacccagcgcgccgcgcagccggccggggctcgactgtctcgcggggacgccgagcggggacccctggcggccgcctgcggtatggcagcaccgtggagagaaaagtcgtctttgggatcatcttccctcc

SEQ ID NO: 333645 - DNA, 858 bp, Homo sapiens
  chr9:29211831-29212689
  hyper
gaccaaccacccagcgttctccgcaaaaaacttcccttaaagcagccaaatattcaagggaggcgggggaaattgggcattagttcgaatacacatacaacagagcaccacggagcaacactgaaaggcaccttttttagatacagaccctatagactctctctcacccttcactccctcccaccctgagtatctgactgagaatttacagagaaccaagaggcgaaaggagagtggaggagaaagagggcattacctcccggggctgccctcagggtgcgggtcaggatctcatccccgaagtggctccagttcaaggcacagctttccagagctcagccgggttcggacctgcgtccccgcggcgcggtgcggagctcggaagcgcgccgggactgccgctcacgtcccccgcccctgccgcgcgggctccgccaccccgcgagcacgctggctctccgcgctcaccccgccgcctcctggcgcccccacacccacccgctccgcggcgcccgctgggagcctctagcggaggcgaagggaacagcaggcgacctgcggcgcccaggttccgacgccggttgcagggagccggccaagcggcagcgtgggcttcgcgcgcccccgagtccgcaggccgggtgccgccgccgcccccacctgcccacctgcgccaggctcacctgccaccgcgtcctagttgcgttcaccggtgcccacagctctctatggcaattgggggtgggtctgcggtgctaataaaaatttaaaaaaaaaacctctctggtaaaaaaacgaaaacccaaaacccaaatccacgctgtatatcaacctccacagagaacccagtccgaaatc

SEQ ID NO: 333646 - DNA, 1969 bp, Homo sapiens
  chr9:29212746-29214715
  hyper
cgcagctgggcagcgccgcaccggctactccctgacttgccaggcgggtcgtgcgatcgcgtagcgacgcccggagagatcctcctaacttgacttaacccccaccccatccccaacatctattttaagttattgtctctggcaattcaagcagcagctttgctgcctcttaccttgaggcgctgttaattctccttcgtgtccttaaaatcccaagccaaggatgcgacgcacacaagtccaggggcttttcctggacttccccctcctcagctctgaaggctcctcctttccaagggatcaggaggggatggcggttcaaaagccctcaccatagaggcgcctccaagccttcgtaccagtggaaatggagaccgggaccaccttcccggcacccggaagcctcccagcccctcctgggccaacttggctgcctattcagttttcttccgtaaccccacagacacgtcagtcaattccctggcatcaggcaggatattctcagttgcggccgctcctcttgctttctctcgataatgcccctcccccctttctccccttaatttggaaaaatttctactccctgcccgaattaggtggggatgaggcggaaaggtgtaagaagagccactccaaggcacagcttcggaacaccgtctccctgggctgctgcagcgcgaaggtgtctacgctggggaaactttcaggggaggcagcgccggtgcggggctgggcgggcggcgggcggcggcgccaggtgaggaggctttgaggaggcggctgcaaggcgggacgcaggatagccggctggggcttggcagccgggctcagagctcgggctgcgcacacacacaggcgcgcacacccgcgcgcgcgcagctacacacgcacgcccagccctgcgcccgcggcccccggccagtggcgagcgaaaagtcgggagtcctgaggaggggtaggggttccaaggatgctgatgacagaaagagtcaatcaatcctcactagttagcggattgccggcaggcagttcctcgccgcacgccgttaagtccgttgggccacctctccgttctctgccctgtctggcatttcaactccctagctcttttcttgaagccagttacaccccctcgacacccagcgagaggccaccagactaaagatgagccccgttcccatcgccaccctccaggggccacctccgccccttctgtagtggagaattgaagtggctgcagcagctctcctgggagctgaggggctccccgaggtccttcgaatagaggagcctacacatcgcttcgtgaacataatcccctcgcatcccgtctttacctgcccactcccttcgtaacatttcccccaaggagctcccgaaagtcgcttagatgttttgaaaatgaatttcttagggaattgtagtgcctagcttttggaactgggttaatttaggtgctacgcttatattgtaaactggacggtagcaggtgaacggctcagctggagaaaggggagggattaggagtctggagacccaacccctttagcagccatttccaaggttttgcaccaggagtagctgtccgggtctctggctagctcctgtcccaacttctttttcttccctcgacggtcgggagggatcactgggtgctacaccgctggggcgtcccaggcaggagagacttcgctctcagaagcgcccccgtgtcatccacaactcccacgaaaggagcttcccaagaggagtttgttttacccggaatgggctgcaggaattaattgcttacagagagtaaacttttgcccgttgtttttttgttttttgtgctttttttaaccaaagcttgcatttgtgctccgcgtagtttctattgcaacagagcgctactctgccttttcaactgtgagacagaggattgctgaggatttctgccctctggggcttcgcgaatatctatggcttc

SEQ ID NO: 333647 - DNA, 997 bp, Homo sapiens; identical to SEQ ID NO: 234099
  chr9:32782695-32783692
  hyper

SEQ ID NO: 333648 - DNA, 194 bp, Homo sapiens
  chr9:34379701-34379895
  hyper
cgggccggtgctcgtagggaggtacacatctggagaaggaggaagccgcgagcatggaggggttgggccttttgactctcatcccccgatttagaccaagcccctgggcggcgcttcaggtgtccgtcccaaggctcggaaatcctcctctccttcttcctcacccttcaaaacccccactgcagcaccgattc

SEQ ID NO: 333649 - DNA, 476 bp, Homo sapiens
  chr9:34380737-34381213
  hyper
cgagggcgggacacggcagggcctcgagagcgtgcagcgcggggctagagcaggctgggggcctgcacggaagctggccgggctggaagggggcggggttctggggcggggcttgtgtggggtggagcccggctgaggcgggcggagccctgcgaaccttacagtcggttgctcccggcaccaaggccgcaggcggcggtcggtgcagggcgccccgctggcgtagtagtccatcccgcgcagacagtagtggcggcccgagcaagcactttcgtaaccatggaagggcaggcggccgggcagcgggtccacgcacccgcatcggggcgtgatccgcggcagctgctggttccgcgacagtgagttcagcatgttcaccatcacttcgcgctctgctcccgcgggtccccagcgcaggagacccaaagacagatgcacagggatgggaagaggccgagtcacggacagagtgaggc

SEQ ID NO: 333650 - DNA, 496 bp, Homo sapiens
  chr9:34591191-34591687
  hyper
cggccagctaggacttcaggacacacagcaaactagctgcgccccgctgagggtcagcgcacagccgcccacacaaggtgtcctctccccgggctctctgggccgccggcctcctgcttcccgtgccgcagaccgggattagactgtggacgcggggaaggaagggggcgttgcgacgggatcttgaggggagcaggacttgcccctgcccctgcggcgaagctctaggccctggcaaggttcggtacaccgggggccgctcctccccagggggctgaccggcctcggcgctctaatccggccggggaggggcggacggggtgaaaattggcgagtggtttggggaacggacttgacctccagatgccctggtgtccctggctcagcctctttctgccaggttgggagcagtcgggaattctgtcccggtccaacgtccccctcggcccccggggacgcagaggctgctgtcggcagagcagcagtccacggctgc

SEQ ID NO: 333651 - DNA, 338 bp, Homo sapiens
  chr9:34664959-34665297
  hyper
tggggaggggcgctcggctcgaatggcgacagcggcggcagagtcaggaggtcagtacggtgggcttcggtttaaatctttaatgcactggctggctgggcagcggcggtggggctgcggcgggggaagccacgacccgagcgctggggagtaggacccaggccgctggacagacagctcatcaggcctcgcagaggctccagcttctgctccccggggtgcgccgagctgtggggcgacccgacactggcatgaggcggggcgggagctaccggattccccccgatgggtcctcagagactgagtcccgtccatgcccggggcgggtccgcggtatc

SEQ ID NO: 333652 - DNA, 952 bp, Homo sapiens
  chr9:34701373-34702325
  hyper
cgaccggggcatgtgtgcggatgtgtgtccgcgcccgtgagcgtgcccatgcatctcccttcctgggcctgcagggggcgccccgagcctgggaagggaggctctggagtggggcgcggctgcggcagaggggtgggcgcatgcggctgtgaccctgcgagctcctcagagaggctgcggtgagcgggcgtccgaagtccctgggcctggaacagcctctggcgccctcccggctccctggccccgccgtccctggggtccccgcgcgcgggccgggcgtatggaggggaggctcgggctgtgggtggtgcccgcgcatccgatgacctgggccgacagttaccccgggccaggacaccgccgtccggccaaacccctgccacccaggcccccgagcctcgggggtcctctgcggggccggcccagcccggtggccgggggaaggcccgtgtttgtcggcgaatatgaagcatttatctttccctcccacgccccaaatagtcccgatttacccagagcccaaggtgcccaatgttgaagtcttgaaataattactgtttggcttaaaggctgaaggagggttcacatcacctctggcacttcgctcgcacccgatagatatcttacaccactcattacggggccaacgctaagaaaggtttccttattccaaggaaatatattaggcgcgaggctggggctggaggatgaagggctatagcctgacatgggcggaaaaggaacttgtcttgcccataagtggacacagggaaacgcgcaacctttggcctagaatgagacacatgtgagaacaaatcgtgaaaataattgaaaacaaattggtcctagaaagatgaaggaaatgagaatggaaaattcaacccccactcctgttttcctgtagcagacagaggactgctgcctcctggtggccgagcggggcagtgagcgc

SEQ ID NO: 333653 - DNA, 904 bp, Homo sapiens
  chr9:35161771-35162675
  hyper
cgcgtcacacaactgagggtcaaccccttgctccctgcagtaagcctgattagtgggcggagcttccttcaggatcgcaagaaagaaaggaggaaggggaccccgcctcctacgtgctcgcgggggggggcggggtcggtggactgggcgtgagttaattggctggggggcggggcaccacgggttggctccgcccaggcgctcgcgcggatcccgggtggaatgacgggagggagtcccggcagctcctacctcccagcgatggcgtcgctgtgccgcgcccagtccccagcctgccggccggtactcaccgctacccggagttcgctcagacggtgagatttggggcgggtccgaggcagcggcgggacgctacctgcgaccgggaccatgaggagctgccagacccgtggggccggtaacgagagcagtcgcggcacctgctgagaggaaagagggagcggtccggcgcggctggggcgcggcagaggcttgcccgatcctcggccatgtcactgctctgcgtgcgcggtgagtgcgcggactgaggcggggaggcggggtgtcggcgtagaggtccccgcacccttccagtggacgtccggtgaccgtctcacccaaactttacatcccgtccgtgctttgggggtctattattttggcaatcacttaacaatcacttgagttctttccactttcttgttttcccccaagctcctgcaagggacgattagctctccattctggtagccatgtgacaatgttgttggactgcaggctcagatcctattaaacagtgactggggttctctagtgagagtggacgagttagaagaccgcggatggttggtgcctgtgaatggtgggcagcctctcattcttttcctcctcctcgcaccgtaac

SEQ ID NO: 333654 - DNA, 606 bp, Homo sapiens
  chr9:35675615-35676221
  hyper
atctcccctacagccgtccctgaacactggtcccgggcgtcccacccgccgcccaccgtcccaccccctcaccttttctacccgggttccctaagttcctgacctaggcgtcagacttcctcactatactctcccaccccaggcgacccgccctggccccgggtgtccccagcctgcgcgggccgcttccagtccccggtggatatccgcccccagctcgccgccttctgcccggccctgcgccccctggaactcctgggcttccagctcccgccgctcccagaactgcgcctgcgcaacaatggccacagtggtgagggggtctccccgccgagacttggggatggggcggggcgcagggaagggaaccgtcgcggcagtgcctgcccgggggttgggctggccctaccgggcggggccggctcacttgcctctccctacgcagtgcaactgaccctgcctcctgggctagagatggctctgggtcccgggcgggagtaccgggctctgcagctgcatctgcactggggggctgcaggtcgtccgggctcggagcacactgtggaaggccaccgtttccctgccgaggtgagcgcggagctggcc

SEQ ID NO: 333655 - DNA, 894 bp, Homo sapiens
  chr9:35756575-35757469
  hyper
cgaaggcctgtctagcacgagggcccaaaggtcttgtcagtggccagtagctctgccgcctttcccagagagggggtccaggggacatcctggaaggctgggccctgggccaccttctgctcttgcaagctagagccagcccaatagggggcggatgtgagtggggagctggggcgcatgaaggtgggggtgatgccgaaggggaagggatcgccagtggggattggtgcgtgtgcggaaacggggacagaagtgaaggttcatcgcctataacgaagatgaggtaggcatataggggcttctggaaagctagaggctgggctgagccaggagtcctctcccagaagttggggggcggtgcagaggtgtgggtcgagcccgcatgcgtgcctgctggggagggggtgagtggtgaggaccaggcccgctgggtcctgggggcgcggtggctggcgcgcaggtcccggagggggcggctggcgcgcactacacgcttgggaacaaggaaaacatccgccggaggcccggccgggcggcgctccagcctcggggcaggtgcgcggagaggaagtgagagcattccggcccccccaccccaaccccggccgctggccctctggtgagtcacagccgacccccgccgccggagggagaggggagctgcgggccagagccccggagggtctggaggagccaggagggtttctgggagcagagggtcacttagtgggcttctgtcgtggtgtcgctacgggcgcgaaacggacactgaacacagtctgactgtatggaggcaggtggggagggatcccctgggagaacttggcgggccgagagcagaccccagggcaaggaggggcccccgagggggaaaccgggagtcgggcaggtggc

SEQ ID NO: 333656 - DNA, 857 bp, Homo sapiens
  chr9:36036762-36037619
  hyper
cgacacacagttgggccataacaaagagccctggtacggggcacgttcccgcccccgggaggttttggaaacactgtgaggcagggggcggggcttgagcgggccgcagccagtcaccaaagggccgggcgctgggggcggggcctcgcgcgagcggcggcggtagcggcggcagcggctgcggccaagctgggtccgagcatcccgcggctctggagccgcccggcccggacatggcgaccgtccgggcctctctgcgaggtgcgctgctccttctgctggccgtggcgggggtcgcggaggtggcagggggcctggctccgggcagtgcgggtgagtaacctccagagcaacggttcgaagctgtcgggagcggccgccacagcgctccaagatggcgcggggcagggggcgggggtgcgcgcgacccccagaccctgcccacgtccggcgaccccgggaccccaggtctcagcgctccagaggctggtgccgaggcggggcgagtgaggaactctctccgccccaagatcttctgggcggtgactcgggtttgaggccttggtctgtcacccaccgacacgggccccctcttcggcactgaccccttcgcttgcctctgctgcttgtcagaaaagggtgcgatgcccccgcccaggatcgtcgcgaggtttagatgggatttcggatacgcagccgccctaccgcggccctagttagttattgttacttgttacttgacccgcacttggttcataacgaccttggtggcggtgagcactgacggtccccacagcccgcgtggtgggtcctggactcgggcaggagacattaaaaatcagtaaaccctgtccccc

SEQ ID NO: 333657 - DNA, 1028 bp, Homo sapiens
  chr9:36257924-36258952
  hyper
gcccagccttttcacgccaggacagctcgcctgccaggcagttctccaccctctctcgccccgccccgctcctaacgggacagtcagcatcccccctgattggacagcactgttccaggggacaagtcaacctgggcctccctctacatcccctcccctgctcatcagggcccaccccgagccacacggcggagccctgaattgggccaaagaggtgccctatggtgaggcctgcaggacattgggcgagagccgggtccagtgtgggcctcggggcgcggtggggtggaaagcggccggggaggggaggcctggggcaggaggccgggggaggcggccctgggggtgggcaggatgctctcccggagtcccacgccgccgcgcggctctcaccagacgccgtcagaggctccctcccacgccgccaccgcgctcctcgggcgagggacgaaccaagcgccacgaagcaggcagagcgcgagcctgcccctcggtttccgcgctcgggcgcgcgggtagacgactcgtcgctcgaccttgtccccactcctcgctcgcccagccacgcccacccggagtgccgaatccgcgatcgcgccctgacgccacccgagagagctcgcgtgattggctgctcccgtccccgtcccccaccttcccggcggtattttgaggcgcaggcagggtgctgaccagcggaccatcttccatggcctctgccgcgctggagctgctgcggggctgtcctgccagcttgtgctcccgccccgaagcgtcctcctccactggcgacacacgcactgaagcccgagtcttcccgctgggtagttgttttggtcttgcacccaaggagggatttcttgcgcctcttgttccctcagttatttcataaaccaggaccgcaactatactgtcgtgtagcgcggccaccccacagcggtccctgacgttaacccttgccgtgactgctagaagacactggtggagtgtgaattgatgaccaaggcatggcagagcctctctcatct

SEQ ID NO: 333658 - DNA, 416 bp, Homo sapiens; identical to SEQ ID NO: 234133
  chr9:36739584-36740000
  hyper

SEQ ID NO: 333659 - DNA, 2775 bp, Homo sapiens
  chr9:37025300-37028075
  hyper
cgtggcagacacggacatgctcgccccgggaagctcaccttcactccagccgggtctctgctgcctttgttaaataggggacctgcggctaggaaagctggatcccaggctgttgggatgggggggagcggggtgggaggaccaggcatggggacggctcctagcccgggagcaactccctgacctgaagcccgcagagaccccgagcggcacccgagccgaggctgccgaagcctgtcaccttcctccagcctggctctgcagcaaacagaaaggaaacgcgattcgttccacttggaatttccttgaaatctccgaatctaatccggcgttaactcaccgtgagaggagcgctcatctcacaggaggctgtggtaatgggtgaattggcaggatccctgcgggccaggcagccaggccggccttgccctcgccctaaatgacccttcccgtctcctacacacgctgcgtctttcagaggcgggggtgcctgcgtggtaactaattggcttcctctttctttctttctttttcgtttcttatcctctttttttaaaggggagaagccatgagaaaaggcgtcctgcagagaaggacccaatggggtctttaagggtctctgtatgaactggccggctcctaagcagaagctgaactcagaaaccgctacttccttgatttttcaaagccccctcctcaactccaggacgcctttggagccctagccccggtgtcctcgcttagctctcaacctcttcctccacacatacagacacgggtcagggccccactatccctccaagcgccagtctggatcagccccatggctgaaaaaggcgccatcggagtaggggtgtggggcgctgtctgagactctgactggcctctccctacaacttactgccctccaactggcctggcccggagccctctacgggtccaagccagggttctccgaaagagctgaaatgtcgccgccggagccttgaaaggctgcagctcgctgcccaagctacgcgttgccggaggcgggattcccaggtgcctcagcccgggcggccaagtgcgttgtttcaggtcccctgcctgggatccctgcactttgcaaagttagctgcgcggctgcagaggtccgagatccttccggccttagtacctgacccacggtccggcacccccaacccggtcccggcgggagagtgagagaagcgagctcgccgcctacttactatgcatggatgcaaacgggtcgtgcttacagtgtatttccatcggggcgctccagactgcaggccggcccacgccgccgcctcccggcgccaaggggctgcccagggcggatagggagcctcgccaccaggccaggcactgtgcgagctgggctcagaaaacactgctggagcttcggggtctctctcagagcctccctgctggagaccgcccggagctgcgcggagaggcgggaaatggtgctagcgcacccgggctaggagcgggtgcccaactccggctggcttccctccctggctggctcaagcagcagctccgggcccagcccggggtagctgcggccaaggcgcccgcggcttcgggggcatagcgtaggggcccgcctccgggacagccagcagcccccggccccaggaaggagcagctttgaggaggccgccggaacaatcggcccttgacttcactcagggggcggagagacccgggggctgccaggctggttccgcggcctcgatgcttctgaggtccctcctcgacccctcggtctccgccagatcctttctttctctgcttctccgagtctctggggctcggacttgccccctccgcctctctccaactggctctccgacgtctcggacgaagttgcaaagaacttcctctccggcagcgcggggtcctggcgggtttggagatgcttccgcccctgacgctggggccgcgactccggagtccccgggagcgtgcagccctccaacactgagacccgctgccttcaaagttcccgcggcccccgctgctcgcccatcgctgggaccaggaacggggacaccagcgacggactcttcctcgccggggtgtctacctcgtgccaaccaactcttcgagccccgccgccctccctcgtgggtctgattccactgtctttccgctgcctcttccgggacggccgccgtgcctgccccaggcgtggagtgaggaacagaggagagagcagagggtcccagccaccaaggccgccggggctgccggggctgagatggagccgcagtcggctctgactgcctgcgttgccgccgccgccgccgtcgctagccctccgcctgctcggcgcgcacagtgcgccaccgcgccgccccggagccgctttcaggacccgctgcgtgtggacagcgccgcccggggctcagctccctccgggcgggggcggggcgggggctaacctgccaatcacgctccaccaagccaatcagagtggcgtcagccggccctggcccgaaacaccgccccattggctaagcagcccacaggctccgcctgattagcggacacctgggcaatgggagagaatggggggcggggcccaggcggcggcgccacgttcattgacaaacgcgctggactaaggcctagtggatcgcggctgtggggaggggaaaggggcccacgcagtgcctggagagtcccgctgcgggtcccacgcgggctggacctccccacagcgatgctgggatcctgggacgctctcaaggcttgagagcagtc

SEQ ID NO: 333660 - DNA, 232 bp, Homo sapiens
  chr9:37028485-37028717
  hyper
cgcaccagggcgcacctgggtggaggggctaaggctttgggccaggttgcccaagcagagtggctggccctctttcctgcctcagatcaggaactgccagaggctttgggagctggtgttgcgcttctgtccaccggagaaattccgcacccggctcaaggcttcttgagaaccgaatgagccaagtcgcgtccagggctaataagggtccctgaagcgggcgggtggacag

SEQ ID NO: 333661 - DNA, 729 bp, Homo sapiens
  chr9:37034135-37034864
  hyper
cgctcacaggtcggaataattcaagccttccgctcccccgccgagctggggtagctgatcactgagctgaaactaaacgttttaggtggaaaaaaagcgtccgaaggcaccgtgaaatgattaaggaactaaagagcttctcgccatgtgagatcatgtcctgttctcgccaacatcacaagatgtccccagacacgccgcgcccccagcgcgccgccccacactgccggcccggagcgaggaaagggtaggcgctgcgcggccgggcctgctcagcgcgccagacgtggcggacccggcccggccggagtagagcgggaagccgggagagcagcagtgctgctgccgcgccgccccagacttttataggggttggggggagggaaggaaggcttcagcctgcgccgggcgctagccagcgcacctacgggaaggggcagaccgaagcggagcccgggagcccgggtcttccagccgcaccttctattaagacatgcgcttgggggtcgcggccctctgcgctgtgcgcggggcctgtgacatctccatgtgcaaaccccgctgcttagacgagcgcaggccgggtttttgtttttgaagaaattaactgctcggccaagcaggtgcttttgaaaggggttgcaaaggctggcagtgttgccaggcaccgaggcgacgttccggtttactccgattcacccctagggcggcgcccgaccccagggttcc

SEQ ID NO: 333662 - DNA, 1734 bp, Homo sapiens
  chr9:37035403-37037137
  hyper
cgggggagcgctccgtaggaggactcctggcccgccggacaatggcagttttggagagtgaatcgtcctcagcaagagtgttgtttgttttttggagggggtggtcacgaggctgggtcgcaacctagggggaagagcctagagctcgaggaaaggggggcccccggcggcaactggacatcacatatccactgagcagatttcgccacaatcggaaatgtggctgtggattcccgggcggcccccccaccaagtggtctgcgcagttccccagcgccgcctcctccctgcagcctgcgggcccgtgtccctaccccgagatttgatttttggccatctccgagtgctcgactctttccctccgcagcccagccccagcccaggcttcccgccctcccgcctcgcccgcgccgggaggcagcgcctgggaggagcggcctgtccgcgcctggagatcaaaagccctcccggaattgacatttcaccccgggctgggggcggggggtgttggtgttttgttgttgttgttgtttccatttagagggcttgttttgtttttgtttgttttctgtgagttttcatttttccatgggatattcttttgtttcgggtgttttgcgtgttgttttttcgtgggattgattttagcgggttttgctctgtaagtcctggtctttggggtgagttttgattttgtgtaattttgtactttgtccttgtaggctgtctttttgtgtgtcgtttgtaaggcttttccttctccgcggtgtttagatgtgttttgatttggtgtgagtgggtgtcgtctgtgtgtgtgttgccttagggaatttcgtgttgtgtgtgttttgtttccttcgatttgaattttatttttttgaactgtacgttttggtgggggatcgggttatattttcatgtgttgtctttagtttttgtgtttgtgagatgcgctggtgagagtttgcgtgtgtattttggcttttgtggggctttgggattagggaggggacatcagccgctactccgttcctgcccgcacccatgaagggcagaggattaggccaagcatcacgaatcgtaggttcgccgtgctccgccgcttcgcgctctggacgctcgagaccagcgggaaacaaatgtggttcccgagggggcgcccgctggtcgtcaaaacctcgcgggcccggaggcgccgctgctgggtcagaatcgcagagcccccctcgcggggtaccgaggcccagccgccgtccccttgcccaccctctcccctgtgagtcggtctccccttgcgcctggccagcatgcttcggaccgtccggactcccgcagcgttggcccaaggggcggctcccctcggcggagcaggtgacgaaccacttcggaggacacggaattgacactgcggccctagagatacgggacaaggggccagaacgcggggagtctaggctcagatcggagtcgggatcccgggaaaatcccccatctcccttgcccgcagccctagaatcccagaaacccaactccgcgcagctttcggtttggagagcccgccctggtttgcaagcacagatacatgtgcccacacccgaacacacgcagacaccgccagagagcgagacagcgagcgggcgcctccgtagcagcggcctgcggggcggaaccggagctggcgccgcctcaaggggaaaccgaactgtagtgaccggaaatgtccccaggacagaa

SEQ ID NO: 333663 - DNA, 936 bp, Homo sapiens; identical to SEQ ID NO: 234146
  chr9:37037362-37038298
  hyper

SEQ ID NO: 333664 - DNA, 919 bp, Homo sapiens
  chr9:38619920-38620839
  hyper
ggaattgccagcgacggaaagcagctgaggctccatttggctccgctgctccgagggtgcccggcgccctccaaggtccccgccccaggggctgccgggctgcagggaagccgggcctgcggccccctcccaccgcgggctgagtccccgagctacctgtcttttctgtcgcgggcgtccaagtcccggaacctgcgcgtcaggcagcgctccacctccgcggcgtcgcccttgatggcagccctgtggatcttccgcagttcccagtcccgaatgtcgtaacccggacccgcatactcttggtccatggagctcaggagcgcctggcccaggcgtctcccgaagctgaagagcttcctcatggtggcgacttctcagacgcccaccacccgctcctgagccgcggcggctcctcgtggcctttccacccccactccgccccaaatccgcgatctcccccgcaacccgcgatcccccccgcaacccgcgatccacccccaaatccaagatccacccccaaacccgcaatgtagctcagaatccgcgatccagcccggtccaccacagccttcagcagcgacactcgcagactccgacctctcagaccgagtgagcccagctaagccgttaggcgcgcgcctgaacctcagcgctccgaactctcagaccgagtgagtccccgcgatgccagttaggcgcgcgcctacaactcagcgccagccgggactccggaagccgctcccaagccctcgtggccggcagggggcacctgcagcacgggcgcacgcgtcgctggcttgcgggttctcctgggctcccgcgggacgtcccggaatcccaggagtgcatcccttcccgcctgagggcctgcctggccctgactcccgacccgctcctcctccgaagagagatcggggcc

SEQ ID NO: 333665 - DNA, 470 bp, Homo sapiens; identical to SEQ ID NO: 234159
  chr9:66458086-66458556
  hyper

SEQ ID NO: 333666 - DNA, 42 bp, Homo sapiens; identical to SEQ ID NO: 223595
  chr9:66494115-66494157
  hyper

SEQ ID NO: 333667 - DNA, 349 bp, Homo sapiens
  chr9:71320587-71320936
  hyper
cgctgtggggaagcgacaacgtcccgataacttgcagactgtggcgcaactggtcttggtagcggaggcacccgaatgctgcccgggtgaggtaagtttcctgtgcgtccccggccccttcccactagacccttctgaggggcttgcgcttaggggctctgcatctctgctgaaacccgtcggtctctctacccttccactttgcctgtctgcgttgtgctgggggtgacgtggagagggcgcccgtggccaccgaagcggaccttcgttccgcgggggccacagctgcgcgctcccaacggacacccacccgctcgtcacccggatccccggggccgcagtgacactc

SEQ ID NO: 333668 - DNA, 551 bp, Homo sapiens
  chr9:71735700-71736251
  hyper
cgccctcacctattgtccgggtggaggaaccggtatttccggatgggggcctcagacccagtgatcccggctaagggtgaggctggcgggggaggggaacggaagcgggtcgtaaaagttaactttacactaaaatcattaacttttctcacaccccccaataaaagcagtcacctcccccccccaagagccccccacgcacccacagtggcccacaaccatgcttcccgggggctttgaagggtagaggagctgacatcctccttgcccagaccctggaaaggattaggaagcggacctgggcacgaatagagaaagaagcccagcaaattcctcttgcaccagctctgggaggaagctcagctgcagttctacgtagaagaaaagaggcggcaaagtaggcgcgcgggctccagtgacaaaggtctcccaggcagccgcggcccctgccccaccgctgagtggcgtgcgtgcaggcccaccctctccgcctttcccgacaccccaaagtagcgctgcgagcagctgcgtctccctcccggggctcgcgc

SEQ ID NO: 333669 - DNA, 1232 bp, Homo sapiens
  chr9:71788570-71789802
  hyper
cgtgtatgtgttggttagccgggcaggcctctagacaggacctaaaactttgaggttttcccagttcgactcttcgtaggagaactgaagctgcctgtgtgaggccctgcgaacctcgccaaaaagtcttcctacaggatgcccccgcgacctcaccggggaaacaccgcggacagtcgggccagcagcgcccggagctcactccaggtctccaaacttgcagcacttcccagagcgcgcgcgctcggagcgggacctgcttgctccagtgcacgccgcggagcgaaccatcgggctggcgggggtggaggggtgcaggcgtgggggctgcgggccgctcgggccttgggcttctcctgccgccgccgccgcctcccgcccccggccaggagtcgcgcgtgacgcggttcgccgcaggagcctcgaaggcgcggcgccggcgagcccttccccggcaggcgcgtgggtggtagcggccaatttgacagtttcccgggccgggcggccagcgcggaggcgccacgctcgggtcgggggcgggctgacgccgccgccgccgcgggaggagggacaaaggggtgggtccccgcgggtcggcaccccggcggttgggctgcgggtcagagcactgtccggtggtgcccaggaggagtaggagcaggagcagaagcagaagcggggtccggagctgcgcgcctacgcgggacctgtgtccgaaatgccggtgcgaggagaccgcgggtttccaccccggcgggagctgtcaggttggctccgcgtaagtgcctccttgtgccgcgcggttgggaggagggtcgtgagcgtgagcgtgggagcgctgggggctctgctcgcgtgctgctctgaagttgttccccgatgcgccgtaggaagctgggattctcccatccggacgtgggacgcaggggaggggtaggtttcaccgtccgggctgatgactcgtggcctccggggctcctggaacctttactctgaagtcacttgggctggagattaaggcgcgagtaggggacactgtcttgaacccggtgtcctggatttctgctggcttggaggcatctcgtgtctgttgtgtcgcttgcatgtctttgtgttttccttctctatttcaaaccacactcggtattgatgcaaagttacaggcttgtgtacgtgagagaaactgaaaactcatcacagagcagaatcccttttccctttcaatcagctgc

SEQ ID NO: 333670 - DNA, 583 bp, Homo sapiens
  chr9:74061513-74062096
  hyper
cgcgtgcgaagggagaaaagaaagcaaagactggggctctcccccggccactcaccggcgtctgctgcgacgggagtcccgagcgtttggtggacccctgcttggaacttaaccttttccacgactcggcaaacctgccccggctggcgctccggctgcgtctgcggctctccgcgttgtcctcgcggtcggagcagccccgctccatttccgccgcatccctccacttcttccccatgagaagttcgcctccctcggccgggaaacagcccagcgccgagcgctctcgctggctcctcgccgcgggtctccctccagcctgcgcgcggctctcggttggcgctgcctttgcctccgccggctcctgccagagccccgcgctccgttaccgccgccgccaccaggctgcgcttgcgcccgcgattggctcaactgtgggctggggctgcgagcgccacctgcgcccgagccagctttcttttgcgtccccaaattgctctccacccggcagccgccgccttctctggagagtgcagggcccacgcctgaggctgttgatgcgccgcagggtagcgctcccagc

SEQ ID NO: 333671 - DNA, 163 bp, Homo sapiens
  chr9:74640002-74640165
  hyper
cgaatgatgaaagccgtccaggggattccgatgctgctcagggttaaaaaccacagcttgatctgaagagctgcaggggacagcgccctctggaggccacgtgatcacagcagccatagaaaagcagctgcatccagagaaaggagcaagagtctaggtttcc

SEQ ID NO: 333672 - DNA, 673 bp, Homo sapiens
  chr9:74764248-74764921
  hyper
gcggagccaactcgcgggagaaaaatcctattggcattgaggaggtagggagccagcccctgggcgcggcctgcagggtaccggcaaccgcccgggtaagcgggggcaggacaaggccggagcctgtgtccgcccggcagccgcccgcagctgcagagagtcccgctgcgtctccgccgcgtgcgccctcctcgaccagcagacccgcgctgcgctccgccgctgacatgtgtgccgctcagatgccgcccctggcgcacatcttccgagggacgttcgtccactccacctggacctgccccatggaggtgctgcgggatcacctcctcggcgtgagcgacagcggcaaagtaagcaggcgcggggtcgagcgcactccgacgggcgggaggataggtgcaaggaacctggcgcggtgcttcgcgtagcccggggttcgctcggtgcgcagtgagcgccgcggctccggagttgaacttgagtctttggctcttgggcaacgcagagagaaccctggcgctaggttcgtgggctggctggggagttcccagaagtcgggagcagtggcgtgctaacgccacaactggctcgacagcagtccgggctgcggtagagccgggagcaaggatgtcaccccccgctcccccgccccccgttccaatcctaagatacc

SEQ ID NO: 333673 - DNA, 716 bp, Homo sapiens
  chr9:77111662-77112378
  hyper
cggacgtttttaaaggaaggggacagctacttccatgggactgcattttagttgtgctaaaagtgatgaaagtgggtttgcattattctaccaccaacacccaaaccacctgcccacggaaacccccgccggagaccgaagtttacccaaatagcgctcggcaaagcgctgccataaattcaaaactaactctgccgggcccgcgggggttgcgagacagggaccgaacgtgaaacccggggagccccgcgtctcttgcctccgaaggttttccgtgatcagtgtccccttctctgctggagtcggaagtgcctgtcacctgcggatctgcccgactctcccggtcggcccttcttctctgcccagttcggacagtctcgaattccccgtcgcagccccggccacctcggactccctggtccccagcccccgccccaccccccgcctccaccacgtcccctccccgcggtcccagcctctccaggcgctgctgggctctgattggcggctgcgctgacagcaggcggggcctggaagtcgcggccaagcccgccctcgcgtataagcccctctcagcgctctctctccatctctcccctctctttctctctcgctgctcccttcctccctgtaactgaacagtgaaaattcacattgtggatccgctaacaggcacagatgtcatgtgaaaacgcacatgctctgccatccacacc

SEQ ID NO: 333674 - DNA, 1762 bp, Homo sapiens
  chr9:77112712-77114474
  hyper
cggcggcggcggcaaacgtcaccctgcagccacggcgtccgcctaaagggatggttttctcggcagagcagctcttcgccgaccaccttcttcactcgtgctgagcgggatttttgggctctccggggttcgggctgggagcagcttcatgactacgcggagcgggagagcggccacaccatgcgaggtaagcgagtctgcgggcaccgaggctccccgagtccggccaactccagccagacggggagatgggggaggggagggcacccagcagaaagggaaagaggttgcccaggcgcagttccccgaattcgctctcgcaggtggggctgcaaatggcctgggcgtagaaagttgcgggaaggtgttgatgtctttcgggagttctggagggacgcgggagggcgcttttttggagaggggagacaggctagttggttcttaccagtccttgagttgcactgaatcttttttgcttgtcgctctcgggtgcggaagcggacgcgggatggagaaagccgaaagagggatgcctctggacaggagcagtttggaagcgcccggcgcgcagtggtcgccggccgggtttgggcgcgcggggcgcaccggccgggggcagggtggacacgcgcgggcacacactcgccaggttacgaggcccactaagcgtcctggccagcaggcatgtcccttcgctggagtagcaagcagaagagcagtgctgcgaggctggacgcggctgaggaaacagttagttccccggcacgcggctgaggaaacagttctgcggcgcgcgccttcgtgccggcgctgcgccctggccaggtcctcgtgcccgagcccgcgcggcccagggagtagtgcgaccccggaaaagttgtaatgagaaagttctggaggcttggaaaggccacactgctcacagtcggagagtcatgggctccggctcttttgtcagataaagggccggtagtggaaggaggtgctggtgcaccctcgggccaggaccctcgcagtcgcaggcggtggcggcggcggcggcgggaccccggggcgagctggggtctgcagggatgcgcgccagggactgtagcgttacgcttgctccggctggactctgggcctctcgaagggctggagggtgggtttcggggagtcacttggtctcctctcctgccttgccggagacctcaggtttccttcgcgctgtgctcggcctttcttcactcttttactgaagagccaggcgggtgtccgcttgacatggggatctgtgcaagctctgggcacccacccccactcccagtccctcttcctggccacacagcggttaatcgggggctcttctctatccttcgcacgtacccctgggtcttgacaacagaaagttagtaacggccagctccagaccttcttgcatcccagacccggagagaggtggtctaggcagggagcacttgggagagttgggatgcaatcactggtctcctccttccactgaaagtgatcctctcccacccagtccccctacgcccctagaggagcaccccaggaggcagcgggtctcactcccactccctcccgcacccggtgagccccgagcctggactcaagggtttgctggctggacgctgggatgtgtcaggaaagggaaggagaagaaggaacggagagagactgtccatgggggagggggttgactgtagataagaaacaaggacgtcctgatgggatggtcttgattggccggctcgctgggagt

SEQ ID NO: 333675 - DNA, 772 bp, Homo sapiens
  chr9:77501932-77502704
  hyper
cgagaccaagaaattaccaggatctccactactctcccaagcgtctccagtgctctcccaacagccaggagcaccctccctctccaagcccccagaacttcctgttgcgccatatgccagcggtggagaggagccagcggggactcctgaggttgcaagtccgggcggcgccgcgttggggaaggaagcggactgcggcggggcgggtgtttaccgtaaccggcgctgtcatcgctccgggactcctgcacggggaacactgggcgcacggggacgcgcaggggcgcggagggacggccgtctgggcacttctccagccgcctcggaaagccgcgacccccggctagtcagcgtccgggtctgagatctgtgcccgtggcagctcaaaacgcgccttctctcctccggattctcagctcaagccacctccgaactcctctccctccggcccggagcggaatcagagctgcctcctctcccggggtgtttcccaccgccccgagctgaacccccgacccccgctaggtttccgctctgacaccacctccgctatggccgcatcccagctcttgaaacgggggctgcgggacctgccctgtagtagcgtacactaccttagataggataatcatctttgggtggagaccagagaacttgaaagccggtatttcataaatcctagctattctagatcctcgttagatgtagtgtccctggccccacccacttctatctaaggccgggggcgcagatctagcgaatcgcctaaggt

SEQ ID NO: 333676 - DNA, 973 bp, Homo sapiens
  chr9:78505461-78506434
  hyper
cgtcagcgcctggctgcggccgctttcaagagggcggaggagggagaggaggagggcgatgtgggaaaggaggggtgttaaggggggcgggggaagtcatttatgcagagcaggagctgctgccattgccactcagaatcctcgcgcgctgctcggagccggagggagcgctgggagcgagcaagcgagcgtttggagcccgggccagcagagggggcgcccggtcgctgcctgtaccgctcccgctggtcatctccgccgcgctcgggggccccgggaggagcgagaccgagtcggagagtccgggagccaagccgggcgaaacccaactgcggaggacgcccgccccactcagcctcctcctgcgtccgagccggggagcatcgccgagcgccccacgggccggagagctgggagcacaggtcccggcagccccagggatggtctaggagccggcgtaaggctcgctgctctgctccctgccggggctagccgcctcctgccgatcgcccggggctgcgagctgcggcggcccggggctgctcgccgggcggcgcaggccggagaagttagttgtgcgcgcccttagtgcgcggaaccagccagcgagcgagggagcagcgaggcgccgggaccatgggctgggggagccgctgctgctgcccgggacgtttggacctgctgtgcgtgctggcgctgctcgggggctgcctgctccccgtgtgtcggacgcgcgtctacaccaaccactgggcagtcaaaatcgccgggggcttcccggaggccaaccgtatcgccagcaagtacggattcatcaacataggacaggtaacgaactacaggctagcccagccctcggccctgaagccactgggggcttcttgtcccctctgcgtggaaccccctccccctcttccagatgtgctctagcagctgttgccctaactcttgggcgatgctctgtctcctgcgc

SEQ ID NO: 333677 - DNA, 247 bp, Homo sapiens
  chr9:79319779-79320026
  hyper
cggcaaataaacggactcagggtcttcacgaatatgcagcacagccagctgggatccaggcagtctgtttttggtctcagcctggtttccctcacttcttcgatcaggaagtgcagaaagcactatctctgctgctctgcatcccagagattcatcctctggagacccagcttcctctattgtttcagcactctgggcaggttctgtgagataagacaaatcaaagggaggtgtgtacggtgccagc

SEQ ID NO: 333678 - DNA, 662 bp, Homo sapiens
  chr9:79520881-79521543
  hyper
cgtggctaggggtttggaacccgggtactcggaggggcgcagtggaaaatctcggcccaaggaagacgagcggggtcccgggaaagtggcccgccggggcgcagcgaccgactgctccctcctgccgctctgaggcggctgcggcggaggctgtgcttgcgccctcgaccgtctcgcccagggctccccgccccacccctcgcccggccgccggctctgggcacccgactctgccctaataaggaaagtgggtgtgccgcccaggagccccggggcgcgccgggcacgctctctggcacgcgcctcgggcgccgtggcgcgtgggcggaggtgcaggggtatggcgaggggctcctccgccaatcgcagggccgtgctgcggcctcctgacgtggcgcgccgaaagctgctgcaaccatggacagcgcccagaagtgcgagccaagtgcaaggggctgctgcagagggaggctctgccgcaggcaccgccgcggtcagcgggggaaggtgggaagagggagacgggtcccaggagagcccccgcctcgcccagcgcctcactggctggctggcgcgttacggagcactccggcggtcacttaatgatctggtcggctggcctggccgggggaggcactcagctagattggcgtgggagggac

SEQ ID NO: 333679 - DNA, 512 bp, Homo sapiens
  chr9:79626891-79627403
  hyper
cgctaccccaggaaactcacatctctccacctccatcgctgtgcggagaaaacccgcaccgaaggcggcttcctctctaaggcggcgaccaggggagacagcgccccctgctgactaaaatcacgcaggcctcgttgccaaagtgcagcgggcgcagcgggcgcagcggtctcccggcttccctcccggcgcccgcagcctgcctaaagcctttctggaaactcgtgttttcagcctcagcctggcagactgcggagggcgggccaggaagagtcaaggagccgggggtctcagactttgctcaccccttggaaatcaccttctcgacccgctagcctaggccgagacacagtctgtattctgaaagccgccagtcccaccaggggaggagaaacccaaaacagaaggagcagggccccacggctgggctcgtgacgaagcatttaatgacctttttaaggaaacgagggaggaggtgaggaggccaacagccgcttaggagagcccgaaac

SEQ ID NO: 333680 - DNA, 679 bp, Homo sapiens; identical to SEQ ID NO: 234193
  chr9:79628712-79629391
  hyper

SEQ ID NO: 333681 - DNA, 2739 bp, Homo sapiens
  chr9:79629671-79632410
  hyper
cagccagtaggtggcgaagctggagctcgagtatcgtctcctaaattcaaggccagtgctttttttctccaagaaataaatgcccctgacctcaggcttttcccttctgccctccaccctcgggcattccgaaaagtcaaatcgagcttatgcactcaaatccaagtagggcggagccaaacctgtgtcctgggcgcctgccgggcaaggcgcggggactggacgggtcggaaacggggcagggatgcacttcgcagagatgtcaggtcgggttggtgacgctggaggcgacggattcctaaaacgttataaggggttgacgggtggcgctgctgccctgcagcgtccccagctgcgcagctcctgagctccccgctccgagcgcccagacccccagcgccactccaccgtcgagatcacagcttcaaacctcaactccttggagccttcgaaggcgcagttctgactactgagtatttcctggaaagaaaaagaagcccaaagcggtgaaatgatgcctccagggtcatccaggcctggactcgagctggaagccacgtttccgagtcctggggctggctttctcctaccctcttcaaatccactttaggagtttcgtctgggaaaagtatgcgccgagaagtcagccgaaggtcaggcaagtgccaggctagcgtgaccaggaaggctcctgggaggaccccaaacgtaactaacccaggcaaccttccgcacgtcagctaagtcagtgcgtaaagggagaacccatggaaattgagatgtgcgcctaaacctttgccttttttctagcgctgtacgtcgtcctagccctatcggtaacttgtgttcctcctcgccctgggcacagctgtccgcagaagccgtgggaaggcctggcctagatccagcccaaggagcgcgtgagaccctccaggggctgggggcatggaggagaaagaatgaataaataaccgctcctaaagttccacatctttttttactcccctccatagagccaattaaacgcaataaaagcttgcatggaacccctcttcctagcatagcgtcgccaacaattgcctaaggggtaaaccaaatacgcctgagataattacactaagcccggggcaatgatttgcctgccagcgtcctgagcgccagccaatatttggatagtgcagtagttgtttaaaaacaacaaaaaaaaattactcgcggaaacttgaaaccgactggttggtgccagggtggttacacgatctgtttttcttgagagggggtctgcaggcagctggagcgcgcgcgttccggcccccgccggtgccactgagcgcctgcaaaacttgtcggaattaacctccggggaagtaggggaagaggagagcgcgcccccctccccaccgcggccccagctctgcaccccggcccagtgccgcgcttggaatcccccaggatcctccgcggcggccgcagcccgccactctccaaaacagacacgcgacccgagctccctgtctgcgctctaggcagcaattgcggcctgggccgccgcgtccggctgtggcctaggtggtgggaagtactttctaccctcgccaagcacaacctgaatgcggaagcgtgaggctcggggcgcttcgctcagcctccgagactgttttgtcccaggttgcgtggaacctggctcgccgaggccgaagacactggccaagcccctggcgtcccctggcgctgaacctgaggttgtggcggcgggtctgcgggctgtagcgagctcacccagtgagggcctggctcattttttgtgctcagggttcgcgttatgcgcccaagatttgtcccgggagtccctgaagggcccctcccctcgatcggttcccaggagccgcaagtgcccaacgggcacggtcccagagctgctccccaaaaggagactctgctgttccagcaacccgcggaagggatgctatccgaggtatcaacaaaagatccctttgctcgagctgcgtgtggggtcgaagtccggagagcccttaagtgtgcggcacgcagagctcctcagcagcggcctgacagcggtgcaggagaccccagcttcctgggctgggacagggctgttgtctcacggtcttgttccaaggaaaaggagccacctggctccagcaggctcttgtcaaactgtgagcgtccttggaattctgtggcttcccgaggccaagaggctgtccgctgctcggctctctcaagtgtctcagcggacaaaaatcgcgcagaaactcctatggcaggaggaaagcttccgacatacagtgaaagagaaaacatcttactttgaaaagggcttaggaccaagaagctgctcttttccccgggccttcttgcaagcttcagtcgtaacatctattctcagacgtcttctggcctaggacaaactggccacatagagctagccagaaatctagctcctgactaaagatggaaattacgggcctgacccgctcacggcactcctgcgacctggctaagccaccccacggacagacgtgctcccaccgtccagctcaccaaaagccagaagctgaaaacacccgatctggtgtcaccaaggttgctagttagggggcagccccccaagcagctgggccgatggctttcttccaggttaggcgtgggaaaaccgagggagccatagtgtccaaatgctcctttctcctcaaatcgcctaacgggaaaggaccc

SEQ ID NO: 333682 - DNA, 3137 bp, Homo sapiens
  chr9:79632892-79636029
  hyper
gtggagcctccattcgccaagccctttagtgcctattctattaatttcttggttactgttcgtctcaccctctataccgcgatggtggagctcggatactgtctcctgtctccctgcacctggtgcctcacatgcagttggcgcgcaataaaactgagatgaatttggcatttggtgaaaacaccccatgctttcttccccatgagtttttccctccagccctctaatcatcggggtttcttgcagagaagaggccttgaggacacgatactctgaacttgacccagagtgtctagcccaggaaaaagggtttgtaaggagagagaagctcacagcgagtagatgaaaacagggaagggtaaaaggaagggggcggaagagggagatgccagagagaagagaagcaagaaggcagtgtcctgttccccctccaccgtgcttggtggcccgggtggggcgcagctgcgggaaatgcacccggagctgtgccccctcccggcgaacagcctgcgccacccgccgcaccgggaggtggctgggggctgccgagcgagtggtgaacgcgatgggtggagagcgcccgaaacgaggtggaaaagggggcgggggcgaggcacggcgccttcttgccccttcttcagctacagacgcggcggcggcggctgagtccctcagcctcggtcatgtgatagtctcgaagcgctagctgcgggggtctcggcgtctcggggaccattacaaaacgcagccaggagagcgcgtcgctgccactgccgtcgcctctcctcctcaagacaagcccgggagaaaggcggcagctgcggcgcggacggctgagcctccccggccagcactcacccagcattcgcagacgccctctccagcccgccgctcgctcccagagtcctgcgccccacactcctcagcagaacctgcgggcgctgccgcttcagaaaccaccaaagttttttctcctcagcgacagcctagggctgcgcgtctcttctaaccccggcgacgctgcgagcctcggagaaaagagaggcgccctagaagccaatcttctctctccttaccctgatttttcactccaggaaaaggagaactccagcgcggtctggctaagtgcctggccaggggcctgcgtccagggcactggaagtcctgctgtcactggcctccaggacagcaggcgcaaactcagatttaaagggccagagtctctactgcccagaccttcctcccagccatcttggtctgggtttccctcggacctagaaaaagcaaagaggccgggaggaaacacggccccttgccactctcctctgcagccagctccagcactcagtctttggccacccgggggaagacgcagagaaggcggcggtaaacctggtgcactccgcccgcgactgtgcgcgccagtcggcaaccgtcggggccagaagttgccagcttccgagagctgagtaggcccgaaaggccaaggtcggagacaccaggcaattcggagaaggcaggagagagaagcagagagggcctggagggcgagagggcaaagtggcgggactggaggggccgagtgggaattagtgggggcagccaggccccaggaacggagtgcggagagattctgtggtccagtgcgggccggagggcggtggaggagccgggggcgatgccgcggccggggaagagctcgtacagcgaccaaaaaccgccctactcttacatctcgctgaccgccatggcaatccagcactcggccgagaagatgctgccgctgagcgacatctacaagttcatcatggagcgcttcccctactaccgcgagcacacacagcgctggcagaacagcctgcgccacaacctctccttcaacgactgcttcatcaagattccgcggaggcccgaccagcctggcaagggtagcttctgggcgctgcaccccgactgcggggacatgttcgagaacggcagcttcctgcggcgtcgcaagcgcttcaaggtgctgcgcgccgaccatactcacttgcacgcgggaagcaccaagagcgcgccgggcgccggtccgggagggcaccttcacccccatcaccaccaccacccccaccaccaccatcatcaccacgctgccgcacaccaccaccatcaccaccacccaccccagccgccgccgccgccgcccccgccgccgccgcacatggtacactatttccatcagcaaccgcctactgctccgcagccgcctccgcacctcccgtcacagcccccgcagcaaccgccccagcagtcgcagcctcagcagccgtctcaccccggcaagatgcaggaggcggcggccgtggcggcggcggcggcggcggccgcggcagccgcggtgggcagcgtgggacgcctgtctcagttcccaccctacgggctgggctcggccgccgccgctgccgccgcggccgcggcgtccacgtcaggcttcaagcacccctttgccattgagaacattattggccgggactacaagggcgtgctgcaggctggagggctgcccttggcgtccgtcatgcaccacctgggctaccccgtgcccggccagcttggcaacgtcgtcagctccgtgtggccgcacgttggcgtcatggattcggtggccgccgccgcggccgccgcagccgcagccggagtccctgtaggcccggagtatggggccttcggggtcccggtcaagtccctgtgccactcggcaagccagagcctgcctgccatgccggtgcccatcaagcccacgcctgcgctgccgcccgtgtccgcgctgcagccggggctcactgtccccgcggcttcgcagcagcctccggcgccatccaccgtgtgctccgcggccgcggcctcgcccgttgcctctctgctggagcccacagcccctacctcggccgaaagcaagggcggctccttgcactcggtgctagtgcactcctaggggacccggcgggcgtggggagaccagcggggtgagagacgccgggcccggaaccgcccaaaccacccgacggggagagggcgccctggtcaggccgggcagagctggcgagtctcagcctttgctggaacggaaggtatttaaatagacgaacaacccc

SEQ ID NO: 333683 - DNA, 199 bp, Homo sapiens; identical to SEQ ID NO: 234199
  chr9:79636291-79636490
  hyper

SEQ ID NO: 333684 - DNA, 401 bp, Homo sapiens; identical to SEQ ID NO: 234200
  chr9:79636831-79637232
  hyper

SEQ ID NO: 333685 - DNA, 520 bp, Homo sapiens; identical to SEQ ID NO: 234201
  chr9:79637669-79638189
  hyper

SEQ ID NO: 333686 - DNA, 710 bp, Homo sapiens
  chr9:80263018-80263728
  hyper
cgggaagatgcgcgcgccccttggcacaggagccggacagcagtcgggggcgcagacgagttggaacgtcggtgctcgggggagagtaggatctcctgggcctaggggtgtccccaggcgggaggtaggcgcggagtgggttggaggcaaaggacctggctggcctttgcctggaaagttctgaaaacctcagcagtgaccgcagactaagactgagtggaaaggttcccgctagcgtttgtggctctaagtggcaggaggaggcggagcatcttgaacctgcagccctggcgtctgctggacttgcccttctgggcaccccaagccgaaggcgcctggaagtgaaaggggacgagcagggggcgcggagctgggggtgggagctggcacctctaggagcagctcccacacttgcctccctggctggggcgtcccggccaaggtttgctgtaatctgcgcgtctggccgccaggcaccgggttccgacaggtgagtgagtttcgccaactcactcgctcggagaaggcggcagcaggctggaagaggagcggcgccaagcgtctgttgcgggacacaaagccccggacctgaagtggaagcttgcccaccagcttcaccaccacgcacacccggatttcctagactggctccttccgcttcccggacgccccggcccagctcgggcttggccaaagcccttggtcagctc

SEQ ID NO: 333687 - DNA, 2087 bp, Homo sapiens
  chr9:80645542-80647629
  hyper
ccccaacgtgccccggctccgctcgccacccgctgggccacacacacggctccccacgccaccaccccatggggtgccgcggccacgacactggaagttcaacccctctgcccacctttccacccccgcgcctctggtcggagtgatctgccatttagcagatgcacagcagataaggtacagccctcagggacacgaaaaggaacaagccaaggcaccgggcagggcagccccgacccctgtgctgcgtgtgtgtgtcgctgtgtgtgtgtgtgtgtgtgtgtgtgtgtgtgtctgtgtgtaacgcgcccgcgcgcccgcgcgggtgaaggcagtggccgggggcgcgcccgggagggtaggggcgaaccgcgggcgccggggggcgggggcgccgaaggcagctgccccgcagggccaaggatggtgggctgggggcgcagaggcccggcggggccccggacggtactcaccgagcagcagcagcttgagctcccggcgggcgtcccgcttgtccctgcggagctgccgctcgatctcgtcgttgatccgccgggcttccttggcctcctcgctcaggcagcacgccatgatggactccagagtcattcttccaaagtgcctccgctgcagccccgccggcaccccctgctcacagcgcgcacacacaccctcccgccctcgctcccccgaggcagcggtggccgccgagcccccgccgcccgggcgcgcgtccgggacgagctccgggaaccgccgcgggggcggcggccagggccggggccaccaggtgggccgggggcgcggtgggagcggatagtctgggccgacgggagaagagaggcgggcgcgggaggcgggcgctggctcggggggcgcgtgagagaaggccgccgcgcccggcctcgctcagacgcccgcgcctccttccccgggaacaggcggcccgcctcgccccccgagccgccgccgccgccgccgcctgcgaggctcccctacgccgtgcgcctggcggcgagagctcattcaccggggtgtccccgcagcgagcggccgccgacggctccccgcgcccggcgcgcccgctcctcgccgccgcctgacacggctcccgggcgccctcggccctgtccgcgcccaccgcccggctcgcgcgcagacccggttcccgtcccgcccggcaaccgcgcgctcctccgcctccgcctccgcccccgcccccgccagacgcccaccccctgccccgattgccaggcgcggagcggctgctcagtgcgagccctccccctcgccacacacacacattttcttctttctctgaactggagcacagatccgggagggaggaggcggcggcgaaaggaggaggaggaagaggcggaggggatgggcgcgggaggagggagccgggaggcggtgccgcccggcccctcctggaaggctttcctgggctcgcggccgccgcggcgcgcctcccagtgcggctctcgcctcgcccgcgcggctcccgggctgggccggcccccgcgggctctgcggacgcctactgctcccgcaccctcggcagagtccgcgggcgcagcagtcacggccgcccccggccgaagtcggggccagacccggccgccgacgcgcagcccgagccggcggccgccgttgcgtgccagggccgcagccgacctgcggctgccgtccggccgggcgtggtgagacaggaatatggcggcctctgcctgcctcagcccaccggcccgggagcgcggccgcggcccctgctgaagtcgcgggaggcggccccgcggagccccgcacgcgctccctgcggcgccggcgctggcgtccgccgctcccgggctgtgcctgtctgctccacggggtcgctcctcagccgtttctgtgtttcccgttcctatttctaaaacgccattcggttagaaactctcacgtcacctctgacaccggtgcagtcttagaaaataagctcctctatactgtgtggggctactggggaagggaagggaaggaattggcaccggtgcccagaggtgtagggggagattcacaggcgaagctgttcgcaaagtaac

SEQ ID NO: 333688 - DNA, 756 bp, Homo sapiens
  chr9:80911724-80912480
  hyper
cggccagattgcgggctcaaggggcgaaggcaggttggcaggggcagcctcttcccgccgcccacaatcctcgggcgggcgcgcagccgagccggctcggctggctggcgcaatctcgcgcgctccttgcattgatcaaaaatgggggttgaaacagtaaacgcgaggaggagcaactgcttcgactcggctcagaagcgcgaccaatggggatgtgagctccttcgcgcgaaccaattagcgcagggcctgcgacagcacgggccaatggggcgccgactcggcgcaggaacaaggcgggggttcggggccggctgcagactctcaccgcagcggccaggaacgccagccgttcacgcgttcggtcctccttggctgactcaccgccctggccgccgcaccatggacgcccccaggcaggtggtcaactttgggcctggtcccgccaagctgccgcactcagtaagtccccgcgagcgggcgccgggagtgaggttcaggcgggagcacgcacgcgggtgggtttgcatccctgcgtgtggcagtcggattcccgctccctgccttgagtcccctaggcgctttgcatcagcgtgcacagcgggatcagcagctccggcaagcgggcttcgggaagaatgcagttggtgaggaagctcggcgaggcgtgcccgtgcagctgcccctggccctgactgctggtgcgaggcagtgcacgactcagctggccggggcctgctgtcccgccggtgccac

SEQ ID NO: 333689 - DNA, 993 bp, Homo sapiens
  chr9:82185179-82186172
  hyper
cgcatagaaataaacgtctaaaacccagcctgttacattagccaacactcttcttgactttttccgaattttttccctgtccccaagattagccgctcgctagaaaagactgcgagcctcagcagcctccccttgaactggggcgctgcctccagctggacacggactaaggatggaaaggcgcactgacggaggccgcccccatttcccaggcccctccctaggggtgcccctcctcagccatggctgcccctttctctcctcctccagcatctgcccctggggccacccccacctttccgccatctctcgggcccgcgtggcaccctgctctgtttttaacggggataaacttgacttgcttctccaaagagcgggaaaaagaggcgcagtcttggtactgatctgggggagggaacgtcccagggcgcgcaggggcgttttctacccgtgccccgtcggcctgctctgttcagtaccgaccgtgttcggggttcacgtggcccagtcggcaaagtttctttggaggtccagcgtctctgattcccggatcttcagccccacccggagcccccacggttactgccccccgcgacccccgatggagcgtcgggatgcgctttctctccgagtgcctccgggggtggagggagggaggcctgtttcggaactaaatggcaatcacagcccccgcggggcttggagggacgagctccccgcccaccccgcggccccggccccagccagcatctcgcgactccatttctggctctaaacaagaacggggaccgagtcgcgttcacacggaaaattatgccggctccagcggcgcgtaaaattgatgtgaaccgaacgaagtaagatcagcgtgatcctccccctcttgtctcaacaggggtttcggcgcgttacacaaggccgagcttgtctctttaaggagacattggaccctaattagtccgcattcctggcgcggctgcggagcgaggggcc

SEQ ID NO: 333690 - DNA, 64 bp, Homo sapiens
  chr9:82188495-82188559
  hyper
cgtgcgcgatgaccctcaccccccgctaacgccgcatagtaggttttctccgtctccctgcttc

SEQ ID NO: 333691 - DNA, 811 bp, Homo sapiens
  chr9:85677440-85678251
  hyper
cgccgccgccgcgtcctcgtcgccttcgtcctcctcgctgtcgtgtgtctccggccccgcctcagacacggcgggcgcgggatccagaggaccccagtcccggcgccgccccccgcggagggacccgaggaagccacgcgcgaactcctggaaggtgatggcgccgtcacggtcggcgtccagccgctggaatactgcctcggcgtcggccggccgcacccgcagctccgtgcacagtgcccggaactcctcgcgctccaggcgccccgagcggttcgcgtcgcaggcggcgaagactgagcgcagccgggccagctcctctccgtccccatccgcctccatcccgcctggcgggggcggccgagagggctccggagcgccgcggggcgcagggccctccctggaaggacggggccacctgctgccgccgggaggcccggcgagtttggctcgtccggctggttcggccacttgagggaacgtcgggcggggcgaggaacgtcgggggtggccgagcggctcccttcgacgacggttcgggccagcccccaacaggtcccgggagcggtggggtgcgcccgggctccaggcaccgccaaggagcgcctcctgcgactgagcgcccaagcgccgaggtggctctcgccactttcccggcgggtgcagctccgcccagccagggaggaggagcgcgcgccaccgcttctccagttcccacgccccggagtccaccgctgcttgccgcgcaggtgggggagacctggctggccggaactgggattcggggggagcattgcccttcggcgtaagc

SEQ ID NO: 333692 - DNA, 552 bp, Homo sapiens
  chr9:86755547-86756099
  hyper
cggccccgccaggacgggcacggcttcgcgtcctcgctcaagtccccgatgatggccgcgtcccggcaggcacggtgcgaattgactggggtttgggggaaacgaaagccccgaaggggccttctctgccaaatgtcttcttccgtcggctcgatggcagcccccaagcctttcattttcaatgtatgaaaacactggggtggatttagcttttcctttgggaaacaaacaaacaaaaaagaacacaaagagcgtgtgtgcgggtcttctttcaaaatagtggggcatttgaaacccgcgctgcagctgcgggcgctgcttcaatcgcaagcgttttgttttctgaaagcgctttaaaagatgctgaagaggaagagagcgagcgccctgcgcattttcggaaacggaagattttgaaaacctgtatttatccgcccttcgcaaaaaatcagcttctctagggcgagcctttccaaccttttccgtcagggcacacagaaaatgacctgatttcaagagcatttggggtaaaactggaggggatttcagagc

SEQ ID NO: 333693 - DNA, 920 bp, Homo sapiens
  chr9:87283136-87284056
  hyper
cgagactccaacccattgctctctcgagagagaaggattgcccgcctttttcccccgggcaggagctcggcgaggccaggagagccgcgcaccggccgggcagggacgcgcaggcgtcgggcgccgctggttgcgcatctggcgccagagcgcgcccccagcgctgtgcccgccgcgacccgggccatgggctggtgctccggagcgtgccgggcgctctctccccgcgcgggggcaccagagccctcggaagtgtcaggcactgcggtgtattttccccgttctcttttaaatgactgcggaaaaacagattccgagccgcaaaagggaagacggattctcagacaaggcttgcaaatgccccgcagccatcatttaactgcacccgcagaatagttacggtttgtcacccgaccctcccggatcgcctaatttgtccctagtgagaccccgaggctctgcccgcgcctggcttcttcgtagctggatgcatatcgtgctccgggcagcgcgggcgcagggcacgcgttcgcgcacaccctagcacacatgaacacgcgcaaggtacggcaggggagcaagggcttgggatgccctacgtgggggtgggcatcgcggggagtgaatccacgatctgggaatggctacatcccgtcaggttaaaggatgagagaaaatgacgcggcgccacacatcggacaggccagggtggccaccgagcatttagaatacgcatcaggcgcgctcccttcccctcacatgtctctatttcccgggcgtgtgatggcagaaaacggcaggaaaaagacccacttagagagctagaattgtgtttggagactcccttccctctgcaaaagcaccaacaggaagcccctccaaaaccaccgatccccaaataggtggcccggaatgggggc

SEQ ID NO: 333694 - DNA, 641 bp, Homo sapiens
  chr9:87285083-87285724
  hyper
cgaagagagagtgggcacactggtggctccagcggcgtcagtgccatcgcggggcaagttgattcctgggccggagctgggcactcatccatccacagtctccgggctggggtcggggtggggatgacgcgagcagagagggagagtgccccaattagtggtgttgggggtcctacgctcagtcttacgcgtgtctgtttgtcctcagcctcgaggtgcataccggacccccattcgcatctaacaaggaatctgcgccccagagagtcccgggagcgccgccggtcggtgcccggcgcgccgggccatgcagcgacggccgccgcggagctccgagcagcggtagcgcccccctgtaaagcggttcgctatgccggggccactgtgaaccctgccgcctgccggaacactcttcgctccggaccagctcagcctctgataagctggactcggcacgcccgcaacaagcaccgaggagttaagagagccgcaagcgcagggaaggcctccccgcacgggtgggggaaagcggccggtgcagcgcggggacaggcactcgggctggcactggctgctagggatgtcgtcctggataaggtggcatggacccgccatggcgcggctctggggcttctgctggc

SEQ ID NO: 333695 - DNA, 454 bp, Homo sapiens
  chr9:88137539-88137993
  hyper
cggcgttctcgtctgtccctacttcatccttcctctctcactgtcttacagcaaaggactacagcaaaggcgcgttcagcgcctgcgcggccaggcccggggtgctgggttgcggcttcccgcgggtaaaccctgtcggtacccgatccccgtccgcggaaggccaggagaacgcggttccccttctcgcgtcctctcccttcccgcatctgtggataactcttcccgcatcggcctctctctgctgacattagaaagacgtccctacgccgcggcgagcttcctttgcccctaaaagcactccctttctgtgtgcaggaaaccgcccccgactccgcgcgatcgccctgtgcgcgcaggagtgacaggcgccccagctcgcgctctccagcccgccagggcccggctttggcagacccgaggctcctcacccgccctgagggacgggttgtac

SEQ ID NO: 333696 - DNA, 218 bp, Homo sapiens
  chr9:88355794-88356012
  hyper
cgggaaatgggctttaaattatcaacattcacatcgattacactatgatgcatgaaaactccattctacaatgagtaaacgcccaagaaaggaacccaaccaactccaattgccctggtgctcgtaagaggtttataccgcacaaggggtaaaacaacggtagagtcgagcaagcctttgggttacaacagtccttgaacacttgcaattgagaaccc

SEQ ID NO: 333697 - DNA, 515 bp, Homo sapiens
  chr9:89517563-89518078
  hyper
cgtgaatgcggcccttccccaccacacacaggctctctcccaccccctgccagctatccctgctctgacctccccgggcctccctaaggggacgatgccccttcctccgcaagtggcagtcctgcagcccgggccctctttcctcttcccccggcctctgcgggggcgcgcgggctgggaaagggacgaaatggaaaaaccgtcccctccagcaccctcacctccaccgccaccctcacctccaccgccgccgagcccggggtcaaagctgccccatctcacagggccttcccagcgcgcggcaccaagacccccatttctatgcaccctggaaagggtgattaatttaaagtgagtggagtctgtttctttaagacaagctcataaatcgtgaaagatcaccacttcttttcaaaagcctctccacggtctgagtctcccttctgggtcagtaaagtcattgaagctttaacggcatgccatggcagattacacgatacagctgtcccggcacc

SEQ ID NO: 333698 - DNA, 1496 bp, Homo sapiens
  chr9:89560777-89562273
  hyper
cggccgcccgatgcagcagcgccgctgcccgggcgcggtgggtgcgggacgccgtcgtcgtcgtccagcggctgctcaccacccgcgcccccggtgcgctgctcgtcatcgtagtcctcatcgtagtagtcgtccaggcccccgtccgagccgctgctgccggggccgttgcccagctcggcgccgaagcacaggcgggccatgttctccttgaccgactcgcagatgggccgctcgaggccgtcgcacacgcagtcgttgagcagcgccgccttgggcatagccagcatgtcctcaatgacggtgcggcattcgtccgtgcagcgcagcccgttgaagactttgccgcagtaggtcaggtagcggctcagcgccaggttgcagcggctgtcgcggtcgcagcgccgccgggcctcggtgcagcccatgaccccgcccgcgccggggccgcccgcgccgccgccgctcgtccggggcaggcacggctcaatggcgcgcttggtggacttgcagttctcgtcctgcgcgcagtcacagtcctccagggcgggcccgcggcgcgtgtggttgagctgaatgagggccgagatgcagtgactcgggcagcgccagcgcgacgagaaagaggcggccgaggccgggaaagcggcggcggcggccccgggcgcgtcgcccccgccgtgctgcgccagcaccggcgcgcacgcctcggcgtactggttgtaggcgtagctgcactccggctccccctggcactgcagcagcgcctgccagcagatgaggcggcggccgtgcgccagccccgatccccgcggcgccgagcccagcagctgcagcagcgccatcaggcacagccaggcgcccggcactgtccccccgcgggcctcgccgccgccgcccagcagcgcggccaccatcgcgggcagcggcggccgccgggagaggaggggaaaggagacgaggcgcggggagcggcggacgcggagccggtggaaaagtttgtccaagtcctgcccacttcttgcatgagtgtcttcataaatccatgcgcgccgctggctgatgccccgctggtggcagaaggtcccctttcgctctggctgcggtggcttcctggaaatgaacagctgtcgagatctggtcccgctctcccacccgagagccctccgctcggcccccggtggtggcgggagaggctcactgtcgccccgggggggtgcgggccgcggggccgtggcggggctgcaggaccgcgcggcgcggcgggtgcattttgctccgcgcctgcagatccgttgtgcggccggctgtccccgtgccggctgctcgcgctgcggccgcggcggctccttcctcctgggctcagtgcctcgccgccgccaccgccgccgcggtctctcgcatcgcgccgcttcctggcccggcgtccgcgcgctgcccgccttcccgcggcccggccgccccgcgtcccctccccctccgcccgcggcaacccc

SEQ ID NO: 333699 - DNA, 757 bp, Homo sapiens
  chr9:90112514-90113271
  hyper
cgcccgcgttccgggcggacgcactggctccccggccggcgtgggtgtggggcgagtgggtgtgtgcggggtgtgcgcggtagagcgcgccagcgagcccggagcgcggagctgggaggagcagcgagcgccgcgcagaacccgcagcgccggcctggcagggcagctcggaggtgggtgggccgcgccgccagcccgcttgcagggtccccattggccgcctgccggccgccctccgcccaaaaggcggcaaggagccgagaggctgcttcggagtgtgaggaggacagccggaccgagccaacgccggggactttgttccctccgcggaggggactcggcaactcgcagcggcagggtctggggccggcgcctgggagggatctgcgccccccactcactccctagctgtgttcccgccgccgccccggctagtctccggcgctggcgcctatggtcggcctccgacagcgctccggagggaccgggggagctcccaggcgcccgggtgagtagccaggcgcggctccccggtccccccgacccccggcgccagcttttgctttcccagccagggcgcggtggggtttgtccgggcagtgcctcgagcaactgggaaggccaaggcggagggaaacttggcttcggggagaagtgcgatcgcagccgggaggcttccccagccccgcgggccgggtgagaacaggtggcgccggcccgaccaggcgctttgtgtcggggcgcgaggatctggagc

SEQ ID NO: 333700 - DNA, 750 bp, Homo sapiens
  chr9:90113280-90114030
  hyper
cgcctcggtgggccgctcccttccctcccttgctcccccgggcggccgcacgccgggtcggccgggtaacggagagggagtcgccaggaatgtggctctggggactgcctcgctcggggaaggggagagggtggccacggtgttaggagaggcgcgggagccgagaggtggcgcgggggtgccaccgttgccgcaggctggagagagattgctcccagtgaggcgcgtaccgtctgggcgagggcttcattcttccgcggcgtccctggaggtgggaaagctgggtgggcatgtgtgcagagaaaggggaggcggggaggccagtcacttccggagccggttctgatcccaacagaccgcccagcgtttggggacgccgacctcggggtgccgtggtgcccggccccacgcgcgcgcggggctgaggggtcgggggcgtccctggccgcccagctttaacaaagggtgctcctctccaccccgcgaggaggggcagctccggagacccggtcttcagcgagcggggtcttagcgccggggaggtctacttccttttggggttgccattttactattattattgccttttttttttcttcaaaaggactggagactgatgcatgagggggctacggaggcgcaggagcggtggtgatggtctgggaagcggagctgaagtgccctgggctttggtgaggcgtgacagtttatcatgaccgtgttcaggcaggaaaacgtggatgattacta

SEQ ID NO: 333701 - DNA, 898 bp, Homo sapiens
  chr9:90340643-90341541
  hyper
cggctctgcggaccaaaaattccaggactaaggaatagcaaggttaggctgaaacagtccacacagggcttgcggtaaacgtcttttcaggagccactcgcccagtgcagtaagtcgtgtacttagttgactcgagcgctccagggagacgcccgaccctactctgcgccgccccggggcaccagctctgcttcctccaggtccactgaggcaggcacgcccagctctgggacagtcagtaaacaagccacgaaccgcgccagggatcagagcacccagagtccccgcccagctgccggcacagccaatcgcagcgcagccaggcggcggggcggtgccggccgaacccagacccgaggttttagaagcagagtcaggcgaagctgggccagaaccgcgacctccgcaaccttgagcggcatccgtggagtgcgcctgcgcagctacgaccgcagcaggaaagcgccgccggccaggcccagctgtggccggacagggactggaagagaggacgcggtcgagtaggtgtgcaccagccctggcaacgagagcgtctaccccgaactctgctggccttgaggtggggaagccggggagggcagttgaggaccccgcggaggcgcgtgactggttgagcgggcaggccagcctccgagccgggtggacacaggtaccgcagccaggccgcgccgcgccgactcagggcctggcccggccagacagggaagctcagtccccgcacgccagacagcggtactcctgctggcgtcaccgcaaacatcctctgaccgctacagccagtgtgtggcgcaggcgtcatgtccccggccctgccacgcctggagccctggaagctggctgcagggcgctggcttcccgcgtgcggccatatgacccc

SEQ ID NO: 333702 - DNA, 378 bp, Homo sapiens
  chr9:91149028-91149406
  hyper
cggctgcgggacacctgcggcggggcccggcagggagcgcgagactggaagagaggccaggagggaaggagagcgacgcggggttttgggggaggggctgcgtggggcgctgaaggggagcgcgaggagtgggaggaagtgaaggaggaggaagagcacggtgtgggggaagcgcaggaggcaataggtggggcgggacggagggcagggcgctgcgtcgggagaaagtgtagaagcgctggggagagtgcccacgacgggagagcccaggggcgcgagggcgcgggagtgtgggcggggcgcagtggggatgggggcgggggcgcgggatgtggtagggggcgtagtggggagagagtgcaggagtgtgggcagggc

SEQ ID NO: 333703 - DNA, 992 bp, Homo sapiens
  chr9:91149647-91150639
  hyper
cgaggcgcagttggagaagagtgcggggatgtgggcggggcgcagtgaggggaaactgtggaatgtgggcgaggcgcagttggaggagagtgcggggatgtgggcggggtgcggtgggggagggtgcggagatgtgggcggggcgcagtgggtggagagtgtagggatgtgggcccagcgcagtgggggacagtgtggggatgcgggcgaggcgcagtgggggcgggggcggggatgtgggcggggcgcagtgggtggagagtgcgggatgtgggcggggcgcagtgggtggagagtgcggaatgtgggcggggcgcagttggggagcttgcggggaatgtgggcggggcgcagtggtgggagggcgcaggagtgtgggcggggcgcagttgggggagggtgcagagacctgagggcttgaggttgcctggctggccccgctcccagaggcgggtgccgcgctgtcgcccaggtatctggggtctctggtgtctgagtgtctcattgtcggcgcgaacacaattgctccagccacaggcgaggcctggccaaggtgtgggcgcatctggggcaggtcttgagaggtccagcgcccggtggtgcggacagaggcggggcaccgcggcgctcgccgccgcctccccgcaggtgatcatcctcctgcaggtgtcctcgggtctcaggtggctgcgtgtctgcgccatggttgacattctgggcgagcggcacctggtgacctgtaagggcgcgacggtggaggccgaggcggcgctgcagaacaaggtggtggcactgtacttcgcggcggcccggtgcgcgccgagccgcgacttcacgccgctgctctgcgacttctatacggcgctggtggccgaggcgcggcggcccgcgcccttcgaagtggtcttcgtgtcagccgacggcagctcccaggagatgctggacttcatgcgcgagctgcatggcgcctggctggcgctgcccttccacga

SEQ ID NO: 333704 - DNA, 173 bp, Homo sapiens
  chr9:93404976-93405149
  hyper
cgcccgtgccccaatgcggacgcagcgaagccacggcagaagggggaaatcggttacctggggaagaacacaactccgctcagagcttcttcagagctccactcgcgcaggacagggcagcgcagggtgtgtggatgcggctcctcccggaggcaggcgcagcgcactccctc

SEQ ID NO: 333705 - DNA, 1191 bp, Homo sapiens
  chr9:93955385-93956576
  hyper
cgtgaaacacaacgtgagaatgggaatctgacatatgagtaacccggccgagaggcacctcttggaaatgacactgggccttggctagaattacgcacaggccctgggagggctgcggctcgtaggcccgtagggggcagggtgagggcggaggtcctggcgcccccaggcctgacccgcccgcaccgctgggctatttttagcgtccactaaacttagccgactccaccctcttgaataacccacatcttaaaatgctatttttctccaacaggtcaaaagaattctgcgagttagagcgcagattaagttgctagcgacgggcattgaaggttttagaaccgagaaaatgagccggtggcggggagcgcgtcctcagcggccaggcccggcacggggctcgggcactcggggacacacggtggtcgtcgctgtgtctcagcaggaccctgtgcgctggagagcttggggccgcgagtcgcgcagcaaggaggcttctggcttctctatttttagcctctgaacgttttccaaaataattaccaaaaggaaatacacacgcacacatggacctaacacacaaaacgtccttctgcgggaagccagcactaggaaagaaaaaaaaaaaaatccgaagtgaaattatgacacagggttttgtaacccgcggtggcgcgcttctgaaacccgagcccggcagcggcttcttatctgcaccgcgttccaggaagcagccggcgtttcggccgcgcaagggcagccgccgcacgtaggcagcgtcccccagcccgggacccgcaggaatgcgaggggcaagacagatcgccggaggagcaggggtcagaagtcagtgtttaaccactcactggctttcggtgaagccagaatgttagcagcgagtcgcggtcgggggccttggggttgcacacgcttgctccaagcaccgaggctcagctgagcacatgcacaaccctctcgatgcagcggaaagtcgtgtggcttagggccgcaccccgaatttcgccgcacccgccgctgtgccatttacaaccccccaccccgccactgctgtcacgtagcaatcaagagtaaaggttatcacaaagtctgttcttcgaaggaaagagttggaatcaaggacttcggacgggaggaagttggtaagttaccgcttcctccctcctgttttcc

SEQ ID NO: 333706 - DNA, 507 bp, Homo sapiens
  chr9:94183474-94183981
  hyper
cgctccgggtcgcccgcgctgcccctgtctgccccgtgcgggagccggggtccctggctccctggctccctggctcccgcggcccgggcgaacccagagcgcacccgtacgccggccccggccggtccctagcgcccgggctccacgggccgcgcccccacgcggcgcctcccagagaccctcctccctccgggtgggcggcgcagcggggcctcggcgccgcgaggaccccccgcgccagaacaaaggaatgtggggagggggcagggaggagctcaggccactgagcagccccagtataactgccgttcggaggcgcttctcggtcccgacccgaggtccccgcccgccactaccagacccgcccccagccccggattctcgcagaccccaccggcccgcaggagggagcggcgcactgggggccgcacggactcgccattggagatcgcgatcggaaggtggcgccacgcggcccctacaggcctgggactcccacccgagctc

SEQ ID NO: 333707 - DNA, 884 bp, Homo sapiens
  chr9:94711200-94712084
  hyper
ccagagctaacgccgcctcctccaggcaacctaggcaggtcccaagctgcacttccgaacctccccgccgttcctctgcgccccggatccaagcagccgaaaccgcgcagggactcgggggaagtggggccccgggaggaaacccacctaggagccgggccccgcccctcccgccgccagcctcctacaggtcccgggggtccccccggcgcggccagaaggcggccgcgccccagccgctcagggacccgcgatcccagtcacaaaccatttcaatccagatcacacaccacttcggccaccccagagcggtgggggagaggaggtttcagggaccaacaaaagggatgccaaagagcccgtttccatcaagcggcccgcgggctgggaaagtcaggacccgggagccgccggcgcccccacccccgccgcaagagccgcttctccggggccacgtccaccccaggattctgccaggcatcaggccgccctgggggtggggggacgctccgagacagacgggggacactcggggccgtgtgcccttgaaggaggaagacctcggggaggaagcccgggtcctgggaccctcggggcacatctgcggactcgggtcccgggcccagggcgggtactcacattcacactcgcactcccactcgcgaccctcgggaagcgccaccgagaggctcccagccgccgccgcccgcccccagactctggaaacacttaggcgtccccagagcgcggcttattgtaaccagcccgagggggtccggggtgcgggccgggagcggcgtcgggcgagatgcgaatggccctgcctggcgcccctcgttcaggagcatgggcgccggcgcagcggccgggagcatagtggcggc

SEQ ID NO: 333708 - DNA, 700 bp, Homo sapiens
  chr9:95569780-95570480
  hyper
tggggagaaccgcccgtccgatgagctcggctgagcgtgcacgcagtgccgaaatcaaggacgcctggatgcttttcgttgcagagtgacaaaggttcaacaacaggaagaggatcaggggccaagacaagaagctgaagttcggcctgccaggaaccccgggccccagcatcccacccaaggcgctgctgcaggagttccagctgctgctgaaaggtgcggtgccgcagggccagagtgcgggatcctgagccctgcatgccagtccttgcgggggccgatcgctgtgagccttactcaggtccagccgcctccagggaggacaatgtagacgaggtgcggggcgtgagggcggtgctggccgcacccctggtcctgaggccacgggagccgcgcgaggaggccgccttccactgacgcctgcaccgggaccggttgctgcagcggtgccagctgcaggagctccgcgtctgctgcttctccgacgccagggcgccgccaggatgacaggtgcaggagactgtggctgtgggcagatgtggtttccagccccaggtccccgcggcccctggcttcccagcgcgctgtcctgtgagcaagaagatgaaaaaagccacccgatcaacaggtcagctgccccgcctggcagcccagccagacaaggcaaccgaagttcatcctctctgagttgacttcgtgc

SEQ ID NO: 333709 - DNA, 779 bp, Homo sapiens
  chr9:95570902-95571681
  hyper
cgagcccgcccgcactccccgcatctcaaaaccggggctagaggtccctgtagctgcggccaagccaggcggtctgccctgcggcggctgcacaggggcaggaaccggccctcagacccaaccccggtggctgcagagggccactggctagaggtccccagctccagcagaggaggagctgggcgggggcagggcctggcgggctctcaggccaggtgcactcgcgatctagaggcagcccaggccattctccaccacctgggcgcccaagctgcaggcgccctctacctgctggcaacagctgcctggccactcccaagctggctggcgctcccaagcctcgcagaaccggggctagatgtcgccgtggctgcggccaagcccggcggtctgcccggcggcggctgcaccgtggctggaaccgaccccccagtcccatcccccatggctacggagggcccctgtcagcggccccgatctctctttggaggaggagcggggcgggagtcacggccaggagggccctcaggccggaagggatgcacgtctgcgattccgagacgtcccgcgcgagcccaggagaacccgcaagccagcagcgcctgcgcccgagctgcagcagccccctgcaggccacgcgggctcgggagcggtttccggagtccgagctggcgctgagctgcaggcgcgagcctaaaggcttagccggggcccacgctgtctgagagatcggagcgttcagctacaggcacgcgcttaacggcttcgtggagctcact

SEQ ID NO: 333710 - DNA, 581 bp, Homo sapiens
  chr9:95820744-95821325
  hyper
cgcgtgcaacgccccggagtagcaacactttccgctcagccggctgccttggcccgctgggtatttggtctccccaagggcccccgcccacagcccccggccggacctcggccccagtccaacgtgtgggcgtggtctgtaagttgcatggaaccgcccctgggcgggcgtggagggcggggcctccccgcccctcacccaggcccaggcccaggccccgcccccacaagccgggctcactcccctggcagaccccgccaagcgcctcggagcgcgcaggatgcgctgggcggccgccaccctccgtggcaaggcgaggccccgggggcgggccggggtcaccacgcctgccccagggaaccgcacaggtgagggctggggccgagtggccgcgtgcggggctctgcgcccatttcacagacgggaaagccgaggggagggggtcgcggggccgcacagccgtgggtgggggccacagcaacgatctgccccgaggacgaacctcctcgaccctccgccggcccagcaggcgccctagcggagccgaagcctggcagcgagcagttcgaaaccaggcggct

SEQ ID NO: 333711 - DNA, 755 bp, Homo sapiens
  chr9:95946034-95946789
  hyper
cgctgagccccaccaggcttagccccaggctgggctcccgagggcggcggtacccctggtccttttcttcctagcctgcccattctgtcctggcacagggccttgaggtctagcgcgccgggctgcggcgtgctgaggcgttgagcctgctgcctcctctcaggaagaaacggggtcctccgcagctgacagccctgcggggcgttccaaagaacttcagaggacaggagcgctacctcgagcaaagaaccgcgggtgggagcccaggtagccggcccgcaggtggccgcgcgcgcctgccagtcagccagcccgtccgcagccaggtgggcgtgccaggcccagccccctgcgccggtccggggcggggcgaacggagccccgccctccccgcgcgccgggtcggagccggtgcgggagcggagccgcgcgaagccggcaggagcacgcgggagcgcggccccgcagtggcccggcccgagagagcagcgcgcaggagctggagcggcgccacggcccccaccccagcgcggacctcgcccggaactcggaccccgtcctcgaagcgtgatctctcccgcctcgcacgccctggccgccgggccgcgggcatggacggcgtccgctcgccctgtgagtgccgagcctcccctcaacgccgctcgccgcctttgtgtgcgcgccgcggcgctgcagccccctccccgcgcgcccctcccgcgccccgggcccgcgtcctttgtggagccgccgcc

SEQ ID NO: 333712 - DNA, 163 bp, Homo sapiens; identical to SEQ ID NO: 234253
  chr9:96588739-96588902
  hyper

SEQ ID NO: 333713 - DNA, 1208 bp, Homo sapiens; identical to SEQ ID NO: 234255
  chr9:96710797-96712005
  hyper

SEQ ID NO: 333714 - DNA, 1107 bp, Homo sapiens
  chr9:96713306-96714413
  hyper
gtggaactcagcagcccaggcgccgccgccctgagtatcctgcggaaaatgtgagaactctggggagccattgctgctgcaaggacccgcgggcgggctaccgcgctggtgggggggctctgtccaaaccttgcgtcctcgacttcccatccgcctcataaagggttggtgaagaccatctcaaggaccgcacgaactggtccttcaagtcccaggaaaccgaaacaacaaccgaggcggctctctgtccgggccacttccggagcgagctctgcggcggacctctggctcccgctcctttgggcacccgcggtgcggccagaccgctcctgccagcgactctctggctggcaagggagaggaggtggagttcagactggcccctcacgcccagagtggaagcgattcctaggatcctgcagccaccgagccgcccgccgtgcctagcccgggcttgatggtgaagagcacagctgccttcgacagagccggaggaaaggaagtttaagaagcaactgcccgcgttccgcttatcttgccgagcccacccccacccccaccctcaccccctgcggattcagaagctgctccaccgagcccgattgtgtcataaaatattttattggaaaaaaagtcaccgtcttcgcaagagggggtaggggccccagcgacatcggggacccggcctccaggccgagccgacgggttgccccggggcaatctcaggccgttgtggcctgagcccaaccgctgggtccccgacgtccagaagcgggtgtgtgcctggaggctccccggccgggagggcaggccccagacggggtgggggtgcaggcgaggagcggggcgtgaatacgcgtggagcgctctgcgccacggagctcagggtagagactgtagcttccgccgggctggatgcgagtctcccaggttagagcccagaagcgcgctgggacctgggtctggcttttgggtctgtgtccttcctcgtttggccccaattgtccgcattcaagatcataataaaaaggcttaggaagtaaacttcttggacgcggaagggccggctcgcgggtttccgccgagtgagggggctgcgggtggcgc

SEQ ID NO: 333715 - DNA, 728 bp, Homo sapiens
  chr9:96714959-96715687
  hyper
cggggcatggcccaggaagctgaggggtgggaagccaccaggcacactcactattttcttccacttcatcctccgattctggtaccacgtcttcacctgcaactggctcaggcccagggactcagcaagatctattctggaaagagcagggcgcaccctcagcaaggcaagtgaccacactcccacagcccgctggccccagccttgtaccgccctacctgtccggcgtggaaaggtacttctgcttctcgaagcgtttctccaggcccatcagctgcagctcggtgaacacagtgcggctccgacgccccttcttggctttggtgcctggctccccagggcctgccgcctccagcttcccgcggagctgcaactcgagcggcaggtgtggcgcacccgcggcgccgggcagcccgggccctgccgccagcaacgcagagctcagccctgaacagcccagcggcgccagtgggaacttgaacaccgccgcctgctcggccttcagcacggctgcgaagaaagagaatgaggacccgggtgagctacggccgcgctcctctgccccagggactgccgcaccacgtgccgcgggggtgctcgcgcttggccagtgcctcccagcgcaaaacctccacgccctgccggtcggcgccggtggcgcagatggagaccctcctcaacgttgccgttccccagatttgggagggagtatctcctcgaccctgtcc

SEQ ID NO: 333716 - DNA, 1550 bp, Homo sapiens
  chr9:96716717-96718267
  hyper
cggggactccgggccggcttgggcccgcgtcagcacccagccctcgggagcgcaggcctcctccccagaggtccgacttccctgggttgggcagccgcggccactcccggccatccctctgcggcgaagcccaggcgcccgtggcctgaggtcgcttccacccacgagagtccgtagcctggcagtgcgcctgcactggggatgctcactcggggtccccgggctggaggccgaagggaagcagtgaaggaaagagcgaacaccctccccgggcggcccgcgggcacgaggcctggtttctgtgaggcctggagcttgcaccctccgcctcccgcctggagggctccgagagacggtcccagaacctgcgctcccagagcagcttcccggggctgcttcgatgccggaggaggctcggggcgcccccgcggttcagctcgctgtctcccgccaagcccggcccgcgaccccgcggccgccacacgtacccaggtggctgtggaagggccgcgccgccagcagcgcctgcacgccgaacttcagcagctcgcccgccgcggcagcggcggctgcgggcgcggcgcccttgggcccgggtggctccgtgaggatctcctcaatcatgaagctgcgatagcggtgcggccggtggtccgcgcagccctcgggcgggccgaagcgcgcggcgcccggctcccccggccgctgcatcgcggcgcccactgctgcgcccgcggtttggcggcggcggcggcgacggcttggctccggcgcggggcccgcgcggggctctaggccggcccgcagctcggggcggcgcgcgggcgccggctcatgccccctcccccgccggccggccgggcggaggcgcagggcgcgggcggggcgcgcggggctcggccggtcgaacccgggactgcgccccctccccacgccgccgcgcctcttgcccggccagccccgcgtcaccgccccgccccgccccgccccgcgccgccgcccccaacccctaggctgagccggagggagggacccagaagggagggaggcggaagggaggccaaaaaggagggggccacgtgaaagaggccggccgaccgagaccgagggagactgagcggagcgcacgccctggaaggagagagccggagagttcgggaggcaagacccccagagacgagagtcggagggatcaaacgacacaggtgagagaaggggcagaggcagacggcgtgggccaaacaagattccagacagtgatgtgagggcaccagagacgccaccgagatgtgcgcagagagaccaaaagaggcgtgagagccagcgggctgtgacgtgacggagggcacagaggcaggcggggcagaggaagggggcggtaaagaaatgggaacagctagaaaaccggcggcttgatcggcttttaggtagccccggaaaggtcgggaggaggaggggcaaaggccgcgctcctcagctgggaaggaggtggtctcaagcagcctccagtcccgggctcaacaccgccaacccggcaagggtgaggcagc

SEQ ID NO: 333717 - DNA, 1249 bp, Homo sapiens
  chr9:96720648-96721897
  hyper
cggcggcggcggcggggcctcctctgctcaggcactgccgcgttggcggccgaaaaaagagggtcccagagaaggggaaccccctccctgtcgaggacaccgaggcccagagaggggaagcctcctccccagtggggtgcagtctgggattgcagtccccaccccaggggcgcagctgccagcccaacgcctgggacacaccccctcccgaggcctctagccgccgccgcgaaaatcccggaaaccgtcctgctcgcggcgggcgcagtggaaaaggtgacctcagcgccccgggccagccgccctccctagcagccgggcggcgaggggctccgggcggcaggggttcctcggcgccgcccggtcgctggatgaggggccctcggagcgcagaaccggccccctccccacccatgttctgcccctcagaccctacagcccctttggaggctgcgggacagggaggggaccacctcattcccacaaccgaatcccctaagcattcaggtgtaggttccagaaccacctcccctccacccacacccttctcctactccagcgcctcccagacgggattgtgaaatggctccgcgtgcgaacgggtccaggagccgttcgttgtacagaggaggaagctaagtctggaaggagcactcgagcaggctcagcggccagcagccagcggcagggggatcgtgcatcgcttggagggcgctgggctctcctccatccgcctcagccgtgggcagtttgtttccgctcccacttgcagcgggtctgcatcttaattggcaaaacgaagttggggccgcggtggagcggaggcttcttccagaacggtcagctcacctccggatgcggtcgtccgagcagccgcctgcggggggtcccacgccctctatctaacaggttgacgtccagcccctaggggcccaggcggccccgggccgccccacctcgcggccttctgctccccgcgcagccttgcgcgcccagccacccagcacacggtccgtccctggggacgcgtcgcgagcgccgggaatggagctcgtttcctcttttcttttttcttcttcttcttttttttttttaaacctttggttctgattgtccttggcccagcaggctgttggtggcgttggtggtgctgctgggactggggcaccggccttggccgcaggtgtgctgtgcccgacagaggccgcctggaccgcgcccggaacgccctgtccgggtgggctgcggc

SEQ ID NO: 333718 - DNA, 685 bp, Homo sapiens
  chr9:96722524-96723209
  hyper
cgctcctgtgacccggagatgacccggttcttagtggtccaggaacctgaggcgatgctcctggactcgcggagccgccagcccgccgctcccagccctccaggccctggacgggtcccgcctccatttcacacccaccgctcgccagccccggcggctcccgcagagaccttgcatccgagtccagttacgcgaaccagcggcgcctgaggccacacccagagccaggaagtagccgtctgggtgccggggctctgtgggcacggccgcgctgctgggcgcggactgcaaggccgggcggggatggtgtttgcgacccgcacaggcgctctccccccggcgagtgtggacccttcgagaatgctcccttggcccaggactgatccccacgagcatacagcttcggccttccgaggagagtcagggtcggtgcggaccgactccgcaggccctcccttgccccatctgggctggtgccaggccgcagctcgagacctggtttccaccccgggctcccacagagcccatgaagcgctggtcacagcccctggaagctgcagacccggcttttcgaggagcctccccgacgtgcagagcctgagaccccagagagcggccggctcgtgcgggccagaacgcggcgaggcgcccgcggaaacgactcggcttttctttcttttcccct

SEQ ID NO: 333719 - DNA, 428 bp, Homo sapiens
  chr9:97767434-97767862
  hyper
cgcagccgctgcagagggagcgtcgcgccggggcggagtgcgggcttgcgcggcaagtgcgcgccgaggtgagtgcgggcggcgcggtccctgcgccccggtggcgccggcgcgagaccgcggctggcgagaggccctggctctgcgctgcggcgcgcgggtgcggggactacccgccaggctccggctcgggcgcggggagcggccgtgacgaaggtcgcggcccctgcggtgaggcgcccggcgagttccgcgggcgggcgcgggtggcctcccgaggtgcggggaagaccaggtcgcgaggccgggggtctctgctttctcgcgctgggggatggccgtcaggaccctgtcgccttctttgaaatgctgtggtttttgaacctcaggtcacgaaatggattggagtgaaccggagaccccgaaaa

SEQ ID NO: 333720 - DNA, 852 bp, Homo sapiens; identical to SEQ ID NO: 234267
  chr9:98111402-98112254
  hyper

SEQ ID NO: 333721 - DNA, 1264 bp, Homo sapiens
  chr9:98272643-98273907
  hyper
cgcggatcgcgaggattcgtcccgacaccgcgtccagtgtcaccaaggcatcccggggattcgcttcccgcggagggggaaaacacgcgaccctttgaggtggattctggagccagacacgtctacacaactaggctttttatttaaaaaaatttttgttttcggaaagtggaatgtgtttttcttacgtttccaagttattacgttcctccctgcggtaggaacccgacccgcaaacccttgatttgcttcactttatttttttttttaaacggggttgaactgcagagggactggcagtagcgagaagtctagtgaagtcgtgaaatggggcggtgtggctttaagatgcgcacggtgtatgttcattgaaaaaaaaagaagaaagaaaggaaaggaaagaaagaaacccagatggagggaaagggggaggagcagggagaaggcggagctccggtggccacgtgaccccgcgccaggaggcccggtgcgcgcgcgcgcccggctcccggactccccgcgcccgcgcggccggggcagagtaggtagggaggcggatgcgccgggccggctccgggcctccagcgcggtctcccgagagcccaggcgaggcgcgcgcccagccggcgcggacggacgtgccggacgcgccgtagtacattcctgaaggcggaccggcccccttacgctgcccaatgcccgcgccgcctccccgcgaccggccaatggtcgcgctcacgagtccctgcccattcagcggccccgcgctggctgcccgggcgcgctgggggctgcggcggggcgcgccggccaccggggcggtccacgcggctcccgcagggggcccgtccgccggctctccccgcccccttccttcctccccggcggtttcccctccccgcttccttccttcggcctgcgccttctccttcctccctcgccccgctccctccctcaatctcccctcccccaccagcctggccaccttccctccagcctctcctcctccccggcttcagggggaggcccttcccccgaccccctaacccgcaaaccgtatgcggtgccggggtcagggcgggatgtcccgaggaagagagggagacggggtggaggtgtttgggggcgttcgcgggatccggagggggacctgagcaccgggccagcgcggaaattcaaaactcagaccgcttaaggagcacgtgattttgtgagtgcctcagggaagggctgcggaaactcggaaagcaggcgggcagcatgc

SEQ ID NO: 333722 - DNA, 824 bp, Homo sapiens
  chr9:98783204-98784028
  hyper
caccctccaagacgcgcgggccggggagcggggagagggcggagggaacggcgcaccgggccccgtcggactgttggaccaaaagtcctcagtgtcgggggctcgcagcgccgccgcggcgaacccagctagggggcaccgcctgcgccgggcacagggaggccgttcggctttccccctcgcgcccattactctcaggcgtcccggggaaccccgcgggccaagtgtcgggctgcgtccgggcagaggcggcttcgcctggtgtcagcgcgtttccgaagggcacccgcggcggggcccacaactcgagctgggagccgccccaagcaacccgttcctccgaatcaggctgcttttctctgtaaagaaaagagaaagcaagcgattaactgatggcttggccggctggaaacgggaaagcgagttctccaggagccgcacacctcggggaagcccagtccctcccgggcagggagcgaggggcggtcctgggggctgcttcccgcggggagagaagggagggcggcgcagccctctgcggggtccgcccctcggttctccggacccccgcggcctgggggacacggggcaaattctcggatagcgacgggcaggaaggggacccgggctggcgatgggccgagtgcctcctttgctctcacccccgcgcgaagacgaggccagtgggcgggtggcgtggggcgaggcctccgcaggccgccgggggcccaggcacctggagccgggagggtccgctcccttccccgccctggatggcggcctatgggaaagcagtctccactggatcccgcgcgcgtcgcgcc

SEQ ID NO: 333723 - DNA, 894 bp, Homo sapiens
  chr9:98784033-98784927
  hyper
cgtgggaaaccgagggcgggagggcgggagggcggaggcgccggcagggtcggcgggactggggctcggacggaggacaggggcgaggaggaggcaggaaggacgccgggtactgcggggcgcctagggggttccgagcgcagcggctgcggggccgacccgcccaggatggaatcagggccccggcgcccccacgccgctcctccaggccgaacccctgcggccccaatcccccggcctcacgcccaccccgcaggtcggccctgcagctgccttcccttcctccacctccctcccgcctccgaagccggcgcccccggccaagtggccgctctcaacctgttaccaagtcctagagagaatttctccaaaatatttcctggatccccctgccaagggccctgtcccgcccttccagctcccaactggatgcctgcagacctctccccgggttccgaggctctggcctcctccctccctaatccattttccacaccgcttccccgggagcccgttaaaatacaccgggaccgcggcgggtgcaagcctcctgtatctccacatagcaggctaaggggaattgggtagggaataaaggctgcaggggacatcggctggcaggtatgaagcccgtattgtgtgtcgtttgttaaacacttccagtggattttctcgtttaatctgcccaacaacgcttctgggccggtattcgtattgttttatagagggagaaactgaggcacagaggggcactcggcttgtaagcaacggagtaattcagagcccgtcagccccacgccgagtttattcaccctggcaggggcttccgcgggagccatgacccttcctaactggggtggaaggacccgcagcgccagccgggtccgggccaga

SEQ ID NO: 333724 - DNA, 176 bp, Homo sapiens
  chr9:99637708-99637884
  hyper
agaaacctcttacccggttcccgccctcgccccccgcttacaggtaataaagctggaatttatgcagctctttcggtctccacagctcggggtcttgccacagacacagcgcccacgagttctggcactttggtcaacgtttataaacgggctctcctctgccgccgcgggcatgc

SEQ ID NO: 333725 - DNA, 316 bp, Homo sapiens
  chr9:99638097-99638413
  hyper
cgcccgcgacacccaagggccccgggaccacctctcagccttagctaggcgtgaagcagcgagctaagcttgcacatgcgcagacgtcatccagaagaccctttcctagagtgtggcgcgcgagccattcggatttaagactacgtttcccagaaacctccacgccacgacttacttcgcagcgttttctctattggatgattggaagatgttcctgactgcctcgcctggccaggttctgccagagcccctagaggttatgggttaaatttgaactttgctgccgaatacggtgcgtggtcctccatcaaatccc

SEQ ID NO: 333726 - DNA, 356 bp, Homo sapiens; identical to SEQ ID NO: 234281
  chr9:99639677-99640033
  hyper

SEQ ID NO: 333727 - DNA, 500 bp, Homo sapiens
  chr9:99983230-99983730
  hyper
acctccaaggcccccgcctcaggcgctgcgggcaaacagggcctgggggccccctcccaccgcgggctgagcccccgctacctgtcctttctgtcgcgggcatccaagtcccggaacctgcgagtcaggcagcgctccacctccgcggcgtcgcccttgatggccaccctgtggatcttccgcagttcccagtccccgatgtggtacccccgacccgcgtactcttggtccatggagctcaggagcgcctggcccaggcgtctcccgaaactgaagagtttcctcatggtggcgacttctcagacgccaaccacccgctactgagccgccgcggctcctcgtggcctttccaccccgaccaagttccaaatccgcgatccccctccccaccccgctatccacccctaaatccaagatccaccaccaaaccagcaatccacccccaaacccaagatccacccccaaccccgcgatgtagctcagaatccgcgatccagccc

SEQ ID NO: 333728 - DNA, 356 bp, Homo sapiens
  chr9:99983792-99984148
  hyper
aactaagccgttactcgcgtgccagcagttgggcgctccgacctctcagaccgcgtgagcccagcaaagcggttaggcgcgcgcctgcagctcggcgctagcccggactccgggagccgctctcgagctcgcgtggacggcagagggcggctgcagctcgggcgcaggcgccgctggcttgcgggttctcctgggctcgcgcaggacatcccggaatcgcaggcgcgcatcccttcccgcctgagggcccgcctggccgtgactcccgctcctctcctcctccgaagagagatggggccgctggcaggggctctccgcagccaccggggatggggctgagggtcggttcctgcccc

SEQ ID NO: 333729 - DNA, 654 bp, Homo sapiens
  chr9:100000457-100001111
  hyper
ttggtccgagtgaccgcagcagtgggcgcggtggaagagaaggagaacgtgttggcccgggcctccataaccatggctgctaggggcggggactgggagcgcgggtcccgggactgggagcgcgggtcccaggccagggtgcgggctgggaagactcggtcctccactgccccagcaggccacgcgcccgcgcgtagcctcccgccccgctagcagcacgctgcgtggctgctcgttggctacttacgacggaagctcggttggggtttctgcagaagtttcccccttgggcggtggcggagctgataagcgcgctagtagcagctctggcagaagcaacggtggcttcgagggatggcggcggctgcaacaggacctgcagcatcccagaggtgcgtgtttttccttccctttgctatttattttatcccctttccttggctagtgggtcctgctgaagtcgttgttttcctgagaggttttttccagagcttctcagatgctctaatccactgcggcgttagaggtgagagagccttttctgcttcctccacccctggctgacgcgcctcctcccagcagcacctgattgggacccagggtcctgtggttactgcgtgtccgccccagtattgagattctcagtctcctcgc

SEQ ID NO: 333730 - DNA, 99 bp, Homo sapiens
  chr9:100263437-100263536
  hyper
cgattgcgtgttggaactacgtgtagacaaaacgatcgcggttaaagcttgcggctcagagcccacctggccgcgctgctgggaaacggacggagcggc

SEQ ID NO: 333731 - DNA, 387 bp, Homo sapiens
  chr9:100264592-100264979
  hyper
ggatcccaggttcgcgctgagagtgtttggggcaggtgaagtttcccaaactgggagagacaaggtttaaagcaccacgacacgcgctacgcggccaagtggagctggaaagagcttggaggcgggagccccaggttgtcgccggctctcggcatggccttggcaatccccctcttgtttctggatctcagtctcccatttgtaggggcgaggtttggtagccgcgatggagctgggagcccaagccctgagagctgcagggcgcgctcttggccgcctgcgctccccacacctgttcaccctctccgggcctgggacgctggggtcccagccgcgcacatgcggagacgctgcagaaatcggagactgactgccccagactcgatc

SEQ ID NO: 333732 - DNA, 648 bp, Homo sapiens
  chr9:100503340-100503988
  hyper
cgtttccggttctgatgcgctggatcttgaagctcttctccaccactagcgccctgcttgtaaccttagcacacgcaactctgaacaggaatagtcctgggagaagggcggaaggttccaggagggcgcctgcctgcctagagtccccttgccggtctcaccctggaaaggtaggcggaactagaacaggcgggccccactgcctgcagcctgcgaggagacgccagggctgcaagcccccccgccctcctccgcccctgccgggacagtcagccgctaggggattaggaacgggcccagcgcccattcaagccattcagcgagacaggaagccaagcgcgctcctgcccgcccgcctctgccgggcaggtctgcgggatgacgcgcattgtgctggggactcgcccaaagggaggcccagccgtggggaaaaccgcgtcccgcgggaatccgacgcccggtgacgggggcacctgcaaggcttcagggcgaatccctgactcccagcccggggctgagtcctcgtggggccgcctccgcgctgcccagtgctgccggttatctgctcacagcgggtggctccgggccttcaggagcgcgacgggcgccatcccttccagtgcctcccgggacaaggccagggtcatc

SEQ ID NO: 333733 - DNA, 1595 bp, Homo sapiens
  chr9:100610054-100611649
  hyper
cgtatgggcaactggaacccggctggagtgtgcagctggccccctcacttccagcccgcaggctgccgcgggggtgactcccgggagatgcgcctagagaggcaggacacctgcacgcatattcgtaacagaggcagaaatactgacggcgaaacctagagagacttgcactccaggcccggggggtgggggggcgggggagaagccttagggagagtggggaggaggccagaggagagctggctgctctctcgtgttgaggttcaagtgtcttccagctccccgcgccccctcctcaccgtgccaccgcccacctcatgctttgggcgccaagcagccaagcaaccgggttgcgttgtagggggaggcaatcagccctgttacccctcctcaggcggccggactgagctgcgggatgggatccctacagagactggcctgggtaaggggaaaaaatcactgcctcttcctgtgcctctagtggttgaactagaatcctggctagctcatctcgcttttgaagggggaaggggagtaatcatcggctcttttgagattgtcttgcaaaccatggactctctccccagaaatgaacacccacaatctagtgtgtaaatttcaggtttccaagtgttccaaagccgcgcacaaatttcggaaccagaccaagaatcctggactctagacgttgcctgggggccgatcctgcgcccagggtcccagaatctaactgaaatgcgcctgcgggccgccaccttcgccccgggccacggctttgccaggaatgcccgccgccacagctgaactcccgcccgcccgcctgggtcggatcagacgcgggtagtggcttgcgcttcgtggtcctcgggtccggaacgcagggaaagcgcgtggagccaacctagagcgggagcagggtctggcttgactctgtccccgattcgttgtgcgcagtgggacaagtccgcgccgtccggagccgacttccccttctcgttgtggccgtaaagctgctggacctccaagccggctcctgcgctccccgctgctctgagaacactgagtgtcccgggcccgcgcagactgggttgggagagggctctgtgggagggcttgcggggagcggggtaagaaaggctaggtgcttcttacctacgtaagaaacgttggtggcgggatctaagcaaacggggaggtgggaagcagaaggttccccttcctgggccccagttcctccatcctgtcccctgggtgacagtgattcgctgttcatagtgtttaagtggaccaacttaaagggagagagcgcttgccgagctctgggaaaccgaaagggtccacgcccgcgggagcctcggagactcaaaatcccccgctagaccgcagaaaatgttacactttaatcaaccgctacttcttccgtggagaggggcggtgggtgggggtgtgcgcatctcatcgcggcctgtgagtggaacaggctagaattatccccagcgtcttttttccatgtccaagtttcgccttaaaacaatttaaaagaggaagaagaggaccgcgcgtctgtaaggcgctccactttatcaccttgactc

SEQ ID NO: 333734 - DNA, 705 bp, Homo sapiens
  chr9:100613895-100614600
  hyper
aaaccaggagttttgtttagcgagtgtaaagcccctctcccttcgttcgaccaaccctctgccgcagaaggttgtcaagcaaacgctttgagcgtttccacacaccgggtcgacggagcaaggatctgggctttgcctcgctcttccgaaggcagctgcccaacgcttggccgggcttagcctgccctcagctcaccgccacgaagaacgcgactaaaaccctggaaggcatgccacccgttactggccagaactctcgtcttgggatctcccacactcacctggcaccaccatccgcgcggctctgcacccacagccccggcccgccccccccccccaccccggaaagctgcgtccgggctggagccactggaacccgcgccaaggcccggaatcctatacgtagcaggggcctcggagatcagcacacgccctccagctgctatttaacagagtagaacactgaggccctgcgaggggacaaggacaggccctggatctcccagtgaatggccagggaacgaacccgggccagaggggccgcgccgcgaggatctcaggttaggaccaagttccggctcagggacagcaggaaaggaactcagaaattggacacccatgaagcaaacgtgtcccgactgcccgccccttcccccggagacgcgcccacccggccaccgctctcttcccactcccccattaccc

SEQ ID NO: 333735 - DNA, 3097 bp, Homo sapiens
  chr9:100614615-100617712
  hyper
cgctgcgggaaggggctgcttggctgcctctgggggtcttcagagctaccctggtcccgggggattggaggaggaggttacctatcctgcgtcgtctttaatccgtgcaccactatccatcaaatagagacagatcctgggcctctcaaagacggatgattgggggtggtgattggcctatccctaaatatctaccacgcaaggactcttgagagatccagaccccggtacagtcgagggacctggggcccaaaaagggaaagcggctacctctaccacacagttgggaagcgcagtcctaaaggagacgcaggttggagactccgctaagcggagaagccgcagtggggccatggcaagtcaccttccctttcgggcctaggaatactcattcgaaagatggggggactggagtgccgagtggctgtggcagccacgattggggtttggaaaccatcctgaaaggcccggggagccagtctcctggaacttctccctccccattcccacaaaaaccaagcgccctctcggccaattctcaccctctcaggacaaaaaagtgagatgagcccgtcctttcacctgcgagtccaagcccttggcagaggcctgaaaagtccgaaaactccgagttcgggcgctgaggtctcccgagccggttcctgaactctccgggcctcagtcgatcggggtgcggagggggccgacccgggggatctccaagcgccctccccgccctgacgctgtggggctcctaccgcgccgccacagctgctcctacctggggaggtgcgcccgggccccggggggcgggcagtcggggggcgggcagggaaccggtgccgccccacgcttcgtggcccctttaaggaggggaagccggcggagggaggagccggtccggtgtgtgcaggggagcgcctcgccagcggtccgcagggctggagacccacgccgtggagaggaccagcctcaggtcgccccgcctgggcccgcgccccgacctcgctgcccccgcctcgcctctctgcccgtggcgcttacggccaccttggcctcgggggcagggcatgggcggcccccgccagatcgcccagcgccagtactaactgccctcgctctggccttcgagcccgaagcctcttctgcgcgcacaacctaggcagtaatcctaaactagcgggcaccacagaccagctgcagccaccccaacccagggatcacttccggacccctcgaccgcccggcaccagcgcgcaagggacccttcagccggagaccagagtccagtcccggtcacgaggccaccgccgctgcccgcctcgagaagcaccacgcgggctgagccgtcggctagcgggtcactcccgagcctctgtctgcaccgcgccagccccagaccacggacgctgagcctccagcgcgtgccagcctgggccgctgggctctcggggccagcccgcgacgatcccctgagctctccgcagaagggccgagcgtccgttccggggacgccaggcccgcccccgccccccgacagccgcggggatccagagcccgggggtgcgggacgcccgcgccatgactgccgagagcgggccgccgccgccgcagccggaggtgctggctaccgtgaaggaagagcgcggcgagacggcagcaggggccggggtcccaggggaggccacgggccgcggggcgggcgggcggcgccgcaagcgccccctgcagcgcgggaagccgccctacagctacatcgcgctcatcgccatggccatcgcgcacgcgcccgagcgccgcctcacgctgggcggcatctacaagttcatcaccgagcgcttccccttctaccgcgacaaccccaaaaagtggcagaacagcatccgccacaacctcacactcaacgactgcttcctcaagatcccgcgcgaggccggccgcccgggtaagggcaactactgggcgcttgaccccaacgcggaggacatgttcgagagcggcagcttcctgcgccgccgcaagcgcttcaagcgctcggacctctccacctacccggcttacatgcacgacgcggcggctgccgcagccgccgccgccgccgccgccgccgccgccgccatcttcccaggcgcggtgcccgccgcgcgccccccctacccgggcgccgtctatgcaggctacgcgccgccgtcgctggccgcgccgcctccagtctactaccccgcggcgtcgcccggcccttgccgcgtcttcggcctggttcctgagcggccgctcagcccagagctggggcccgcaccgtcggggcccggcggctcttgcgcctttgcctccgccggcgcccccgctaccaccaccggctaccagcccgcaggctgcaccggggcccggccggccaacccctccgcctatgcggctgcctacgcgggccccgacggcgcgtacccgcagggcgccggcagtgcgatctttgccgctgctggccgcctggcgggacccgcttcgcccccagcgggcggcagcagtggcggcgtggagaccacggtggacttctacgggcgcacgtcgcccggccagttcggagcgctgggagcctgctacaaccctggcgggcagctcggaggggccagtgcaggcgcctaccatgctcgccatgctgccgcttatcccggtgggatagatcggttcgtgtccgccatgtgagccagcgtagggacgaaaactcatagacacatcggctgttcacacgttccccgcaatctgagaacgaacaggaatggagagaggactcaactgggacccacgtggaaaagaccgagcaggccacagaggctcggtctccccgcgcacagcgtaggcacccggtgtactctgtaaacgggaggaggtggggcgaggcagccagagcccttggactggcacagggaccctcgatggagcgaagccctcaaacgggatgctttctggtattctatcggggagggtccttggcggtaaccagagggcagcgtagtgtcaacaccagagaccaggatccaaattgtggggaatcagtttcagccttccatgtgctgccggaactcgggcctttttacgc

SEQ ID NO: 333736 - DNA, 905 bp, Homo sapiens; identical to SEQ ID NO: 234294
  chr9:100619833-100620738
  hyper

SEQ ID NO: 333737 - DNA, 1075 bp, Homo sapiens
  chr9:101469271-101470346
  hyper
ctggggcagaggacgcctctccgcctgcagcagcctgcgcgtaccgctgccaactgccaccggttccttcaccttttatttacagcgcagagcaagctggttcaccggtgaagcgggggaggcagggaataagatacaatctagattctgctctttctctggggacataaagagggtccgaccaaggaggaggggaagcccagattgcaccaccagagcagtagcgcgaccctcctcccaaaagggttctgcacctggactccagcagaagcgcccggagagtcccaggaagccaggatcaagcccagcgcctcggccccgttccgcgcgatggaagaggcgccaaccgagcgtactgcacaggaaatcactgcccccttcaggccgcgtctcagacgctgcggtcggagcacaggggctcgctcggtccggaaaaactcgcaaacccgaccttgcgcggccagcgatcgctcctccagacccgctccgcgcgctccagccccggcctggcggtgaaggtccgctctggggcttcaggcagaacccaaaccgagggcgtggggaggggtcttgggatggaaagcccttggctctctggctccgctccggactgctctccaagtctgtgctccggctgctaggtcggatgcttcaagcctgagccgtgagaaactgcctgcagccgcccggccaacagcagcggcgcggccggacaccactgcacgtccgggacgagaactgccagggcactttctgagcaactaacccgaggcaggggtctcctgaaatcgctctggccacaggcagcgccgggcacgtccaggcagaagcgctgcagagccggtggccccacacttgcccgcgcggagcgggctcagagctgctggcgcgcaccaggcgcccagccacgctgcacgctcaagccccttgggttccggagccttccggacctcaaagcgcggctcggcttccctgggggcctgtgagcaggcccgcggcccctccggccctgggtggcccagtttgcagtcaatgcgcctgttcctcccactcggtacctcgcagccccatgagc

SEQ ID NO: 333738 - DNA, 939 bp, Homo sapiens
  chr9:101470649-101471588
  hyper
accccaatgccccccgaagccccgacggcaggggcagccggacactcacctccgtgtcatagagccgcaggtcgaggaagtaggggcgcaggagtgactcgttgcggatctgctcgatggccagttccacggcggggagcacaccgcgcccgatgctgcccttggccacctccttggtgagcggcatgaggcccatgatggagagcggcgggctgctgggcggcggccggggggcgccccgcgcccagccccaggccccgggcgccagaggcagcagcagcggcagcagcagtagcagtagcaggcgcgcgggcggcggtggcggcggcggcggcggcccgggctgcccggagctccgcggggaagccatgccgcgccgcgggctgcgggcgccggctcactcggcccgcatggcctggcccggcccgccgccccgcgccaaggtcttcccgcggcgcccgcgcaatggcgccggcccgggccccggctccgtctcgggctagggttccggctcggctcagaacggccgcggcggcggcggcggcagcggcggcgcccgtgacggatcaatcacgccgggaaggggtgggagcgagcggagtgcgggaggcggggagcaagcgagcaaacgcggagaggggggccggcgtctccgcgcgcgcctctctccagcgcggccgccccgcaccgggccgcctccgcccgcccccgtgcgcgctctgaaccgctctcccgccgggagctgctaggcggcagcccctggagctcggccgggggagggcggacggcaggaaacgcgggaggcgaaggcgaggctgctcaggggcggctcgggccgcctccagggacggggacgagccgtgcgcgccgggggagggggaggcgctggcgctgcggcggccgcggggagggccaccttcccagcacacgcacacacgc

SEQ ID NO: 333739 - DNA, 52 bp, Homo sapiens; identical to SEQ ID NO: 201813
  chr9:101558601-101558653
  hyper

SEQ ID NO: 333740 - DNA, 703 bp, Homo sapiens
  chr9:101569830-101570533
  hyper
cgcttgggctggcgcggggctggacggaaagggggcggcgcgcaggtggggcgggccgggggcggggcggcacggcggttccgggatccgggtcctggcctccaccgccgccttggggcgcgcagatcgctggctgcagttggcgggcgcatgtgggggcgcacggcgcggcggcgctgcccgcgggaactgcggcgcggccgggaggcgctgttggtgctcctggcgctactggcgttggccgggctgggctcggtgctgcgggcgcagcgtggggccggggccggggctgccgagccgggacccccgcgcaccccgcgccccgggcggcgcgagccggtcatgccgcggccgccggtgccggcgaacgcgctgggcgcgcggggcgaggcggtgcggctgcagctgcagggcgaggagctgcggctgcaggaggagagcgtgcggctgcaccagattaacatctacctcagcgaccgcatctcactgcaccgccgcctgcccgagcgctggaacccgctgtgagtgcacagctctggggaggaagcccgccctcagagccccgggcctcagtttctccatcagagcagtggcagggcggggagctggggtctccaggatggcgcgtcttattgagtctttctccgaagacgatagtgtaagagctcacatgggggcggggaggcaagaaagtaaaaaagac

SEQ ID NO: 333741 - DNA, 714 bp, Homo sapiens
  chr9:101705947-101706661
  hyper
gcccatcccgcttgccccaacgaacgcgggcgcggggctttcctcgcaggttacataaggcagccgcgggtggaggcagcagaggcgagcgcacgtccgtcgagggggaaaggggcgtggggaggcggccggggcggccggtatcccccgggcgtgagtgcgcagcgcgcgggggagcgcagggcgcggcggagtcgggtttcagagcgcgggtgactcggggcgcgggccgggagccgggattctgcccgccgccgccgctgccgagcgccgcctttgttccctgcaggaagggcgagcgcggcggccagcgctcagcgacccttcgtcctccgctaagctccaacgctctgctcgactagccgcgcgccttccggggctccgcagacccgcgagatggcaccaaggtaagacccgcttctctgcttcctcgcgtcccgggcccctccaatactcttgcccgcctcaccttttctccctcgggcacatcttgcaggaggaacaacgggcagtgctggtgtctgctgatgctgctctcggtctccacgcccctccctgctgtcacccagacccgcggtgcgacaggtaagcaacccggtcggagggtggcaccggctgcctccgcgcccgtgggggaagtcggttttggcggcggacgcggctgcgatgcgtgcctcattcctggacataaaagggagtcttgccactcagtgc

SEQ ID NO: 333742 - DNA, 1009 bp, Homo sapiens
  chr9:102586203-102587212
  hyper
cgcagaggagccccggtcacaatggtgcgtttcacggtttcctccacacacttcaccaccgggaggggaacacgggggtgttcctttcgtctgcccacgagaaagaaaggggctttgacagaggtagttatttcttcctaatttacaaccccaaggctctgtgctcccggccccggcggccgcaagcaggagcggcggaacgtgtttccaggcactgaggctttgcctaggtaaccggccgcttgtggggtggagagagcggcggggcgctgggctgggctggaggaaaggctgtgtgggtccctcccgcgaacgctgggcgctcgaggggaactccttcgttggggagaggcggtccccgcccacccgagttctgaggcctcctctcagagaacgactccgcttgaaaggccctcagggaatgcgggacgggaatgcgggcacccactgaaggggcgggtgggggattgctggagacccccattgaagatgcggggagacgggaagcacgtgctacagccgtgggaagatccgcttctacccgcgctacatcgagcgcaagctttccgtccgagcagctccagctggggctgggggtggcaagggaatcccccatttcctggtcgtcgagggtttcctggacctgggagccccgagtccctttctctcttcctgcaggcaagccccgggctcaggggcgccaggagatgaccctcgtggccccgcgcacctcggaggtttttggtttggtttgatttggggtttttcggtccctgttcccactcttcgagctgcgcccaccccgggcaaagggggcgctataggccggagtttgggcacccagttccttccctgaggcctgctgagctgcgctttcagctacaaagtttcgctgaggctgtgggctgagacgctggtcccggagctgcgctcggcgccctcaggaatgtgcccccgctaggccgctgggtggccaggagcctccaagccgcccaccctcgaagacacc

SEQ ID NO: 333743 - DNA, 801 bp, Homo sapiens
  chr9:103790598-103791399
  hyper
gacctctggggagacgcatctcggttgcccgcagggtagaaagcaagagaatggcccacaggaacgcccgcgccagcgctaaaaccacaccgggagaggacagccccacgttaccgaggactcgaggcagaagcggtctccaaggatgggtggggatcccaccactggcttccagctctgcatgcgccgcggagtccccgcgcagggcgcacctttgcggcggggtttccccgctgccttctgggaaccccgcggagcgactgccgctggacgcaatctggctggcttgcctctaccccgagctcactctctctgctctgtctgggctctggagccagagctgagtctctcttgagcatgcgcagcccggcaccctccccgcctctcccctcctccgccccctccgcgccagccttttgctctttcctttcattaaacaaacaggagatcctgaaacctggaccctgtgcaagctgcagcgccaggaggaggcagcggaggaagcagagcgcgggatgggcgcccagcggcatctgtgatcccgcgcacctccgccccacgggcgcgcgcacaaacacggacacacacatacacacactcgcgcacacactcgcacaaacacacactcgtacacgcccgcgccgctcgctcgccggcttgctctcccacgcaagcggaatgcagcagcgcctggagagcgtgtctcggaccgccgcctgaatgtacctcgctcccgggagccggacggcccagtagggcgcactggaggacgctccgctgcgggaggtgagtgcggcgccc

SEQ ID NO: 333744 - DNA, 1225 bp, Homo sapiens
  chr9:104248323-104249548
  hyper
gagagagcctgggccgagcagaggatgcgggtcacaacgaccctgcaggagctcacgccccaagacaccgcgagcgcagtgcgacactagcgacgccggagccaagggccagaaagagggcgagacacacccaggtggatctaattaaccctccctcttggaaaaagaatgggggacgatgtccagggccctggatctagtgtctgtcgctgaccttgggcagtccctgccacgcttgagcctcagtttcccacccgtaggccgagctgaccgtctccatcgctgcgctccttcccttctgctggtttttcctggtcctgggagggacgccttcctctgcccagtcgccctcccccagcccttggctgcgaggtcgcccgcagaaacccaacactgctgccgcgctctcggcgcgcccggcgaacctaaggtgtggacgcgccgcgagggtcccctgcttgcgggcggccattaggcgccaggccccttggcgcttcggccctgctaggctcggcgagggtcttacccagactggcacgcgccccgctcgcgtccttctattgacctgtcagcgcagctggcgcaggcaagggccagggaggcgcccccgagacactcaaccatccccgcactgatgcgggcccctgctgccctggggacccctgcggggtcctcgcaatcctccggcaggaagcggtcggagctgcgggcagggccgctaggcaacccgcctgcccgaggcgcactgcccggggcacaggccctctgcgatgactctccccaacccccagctgccctgcttgtgccagctgtggccacccctaatccttgtcccctcgctctagtgtccagggctccgaccaccgcgccagaagggctgggcagatcgtgcgcaacagaaacctacccggttggggcgaccagctcggtcccctgcgcgcgccgagggccgcctctggtattgcccaggctggctagctcatcccggtggaggcgccatctccggggcccggaaggagcgggcgcagcgcggtttgggtgtgcgccggagcctcacctcctcccgcctcgcagctcaggcgcagggctccccttgctcaggcgggccatgtgacccgcgagctgcggagagaccgcggcccccaaagcggcttggggaaaaaggacggcaaaaggcgccaactgatgggcagccagggaaaagcaggagtcgcccccaagtcac

SEQ ID NO: 333745 - DNA, 857 bp, Homo sapiens
  chr9:104500321-104501178
  hyper
cgctgcctgaggtctccgcctccaggtcccgcgcgcagcttcactccactcggtgaagcggtcccaggagctggagcggtctctaggccatgcaagttggagcgtagcgcgcctccggcagtctcagatcccgctcccaggtccctccgcctggcatcctctgcccgcccggtcactgcgctgagcaggcaggcgggcgggccggcgcctgtcacccgcagctggagcgcccgttccctgcccgccccatctgcagggcgcctcgggcactgcgtccggccccgcgaggcggccgggatgagaagcagccggagttcctcgggggcagcagtgacagaggagcgacgcgctctcgcctggattcttttccttttctgcccaggcgagacccacttatttcctggggtcgcgttggagagggctttcacgcccggggtgcggaaaagaagccaaatccaccttcctccactgttggccaccctcctgcaggctcccccagcgccgacttcattttctctcttctctcgctacttcctctctgcctttctttcgttatttttccaccgagtcgccaccgccgcttgcttcctcggaggagcaacgcgactggccagcaaagggtggctctgctccgagcgccaaagttctccccgcctcagccggcgcctccctgttgctgagccctggcgcctgcctgtcgcttggctgcgctaaacgcccactgttggtgagattcccgagtggcacatcccgcgcccctggaaagtcctctcccctcaaaggctgggcgtcatagtttgcaaaattccctaaaacctaagaaggaaaataggactatgagccggtgagaattctga

SEQ ID NO: 333746 - DNA, 715 bp, Homo sapiens
  chr9:108418403-108419118
  hyper
cggaagccagggcgcggagagtggggaggaaacggtgggagtccccgtcgggaaggggcccccgggccccgcgagacaaagggcggtgtcctataaaggcggcggcggcggcggcgcggtgtccaggcgagggcgcacacggccggcgagggcgacggctacggcgacgacgcgggctctttgcgaggaggtgcgtggactccggggggacatgggcgcaaccagggccgggctcgtgggcctgcgggtctctcgctgagccatactcacccgggagagcaggaatgcggcggagacttggtagcggccaccgagccaattcggtgggaagaccgggggactttccgcggggcaggggcggtggctcagctccgggggtgctaggccgactctctagcgtgttggcgggcccgcgtcgcttttatgcgtgatgccggggacccccttgtaccgctctcggcggcgcatctcccagagcccttcaaggagctcgcgcgtccccgagcgactcccggacacctggcagattcgaaacttcagccactagatgctttcctggactccctaaatacttaatcattaggcaaggcaatggtttgcaagggggagcaaaagttataaaaagaaaaagggaaaggcctggaagcgaagcgggcaagggaagaagcttgggcagagtattcgagatgcgtccaggctgcacggtgcaggggtc

SEQ ID NO: 333747 - DNA, 875 bp, Homo sapiens
  chr9:109622327-109623202
  hyper
cgtggaggcttggagaggaggtttggtttccaaggattggagcgctgtgaagggcggggccattccaagtccatctcccctttttgtcctcttctcccgggacgggagggtggagccaagtccccccgcggccggttcgggagctttctctatctcggtcgctcgaggtgagtgtgaaagggcggcagcccgtttaattgcagcgcaggttaatttcttgagttcaccgcagtcggtccgccagccgcttccccggtctttgccaagtgggtttacgaggtctgaggcgtgttggggcgcgctcacgttctcgcaaaaggctcctccccagggctcaattccccgactgcgggaagccctttggtgccccaggagccttggaaacccaaggtttcctctgacctcgtcgctcctttctccctccccaccgcctggttccctacgtccctgcccccagggaaggacggcccccatcttaggacttacgacccaagccaacccagaaggtaccttcacgtcgatgaagattttatcgcagcctccaaaacccagcagtaataggagctttcaacctgaaatacgattgttattttcccggtgcagagcttgacagaaaaagtcagctttttattaaagacaaagaggtaaattatcagccgggacagtggagggacggcggagacctggcgcgcttcctccggttgccacgaggaatttatggggtggcggcggccagcgctcagacaccccccgggtcccggtggggaggagctcggggcaggaggacttccctaggtccctccgggcactcggaagggggagtcctcccaaagccgcacaaagccgggatcatttcaatccggaacagcctcagc

SEQ ID NO: 333748 - DNA, 299 bp, Homo sapiens
  chr9:110187439-110187738
  hyper
cggcggaggcttcttccctccccccagagtctggttcagaggaagccaacgcctgtgcacgtgggaaagcagcgtggctggccctgggcctggagccacctcccgggcccactctgccaggccccattctagatgccagcaggccggccccgccccttggacacggttttggttttcgggtgcaaacagtctacattcctctgaagaggcccgctccggcctcatcagagctggcgaaatcaacgagagaaacaggggacgtcggcccgcagttcccgcgagcgccacgaggggcgcac

SEQ ID NO: 333749 - DNA, 752 bp, Homo sapiens
  chr9:110227818-110228570
  hyper
cgtctattttcacgttagccaaagggaagcctagaagtccacagtccccgggagctggaagccaggcagtgacagcgccagcgtattctccttgacttgattgtaaatttcacaactttggtagcttcaacagggaggaagaggaggggcgccggctccctccagcaaaggcggcgcggagcgggtagccaggtccggagccgtcctgtgccgggccgtccggtggggggcactgcagaccgcgcgggcgctgcgcccgcctctagctccgggcgcagaggggtggccacgctctcctgagtccctcgcgcccctagccgcgcctgggagagcggactggcctcccagagaggatgcgggggaagccgcacaggggcccactgggactgggtaagggcgcgggatgggatcggctctggatatgggtgccccccgagccgcgccccaccccgcgagcgctcccatttgcacctccacttgagcacggagcttcaagaacgagctattctggggtgcgggttccgacactaggccccacacggatctggggactggtttggctacgacctggcggaaggggggaaacctggcctgagaacggaaactgcgggacgatccggcggcgcacttaaatctggctccgctgcttcctcgccccgcccccgctgtcaccttcctctgcttctgcgcagcgattccacaccccactccaccccatcccacccagaccgctcacccgattctgactttga

SEQ ID NO: 333750 - DNA, 950 bp, Homo sapiens
  chr9:110249882-110250832
  hyper
cgccaccaccaccgggtggctgccgtcagggctgcctttgctgacgctgatgaccgacgggctgccgtactcgctgccaggggcgctcagcgacgccttcagcacgaacttgcccatcagcccgccacctggcggctgcggctgctgcggcggaatgtacaccgggtccaattctggccgcaggagctcggccacgaagccgcccgaggggctcacgtcgttgatgtccgccaggttgaagggagccgtcggagggggagcggactccctgccatagaggaggcctccgcccgtgccgcccggcgccacgcccgggtcgttcccggcccggatcggataggtgaagctgcaggtggagggcgcgctggcagggccgctgctcgacggcgacgacgaagaggaggctgacgctgacgaggacacggtggcggccactgactccggaggatgggtcagcgaattggagagaataaagtccaggtccaggagatcgttgaactcctcggtctctctccgaggtaggggcgccaggttgctaccgccgcaagccgcaccggctccgccgctctccaggtctgtggccacggtcgccgccgccaggtcataggggcggccgggaagcactgggggaagtcgcttcatgtgggagagctcctcccgccagcgctgcggggacagggcgggagagacctgtcagtggtggtcccctgttgccacccgacatactgacgtgctggcgggccacgcgcgactgcaccgcccagacatggggactggtcaggcaggaagcacccgggaacccagggcgccagcgctgcaatctcggcccactcccgggtcgaagaagaggtgatgcgtctgtattgcgggtgttatgtcctgtctgcccaattgcgtgtgagcgagcgccgcggctggtccctccccctccaggtcccgtggacgtcccc

SEQ ID NO: 333751 - DNA, 949 bp, Homo sapiens
  chr9:110251832-110252781
  hyper
cggagctgcgaactggtcggcggcgcaaggcgcggactccggtgagttgtgtggagcgcgcgcggccatgggcgcgggccacgggcgggtgggagggtggggggccagaggggcgggggagggtcactcggcggctcccggtgccgccgccgcccgccaccgcctctgctccccgcgcgcccgcagacacgttcgttctctctggtcgggaaactgccggccgccggcgcgcgttccttacttataacttccttcgctacagccttttcctccgccttctcccatgccccgcccctccctttcttctctccgccccccccgaggctcccttccatcgttgctatggcagctaaatcaacaaactcggcgcacgtgggggcgggggaggggaaggaggggcgcgggcggggctgggccgggccgtgacgccagccaggcagctggcgggctggagccgagctgacgccggcggcagtggtgtcggcggcggcggcggcgtccgccccagcgcggggcgcgaggaaccgggcgcaggttcggtcgctgcgcgaccagggccgtactcaccgccattgtcggctccctgggttcgaagcccgcgaagactggtggggtcagcgggcggcacggtcacgcgtccgcacccctgctagcatacgcgcttgccgcgctgtctgcgcgctggagaagagcgcgattatccgcgtgactcatccagccctccatctccccctccctctctgcgctcgcaggagtccgctctcgtcgctcagcgccagtgccggtggcggtgccggcgctcggcctgacctcgcacggttcctcgcgggcccttctgctgaggggtggggggcgctaggggtgtggagaggaggcagtgcccagcactgtgcagcgtgaactgggagcctcaagagaaggccagaggagtgttccgccgggaacaggc

SEQ ID NO: 333752 - DNA, 500 bp, Homo sapiens
  chr9:110399862-110400362
  hyper
cgaggtcaaggtcggggtcagggtcggggtccggtcgtacgccctagcactgcctgcggtggggcgcgcacagtcgagcgcggggcctccccgcaggctgcgctgcctgccgggcggcctcgggaactgaccaggccgcgtgtgagcgccgggattcctgatcctgccttaaatatgccggttatttttatctccctacgtcaggcagcgaaggccatcccaccggtggcccaggcggctgctacacaatgtttccctttagtcgggaggggaaatggagggaggccagacttcctgatcacatggtgctgaagtcaatgaaaaaaaattaagggggacccctccctttttcttcaatgcctgatccagattcccccctccccgctcccccgacccaccccctctgggctccgcgcgtcggagggaagcgcagcctcccaggcggagggccagcgaggcaggagagcgcgcgcaaacataaacacgagactgttgcagta

SEQ ID NO: 333753 - DNA, 1359 bp, Homo sapiens
  chr9:112081274-112082633
  hyper
cgggaaggcctatatacttccttggaagtccgggtatgttatttcttcccttgacatcctcgagatgatctgtaacattcatctaaagctcaattaccgctgtgtcctcagtcacacccagaaattcccgaaggcaccgtctgccgcagcgccgggtgcacagtgggcgcccgattaatgtgtggtttgatttgatctgatctggccccttcagccaggaagactcactggtaactggacgccctgcagcggaccgcagcgccggcccagctctcagctggcgcggggcgggggtgcaaccacctgtgggcgggtgcccgggacgcaggcccaggcgccgccgccctgaggtgccccgccgaccccacgcacggtgcccaagggagaaagtcaggcgcgcctggccccccgggcaccccggggtcgactcccagcgccccagcaaagggctctgccggtgcaaggcaggcaggtctgagacagccgactctagagttagctcccaagtcaccctacccgctgcgaggaggctgcggggcagatggggctcagggaatgggaatggggtgtatccagaagggatcagcagagagcagaaatggtctaacccccgcctcccaaacttggggcgcctgccgagcagcaagcgaggggatctcctctctgctgtctcatcaaggcctgatggcgagtttgaggggggacaagctggacaccccaggacggcctcacattgatttgagattttctacccaataacccagtatcaggaagacccctgctggaagctagggacggaaggggagcgccggccacccacaccagggggggcggggtctcgggacttggggaccgtgtgtactggggagggggcgaggccccaaggactaggtgggcgccagagaaatcgcaaccccgcggcgcaatgtgccaaggagggggcacgggccaaaggtggggccccggaagagaccgggacggggtggcccaagaagaaaaagggttgaggagtgctcggagaagaggatgggggaggggatccccagggaggtgcaagggaagcgcccccgatgcaagcactgggggagggggagctgcctccaggggcgcgaggtgccagtgccccagactggccccgtcactcaccggcaggtccacgctcacttcggtcccgtcgagcaggaagacgcggcagtagagggtggccttggcggcgccggcggcggagatgtgcacggccgcgccgccggtgagcaggggcccgccgcccgccgggaacacgctgcccccgggcgcggcgggcagcgccgaggaggaggcggcggcggccgggcccccccgtggccccccatcgcgctc

SEQ ID NO: 333754 - DNA, 843 bp, Homo sapiens
  chr9:112259840-112260683
  hyper
cgcaacttctcagtaagtttaggtagctgaaaatgggaatttcgggggggctgggcactctcacatacactcccccatctgcagctgtctcaccgcaggtacctgataaatcattccatatcgtccgcggaacggggaggatttattggctctggagtttcgtgccaggcccaggaaatgccatctttgaaagccgagaggcggattcgccctgggagccgagcgctggcagccgctctcggctagctccccgcgggctgtgtgccccctcggagccccgagccggggtcgcggcggcacggggtcctccggaggtgccggacgcacgggctccgcgggttgcgcccgcccctgcccggctggagcgcacgcccacgctccggcgccgcgtcccggccgccagcccgccccggccgagccccacccggcgccccgcccgcgccctcccgccccggccccgccaggtgagcgcagcggggcgccccctccccgccccgacgtggtgcggggatcccggtgcagccgcacccgccagcccgcccgcgcgtccgccgcgcgccccagggacgggtgggggcggggtggcgccgagcgcgaccccggcccccggcagccccgcaccctgcccccggcccgctggggtcgcacgggcccgtacctgcagcatccgggggcgcggagcgcccaggtaggtcgcgcgtgcgggcggcgcggaagctcgctcgcggcgcgacctggccgccgtctgagcatgcccagtgccgcccgcgggcggttcccgccggccgggctggccgcgacgggcccgcgcgccgggcggggggcgggcgtccgggctggcct

SEQ ID NO: 333755 - DNA, 911 bp, Homo sapiens
  chr9:112402440-112403351
  hyper
cgggaacacgcagaatttggagtgaaacggaaaggggcatggggtcgccaaggtggtgaaacgccgcattaaggcgcttcaagatagctggagttttgcttgggaaactcagagggatctcgcccggccggcacaatggcgtttctgaacccatgcccagcccactgggggcagtccttgctgcttgcagaggccagacgcttcttgcaacttctaagcggcgagagctgccaccttgccaatgactcaaccgtttgcctatgccctctgggctgtgccaccagccgcagccgccctgctcccccacccacccttctccccaggctccgcgccgcgccgccagtcccaggggagccgccggcgcacctggcgcctagggcgcacggcactgcgcgctggtgggcacctcacccgacgccagctgccagcgcgctccctccccgaaaccctgaagtggggtgtcttgtctagcgcccagcgaacaacattatccaattgcttcccgttttattcgcaggctgggagctgagagagcctgagcattcactttcaaccctccaggggaggagggggtgcgggtggggaggggagacggctcccagctccacctcgcgcgcggcgcggccagtgcactcggctccgggagaggcgagcagcgccggtgagccccgcagcagcgcacccggccgcggagccccgcgatggagtgagtatccccgagccgcgccgccagctgctctcctctcggcatgttgccatggtgaccgcggcggcaggcagatcccgctcgggtccgcgtccaggatgggtgtttaatttcagccccgtgtgtacgcctggtgtttctatagcagccgccgcggcggcaggaggcaaggggtgggagccccgggtggcgtggtttttgcggc

SEQ ID NO: 333756 - DNA, 178 bp, Homo sapiens
  chr9:113017465-113017643
  hyper
cgaggcgggcgaggacccgccctcctctgcttcccgcaggtagggaggggtaatcgcagggtaggcgctggcgaggggtcttctaccgttcgagcagtatcaatttcctccactcacttttctgacgctgcatttaacaaatatttctggagtggctacattggactagacactgcgc

SEQ ID NO: 333757 - DNA, 1300 bp, Homo sapiens
  chr9:113800180-113801480
  hyper
cggtccgccgctgggtgcgggaggccaggggagcctcgcctcctgcaggccggctcgcaagaacgcacggccacccacccgcgccgcggcccacagcgcgcacccacactctcactggcactcgcacgcgcgcccccaaccacaaagcccgtccgcggcgggacagtgtgagcccagcgcgccgtgtggcgggccgagcagtcgccgcggcctctggcttcgcgcccagggggcgccgtccccacacgccgcgccggcccccttacctgcgctcgctgccgccgcgcgtccctctcctgccgcccccgggctggcttcaggccgcgcgcccagtcccggcggcccccgccccaccgccagccgagcccggccctccgcccgcccctcggcagtcgcccagagcggggccgccccctgcgcccaccccgccggggtcccgtgctcggccgggcggcggggagggctccgcggctccgggccctggccgccccagatccggcccgcgctccgcagcggggctggagacggagtcgccactcagggagcgtcagccgccagtcggcccctactgcccggctttggcgcgctggcaggaggagggggcgcagagggagggccagaggagcagcgccgacgccagcctcctctcttcctccgccttccttcttttctgcttgttccacgtagcacaagtcagcaacacccgaacccccagagtccgccctccccgctcccaagctggaccccttacctggtgtggcgcccccagcgcccctgacctctgcgccccctcctccattcattggctcgacagcccacggtggtggcagggccggggctggggggtggccttagcctcccattcattatctcagcagcctcccccgccccgcccccgagtcgacacacccgcagcgggagacccgtggccgccagctcgggtcccacccccgcccctcctgcgcttaccccagcgccggacagctggcaggactccggtggacgccccggcacggggcattttcacgttgtcgctctcctcttcccactcgaaaagctctggaaaacatcgcggggcccgcaaaaccccggaaatgtggcctctctttcgtggctcactttctaaactttccagaaggcgcaaagtttctcccagcgccgccctgcactggaggctgcgaagaacgcagaagcggctttgctgctaggaaggtgcatacgtttctagttctgatttttcacttcactggatctgtaaacgaaagcaagtgtgtctgctcccctagttctccatatccac

SEQ ID NO: 333758 - DNA, 395 bp, Homo sapiens
  chr9:116111663-116112058
  hyper
cgcatacaatcgcgatttcattcaacaaggaatttaaagagacctgctgccccgggcgggatgggagcgcgggttgggtgggaggaggcgcagctgcggggcgcgctggcgcaccgggagggccgggggcggggtcagccaggccccgcccgccgccacctgcgacaggtggagcgcacggggcgggcgcacggccatgtccgccgagggcgcggagccggggccggggtccgggtccgggcccgggccggggccactctgccccgaacacggccaggctctgagctggttctgcggctccgagcgacggcccgtgtgcgccgcctgcgcggggttgggcggtcgctgccgggggcaccgcatccgccgggcggaggagcgcgccgaggagctgc

SEQ ID NO: 333759 - DNA, 217 bp, Homo sapiens
  chr9:116450208-116450425
  hyper
cgcggtgcctcgcgctccggggtacggagggtcggaaactgcggagtcagcgcttctgtcgagctcccagcgcagcccctgaggaccagctgggggtgggggtcaggggagggagcgggcgatctcaccctgcagcccgcacactcaggcctacactccccggtttggagcccagataaccccttcccgtcctcccctcacccgcgggaaccctgga

SEQ ID NO: 333760 - DNA, 429 bp, Homo sapiens
  chr9:116918463-116918892
  hyper
gggcgagagttggcgaacgctgcccgccctgccgcgcctggcccggctgcccgatcccgttggggcgggggcagagccagcccgggggtcgggggtgggggtgggtggtggcgcctggagcggccggcggggtgcggaggggggctttttggatgcttgggggaggaggggggtctccgtttggggccgtctcggtgtgttccggtgtctcagtgtctgcaggtcccaagcctgtacgtctccgtttctatctgttcttgtgaaattgtccgcaagtttctaggtcaccaggtctcgggttctgctcctgtctccgtgtctgtgtggctctgcacgtccccgcgtttctggaaatctccgcgtgtttgtgttagtcggcctgggtctgtgtgtctgtgtttcctgcttctcggttcctgtccctttcac

SEQ ID NO: 333761 - DNA, 301 bp, Homo sapiens
  chr9:117267162-117267463
  hyper
tggatccccgggagcgcggagacgacggctggagcctgggtttggggagcacgggtacagtggctggatcctagggggtcgcggagaccgctgctagagtcccggaggcgcgaagacggcgggggtcgcgaacctggaatccgggggacgcggagacgtcggcgggttcctgagagacacaagagttggctgctggagcccggaggtggcggagactgctgctggagtccggggggcgcggggtcagcagctacattctggagggcacggagacgacgggtggctggagtttgggggcgcc

SEQ ID NO: 333762 - DNA, 239 bp, Homo sapiens
  chr9:117880317-117880556
  hyper
cggcggttcccacgtgcgcgttcccccgagttccccagcagcgctgcctttgtgcccacggaggcgggggcgtgtatctgcgcgcgggagaggcgggtgacagtaggcaggctgtggccggtgcagccaactttggctggcttatatagcgagctccttcctctgtaatgggacgcctcgcctccagacatcctttcccactttttcagttggcgaattaaaggaacagccctcccagc

SEQ ID NO: 333763 - DNA, 1408 bp, Homo sapiens
  chr9:120175204-120176612
  hyper
cgtgggaagagctactggtttgtgtgtgtctgtgtgtgtgtgcttggtgcgtcgcaccccagaagcgccgccgcggggagtccccgaggaacctgcaggacgctccgctgcctctcctcccggaacgctcggcacgctcaggttacagcctgcgagggtgggtacaggggctcgacccccgaggttcaagctcagagcgggagaaccactggcactcgctcaaatccccagaggtggtagcatgaaaggatggggagtgggtcacaaaaatacttttaacaatatcagggctaccaggagagtggagcgtagtccgctgattattctgtgggtcttttcaggcgagcaaggagttaacctcggaagttcagggatcgtaaaggttctcacctggaaggcccctcacctgcggtgcccgaggcggatcccgccgaggaaaagacccggggaagaagagctccgggtctgggcgagcccctggcgcctcacgggcgctgttgttggccagactccgacaaccaataaggccccgcgcccccaagaggggaggggagagcgagcaagcagcgagcgcgggagagctaaggggaacaacatttttgtaaacgctctccgagataattaagctatcaattacccgggtgggaaatcagctgcgcttcccacagctccactgaagggccgactcctccgggattcgcgcagggaaccagcaggcagcaagctgctggcgaacttttctgattaacttttccgttggagccccccacccacacccatctcctctcctctcctttttcttgcctttaagtaattattattagcccagggagtgagctgcaaggacaaaccggctctctgcctggaggtgggtagaaagggaaggcggtaacgggggtagagggaggctctaaacgtggagacctcggagtcggaatcccagttctcagcaaccactcaagtctctccagccctatttcacagatggccagaactgaggctcagagaagggaagcgacttggccaaggtcactcagcccatgcggaagccacgcttttgcgggttgagcgattccacacggaactactccattcctactctcatgaaaatccatctggaagggcagaacccgcaactccgaggcgagagcgagggggcggtgacggcgggtggccagtgacggtacccggagaagtgggaggctcgacctgaaactggcttaggatctgggatgctccggcccctagccagagcaccttcagtgaatggggtctccggcttccgggatggatcaagcagagctccaggtcgggactgagaggcagaggggcaggttcccactgcgggagggttggcacgcccccaggctcccgccgcgcgctctccaggacctcctcccacatgctc

SEQ ID NO: 333764 - DNA, 874 bp, Homo sapiens
  chr9:120176629-120177503
  hyper
cgacctctgggcccctcctctaccctctgccaaccccactcggggcagccccgggcagggatccccagggcgcccccacccgtccggcatgacgcaggggctcggggttccttgggatctagcgcgtgccggcgcccagccttacccagggtgaagaagggcagctcggtgttgtccaggtcgtcctgcaccgcgatgcgccccggcagctcgttacgcacaaagagcaggaggcgcgactcggcggcggtgccggcagagccaggagagcccggggacgcggcggcggcggcggctccggccccggtcccagccccggccccggcgcgggcgccgctccagccgatgtcgctctcccgcagggcgggcagtgtggacaccgtgacggtcttcagccggcacgggctgtcgggctcccgcgaggcagcggcggtggcgccggccagcagcggcggcggcggcagcaggagcaggaacagcagcagcagcggcagcagtggcggcggccccgggtggaagcagagcctcggccgcccccggagccccgagccggggccggggctgagccgggcgccggcggcggccatggcgggaggggctgcggtgctgcgggcggcggcggcggtggcggcggtggcgaaggaggaagaggaggcagctgcggagacggcggacgccgaagcgaaccaggacgcccgagctaaggagcggagagagccgctcgccagcagcccccagctccgggctccgcctcccgatcggccctggaccgcccccccgcgccgcctcccggggcccagccgcccgtccccgatctccggctccccccgcagaccccgagcgtttcggaggctccgcccggcctcgtgcaagt

SEQ ID NO: 333765 - DNA, 391 bp, Homo sapiens
  chr9:122318422-122318813
  hyper
ggctgtggccaacacgcgtctccaggcccacaggctctgaggcggaaaccacagttccaggtccccaggctccagccgccaatgcggctaccgaccagcagagggcagctgcgggaagccgtccaaaggcggcctccacccccattagtgccaattaagccgcgagatgcaagaggcgagcgcgtggtgaaagaaaacacatctacttctgggttgagctaggctgggtgatctgctgggagggacgttgacctgcttccaaaaagccggctggatggtgccgtggtggctgcctgcaaaggaacaccggcctatgggaaccagaccctggggcttcccgcgagcttctcttcctccagccagcaaaacaggaaaagcctggcccagggac

SEQ ID NO: 333766 - DNA, 168 bp, Homo sapiens
  chr9:124062292-124062460
  hyper
cggggggccccggggctcccggagtaactctctattgtaagttcttgcagatacagcgctaggaaaaggggagtaattcaggtctagaatggaaaaactgttttgttgctttgtaagtatctcttgctgcttccggggctctggctcgcagacgagggtgggagcctc

SEQ ID NO: 333767 - DNA, 1023 bp, Homo sapiens
  chr9:124131788-124132811
  hyper
cgaggaacaaaagccgggaaggagagttctccaaaacgcagaggaaagcggagggggaaaaatggggcagaaagtggagctagaaagagaggtaagaagaaagccagagagacttcttccttctgcaaatcggtctaagtttcgggaggtgggattgggggaggagggggttcaccctggggccaggccagggctgggtggaggaggcggccttcgagagagtgagtcgggaaagaaggggagtgggcaaagggtgagatgtggggtcccggtccccgcctcgctggctgccagttccctctgcgtttcctagtccgcgtgcgtgacacgagatagtgcagccctggcatggggcttggcatctggcggccgcgagataaccagggcccgtgcgatgggaaacgtgccgttggcagcccgccacccctccatcgtgacctcagtctgccaaacagggttcgtgatgctcagtttactagggaggagccgcggctttgagatctcgcccagcccgaagcagcggagactggccaggagcccggctgtcagacctcggagcgcacgctgcgggcgggggctcggtccacgggggagggtcaggggacgcgggactcacccttgaaggagtcggggagccgctgggcttcggagtcccgtgtgtgccgcttctcggccatgctgcccgagacgcagtcgcactcccccgtcctcgttgccaaacccggagccgccgggaatgccctgaggagccagaggcacaagacccagattgccgccccgcccccaatcgaggtcccgccctcgtgagagttggccaatcaacgcccaggatcgaggaggacccacctcccaatccccgccctcctgtccctccacggcgcgactgcttcgcagtcacttcccgctagttctgtgggctgaggggcgtggcctgaggggcgtggcctgaggggcgagagcccccaaggctgtgggtatgaggccggggccctgcaccggaagggagggcggaagccacgggac

SEQ ID NO: 333768 - DNA, 143 bp, Homo sapiens; identical to SEQ ID NO: 234366
  chr9:124461191-124461334
  hyper

SEQ ID NO: 333769 - DNA, 268 bp, Homo sapiens
  chr9:124857529-124857797
  hyper
cgctcgacactacagggtgaaagaaacacagaagttgtcaaggaacgtggcccctcttcctctctcatctctccaggtgtcttgtttctttgctttagtccaggggtttcacttgctgaataaactgccttgaaatgtccaagtcataaacttaagagatccaaacctcctttttagcagcagagggcgctcgcatctgttcccttcatgactttgtttcagagtttctgtaagcatggtcgtctggccacttgcatgggaacaaccc

SEQ ID NO: 333770 - DNA, 716 bp, Homo sapiens
  chr9:124990438-124991154
  hyper
cggattcaggcgcctttcgagggccagtcggagggaaacccggagcaaaaagagagcgagatcggggcgaaacgggaccaaaaagagaaaagagaggcgctcaaggggaggaaaaagcaccctccagcccctcggcgcgccgggtaccggccccgcgtcgggattctcagcgctgcgccggcacaacccccggcgcatcggcgctatcagcgcctattcagacggacaataccggcctcgcctcctcttgattcgcctgtgtctttactaaatcgctttttgagaaattcctccaacatttgcataatgtgttcccgctttccgcgaccccccccccccgctcgcgcgcgcgctcccacactcacaagcacacactcacaggcgcaccctcgtacccctccttcctgcaaccgcccgccaccctgctcggcccggctgggtcccggaccctgcccgaccccggcccgggccgctcacccagtcgttcgccggctcacctggtcggtggcggggccgccctcggccggcagccggcagccctcgggcaacgccggggcggcgttctcatgcttccagtacatgggccggggaacctcgggctcagcgggcgcgcagcgcggagagctgcgccgagggggaccacagccgcagtgggagcagaggctgctgcaggagcaggaggagagccgaggcgccggccccgccgccccgggccc

SEQ ID NO: 333771 - DNA, 215 bp, Homo sapiens
  chr9:126759147-126759362
  hyper
cgtgtgaagtttaaaagcgcctgtgctgaagaggccgactttgaagcagcttgccggggccccttggcaggctcctgcgagtcagagggccggcctcgcctcagatccgctgcgcctgcctccgcagggctgggaaatgggaattgtttttaagttgaaaaattactcatggagctcactcctttgccactgctcttcttttgttctcagtcgtc

SEQ ID NO: 333772 - DNA, 144 bp, Homo sapiens; identical to SEQ ID NO: 234371
  chr9:126760302-126760446
  hyper

SEQ ID NO: 333773 - DNA, 968 bp, Homo sapiens
  chr9:126771200-126772168
  hyper
cgttgccactttctgggggagggggaggtcgaggggccgccgtttccggcgcctgcgaaggttccgtacctgtcggtgcccgctccccccaccccttgcctttcccttggctgcagcttctcgcaccgcgtaaatgtcactcacgtgtcaggatgtgtgtttacagcctgttcctctgcttgtttagtctcggcggacagggctcagcggttgcgcgacgttccccgccgctgggggagattagcaaagttacccgcctctggaccccggggcctgggcccctagatcccgccccgcggcgggagatgcgtttgagccttttacagacggagcgcgtcccagcctgacgcagagggatgaatagacaagcgcaccgggcgggaatcccgactgcctgtgtatctggggtcggcccagcgttggacgtgggctgctggtccgagaggtggcgacggaatcgcgtgcctatatgtatgggggagtggaaagtcgcagggtgtgtttccacgtttcttgagcagcccgcggcaagagttgctgagtaccccaccccccgcccccagatcctaaggcagcccctcgagctttccaaacgtattgtatccagccctcccgagagtggagttgcaccaaggacaaacactctagcgtcattacaaattttttctgccccttgggcgacctccagatgaaccctggtgactctcagattggattttcattccttactttctttgaaagaaagtgccccagatgcgtcaataaaacatgcctatgtattcgtgtaggcgtccgcatgcctgcgcgccggccgtgtgcaggcgccgaagcacacgtctgtgtgaacacacgggcacgcgcgtctttgggtttagtggtccttccctcgcgttggggcatctgtacacatgcagaatatacacatatgattgtaacttcaagttttttcaattatgcaaaacgacctc

SEQ ID NO: 333774 - DNA, 1474 bp, Homo sapiens
  chr9:126773180-126774654
  hyper
cgaaccctggcctttctgagttcctaaagccatgctcgcccccactcttccaggctggggagagaccgggaagagcgagaagctacacgctgggctgcagattgggccctagcgggcttggagcgtggatatgctggctggcccccctccccgggagtcacagctctcgccggtctcgccactcaggctctgccgggtacccaggaggcttgcacggccgcctgcagcccgctgtgcagagcccgggccgaaggcggagctcgatgggaaacggccggccgaaggctcttgcaactctgccacaggcctgccttcccgggcctcccaggcgggtgcctgaggccgcggctccaggccgaggggagaccgcagtgagacgagcatccccttgctgcgccttcttaggatagagggtttaattttcctttctgaagatatcgcaggaagctgttcgtatcttaaaaactccaaaccccgcgctctccctcctccctgcctcccccccacccccgccctccagcctcgcccaccagctcccaccatctcgactctcctctgctcctcttgcctctcccctccctcttgggtctcccgccttcccggagcacgcgctgccagggcctggggcgccgagcggccaatggcacggcggcaggacgtgatgtcaggcgcggctgtagaaaaggcgcggaggcttgcgctggcgcggactgcagagccggggctgggctaggcgcgcgcttggagagcattgcgcgcggctgggcccgcggccggcggctcctcctcccactctgctcctcctcttttttctcctcctccacctcctcctccgcctcctcctcctcctcttcctcctcctcttcaattctcccggtggctcgactcggctcgcaggcttcggagaaacccctactccagtcgccgactcagcgcccaagagggtcgccttgggctgggggcgcaccccagggaggggaggggtccaggcagctgggccgccgcggacacctagcggcttcagggtgaaccccgaccgcagccgtcgccgcctcgggcagagtttgcgcccttgctttgcgccccgggcgctgaagccgggcgggcgatgcccgcggcgtgaaagcgcccgcggcgggcgccgacctctgtcctagtctcctgctccccccgccccgcttgtcccgtgcccttgtgaccctggctttggcgccgtcgcccaggcgccccgcaatgtagctgcccctgcgcctcggcgggaggcgtcctgccccgcgagcgcccggggcccggagcccggcctgggggctcagccgagctcgggcggggccggggccgcggtggcgatgcaccgggcccgttagcgccaggagcgccaggcagctgaggcggggggcaagccctccctcggaggagccgcgcccccggccccgccggtcccgccgcgatgctgttccacagtctgtcgggcccc

SEQ ID NO: 333775 - DNA, 139 bp, Homo sapiens
  chr9:126779038-126779177
  hyper
cggtaggccggtcggtggcgcggatttaagatttgctgaaggcactaccacagatgtagctctctggaacttccatccctcctctcctaccaccccccaaaaaaagacaaaaccgagttcagaccggctcccccaacac

SEQ ID NO: 333776 - DNA, 1420 bp, Homo sapiens
  chr9:126779532-126780952
  hyper
gtcgtgtttgttcccgtgccctcctctccgaccttggccggggctcctagtcctgagagaaacggcgttcggtgcgccggcggtggctatgcggctggctctttcggggctcccgggactaggttggggaaagagggcatctccccggcctctcggggcccagcccagtcttcctagatctggcgtccgcccttccctcccctcccgcactggcaggagagaaatggccgcagtgtgggccgcggggcagctaggactggaaagcggggaccctggagggtgcgatcgcggacggggtgtgcgggcgcgggtcgtgtgcgtgtgcgtgcagggttccgaccacggggacacgagcttgtttgtggcagtgtcccacatcctgtggcccagccacgacgaccccttgcaaagcctcttgctctggggacagtccctccgaggcgcggcggcaccttactgaagggcggcgagctgggggccgagtggggagggggcgccgtcggggcgccgggcgctgggcttacagcagagccgcgggccgcggggtcggaaagtccttccggggcggggccgcagcggcctcttcccgcagcccctcgggcccgggccccggtggaacggaaacctccccctaccccgggaggggctgccagcgggctgggggtgcgaaaacggcggcaggagcgggcgaggggcccgggccgcgcactttgcgcctgggtttgcgcgccgcggccgcgggagtcccgcgcggaccggccggacgcccggcctcccccagccccagctttttgtgtgtgtgtgcctggcggcgtaattactgatttgattccaatccattatttagacaattgaacctacaatctcgtctttagtaaaatgaggcgaagtcagatttgattacaggttcagtcccagcgacaagagctcgaaacccgatgggttaataacagatcacgagtaaattattcatgattttacgagctctttagctccattgaatcggcctaattgagaggaaaaaaaaaaaaaaggagagagaaagcccgggtcctccccctcccctcggcccctcgctcctccccggatccgatcctggggaatctcgacccgcccccgggcactgggggcgggagtgagggggttcggggcgccggccaaacctgggccccacggctgcctcccccgccgccgccccctgcccttgcctctggccggcctcggcctcgctacttagggccggctcctttccctttttctccactccccttctttccccttttctctactcccccgccaataacggcttcggaaaaggcctcccccgcagggaccgggtctcccggagccccgggattcagctcggccaccggaccctcgccacaagctgcgcctgtttccgggactcgctttcccctcc

SEQ ID NO: 333777 - DNA, 242 bp, Homo sapiens
  chr9:126782430-126782672
  hyper
cgttagtttccacatctctaaaatgggaatagtcatagccacctctctgagaggtaatgatgtacagtgacatttgtaaagccaaacacacaccataggtgtctactacatgtttatttctgcctcggacttccttccccgtccactctgccgctctctgtggactgccgcagatctctgaacttccccgagcctaatttgctccacttgttcacggagaaacaatcatcttacagggtagc

SEQ ID NO: 333778 - DNA, 262 bp, Homo sapiens
  chr9:126783310-126783572
  hyper
cgagtgtggatttggcatggggggcgggtcaggaagttcacccaccggctctgtgtctcctccctagcgctaagctgcaacgaaaacgacgcagagcacctggaccgtgaccagccatacccgagcagccagaagaccaagcgcatgcgcacgtccttcaagcaccaccagcttcggaccatgaagtcttactttgccattaaccacaaccccgacgccaaggacttgaagcagctcgcgcaaaagacgggcctcaccaagc

SEQ ID NO: 333779 - DNA, 539 bp, Homo sapiens
  chr9:126784854-126785393
  hyper
cgagtccaggccagtctgacccaccctccagccccaggtctctgggattgagggctgggaggtgacacagagggatgacggagacggagggctgcgcagctgccctgagaaagttcttgtgagtttgtcagaaacaaaaaacaaacaaaaaaatgccctctgtggggcgggtggaggctgtgacgcggcgcaactgcagctgcagctgcggggggagccgggagttggggcccctaggctcccgaggcgcccccttgagcagcgctgcccacggggagcgggcgaggggctgcgggagagggaggactgggtgacgtagccgagggagggagcgtcggccaatgggatgccgatgcgcccctctgggcccgcccctccctcatggtctgttttgctttggagtcccagtggcctgagctcctggtggatggagaacgtgactacactggctggggtagcaggtccctctcgtctgtttccttcgttgtttgccttcttggggttaggtcaaggaccctctttggcgtcccctcccttca

SEQ ID NO: 333780 - DNA, 339 bp, Homo sapiens; identical to SEQ ID NO: 234388
  chr9:127212694-127213033
  hyper

SEQ ID NO: 333781 - DNA, 108 bp, Homo sapiens; identical to SEQ ID NO: 234390
  chr9:127265975-127266083
  hyper

SEQ ID NO: 333782 - DNA, 447 bp, Homo sapiens
  chr9:128651916-128652363
  hyper
cgcacaaaagtaaacccaaagagcccgcacatgacacggaggctgctccatttacattaattatgcagtcagggcggtgagaattcgctgtcagccagcagggcgggggcgcgccgcggcggggagcggggccgggccgcggggcctcccggcgcgaacgcgggagggggagccggatcgccgtccgccgctccgcggctccgcgctgcgagaacaatgggcgcgcccgacgcccgcccgcgctcgcgctgcccggcgcgccccgaaagccgcggggcagagcgccctgagcggtcccccgcgccggcggccccggctgcgccccgctgtagcagctgaccttagccggctgcggccgagagaacgcgcgttgcccgccgaccttgtgccctggggtcagcacccactgcaagtcagaacctctccgtggtcccaaagttagtgctt

SEQ ID NO: 333783 - DNA, 284 bp, Homo sapiens
  chr9:129373418-129373702
  hyper
cggggaaggcatgcagaggggcccaaggggtgtggactcagcagccccaccccagaccagagaaggcagccaggctctggcgtccaccgagccagcgcccctatctgggcgcgggccgcatggcggcagaccaccctatatccgccttggtggcgtgggatatgactggcaggagcgcggaagaggcgctgagaatgcatgcgcacccggacagaccagacgcggcacggagggggtacttcccacaagtcctcctgccttgagaccaggccttcgagtggtcc

SEQ ID NO: 333784 - DNA, 892 bp, Homo sapiens
  chr9:129375663-129376555
  hyper
ggaccaagcggccccgagcaggcgccgccgcccgggggactccgactcagcccccgcgacctacctcggccgacagtcgggggttcccaagcggccactcccggccggcgccgtcccctggcggagccgccgcgctccctgccgtccgcgcagtctggcctcgctcggggccactcctcgtagcgctggagctttacaaaatattaataataaagaaggcagaggagaaaaaagaaagccttcgctccccaactcccaaatcaatttttcaagggggtggagcagagggatttgtttcgaagacgatcaaaacttctgcgaggggcccgcggggcggccgggccggggagccggggcctgagctcggggccaggcgcggcgcggggcgcgggccaggggcgcggagccccggggcgcgcgggggggcgggacggcactatttgacgtggagccggcggcgcatcccggcgcagggataccggccgcggggttcaaatgtcaggaagtttcgggaggtgaggcggcccgtatccctccgccgccagccccagctctaaacccggcggctcagcgggcgcaccatggcactggagtagcgcggggagcgcgcccggagccccgcggcccgctgcgccccgcccgggaccccgctgcgccgcgcgccccccccgcggcccgcggggccgcccctgcacccccaccccctcccccgcctgccgccgccgccaccgccaccgccgccgccgcctcctccccgcggctccgtctgcagcagccgccgccgccgggttccgggactgacaagcaggtgacagaggagccggcgcgcgtggctgcaagtgtccgggagagcgcggcgcgggctgcagccgccccggcccgcccgcacgac

SEQ ID NO: 333785 - DNA, 198 bp, Homo sapiens
  chr9:129381068-129381266
  hyper
cggaaggggggagggtcggtgggagagtccaaaaatctgtcacaaaatggagtctaatcgcttgtaagacagctcccaggtttggcgacccgagacccgctggggtgcaagcgggcgcctttgtgcacggcgagacgcggggttccggcccgggccgcgctcctacctcggcggcggggccgcggcgtccttccgccc

SEQ ID NO: 333786 - DNA, 941 bp, Homo sapiens
  chr9:129387302-129388243
  hyper
cgtttaatcagaggctgtgccgctcaaaccgcggggccctttgtcccacggagtgaacgacggaaacttgccatcctaatccccttattcatgtcaagcacagaaaagaagccgagcaccttacaaccgtgtcccctccaccccttccgaggacggcgggaagagggggctccggccctgtagccccctgacgcttttcgtttccgagcgcgcttgggcctcaggagccggagcgttgccgtgggggcgggggaaggggtggttttgcgggtgccttaattggcagcgtctggaaaatggggacagtgaccccacgactagaggatgaatggggggagggttagtgggatgtgtttgcctcctctgaccgagagcacgggtcctgctctgtcccctcttcccaggaaaggtggcactccgggtgcacacccaccacccccattaaagcgggattgaccagaagagagaggccgaatggagatgccaggctggggccctcggcggggcagatttcgttggatccctgggactaatgtcgcagcgctcgcactcctgcaggtctccagggttggccattcccggctgcatgctcggcccctttcttccgagggtgaattcctttgttccacccccacggaaaccctcttctccgccaggcccgtggcgcctttctcgccacctccgccgccgccgccgccaccctcgtcccaccgtttgcagggctttcctgcggcgctctggccgcagagacccagccctgtctgccgactggcccttcgacgtcgccgccgtgcctgagccccgctgcctgctcggacaagcagaactccggcaggcgcagcgggcgccgaggcttgggctttagccgtggcgctcgcctcggcgcagtggggagccgcgggcgtcggagaagcggccgcgctgttccgggtcactgcacc

SEQ ID NO: 333787 - DNA, 950 bp, Homo sapiens
  chr9:129388280-129389230
  hyper
cgaagcctgcgtgcccccgggggctccgttttgctcccctcatggacatgggggtggggagctcgtggggtttcagcccaaaggctccagtcagtggaaccggagggggacttcggaggaatttgtctctgatgtcccggctccctggcctcctattagaactcgtagaggatccgctctggagtccccgtgcgccctggcagaggtcggggacgccagagtgcacgcagtctcctgcgcgccgagcccaggctccgggcgcagggaggatcgggctgagagcagggtgtcacctcgtaaaagcgacaggcaaggactgttttatggggagggagaaggagcaggaagtgatgcttccatctctgacagcatagggaccgggagctccgatggaggaaaccctttccgggcaggacgagtagagggacaggacatggccggggaccatgggattcgctgccattaagtatgggacgggcaggcgagagcggggaaggggaccgatggagccagaagccctgagctcacctcccgcccgtcctctcctggagccccctctgcaatcccggctcagtcggcaaccggcccttccttccaggtcaggggtgggggagagactttctccctcgaaacacttgataccaactttgtttttttggcaagaaaaataagccttgtttggaaaggggtgggtggggggcgtcgagcgagcgagggaaggagcaaggaggcggcggcggagcaaactctgcggattaggtttcagcgcctccgccccacccccagccccgcggcggtgatttgtgtgcgggggtctgtgaccctgcaagcatcaaacggcccgcgggaaccggccgagttcagagggacagtgggccgaagggcggcctaagacaacgcagatggttcctatcagcccggccgggcccgcagcgtccgccggtccgtcc

SEQ ID NO: 333788 - DNA, 231 bp, Homo sapiens
  chr9:129393170-129393401
  hyper
cgggctgccggtgcagcaattcagggcaggcgttgtctggcctttgaagggacggctgtctgagtgtgtcactttgaactgcaaaggggcctgtggtgagggctcggccccctcccacgtgcccccgcctgcccacccctccagctctggttctagtcggcaggcctggagccaaaggggcgggcagggcagtggcccccctgtgggatgtcagcctgataagtgagcagc

SEQ ID NO: 333789 - DNA, 532 bp, Homo sapiens
  chr9:129400713-129401245
  hyper
cgcagccctgccaccctggggagctgaccccgaccccacccggccccccacgtcccagctcgggggctcacaaagggagaggagggaagagcaaaatcgcagagatttgtcttgtctggggctgacagcggagcgagtgattgccaggcccgcttggcagtttttaatcattttatctctgttctcggctctcgggggagacagccagtgcttagcagtctgctcagaaagacctcggggcgcgtggcgcagcggcggctcggagctcccattattagctgtgctcttcggagcgcgctccgatctctcccgggggagccggtgaaaaattaacacgggccggcggcgcgggcgcccgatgtaactgtaattactccattgatattcctcacacaatagcgctgtcatcagtcatttacataaactttctctccccaggacgggcggaggtgcctaatcctattgggcgcttccactgcatgcattatacatggcagctcctaggtgcggactgagggaggggcggatagcc

SEQ ID NO: 333790 - DNA, 527 bp, Homo sapiens; identical to SEQ ID NO: 234411
  chr9:129445250-129445777
  hyper

SEQ ID NO: 333791 - DNA, 486 bp, Homo sapiens
  chr9:129485513-129485999
  hyper
cggtgtccatggtgggtctggttcccaccgctccctccctccccgcacagtctgagacccccttccccgggccgccccgtcgatcccaggtgatggatggagccttcagggagcccgcgcgggcgggctaggctcgggcggaaatgaagaggataagatctgcgagcagagccgcctgacaccgtgatatccgcctggctcgctgcgctccgggtgatggatggggcggagctccccaccccccagccccggaacctggcgcccctcccagaaacaccgctccgctgccacacacgcggccgccggactcccagccaccggcgcactcacgcggcgccccccacgcatcagcccggcgcgcacgaagggaaccgttcctcttcccagtcccctggcgctagcaccagcaggactgcccttagcgcacaccacaccttacccacttgcccatcacacagcctcttccgcgcacgcacatacacatgc

SEQ ID NO: 333792 - DNA, 293 bp, Homo sapiens
  chr9:130461624-130461917
  hyper
actgtgagcaaggaaaaggccgacacccaacaccggtcacgcggcggatcagacgcggcctcgggactgggcttggggaggccgggcttccggggctagtaagcgtctactagccgggctgtttagggattggtcgcctctggccctggaggcgggggttcctggagtaagacggttgctgattggctggctttccgaggcggggttgtgaagcgttggtcattctatctgggtgctgggttaggcagtacgaatactaaaattggaaccagtgacacgcagattggtgaagc

SEQ ID NO: 333793 - DNA, 367 bp, Homo sapiens
  chr9:130639769-130640136
  hyper
cggatcacaaccacggatacacagccgcacagcccccagggagccccgcaccagcacgcccccgccctcccccggtgccgctgcccctccccgcagaggcgcccccccagacacgcgcgggcacgcactgacctggggaggggtgcgggtgggcgccggggccagtgcgtgccctgcccgtcctcgcggcggccggcaaaggcgactatttataaggctgtcagcgcgcggcatgccgggagccggcgttcccgaaggcagggagggcgggaaggagggagggagagcggaccagggaccgggaagcggggcgggaccgagcccgagcccgggtgcgcggcgacaccgcacccggcaccgtgtgccc

SEQ ID NO: 333794 - DNA, 120 bp, Homo sapiens
  chr9:130661066-130661186
  hyper
cggctggaacgggtcagaggccatggagtgtgtgcccaggacgtggctcggcacaggcaccagggcgggggtctaggggtgccggcctgttggggagcggcttgctcacgctggggaggc

SEQ ID NO: 333795 - DNA, 456 bp, Homo sapiens
  chr9:130674546-130675002
  hyper
cggttcttgcccgtctcgtcctggaagatctggtcgcagtaggccatcatgcgctccgtgaaggtgtacacctgcaggccggggtacatcctggtgagctgcagcagcgtgcggtaggtgcggccgccgagcacccggtccatgtgcctgccctggccccacaccatgtagagcgtgtctcgggccttctggaagtagtgtgaatagttgcgcagcagcagcggcacgcttgtgtgtgagacgacacgcagggtgctgcgctggcccacatccgcctcaaagcccacggtgggcgcctggttcatgcggaacacgcactcggcactgtcgatctcagcacccaggcctgagcccagcatttggccggagctggacaccacggcacagctgcggcagggctcgcggaccagcggctgcagggcaggcagggagaaagagacagagaggcatgaacac

SEQ ID NO: 333796 - DNA, 835 bp, Homo sapiens
  chr9:130689378-130690213
  hyper
cgggccgcgagtttcggctgggatgggggcccaaacctgcttaggccactcacctctcggagatgcggccggcggggtagaagacgctctgcatgacgatgaagtacgtctgggggccgggacagggagtgagggaggccggctgtcgccctccagccgcccgctccgcccagccacctcgcctcggcttcacccaccttctttccccggtccacccgcagactgtgcactcctggaaggggagagggcgccggatgaggatccccaaactccacaacccggggtgcatccggcgccaatcccagcgccaggccacgcctccttctcaagatccgcggcacctggacccttccttggctggtccggatcccgacccgatcccacccctaaacacagccccagtggtgccccgcccccacgtatggccccacccccatgccctacaaccccaaatccgcccatttgggccccgcccacataccccgccctccccaggtatatgatgacctaggacccgcccccaccgagccccgcccccagccaagtacccagcaaccgcgccagcagcgagtgcgggtgccgctgcaggtgctgcacgtagcggggcaggtgggcgagcagagcctgcacctctcggcgcccctgggtcttcaggaagaagcgctggtcgtggctggggggcaagagaaagaggtcactgcccaggcctggctggagcggctcccacccggcccccttccccgacctgtgcacgtggatctcgctcccaggtctcggcaccgcctctctcgccttcggccctcgccctcctctcctccccgatctgtccaccatc

SEQ ID NO: 333797 - DNA, 257 bp, Homo sapiens
  chr9:131127222-131127479
  hyper
cgtagccggcccctccccccgaggagggggccctgcttcctcccggcctaatgatattctgggctcagccctcgtctttggcggcagtttaacccgagccggggcggatttctttctcactgatctcagcttgacacccaattagcacaagaatgggaggaggaagcctgcgagaggcgcctcccagcctcccggggcgcgcgaggggagcaggcgggaagacaaaggacagcaggcaggggggcacccgcgccctc

SEQ ID NO: 333798 - DNA, 859 bp, Homo sapiens
  chr9:131842789-131843648
  hyper
cgcctgctctgtgtgacttgccctttcgccggccagtatggggcagagggaaataagccccctctgctctctggtctcagtttactcgtaactgaaagtgggtcggttcaaaccccctggagctgaggttgcctctcctcttcgagcacgcgctatcggacgcgcaggtccccaagaccgcggatcggcagggggtaccagggaagccttcattcagggcgcaggtcccagccgaaccaaagctcccaccaaagttcaacacgcccccaaagccagcgcctgattggcccgccctgcccacaagctgaggcagcctcaccttctgattggctgttatgctccctgttcggtgctggaaccctccccttctctgattggccagatgcctacctgcgctcgccccagattgggcgccagctggggcggctcgttggctcccaggggccccgctctctgattcgccgctcgggccagcccccacggcctgcacgctgaatggctgcgccgctacctatattggcctccgattgggtgcacggcgcctccccggcgtgataggtcaggaccaccgcccccctggctccccattggctgctcgaagaagcccggtctccgggtaagatggcagcggacggacagtgctcgctccccgcttcatggcggccggtgaccctcacccacgtcgaatatcctgcaggtaaaaggcggtcccggctccaaggacgccttcccagggacggcctctcagtcccgggcgctccggcctgctcgagcccgcggagggggcgccgggggaccggggtgggaactgtcaaatagtgaaccacggaggggctcggccggcgcgcgcgccgcgcag

SEQ ID NO: 333799 - DNA, 406 bp, Homo sapiens
  chr9:131872521-131872927
  hyper
cccccttgtctttcctgggtcgttggaactgaatgctccaggacgtgggtttaatcccgcttctgaccttgcgccccaatctcctgctctgccaaacctgggacgcccgcctgaccccaccccatcagctggaggccgggtcgaacagcggccgcaggacgcggtctccgttcccggacgcaaccgcacggcccgcccaggccgtccagggccctcaggcccgggatccgccgcactcaccacggtcctggcagcgaaggctaacatcttcgctgcccgtccgcggacacgcagtccgctccgccccacacaccgggcaaagtccgcgccgccgccgccgcggctggggtcggtgggtccttgctagagccttcgggccaaggtcgctgagttacagccgccagcc

SEQ ID NO: 333800 - DNA, 522 bp, Homo sapiens
  chr9:132020659-132021181
  hyper
cgcggtaagacgtcagcccggtgagcatcctccgcactgcggaccgcccggggtcggggtcacccgggccccgccccgagcttgctgtcgtatcggccccgccccacccacgccctcccggcccctcctgctccgggcgcgctcggctccgcccccacgggcaacacggcctcccattggccgcggtttccatggttacgcgggccggcggagctgcgggctcccagacacgtgtccccgggagccgcccagaatttgacaggggaccatgtgcgcggcagcgcgggagcgagacaaaggaccgggggaggcggggaacgaagccgggcggaggggtccgcgtggcccgggcggggatgggccccgcgcttctcctgcgagcagggcaccccctcttcctttttattttgaaggaaagggaaaaaaggaattgctacggaaagagaggtgggagaggaacccagtcaatttcacctgctccccttcctccaggaagaatcgggtacgcgggcatctgagaac

SEQ ID NO: 333801 - DNA, 280 bp, Homo sapiens
  chr9:132145475-132145755
  hyper
cgactggccgttggcctctcaggactgtcacttggaagttccttctccaagagatggctattgccaaagtcatctgtgcagtgaccactgcagggcctgggcgctcccgggagccgcagcgcagggacagtccgtgcagacgggtggcgggggaggcgggggagggcaaaggcctccactctgcaggtagcccgggcctggtgggcgaaaggactcaaacgccagagctctctgaccctcggccgccagggttcaaggctgggcccagccgcgctttgcc

SEQ ID NO: 333802 - DNA, 166 bp, Homo sapiens
  chr9:132176641-132176807
  hyper
cgtatccccctccccggattgaaccagcaaagagcacaaagcagaaaatacatccttgccgcccgcaggctccctcatcccgcagaaaactctgaaacagtccacacccgtcccaaagttgagagaaacctggacgtttcataaacaaaacccgccctccagcagc

SEQ ID NO: 333803 - DNA, 1561 bp, Homo sapiens
  chr9:132244512-132246073
  hyper
cgcgctcctcccggaccccaccccgaggcagctttctcacaacgggatcctccccgggcggcgtggggacgcctcccgaccccgaggcccggcaggagagccgccaccgcggccgggtggtctccgcgtcgcatggcccctgccggcccccccgcccatggcagctacataattaattcgcccataaataactgattggggtcgcgcacgcgcccggtgtccctaggactgggatccccgttagggttaggggcgtggggggtcgggggccgcggggctgtgcgtgccggggcgcacggttttgctccgcgggcctctctcgctccctcgcgccggctttttccctttttctctttcctttttttctttcctggagcggagcccggcgccaggagtctggaaccagcttgacaggcttttgagttatggaggggggagggggagaggcgggcggcggggagggggaagggagggcgccgccgcggcgtgggggcggggccggctccccggtttggagactcgccccgactttggggtccgccagcggcggccgggcggagggcgggggaccgcaatcgtggggggagtcaccccgcggggcccggcgggcgaaacgggccgggcttcagagccgcagtaaatgaggcccggggcgggcgggggtggacacggcctcggggccacggcctcccccgccgagcaaggcattcctttccgctgaactgggcgcccgggcccgcgccgcgccctgcacgcctcgcgcccggcgatcgggcccagggcgggggagcagggaggcggccccagccggtcgccggcgcccccaggcgctgcttcccaggagctcggctccccgggatggaagggactgatacccagttaatgggcgtggagcctgagcccctgagggtcgtcgctaacgggggtcgctcagcagggccggcctccgctgcctgcccggggtgtctaatcacctctccgatcctttgcccggatctgagcttcgtcattcacgcccctcctccctggcgactttgggcctggtgacagtcccccgaccctcgcagagccaggggcacagtaggcgccttagccactggcagaatttcaccggcgctctgcccgacgcccccagccccagggccgggcgtgggtggaagtgtctggaagggtgggttcaccagggctgggcacgtcagcggccccgtacagagaatccggtgcctggggtctctggagggggtactcagagtatccgaggaggagactcctggatgctaacagagcccccagttaggagcagtccgcgagacagttggtaacagtgctggccttgcccgggcgccggaaggttccgtgaggcccagcaagtcctgacttggcacagggcccagcacacggtaagcgctcggtacttggtcactgttgcttgattttaccatttcggaggggctcatctacgcctagcaaagcccccctcccggtgacccaaggggagctccagaatgttgagcggctgagcggcctggctcctcctctcgaccccatcgagccaagtgtc

SEQ ID NO: 333804 - DNA, 690 bp, Homo sapiens
  chr9:132258226-132258916
  hyper
cgcctgaaagccgcttgggggccgcggaggcaggtggcatggccagggcagagtccgcggggcggaaagggttaacgggctccgccgcattgggctgtccttcaaggggggagccagccaatgagcgcgcgccgcgatgaggtaatgccgggaccacgcggagtgggcggggctgacggggaccccgcagagctcagcgcttcttctctccccacctacccctcacctttgaccttgatgtacaccctcccctcccccaaccttacccctgcagaggcgcccgaactgaaagtcggctgcagggccgcgggcctcccttagtctgggacaggaactgagagacgtcccggcctcagtcacaccctctgggcctcagtttccctttctgcaagaagcagagtgggtgatcgctaaagaccctaccagctgtggacgtccttggatcccaggacagttttcagcccttccctgcccttggcccgaactttaacggtcccagccccggcttcccctcaggcggtgcccagtgccaggacctaggagtccctcgggccacggggagagagcctcaccggcccagccacgccctccatgtgaccccgacccatcccttgggtgtcgcacctggcgcgcccaccgaggccactaagctctgctagctgcaccagcagcaggacctgccggcgtggc

SEQ ID NO: 333805 - DNA, 413 bp, Homo sapiens
  chr9:132312371-132312784
  hyper
ccccaagagagccccggccgggacgcgcggaccccagaagctcgggcgggggcgcccctcggaggaatgtttccggggcccggaccgcgccgccgccgcagcctttcctccctctccccgcccggctcgccggccgccctcgcgccccctccagggccccctatcttcccccacccgaaccccacatcactgccctccgggccggctgcgcccaggcacttggtgcagatgtaacctctccgcgggccccgcctccgccgggaagccgcgcgcggttgccaggaacgcggcaggcgatcggagctggacggcggcccgggcatctcggcactggcggcgctcggccctcctgggcggccctggcccggccctctccccactggcgccgctgcgcttgctccgattccctccgc

SEQ ID NO: 333806 - DNA, 762 bp, Homo sapiens
  chr9:132382255-132383017
  hyper
gggtggtggggtggtgggtgcggggacacaagggaccaccccccaccggaaatgactcgggcccgccccccgggccccgcggggcctcactcagtggctccggctcctcggcgcacttctcctggagctggtgcaggaactcacggaacctgctggggaggagctctcctaggaaggcgcccaagaagtcggggtcctccctggccacgcgcctccgggggcgctcgcgctctccaggccctggctgcctgggcgccgattcccgggacgcgccggccgacagcaggggaggcggcagcagggaccgcagcagcccccgcttccgcacggcccgccgggtcgcggtgagcaaggcgggcaggcgcggcgggaggcgtccgacgcccaccccgggcttggcgtccccttccggccaccacgcggcgccgccccccgggatcctccagtccccggagccccgcgcgcccagagccgctcggagcgcgggcggggtcagcttgggcagccgcgggtcgctgctgcgtcggaagtctccgtcgccagggagccccttgggcgccaggtcctgggcccctgggcgaagtcgacgccagaacatgcttggccccgcactcagctcaccgcaccctcagcgcgcgtgggtggggggcgccggctgaggtggggagggcatagtccagccccaggccatagtgccccgggcggggcagcgcggtgcggggtgaacgccaccggcccggcggacagcgagtggcttcaggc

SEQ ID NO: 333807 - DNA, 644 bp, Homo sapiens
  chr9:132647794-132648438
  hyper
cgctcatcccgggtctcagagggcgctggcaacacagatccctgcctcccctatcgggaaagcgttttaggaccagggaaaaggaggcctcccccaggcgagtgcgcagagccagggaacccgtctggatggtggctctttcccaccatccttctctggcagcagcagttcaaagtggagcttccaggctgtcccatacatttcacgatttctgagtctttcgcttcaatttaaaaaaagctgggggcacgaccgaatcctgcctctgtccaccgccatctcgttcctcatcgcagggggcccttcttgctccctccactgctgcgctctgccgtctgctcccgccaggggtccccaccacctctgcggacggaggagccgcctcccaggcccgggcgtgcccagggcgggtggagggcgtggggcgggccggtatttcctgacccgctggaggagccggccccacaggcttgtggcctccccggagccggtgagtcaggaacttcctacttcaagaggcttccccagtgcagcagaaaacaaactagtcgcccccaatgctcccgacctctgtgatgtccacacccgcggaaatgggggccccaaaccagcaggctctgttctaggcttctcagcgctggtgc

SEQ ID NO: 333808 - DNA, 1655 bp, Homo sapiens
  chr9:132804293-132805948
  hyper
cgggccgccgcactgcccatcccctgcccagtgatttccccaggaatccggggacggcaggaaaagagctccatccacagccagcccctcgcctttccggggacggccctcagccctgagggctgcccgtttaccgtgcgcatcccccggccaagcatccccgcaaggcgcccctcaccgccaactttccccactggaaactattctccgagcaaccgttaaagatcattgaccccgcgaacgcctcttcctgaggtagatcacgtaagatctctccctaactcccactttcccctccagaccagacgtcgcagtgcccacatcccactcaggattgagctaccccgaaagaacaagtgcgcccggagccgccacgggccagaagtcctcgcctccagagcgaagaccgcactctcgccccagcaccccaaaacccgacccccggcgctcgccccggccgccccgctcccggggaagtgcccgatccgccagcgcctccgcggagccaggacagaactcgcggccggggcgccccgagacccaacgcagcgccgcgcagccggggcctccacgcccccacgcccggtcccggccctccccgggcatccgcggctcgccccgggggattagggctcggcccgacacacacggcccgctccggggcgccggggacagggaggcccgcccgcgccgttcctcaggccgccggggacccgcaccaactcccctcgcctccgaaggacaagccggcccgcacctcctgctcgggccaaggcggacgaggggcattggaaccccgcctcctccccaggccgcgaggaccccgaccagcgcgccctcgcctccgcccagcagcgcggcccgcgccccctccccaggccgcggggaaacgcagcgcgcgccccgcatctgcccgcgggcccagcccctcactcacccagagctcggtgccccagctcatggtgcaggggacgcgaaggggcgctccgcgcggcgggcgcggctctctggtccccctccccggcgatccctttgccccccgagatccccgcgacggcggaaagcccggagtccgcgcggcctcctccggctcgcagctcctcgcccggggtctcctcggcggctcctcctccccgccgctccacagcaaaatggcccgaggaagcagcagccgcggccgccgcagcgcccgcccgccctacacccggagagcgggggaggggcgggaggggaggggcggggccggtctgacagctcgcgcacgcgcgcccgccccaccccggcccggccccctcccccgggctcccccggccgggtccgcgtcgccctggggtccggaaggacgcggagggaggtgtgagggacggcgggacccggatccctaggactccccctgccaatctggtaatgacttcttagtgaccactgtctgctcgcagtactagcgcttgccttggaacgcggcaggccctgggatcaccgatgctccgccgcggtctgagatcgctcccctgcgcgtatcgccgctctggatttaaggacaatactttcccctggcagccatgcgcgccgagcagagtcagcccgggaggctcttttcccaccgcccgagggaagcccgagagtcccgcaggctggcgcggtgggagtggggc

SEQ ID NO: 333809 - DNA, 640 bp, Homo sapiens
  chr9:133308611-133309251
  hyper
agaaggacgggcagcgcgtgggcggaactgcaggggctggcagggaggtctgagttacgcggatgggccacgctccgaccgcacccccgagtccgcctgtccgtgtgtctgtgccgcccgcaggacgtgcttccggcgctgctcgcaggactgcggcacgggcggcccctctacgctgcagtaccggctgctgccgctgcccctgggcgtgcgcgcccaccacgacgtggcccgcctcaccgccttctccgaggtcggcgtccccgccaaccgcaccgagctcagcatgctggagcccgacccccgcagccccttcgcgctgcgtccgctgcgcgcgggccttggcgcggtctacacccgtcgcgcgctcacccgcgccggcctctaccggctcaccgtgcgtgctgcggcaccgcgccaccaaagcgtcttcgtcttgctcatcgccgtgtccccctacccctactaaacgggagagggcattggcggccgccctggcgtgacccccgaggaaggggtcgaggagaagcttggtccacgccacctgctgtggcaagcggagcgtcatcgtctcccgccccgtgcgtcagcgagaccttgggtcaacacgaccctgcgcacagccttgacccccgacagc

SEQ ID NO: 333810 - DNA, 210 bp, Homo sapiens; identical to SEQ ID NO: 223701
  chr9:133534647-133534857
  hyper

SEQ ID NO: 333811 - DNA, 324 bp, Homo sapiens
  chr9:133535058-133535382
  hyper
ggccgccactccgccggcagccccgcgcaggcctggccccgagtcacgtctgttgaaaccgtttttttcggcctcgcccccacccgccttggcagccagccgcgcctttgtacgcgccggcgggggcgccctggaaccctgaaccgtcttacggggaacgggggtggggggaggggagcggcgcgggccccacgcgaggaaggaatttcctgggccactgcgaaagattgaggctcagaaagccagagagagacgtgcgaggaggaagcggagagggtgtgcgaagctggagagggagtcggagcgccagcgaaagaggggagc

SEQ ID NO: 333812 - DNA, 972 bp, Homo sapiens
  chr9:133535423-133536395
  hyper
cgcggatgctgggcgcgcgacggcagcgggcggaggaggggagcggccgggaacctgcgcgcaggggaagccaggacggagcgcagcaccggcaggggagggttgccgaggggctgtgccgaggagcccgggtgggggcggctggaccgcgggccgcgggactcacagacagtgcgaggcggcgcgggggcccctctccctatgcggggctggggcgcaggggctgggcggggcgggtgggcgtctgagcgcggcgcgggcgcattcttcgccttttcttcctcgggctcattccggccgatcgatacctgcgcgggacctgcccccgccgctaatatctttttaatgagttcgccaggcttaaagcgagcgcgatctgccctccagggtggattttcccccggcagatgtttcgggaggaggaggcgcgcggagctcccgggaggggggacaaatctctccctccgaggggcgagaacaggagactttcttctaaagttcaaaagaaagacgggctttcactcggcccccaaaaatgtatttctcggcggacaatgggcttctttctgcgcctctgagggccggcggggcgggcagggcggggacccgtgcgctttggccccgcctgaccgactcgcacccccctcccccgcacccaggcccgggccccagagcgagggcgcaggagccgcgaagccggccgcccttccgagcgtccccctgaagcgcactgtcgggacctggctctcccggagctaagccccggcgcaccggcgagaacgaaagcgtcgtgcggggccctgggctgtcccacacgcccccgttctcataggtgcctcagccgggccgaagggacgcgcgctggtgcctcaaggggaggacgaacggacctccgggcttgggccgcggcctccttcccctcggcgctccgccctgagcggggcaacaactagaaattagccaaccccgggc

SEQ ID NO: 333813 - DNA, 1334 bp, Homo sapiens
  chr9:133541074-133542408
  hyper
cgaatggagccgaatgaatgcgatcactttaacagcgtgacaaattgcccgccgcgccgcaatggacaccgtttaacccccccctttcagccggcccgctcgccgggtattttcccaggtagcttagaggggaaccttgtaagacatggaggccgcccttgtgcgcctcgccgcttccagccctgccgcagatgcccgacaggggaaccctcggggagctgggggccgccgcggctcctccccgcccagagagatgacatcggggtttgtctgagcccgggcgccgccctccctggcaccccagggcctgggagcagagagggactcgggcgcgcccggggtcacacagcgagcgcagagcctggccagctgctgccggtgcttctttggcacctccaacacctgccagcccgaggtctgtccccagcgctgatcacggcccggctcctctgccagtgcccagagcctggacacacagtgggctcccggaagccgactaggcgaaagagtctccggttggccttcacctccttgcaggacctggcctcagtttccctgtgcataaaaccgctcgctgccgttggctcattaattcttaaacttatccggggcagaggatggaagaagttgcgaatgctttgagaattcgcggagagactaaaaacccacttctaaaaatgatccccaacgcaccactcgctttccagggcacggagggtctccaggttgcaaacagaggagaggtcgttgagcctccgcacatccgacttcctccacacccgggtggcttctctggatttggggccgacttgggtttggctggtctgggcaggaccgaagccggggtcccggcggggaaggaagggccgggcctcggctgcctcgggctctgaccggttttcctggccccgccgccgcagaagtgcagaagctgtccagcctggtgctgcctgcggaggtgatcatcgctcagagctccatccctggcgagggcctcggcatcttctccaagacgtggatcaaggcgggaaccgagatgggccccttcaccggccgcgtgatcgccccggagcacgtggacatctgcaagaacaacaacctcatgtgggaggtacgcgcgggctggggcagaggggcgcaagggccggcgaggggcgctggtcgcgggtaggactcgggcgtccggccgtcgccgcttccacccgggctgagagcggcggacactcctggcctggacgccccctgagccgggactctaagccgcccgagcctggagctcaccccgcctctaggctcctcccaacccgtgccgaaaatccgaccctccttccccc

SEQ ID NO: 333814 - DNA, 1351 bp, Homo sapiens
  chr9:133710055-133711406
  hyper
cgtctgttcgcagcctgacctcatatcctggtctggatgtgcggcctcaccggggtgtcgtgcgcacgtgtggttgtcctgtgggtgccagctctgacttcctccccagacacccactgcctcagccttaatcacaggacgcgcgttgagtagaaatgagaccagttagtattggtaactgcagaggaatatgcattttcaccagcgttctcgggtcagagggtttgcctggcaccgcgtactgggaaactcgccaaaagcggtgcaggttggagacgccccaggccgcggtggagttgcgcgcggcttctaaagtggagtggagcaggcctgcaccctccccgccggggctgggacggcgcttccaggcggagaaagacctccgcgggccgcgcgcggccttccccctgcgaggatcgccattggcccgggttggctttggaaagcggcggtggctttgggccgggctcggcctcgggaacgccaggggcccctgggtgcggacgggcgcggccaggagggggttaaggcgcaggcggcggcggggcgggggcgggcctggcgggcgccctctccgggccctttgttaacaggcgcgtcccggccaggcggagacgcggccgcggccatgggcgggcgcgggcgcgcggggcggcggtgagggcggctggcggggccgggggcgccgggggggcgcgcgggccgagccgggcctgagccgggcccgcggaccgagctgggagaggggttccggcccccgacgtgctggcgcgggaaaatgttggagatctgcctgaagctggtgggctgcaaatccaagaaggggctgtcctcgtcctccagctgttatctggaaggtaagcccgggccgcacgggttgggctgagtagccgcgcgccctcccgctgctgctgggcccttcctaggcctcgccgcccgcgcgctcccgcctgcgccctccccgggtcttgtcttttttttctttcttccctcttctcttctcttctcttcagttctcttatattctgtctctctttctttctctctgtgtctgtctcttttctcttctcttgtctctctctttttctctctctctgtctctttctctttctcgcgatggcccctaggcgccgccggcggagcgtggcccccagccccggcaccagccccggtagagccacgccggatggtgacggcggcgtccggggccccacagtgcgggctcccccgaaaaagtttgagaaagccaactcgccaggccttaacatccctgggatcccacgttgtggaatttccaccgttaattgggactgtgtgttaaaaagatcgacccgtgtttgtgaaaacatgc

SEQ ID NO: 333815 - DNA, 869 bp, Homo sapiens
  chr9:133814876-133815745
  hyper
tgggcgtcccagtccgcgtccgcagacccgtgccctcgcgcccgcggtcggaaagcccacacgacgcccccttgcccgggcggcccgtgggcgaaatgggggtccccaccactgccacagccgccggcgctgtggtcgcgagtaccagccgctccgcgctcggccgcgctcccggccgatcgcccgcgctccccggcgcgccccgcgtggtcccagcccccgccttctcctccgccgggaggggatttgtgccaggagggggcttcttagttgccccttcccaccagcagcacttttaaaagcatttaatccgcccggagcggccttcggaggtaattgacaaagtccttaatctgcgcggcgaacgagctgctattgtggcttctgaccgggaggcgcccacactgcccgacgccgcgctcccctcccgccgccccgccgagcccgccggccgcccctcctccgcccctttctgcgtccccatctttttctgctcccccagctccagacagacccccgttccccgcccccgcttctccccaaagctgttttccggctcccggggcgccttggccgccgcgctgttccctggcaccgtctccgtctctcccccactggctgccagtctgtcgccccatcttcgtccctctcccgatccctctacgcgtccggcactggcggggcagactggttgggggtgggggccgcgtccagcctgggctggggcactccctggaccccggagcgggggaccctgtggcccggtgccatccgaggagactgccacccgccaggcgctgggttcacaaaccaccggctgtttgtccccagccgccttttccttccaggacaaccgctggcctcaccta

SEQ ID NO: 333816 - DNA, 168 bp, Homo sapiens
  chr9:134131738-134131906
  hyper
cgactccacaccgagaagccaaaccacgacagtgaactgcaccacccaggagccatctgcgtggagctcggccagcaatgcctgttatgcaatttcctgctttggtgtctcagccccaggaggcaggatgtgagcgccgttggtttgctgcaacgtggagaacccaca

SEQ ID NO: 333817 - DNA, 724 bp, Homo sapiens
  chr9:134151944-134152668
  hyper
cgcgcggccgcgccaccctcgcggcagaagcctgacttcctgccctccggccttccgcacgcgctccctccgggccccgcacccgcacccgcccggcgcggtcgaatcaattgcagagcagtttgtgttcacccggccgaggtcccggcgccctcggggcgagcgccgacccgcggcttccaggaggcgagctcagggctccggccgctcgccggtgacgggggagcgcggcgcgggtccccgtcggcgcccactcgcgggcgcgggccggacgtccccacgcaggggcgccgcgtcccttcgccgctgtcgctgccggccgccgtgcagggtcccggggctgcgctccggccgccgccgcctgcttcgccgcggccgccgaggacctggtgggaggtggaagggacagcgcgtcaaggccagcctcaaagttaagccgaactttgctgcggggggcgcgcgggggcggcgacgcgtgtgcgctgggcgcgggctgcggagctgacggcgcagctctgggcggtctccccggaggcggtggcccccgccccccgcgcccgccccgtcagtggcggccgcacgaccgcgcgcaccagcgaataatagccgcccgtgacatctccgctgataccgtcccggacgggcggggtggggggcgagcggctgccgctgcagggggcggcgagcacttgccctgctctgtccccaccgccgcgccgccagc

SEQ ID NO: 333818 - DNA, 867 bp, Homo sapiens
  chr9:135036693-135037560
  hyper
ctcacttggcccccctccctcgtgccgatggggcagcccccacacccatgggcgctggcaccccggcaggcccccgggttttggaagaggaagctgcagcccggctgcgcctgaccggagccggctgaggatgcgctctgggcgcagggacccgctggcccccgggccgggaggcgatgtttaggcagcgaccccccagaggctgccggggccaccctggccacgggcccgccgggacgcccctgctcgccgcgcccctccccgggccgtggcgcgtcccccgagccgcgcaatatttccttcctgcacctttaagaagaccgttgctccgtggtgggatggtgtgttaaagccacacagaggaagttacgcagcccggatcagaccgagagataaaagccccgatggtgatcgtgagtgatggcaagaggatttagcctcggcattaacttggagcggagtgcaggggggcagtgaagcgcccgccatctggcccgcgccgcgccggggggatgccccggctccccgacgagacgccgcgaagcccacccgggccgggggctgcccggcgcccgagcgcgggtcctccccgggccgcccaggggggccaaaaagtttgcacttgttagcggcgacctcccgctcagcccgggcgggcgatgcgggcggcgcgggcggccccctcccccggcccgcgtctccgggacggctgcgggcggcccccccggcggccggagggctccctggccccgatctgacggcggcggcggcggcggccacagcggcgggagcggcgcggggaaggagcagcggctcgcagccctcggcccgcgcccccacccagcgccagcccgaggggggaggcgc

SEQ ID NO: 333819 - DNA, 391 bp, Homo sapiens; identical to SEQ ID NO: 234471
  chr9:135117799-135118190
  hyper

SEQ ID NO: 333820 - DNA, 672 bp, Homo sapiens; identical to SEQ ID NO: 223712
  chr9:135285314-135285986
  hyper

SEQ ID NO: 333821 - DNA, 755 bp, Homo sapiens
  chr9:135286199-135286954
  hyper
agataggtcgcacacgcccagtctaagtcgtggctgccagccctcccagggtaaaggccgcctctccggttccgctgcacgcctggggtacgtctatgcagcggtggctccgtgtctgtcctggaagcatcacgtcgaatgttcatttccgttcgatcatactaatttcttacccaaattacaaccctaagagaaaaaaagcataatctttggcctaggaggctccgcagacaagaatgagggagctgcggtttcgggctggatcactttcccttccattacacttccctcctccccacctttagcctcgcttcccgctgatgggaaaccaacactgctgtggcggccacaccttcccgggggccactggagaagtcaggctgaggcttgggggtcagggagcaagcctcgaggcgaatttatcttgcgccgctggagggcagtgcgcctttaaaaatgcgccccgcgtcccaggtgcgggagtggaaggcgcaggtggtaaccgtggattcaacaacaattatttgtgtgaccgccaggcgctgagtagagcccagaggtggtggtggcggtttgtttttgttttggggaaaagggaacccgtgctagaattaactgagttaattggctcctggcaaaacattgactccctcctcttgccttccctaaactcggtcctgagaggaggaaggatactgcctaggcgcaggctgcacctgggggaggctggcttcccacactcgtgcctttccatc

SEQ ID NO: 333822 - DNA, 83 bp, Homo sapiens
  chr9:135457318-135457401
  hyper
cgggcagcggcttgcggagccgtgacatcacccccaaaatcggccagagccaatcagcgtcatcactccggggacacgtgggc

SEQ ID NO: 333823 - DNA, 335 bp, Homo sapiens; identical to SEQ ID NO: 234476
  chr9:135457644-135457979
  hyper

SEQ ID NO: 333824 - DNA, 39 bp, Homo sapiens
  chr9:135458266-135458305
  hyper
tgctcggggactgccgttcgcccctggagctgagtccac

SEQ ID NO: 333825 - DNA, 1046 bp, Homo sapiens
  chr9:135461876-135462922
  hyper
cgacctcaggagctgggcccccggtgtaattctgtcccgactgtggggtgtaaacacacgatgccacgcaggtgtagcaggagccatcgttagcgggcaatgtaatgacaacggaacgcagacctgggcaatgcgcgctgcgcccaaggggcaagcgagtggcagggtcgcttattctcccagtgctcggcgctcgcagacccggagccttccgcccagcgccctgtgtaggtagcgagtgtcgggagaaatcatcactacgaattcgtttccatataggggcaacgccaggcggggcacaatgatctgtccttgaggacaaagagtgattccggagagagcaggtttttgtccctccacgcaggtttctctccccagaccccagccttcggcttcctcccttcctgtcacggacgcagccggagaaactggggcccagacgcggagctcactccgccagaaaccctgggtcccttcccctacgctggcaggctgggtccggttccatcgtcgcggctccgtttatccctccagggagcgcgggcagagcgccgagcgcggcgcagggactggagttctcgccagcttcgggttctttctccccggagctgcccggggggtctcggcctcgggcgctcccgccgccgtcctgttcccctcagggttcatgtcctgttcccggggccccagaggtcccgtctgagagcggcccccgcgagcttgggtgtcgcggaaccaccgctgtcggaagccgaggttacacaaacgccacgggcaggagcgggagggcaccggcggcggctgcgaggccgggccctgacatgccgctgtgtccgcagtgaaggaggagggcgaccgcgagatctccagctccagggacagtcccccggtgcgcctgaaaaagccacgcaaggcgcgcacggccttcaccgaccatcagctggcgcagctggagcgcagcttcgagcggcagaagtacctgagcgtgcaggaccgcatggagctcgccgcctcgctcaacctcaccgacacgcaggtcaagacct

SEQ ID NO: 333826 - DNA, 697 bp, Homo sapiens
  chr9:135645005-135645702
  hyper
cggtcatgagcttgcctctaacccagcaaagcgtgtggaagaaacatcggcagtgagggctcccatctctcatttctcaaagagccgagactttcagcgaggccacttgccattcctggtaggtaatcagatcgctgttaattaataaagctgtcaggtggctcgtcctctctggtcattagtatcctttcagaaagagaatcctgccatcaccgccttgtccgcccctccgcttgccagcaattaacttaatgctatgcaaatgagaggctcttctcatcattagcttatagccacgaatgttaatcgcataattgggtcttcaacagggtaattagacacgatttcctccattagtcttacaaggctaattattgttgagcggagagggggactgctcccagggctccaggcgaagaggggcatctggttaaagcgaattcgggcgcatcgtccgccaggtaaaaacagcagtcgcgatccattgtcacagcccactgtccccacccatcgtggggaccgggctagggagggaaacggaaccaggggaaggcctgggggggtcacactcgtgccccttgcctgggtcctgggatgcagacaacgtggcatttaaaagtgaaagcggaaacaaacagcagccccgccagcccgggcccggaggcccagccccgcgccaagggccacccctcggcgc

SEQ ID NO: 333827 - DNA, 605 bp, Homo sapiens
  chr9:136399587-136400192
  hyper
gtggcccccagttctggacccgggaagaaggcctccctgctcgccgctcctgggccgccgccgccggcagcagccaacaggcagctgggccggcctggccgggctccagaggcgcagagcgggttaaagtgtgcgccaggccggccggcgcgggcgggggagcggcctggtgggaagtgtgagtgttcctccccgtctgcctgacagctataaaggcggccgccggcgcagagccgccactgggctgcgcccctcccgggaaccccctctcttggatgctctttgaagtgggagagggaggcggcgcgggggaggaggggaaggggagagggaggccgggccgcagcctctgcactcacgccgcccccgcacgcacagcgcacctggcgccgtctgccctccgcagcgctcgcccctttctctgggaggacaacctgctgacccgaagccaggtaggccacctcgtccccgtccccctcacgttgcagcgtccaccaggccagcccactgctcagagtggggctgggggtaggagcaccccgcgccctctggagccgttacataacgtggggaggcttgtggggaggggtcgggccgcagagcac

SEQ ID NO: 333828 - DNA, 552 bp, Homo sapiens; identical to SEQ ID NO: 234484
  chr9:136474216-136474768
  hyper

SEQ ID NO: 333829 - DNA, 196 bp, Homo sapiens
  chr9:136603465-136603661
  hyper
cggaactccaggcctcccccgccccccaccctcgctgccagccccatgtctccgcccaggatctgggcggagcgtaccgcccaccactgcggcttctaggccagcttagttggggcttctaggccagccctgtgggcagctccctctgagggcggcagagcagggttgtgaaccccatgccccattacccgtaggc

SEQ ID NO: 333830 - DNA, 505 bp, Homo sapiens
  chr9:137299004-137299509
  hyper
cgaggtccatgtgaaaggaggctttgcggtggtttctgctttgcttgcattgagcctcaaactcttcctgtcccgtgagaaggggggatgggatttggaggcctgaggaaggaaggaggggagcttcctgcgcacaagcggcggcaggggtttgcagaagtggaggctgggggctgcctggccaagcgcttaccgccctgcgcagccaggctggctggcaggctgcagcgggaagcgcctgtgggtcctcggcgctgactgcagagctgggtggaggcagcggaaccaaaactgctgtgtcactgcacgctgcagctgttgccagggtgaccgggtgagtttcccacgcttgcccgggcggcagcgtgcgggccggcgggtggggcggaggggtgtgcagagaggccagtggtgtcgtgccacccgatgcccgggggtgtccactcccctctcctgggtcacgtgaccagggcccctgccctgcggtgttgtggggtgtatgtgt

SEQ ID NO: 333831 - DNA, 1313 bp, Homo sapiens
  chr9:137533140-137534453
  hyper
cgccctgatctggctggatgggaagtttagtctccacccagaagaggagctctgaactcctccacgttaaagaaaaagttaggcggggtaaactgcaactttctttttaacccgaagtgatcaaacctcggggcccctctgcactggttcttggagcatggccaggtgcgggcacctggggtgggaacagtggggggaccagggtgggcccctgggctccgaggccgccccaggcccgcccgcctaccggctctcagagaaagaacagggggccgcgcccgccccacgtccgctccgccccgggccagccccttcctcgctgcgactcgcccgctgtccccaccccctcgcccgcggcgcccagtgggaggcgggggctggcctcgccgagcccagcgccgggctctgatttgctgcgggcgttggggatcgacagcctccgcggctgccttccaggagagagggagggaggaaaagggggaaaaaagtgctccgcgccgaaggcgaggtccgcactctccgtccccgcggctggcgcaggacctcactcgagcggagcgcccacggggagcgggtcgcggggcggcggcggcgaggaggaggcgagaaggagttggaggaggaggaggaggaggcgagggcgagctagcccagcggggtcccggccgccccgcgggccaaagtcgagccctcccgcccgtgggcgagcgcgccagccgccccttccagaacagccgccgccacaaagaagaacggggggtgccgaggtccccatgacctcctaaagtggtgcggtccctgctgagtgcgctgcccgggccgtgacccgcgcccctgtgcgtccccgcgcgcctccgagcgcccctgtgcgccccggcccgcgccccgccggcatggacgtccatacccgctggaaagcgcgcagcgcgctccgcccgggcgccccgctgctgcccccgctgctgctgctgctgctgtgggcgccgcctccgagccgcgcaggtaagggcgccccggggcgcggggctgcgggatggggcgcgcgcagcccgggcgccgctgtcatccccgggcgccttcgcccgcagaacttttcttccttggcctgtggaatgcacgggccaagaccacgaatgccatttgctgggggcccccccgagatgacgacacgcagacacaatgcccgcgggcgcgccgccgccccctccccagacgggcgggtcgggtggggctgtcgcgcgagccgaggaaggaccgagggctggatcagcaggaggggttgtccacgaggcgggcaaacttttgtcccaaaa

SEQ ID NO: 333832 - DNA, 150 bp, Homo sapiens
  chr9:137979104-137979254
  hyper
cgaatcaccgcggaaaagggctccagtaggcaggacggcgccgtctctctgccggcaacctttgccccaaagcggaccctctgcggggatcggagagggatgccccggcgtgaggatgggagaagccccgggacgggagggccgcgggcc

SEQ ID NO: 333833 - DNA, 684 bp, Homo sapiens
  chr9:137979545-137980229
  hyper
ggagcccggagggacgcagccgggcaaggcagggcgcagggcgggcggcgcgaggcgcagggcgcggcgggcagaggccacctggccaccttccctggcgcccggggaaggcgcggcgatggccggggcgcgcggggcggcggcggcggcgggcgggcggcggcgggccgagggggcgcggggacacagccaggcgcccctgcccgccgcggtgcccgccgcctgaaggccgcctgggcgcgggagccggtgccagctcggagcgggcgctggaggcagctcgaggcgcgatgtcggtgccgctgctcaagatcggggtcgtgctgagcaccatggccatgatcactaactggatgtcccagacgctgccctcgctggtgggcctcaacaccaccaagctctcggcggccggcggcgggacgctggaccgcagcaccggcgtaagtgcgcccgccggccgccttggcgcggctcctcctcctcctcctcctccccctcctcggtccggagccccgggctgggcgggcgccgcgcgggacccgagtcgcccagggaggcggcggggagcagggcgggcaagggcaggcgtcgcgggccggcgcagcggtggcgaccctgctccccgctcccccagcctgggccactccatctccgcccgcgcgcccctggggcggcgtttccttc

SEQ ID NO: 333834 - DNA, 1554 bp, Homo sapiens
  chr9:138986173-138987727
  hyper
cggctccacgacgagagtccaagaccaaacttcccccagagcctggcagaggggctgggaggtgacctctgacctccgaccccacacgatcccagcaagagaagcaggaaactccgtcggaaggcctcggtccgccctggccgtgcggggtgcgcggcgggccccgggctccgctgagtttcttagagaaggagctggggccccccgacctcagctccgcagaggcacagaagctggcaagaggcagagccccctccccctgcggccggaccccagtttctccccaggctggggcccgagtgggggaggcgcgggaggcggtgacgacccacgaacgggcccacctggaccgggagggcgaggcgcgggcccggctgggccaggcagctgcgcagatgcgccgggaggggtgggtacctccgccctggccccgggccagtcctgccccggcttccccacccggagggctggatcggccagtcgggtccctggggaggccgcgcgggtccccagaaatccagggaaacccagcaggcggcggggagcgccccgggacgcccggagccggggtctccccgaacgcgcggcgcggcgtcccggcccggggtcgcgggcgcctccgccgggaccccccggccccgcccggcccccctccgcgggctcccgaggccggttcccgcgcgcacgcccgggccggcgcggaactcggccgcacccgccccgcgcggccggcactgcggcagggggctcgcgccaagttgggcggccgcggagtttgcgggaagtgcgggcccggcccgtgggacgaccccgcccggcggcgtaacccgggggcggccgcgcgcgccaagttggcggtacctgcgggcgcccggcccggtccggcctgggcagctgcggcgcgccgcccgcggcaggaagtgcttggcgtcccggcgctccggctcccatggactttctccgacctcgcccagcaccggcggccgcaccgcggcgggggcggggcggcggcgggggaggtgcccgcgggccgttaaagggacagcgcgccggccgcgcgcgcgcgcgcactggcagccaggtgggctcccggggtcggggctggggtccgggggccgggagggtccccagtgggggccggcggggcgtggggaaccccgagcgctggggaggggaggcggcagctcctcgcccctcgcgcgtcctccttccggagctgccggcggtcgaccctgcgcgggacacccggcgggagccggacgccgcggcgcagaggacggagctcggcggccgggtcgggaaaggacctggagcgccgccctccgccctccccgggccccggcctcggccggactcgctaagcccgggagagcccccgggcccccctaccccgcccccggcgcgcgccctgcccgcggcagtcgcgtccgcacggtgcagcctccgggatccgggcgggggaagtgcgcgcatccgcagccgccctggacgctcaggcgggccgtgaaagacgaggatacgggagcgcccttgggcgaacgtctgcggggctcc

SEQ ID NO: 333835 - DNA, 1629 bp, Homo sapiens
  chr9:139084516-139086145
  hyper
cccgccaaggggacgccacccagagccctgtgccacccccagccccgcccccgctgcaagggggatggggtcctgggcaagggtcggtcctctctggtcagcgaccccgctgcctctcgggtcgggaccccaacgagcgggaaaaaaaaaaaaagacagaacgcgtgccggggagtatgaccccggccccggctccctgcaccccgggctgcgcagagccctcgccctccgggttccctctgccagcgacgccagcagagccgggcaggtcccatctcggggtctccccgcgcccggacgacccctctcccactgcggccccggccctgcctcacccgccgccccaccagggtccgagaccgggagaccccagccgcggggggggggggacatcagccttcgacctgcccccgcacctcccgctccgcggggagactgggcgccaggaaccccgaattcggggctgacaacccgcaggcgcgcggctaaagcttccaccgtccgcgagaaggcgtctccaccctggaaggaagggggctcggacccagggaggatgaggggtccgccttctccttcccctcacctcgctgcagcccagagcccgcagacagccccgcggcccaaggtctctctccgcccgaggtctgcagctctggctgggcgtcccccggcctggcgggggtccgggtgggggccgcggcccgaagtctgattctgggttcgccctcgcgggtacggagcaggagccggaggaggtcggagcccgcgtttctgtccctggggcgcggggaggtcacagggctccccccaggcccgcgcggggcggaaccgggtacggccagagcggcgcgcgctgcgctccgatcgggaaccggaggccggcgaggtcacgcagacgcgctctccagggcaccgcgggtctcccatcgccgaggccgcctccgcaggccccgctcccctccccgcggcggccagggcggtgtcgggggcggccacgggctccgggattatcgacgcgccgccagctggagcgggcgcgggcggggtccccgcgggaacagtcggcactttattaacctgtcagcgcctaaaaggtcccgggcggcctgggggaggggccggaggccggggcggggtgggggcgcggctgggggatttgcgccccctcctcggggctgccccccgccagcccgcgctgcaccccggcggccgcgccccctccctaaattccgccttcgacctgggcccggagccgctttccccgcgggctgcccgttgcccccggagagttcggggtcgtccctccagcgcccgtccctggccgcggggccgctggctggagtctctgccctggggacaccgactccgcaggccggccccgaacctcgcactttcccgccggcgcgcctttgcccgcactggtcgccgtcgccacgcgccatcctcgcgtccaaccccatctgcttccacgctcggctccagtgttgccgccattcccagtggccgtcggggcccttctcccctcccgggaccgccctggtgatccgcgcgtctctgcgcttcccaggggtgctcggtgcctccttagacacagcgtggctgccagagcctgggggtcgaaggccatgc

SEQ ID NO: 333836 - DNA, 908 bp, Homo sapiens
  chr9:139090420-139091328
  hyper
cgcgggctccctgggacccctgcgaccccgccgacgcgcgctcgtccccccccgagctccgcgatccctccgcctaccggggaaggagacctcagcgtcgctgtcctgcccctcctgaacgctgtccttgtccgacttggagccgccgcgggagcgcttcatgttgcggaaatactgcccccagcgctgccggccggcgtccttcttcagcctcttctccttggcccggcggttctggaaccaaacctgggggcggggcggggtgagcggccgcccggctctgcgggggcccccaaggccgcgggcgggagggaagcaggggcgagcgctgacctgcaccacgcgcatgtccaggcccgtctcggacgagagctgctcgcgcacgtggcgcgccggcttgggcgaggtgttgtaagcgctcttcagcgtctccagctgcttggcggtgatggtcgtgcgcggccgcttggccgtggcctcggcctctgcgcggcgggcgagcggtgaggcgcggcagcccctccggccccggccggacccccagccctcccaccccggccggcgcggggacgtcggggcctcaggtgcccacccccatcccgccccacaggcttctcggaaggcgcgggcgctgggagcgattggcaaaaacgggcagcacccgggctggggtggagggggcgccggcggagggcgggttctgccgcgggggcgggggcggcgccttccctaaaatcgcacctccacggcgcccccgccttcagccttggctcccttctccaagcaccctgatttccccgcgggctcccctttattctaagggtgtgggtatggcccagccttcgcggccaagaatttagggcgataattccgaccaggggcgaaaagccgcacacttcggaccgaac

SEQ ID NO: 333837 - DNA, 540 bp, Homo sapiens
  chr9:139093549-139094089
  hyper
cgacctccggcggaaaaaactgggctgcgcctccccacgcagtggcgggaaaccggcgatgaatgcgccccgcatccggcaaaaccgcagctccgggtgcggagcgtcgaggacccgctgcgcgcccggggtccccatcgtgggcagcgatcgcaggcgaggacccggctcggagcggggcggcccgacaggccgacacagcgcggattcagcaccgcggaccggacagcgcctcggccgcagctcgccgccggcgcccgcgtcgggcaaaagccgccccagcccaccccgcgccgcgcccgcgaccccagccttacgctgcatggcgactccagccctggcgggggctcctgtgtcagggatggcggggtcggcggagcctggacgccagcccgcccgctccggccagctctcccgagcgcgggcgcgcagtcctccttcctccctccctctctccgccccccagcccccgcggccaacccctcccaggaaccgtcgaaaaataaataaataagtagggaaccgcgagcccccacagcc

SEQ ID NO: 333838 - DNA, 311 bp, Homo sapiens; identical to SEQ ID NO: 223726
  chr9:139096714-139097025
  hyper

SEQ ID NO: 333839 - DNA, 357 bp, Homo sapiens
  chr9:139401232-139401589
  hyper
cgggcgtcgcagggattggacaggcactcgttgacatccccctcacagcgctcacccacgaagcccggcgggcaggtgcagctgtagccgcccacctggtccacgcaggtgccgttgttaaagcacttggggctccgggacacggggtcaacggggggattgcagtcgtccacgttgatctcacagtgcacacctgcggggccaggtttcgtcagtggcccaagcccgccacaccccggccctgccgtgccgcgtgtccgtcccggaagacgagcgctcaggtctggggctgcacggacactcgggagaggcaggtgtcaagggtgccgtggagacgcccttcccactgggaccccc

SEQ ID NO: 333840 - DNA, 213 bp, Homo sapiens
  chr9:139440690-139440903
  hyper
ggtcgggagcgggcgcctgggactacttctcgtttgaaagttttcagaggccaaaagtttgagccggggctgcggaaggatccggctctggcggttgccgcgctcggcgacaactggcgactgaaatttgcatgtgaataagcggaggagcccggggcggaatggggagggcgaggccgcggacagccgtgtgcaccgtgcgctgggccgggc

SEQ ID NO: 333841 - DNA, 133 bp, Homo sapiens
  chr9:139703274-139703407
  hyper
cgccacacattctcgcctttttttttaaaagaagcgtttgtaagagacgtatctagaaaagctccagaaggcacgggctgacttgcgactgtaggagacatcccatttctcgtaggaaggaggagtcatttac

SEQ ID NO: 333842 - DNA, 292 bp, Homo sapiens; identical to SEQ ID NO: 234510
  chr9:139739086-139739378
  hyper

SEQ ID NO: 333843 - DNA, 1026 bp, Homo sapiens; identical to SEQ ID NO: 234511
  chr9:139740765-139741791
  hyper

SEQ ID NO: 333844 - DNA, 517 bp, Homo sapiens
  chr9:139948373-139948890
  hyper
acagcagtaggaggccggcgaggcccgcggcggccagcagcagcggcggcagcagtgaccgcaccttcccggccatgggcgggcgggcgcgcgggaggacgatgcgtggacccggagagtgcggggagccggaggcggaggcgggcggggccgcgggaccgcggggtaggggccccggggcgggacgaggggcgggaggccgggcgggcccgcccatcaccggccacgcccacgggcggacaggtttcgcctccgctcccaagcttccgccgtccggcccgcgcaggtgagagacgcgggcgcggctgagtcaccagcaccgccccccggctcccgggtctgagcccgggcgccccgcggctatggcccaccttccccttcccgcccactcagcaaggggatcccccggccgtggaggcaggagacctggcgtgggggtgggcgggcgaggctggctcggagggtcctgtgctggagagccgcgcttttcccgggcccgggaaaggaggccagactc

SEQ ID NO: 333845 - DNA, 1192 bp, Homo sapiens
  chr9:140023880-140025072
  hyper
cgcccaggccccgctcggagccgcaggctgggagggcggcgggcgcagcgaccccgggcctcggtccgcccggcgcggtcctcaccctgcagcacaagagccgccggcagttcttgctgttgccgtagctctcgccaaagctctgcgtcaccgaaatgaagtcctgatgaagcagcggcggcggatgcgtggaagggggcctcgaggaaccaccggcggcatcaggagacccggtcctgtaaaagactgagagctccgcctctccgatactcgcgggcagccattgcggcgcacagaaccgtccgcgtgtgagcagcgcgcacgcgcacgcaatgcgcctcaaccccgcagcctatgcgcctgcactgagagctcacggcttgcggcgcctgcgtctaccccgcgcgcagtcgccacggcaacagggcgggccttggttctgcttcgggcgtggtcggtgcatggtcctccagcactgttcgccccgcgggtctggtcctgggttcctttcgcctcctgtcgtcggacggcaccggctttgcccacggcctcgcggggagacgcagacacccgggacccggggaggcgcccgggcgccgccgccatgttgtcagggagcgcccgctcccagctcttcggttccgggacccgcggcgcggggatggggctgggccgcccttggtagccgtcctgggctgggggccaccctggccgcgtggtcaccggcaagaagcccagggcctcacccgggcgcggcgtcgcgggggccgagggaaggaccggaccctcccgaggtcgcggacccggccggctggggcgaggctggggtggcccctaccccgagctaagctggccgcgccgcatctcaccgtcgccggggcccgagcgctgcgcctggaccggcgccgagcgagggggccaagcggccggctggacccacagtccccgcgccataggcgggtcggggctttcagactcggctccagccctcaaacctggtagccttggaggtcagcttgagatgactgcgcttcctgcgcgcgttgtcctccccagaaacgctcaaaatggcaaagcggcgtccgtggccgccggaggcctgtgttctcccctgccgaacctcacgcgcggcccctccctcattttcttctggccaggctgccccctgccccttgggcgattctgctgcgtc

SEQ ID NO: 333846 - DNA, 931 bp, Homo sapiens
  chr9:140196486-140197417
  hyper
cggcgtccccgggccccgcacgccgcctctgggcgctccgggcgctcggggccgggggtcgccgccgcggggaccccgccgcatccagccgcgcccgggtgggcgacgggggcgcgcgctcggctcgcgggggccgggcccggccggggacggcggcgccgcgcggtcccggtccctactcggttcggctgcggctcccacgcggtcccaaggcgcctccccacgcgccgcagcactagctcgcccgccgcgccggggcgccttttaccttctttatatttgcataacaatggcagcccgtgacgcgcgcgccggcggccccgggattgggccgcgcccacatgggggcggggcgtgggcggtgccgtgcgcaggggtccgggggcgggtcccggcggcggcgcgcttcgcggcagggggcgctggtcgccggcagcgcctgggcgggggaggccaggtggccgccgggggggtccagctccgtcgccgccgccgtccgcgcgccccccgggcgctccgcgtctctttgcggtcgtcccgccccttctccctccggccacccggggaattccaagctccctcagcagccagacccaggccttgcccggtacccgagcgcgaccgccaggtggccccgagggcggcctctcccgggcagggggttcgcgggcatctcaggcccgtggcgaaggagagacccctctgagcggagaggcgcgcggcgaccccggccagcccgcgcctccgggctcaccgtccacgcgggtggcaactccaggccctgacgtggggccttcagccacgcgggtccttcccgcgcgcgggcagcctcatggccgccggctcagcctatgtgtgccccaaccgtactgatgcgaggggcctccggccggccaccgcggcttctatcgcctggcggtgaagggggttc

SEQ ID NO: 333847 - DNA, 600 bp, Homo sapiens
  chr9:140703858-140704458
  hyper
cggcggccctgcgccctcggagggaggcggggcagagctcaaatggaagcagagcctgcggggtggagaccgcacccctgcaggggtctgccttgggccccgagcctcctcagccgccgcagcaaagcggtcagtcaggcggggcttggtttatggcatctgggaagatcgctgaccattcccgaggggaaggaggctgcagccggcgctcccagacaccagcagagcagaacacacttcaggaacgtgaaacgctcacgtgcttttaatccagcaatcctgcctctgaggatgcatccttgagaaataatgtagaaaatgaaaagcactaaaatatttgctggcattgtattccagaaatataccaacagacataaaccaagtgttcagtaaaggaaaggtccggaagctgagtgactgtgggggaagggtccggaggcggttccgatgccgccctgtgtggaccgtcggtgatgggtccggaggcggttccgatgccgccctgtgtggaccgtcggtgatgggtccggaggtggttccgatgccgccctgtgtggaccgtcggtgatgggtccggaggcggttccgatgctgcccctc

SEQ ID NO: 333848 - DNA, 1389 bp, Homo sapiens
  chr10:734738-736127
  hyper
cgagaggaccaggacggcaaggccggagcccggcccggggggaggttgacgattccgcccagccctccccgcgcagcgcccgcgaacaatgggggtgggatcccccgggccgcgccaggaccgctgcacggcctgagccaccagagatcgaacccggggtccaacgacaagtttcgcattgaaatctggccgggcgttccaggccgaacccgccagcgaggaggtggcgcgcaccgcgctgctgcaccaaggacgccgcggctccagcgcagagcgcacgggaaggccgatcccgccgggcccgctgcatcctgcgtccccgcgcggcgcccaggccccacagacacccccagggcgcggggggatcgcggccccacaaacatcccagggcgcgggggatcgcggccccacaaacacccccagagcgcgaggggatcccaggccccacagacacccccagggcgcggggaatcgcggccccacaaacgtccccagagcgcgggggatcgcggcctcacaaacgtccctagggcgcggggtctgggggtccgggggacgcgcacgctccgggctggggtcgcacctccccctccgggcccggcccccgccccgccgcaggccccgcgcccccagccctccgcgcgcggccctccccggtgacagcgcggcccggcccggggcgggggcccggttaccttccgacagctccagctccagctcggccaggcgcgcccgcacctccaggggcagcgccatgccctccaggctgcggtccgccatgctccgcgggcgccgcgccccgcacggcctcctctttgttcgcaggcggaggtctcggcggctcctcgcgcccggcggaaccgcaccgaggaggaggcggcggcgcgggcgcgggaggcgggcggcgggcgcgcagggacctccctcccctcggcgcctcctcagcgcggccccgccacggccgcctcgcgcgcccccgcgccccacggtccccggcccgccccgcgcgcgctcggcccctccccgcaggcgctgcggacccggacccggccctgctgctctcggccccggcccggcgggagcgtctctgcgcgcgcgcgtcacggggccgcgggggcagggcgcgcgcgcgcggggcgcgaggacgcgcaggagcgggagcgcgcgggggggcgcgcggccgcgtcggcgaagcgcgcgctcccgggggcgcgctcgggggcgggttgggggctcggggcccgcggggcggggcggggcggggcggtcttgtctgtcctgggctctgcgcgtccagcggagcctgcgggcccggccccagagcctggtccacccggctccctgcgaaaatcacgtcctggagccgcagcttgacgtctgcgcgaaaac

SEQ ID NO: 333849 - DNA, 225 bp, Homo sapiens
  chr10:1651074-1651299
  hyper
cgcattgccggccctctgtcttgagcccctgcagggtgccggatggccatgccctattgtgcgtccctcttgcagcaacaccacattaaaccgtggcatcctcttgaggctgcccctgcggattgcacggctaatgcagaaggctagaaagaaggacccgaaacgcccaccaaactataaattaaggcgaagatctcaggagcaatgtgcctggtgcccggcgtc

SEQ ID NO: 333850 - DNA, 1428 bp, Homo sapiens
  chr10:1778724-1780152
  hyper
caatgtttacaaatcgacgggcaccacattgagtaaaaactgccagccaatttggagaggcgatcgcagggcttcgcctatcccttcctccgggacagtttggatgggagtagctggcgcgagggctcgttcccccgtttttgggtaattcctttggcactgggagacgagatggcctccggagggtggaaggcagtgccagcccggccggccactggggactgcggggcccggagacgcgcggggtccccggggagctcctcgccgccctcgccccacttcgtccgggtccctcaaacatgtcgcagcgtggctgctcactgtcccctctgggcaagaggaggccccagacatttccacgggatctgaactcccgagcgccctgcacggagcagccatcccgccagcaccccaaagtgaagctgctcacaacggacaagcccggagaccccatgagaggccggggtggagaagccgggggtgaaggggggcaggggccggcgcgccacgcggtccttacctttccgcttggacctccgcctcctcctcctcttggacttgcatttgagttgactgctcagccctccagaccctctgccgctccccaggaccgaggccatggccgagacccaggcgcggagcccagagccgcctccctcctgcacctgcacctgcctccttcccggcagccgccgccgccgctgctgcgaagcttgaggttgcaaacccgggagcggctcacttttcaggactgagcaggaaagcgcgctccgtctctctgtctctcgaattgttctctatgacttgctcccactgggctgggggcctcggctgggcgcctggagcgagctgctccctggtcagggagggcggggaagggcgcgcggcgtcctgagtgctccgagcttcccgcgggctctgcctcctgctctgggctcccagcgcagggaggctacttttgcgcctctgctagttgtttggcaccagccactttgaagccaatcacgcagggagcttgtctatttgctgcagcagcgtctaattagatccaatcacaactgctttctggctctgacatcagcagcagcaccagccgcaccgccgcctggccgcttgcaaactcagctcccgtttggacggtgaagctcccaggaccggcggctggagggaggctgctcccggggaacaaggacgcggcgcgggtgcgtctgggagagaccgggggagcctccaggagggaccctgcccgggaggacgaggcctcctgccgcagcctcgcggacagctcagctcgccctgctcagaaagacacagggacgggtttttccaaccaacagtttttaactagtcaattcattaccatgctccttgtgtcaagggggggaaatacctctttcagaaatgcagagaccgcacttcctcagaaac

SEQ ID NO: 333851 - DNA, 2345 bp, Homo sapiens
  chr10:3109010-3111355
  hyper
ctgggggcgggggtcgaggaagccgagccccgaggctcccagcgccgccccaggaggaatcttgcgggccactagaagctgtgcgcgcggccgggctcggcccccacaacggcccgagcggccgggcctgccgcgagcctccgcgtccaggtggggtctccgcgcccccattccacccctccccgccatcggcgctccccgcaactgcggggtttccacccgccccggcgctcgcgcccactcacggtctccctcgcccccccgggagatgctcccggcgttctatcccgccccgccctggcgcgccccgcaaacgatgtgaccccggccccctgcggtctcccctcctccggacgctgcccctgccccacctgtggcgctcccgtcatctctagagcccccaaccagagtcctccagcccacccgcgaggctcgcgcacctgcgatgcggccccactagcagggacccgcccacctgtggcgctacccctgcctctgccgcctcccgcaccgctagcgcggcccccacctacgacgacccccgcgtagatgctcctgcccacacccgccccagccccggcccctgcccctagccgcgcccgcgccccctcccccgcagcccctcccatacgctcgggccccgcccgtcaccgcccattggcgctggggccgggcgggggcgcgggcggggcggcggttccgagtcaggcgcgcgcgggcagggtccccattgcctgctgcgcacccggacgtgcggctcccctcggcctcctcgccatggacgcggacgactcccgggcccccaagggctccttgcggaagttcctggagcacctctccggggccggcaaggccatcggcgtgctgaccagcggcggggatgctcaaggtgcgcgcccccctcccggcggcgagggagggacggacggacggagctggggagaaccgggcgaaggcgatggggtgaccggagagaagaggggggaagcgatgggggggacccggggaaaggtggcgaagcgatggggagaaccggggagaagagcggggaagcgatggggagaaccgggaagaagcccgcgcccggaagcggcaggggtacctgcggggcggcatgagccggcgaggcagccccggggtccttgcccggtggggcgggggaggaagggacatggcggtaggaacctccatccggaagatcagtgagttttccaccttcggttttgttttaaatggaacctggcagagggagtcgcctgaagcgccctcgggggtcgttctgcctctgagctgtaggacggggccgggcgtcccctccgaagcgtgggtacagcgcgatcacttcctaagtgcccccccgccccccaactccgccgcacgccaccccctagaatgtcgaggaagaaacggctgggtccccgcgcgcctcctgtcgcctcgtgccctgcgcggcgtgggcggggtcctggctgctgcaatgcgggacgcggcgggggtgcgcggggttcccgcctggcgtctccagggcggtccggcagcccctcgcgtttccgctgggagatttttaaaaagggtttcctgcgctcgcatgtgctgtcgccttccggctcgtgacaaaaacgaaaaccaaaatgggtcccaggccctccccgccagcctccgcagacgggaaggatcaggaagcggggactccgggatgtcagcggcgccgcggcgcgggctccgggcttccctgccctgcaatgtggaagctgctctctaggaggggcccgaggctgggcccacggacgcgggcgcgccgggaggatatttaacattgaagagcggaaggtggcggagactcggcgcgccccaggccccgggtgcacgtgggggcgccggtgcccggatgatggagtgtcccgatccgtgcaatccctggcgggtagatcggcgcttcccaggcgaacgcaacctgggagccttagcgatcgcgcaggctggagacgcggcgcgccccgagctgggttttgatttttgttttcccggttcctcctgccgcagatgcgtggaaaggcccggatggcggatttcctcccgtttcggggccgcgcactgcacagggttggagcggggatgcaccccctgcccactgcgcgggtgaccttcccttcgcccttgagcgcgcggggcgggcgcgggtgccgcaggttgaggcgctgtgggcgccgccccgcccgccacgagcgcctacgtgatgcccggcccgtcgtctccacgagccccggccccgacacccgtgcgccgcgcgctccccaggcccgcagcgcagcctccccaggcccagcgccccccgcgggagaccc

SEQ ID NO: 333852 - DNA, 355 bp, Homo sapiens
  chr10:6018609-6018964
  hyper
cgggacaaaacccctaggaatcgctcattccgtcctccctgccgagatcagagctccgcgacccgctttcttctcgaatacaccaagcgatcacagatctcttccccctttttctgcgagtgtagactccaggctggcccccactccccacccccatccggtcccgaccgcctctgctggtttcctgatcgcttaagaattggaagttgtttccaggtccccaggtgtgcaacttgcccgacgcgtttccccctgggacacagctcctccccaccctcccagctcccactgacataatttacttttgcctgggagtcgggaggagtagtttctcccggacccctccgaggaccgc

SEQ ID NO: 333853 - DNA, 143 bp, Homo sapiens
  chr10:6246027-6246170
  hyper
gcgcacgcaccccccggtgctcggaattggctggcagtaccctgccccgccccgccggtcgccgcccccgccaccagcgatcgcttgggagagggttacctcgagctccacctcagctgcggagcgccgccgcggaaaagggc

SEQ ID NO: 333854 - DNA, 939 bp, Homo sapiens
  chr10:6621854-6622793
  hyper
cgcaggccccctttcgttcaggtgagaaggaaaagggagaagaaaggaggaagcgcccccaggccggcggcccccacccggctaaggtcgccagcatcccgcatcccgtgcgacctgcgtcccagaaacccagcggggaaattcttcccggtgcgctcttgcgcccgcttggttccatttcctactccgcctgctcacccggcagccctcaccccttcccggaggctctccgaggggcccgggtagcccttctcgccacgggtctcggcccctccagcccgctccctcccggcggcggcgcggggcgcggggccctacctggagcgagcacggcgccgctgctgcccggtggcgctgggactgcgcggggactgcgcggggactgcgcggggactggcggggctggcggggctggcggggctggcggggctggcgggcccggcgcactgcgggtgcgcctagaaggcggtgcccgccagggggcgctcgccagcctccccgccagcccggcctcccgggacccggcacctctagccagggacgcgcgctcggtcccccgccgtgcgcccccggtcccgcgcccaggctcccgcccctggcctccttaccagccacttgtcgcccagctgcgaactggagcgggaggcggcggccggagggcccaggacagccccgggagggcggcgaggcggagcaggagcgccccggctccggccacattctcagagtcaggaaaaggggcgagaggccacatgtctccctctcgcccaactgaaaacgaaacggcgctccagcagattgggtggaaagagctgggtctcttttctctgtttttcacgctagaaagggcttgtaaacattgttccttttaaaatgacctaccccaggcatttgtttgggcacacttctgtcctggggtcatcgttcctaggtggcttc

SEQ ID NO: 333855 - DNA, 4416 bp, Homo sapiens
  chr10:7449896-7454312
  hyper
cggtggtcggccgggctcctgcccagtctcggctcctccctcctccccaccagaaggaaaaacttgggcccttcgagaaccctgtggaatgttctttgtaatcaactgtacatccgcttccacggcacggcctcgtgcaaaatcgcgggtttcggggccttggagcaaattgcgcttgtcagcggcgacgtcaggaggacaaggggaggggttcgcggctgaaactgcagcttcgcagcacagagccattttaggctgctccccacctcgcggggcccatgggaaagccggccccgggagggcgcgcccaaacgcaggctggaggagccacggacgcgtcctggccggcgtgtcgccatcgttcagcctcgctgcccaggtgggaggggtcacctgccgcggggtctccaagccagtgccgcttgctcccggcccccacccactgacagcacggcgtccgagtgaccctgtctagcctcgttctgcgctcctgcaaaccacgttgctgcgctaactacaaacctggccaacatgtctttgtaaccctatcatttaaaaacgcttccaggcacctggccgctgccagatcaggttcgcgggcccggaggaggtcctcccacctgcccccgccagccccggggaccgtgcgcggcctccgtgtggcccccgcccacgaggtccctcgggcaggaaccgccgcgcgacctctgttcagcggccgcgtcctggccacgggcgacccctgtcgggaaccctgttcccggctaagctgcgttcccgcattccggtggctctcacccgagctcgcgtttgctggctttccctctggctcctctgcctgaccccgattttgtctccgaactccactcccagatcctccccgccctggaacgccgacctttcccccgcacttcgccgcccactcacatcccccggcgactgcccggcctccatgcccgccaagacaagaagatgcccctctccgatgcgccgagagggttcctaagccgagcaagggacaatttcttccccaaacgctgtccccatcccccaccttccctagagcgcgaaacccaaaagtaaggaaggcaacccctcgcctcgaccctacgtgcttgtctcccagagccgcgcgctcccgcccttctgccccaccccaccaccaccaccaccactttggtcttctccaagcttcggtcccggtcccccacctcccaccccagagcggcgtggaggaaagcaggagcccactattaagtgcagcgcgccccctgcacacacgaaatccggctggcgtctgcagcccgattgcacccaatacccgggacagttagtccttttaataagcacctcctcgccccacctactcggggatctacccgcgcaggatccagcacacacaaggcgagagctagctcgtctcctagaaagacaaaataaatcactccctctgccctcatgtactttacaccacgtgtccgcagtttgtcacgtcaaatcatggcagggtctggttccaagacgcacacacacattcggggtggttctctttgacacacacacccaaaaaaactgcgcacacgcaggcctgcacactaatccacaggcacacacgacagttgcgtttcggtgccctggtccgggccaggggcacttctccatccctttcccccctagcaatggacttgacacacagactctaaccacggaaaaaaaaaaccggacagcccattccttctttttttccccacttaattcgctaaagcgcttcctggggtagccaaagagagtcgaaactaaggggtggaaacttcagctgggttttttcccacctcaaaacctttattttcagtttttaaaagccaccttagcccgccatattgaaactggcacggtttctaaagactccttccccgcagttgtggcgcttccaagaaaacacgagtacggatcaggctctggatgagtgtccggccaccgagaatcagccacttcccaccctccaggatcccccagctccctccagccccttcccaccgcccctggtcaaaatcaataaatacatctcgcagttcctacagttgcattttggcggatttctgcaaaacatacacacacatacacatacccacgcacgcatattaaaaaataaactccagaaccagctcaagtcagcaattttgaaagggggtcgaataagaggagacaaccggaaagcccctaagtgacaggatattactttaaagagaaaataatgaacaaaaagaccatcctcgctggagcacgctccaaaactactactgccaattttatttcagttgctcaggcaaatgtttccaagggagcgattccgaatgtctgcacgatttttacccccatgccggtctccgattccccgtcctcaccatctttttctcccacccaaaccaaaagaaaggggagaccccagcgcggaggagacgcgggagcgcggggtaggtagcagcggcggctgcgtcgctaaaatgagtgcagaaacgaggaaggtgggcggcgggaggggacaggctgcgcccggggaaggaggacactttgcaactccggacggactcccgcacggctcggcttttccgagcccggagacgcaggcgaaggggacccgggaagcaaaaatgacaacctggagcgcacagaggagtttgaagcttcgctcaagtgcagtcgctttcttctcctgcccttctctttcgctcccctgcaccctccccagccttcccccacccgccacctccaaccccagctccctcaggcttccttcctttttttttttttccttttttttcctaggctggaaaaagcccctgaccagcgcactcaacctgcgggccgaagggctgctctccggccagcctgggcgccggggacagcagccggcgcggcgtcctacctggtgaagttcgtcctgccctcggcgtggacccaggccccggtcgccgcccgggagggcaccggcctcgctcgcttgctcgctcgcccgcccttgcccgctcgctccccgcccgccgcctccctcgcgcgcccgctccggtcctccggctcccactacagctcattccaatatggcatcctctctgtgcgcatgctcggcgctcttttttttttttttttttttttttttttaagattttgtgtgtgtgtgtatgtgtgtgcgtgcgcgtgcagcgaactccttcaacgaccttttccagcgcttgcaaaatttcttaagccaattagcctgcgggacgtgatcggctccttccccagccagctccgcgccattccctgcgcctaagcaggcgggcacccccaggaccctgggaccttccacgcccacgcggcctcctccccaccgcgctccccttcctcctttttgtgagctccctccatacatgatctgcagaaagttcccatcgcgggcgtttccgcacacccctccgcaaggacaactgggcaaactcccgtttccctggctgcggttcgtgagctgggtttccaatggctcagtcgaccgtgtgcacaaacttgcgctttatccgccggggatcgctgggagcggagataaattcaatccccagggcaatcttggccccgcccgccccaccccatcctgtgcttaaatagagcctttcttgaagctgcgaacatttccaggccccttgggcagggctggaggggccgaggagagctattcgagggaaaggtgccccgaggggcaggaaattaagttggggctgcccgggcgagctgccaggtagccgtgctcgccacggcgtctcatggggcacctagctagtggcgggcctcatagggcgggaaaagaatcgtcgctcacaccccagcaaaacgtggccctcgacggtccgttggagagccccggcggccgtgagccccgggcagggctggacgtctgcggagccctcgggcactttgtcccgggcgcctggggaggaacgcggagctcccagggccttaggtgcaacggctgcgcagagcccaaacgaaatgtccccagtgcggaaaagccggtgacgccctggtagcaagaccaagagcttccgaagaacgctgcgcccttaactagggggcctcgcagagatgcctgtgtgggcctgcattgtatatttctgcgaaatagcgaatggacacgtttgctcagggtttttatggttgccaaagggggtaaaattacccagtcccccaaatctgtgtcccatgaatccctctcatagtacccctctccagggggccaagaggtcctccaggtccccgtgggttcgcagctccacccgcccttcctcgccctgcatccctaaggagaggtgtccgctctgaagggctaggggccagccatggagtgaggggaccggggctgaccacgcgcggcacagacagagg

SEQ ID NO: 333856 - DNA, 671 bp, Homo sapiens
  chr10:7708278-7708949
  hyper
cggtaggtagtcgctaaatgggaaagtcgtgttctcccggttttcaggtgggaaaagctgaggctcccaggagtctagaactcctctcatattgcctttctccctggatcaactgggaatgatgataacagcagactgccccccacgcgtgataaggaaaaaaccttgtaattataataacttttggagctacctcagaaattaacaacgacgaacagaaatctgcgcaatcaacaggagccaagaagaaaaactcggctccgcaggacaagtcccgggcacagttctgcaggaagcctcaggccagatcaggcaccgcggctcacacagaggtgacgcacgagtgacccacagagagggacccctgggcctctggtgggggcctgggagacggtcgaagggggcccgggcagaagctccgcggccgggccggcggagggaagggggcggccgcgcccgggacccggctcccctcggctccacttacctgctccgaagagtggccccagctctgcgcctcttcctgcgaccccacacacagggacagccccaggcacagccccagcagcaggagcatggcggggcgagggcgcgggacgctcggggacccggcgggacacgctttgcagcgcccagggctccagccactgcgggacgctctcggggccgcc

SEQ ID NO: 333857 - DNA, 42 bp, Homo sapiens
  chr10:7729428-7729470
  hyper
cgagcacctcacgccatctagcggagacacactttgaagacc

SEQ ID NO: 333858 - DNA, 128 bp, Homo sapiens
  chr10:8075813-8075941
  hyper
cgccggcttcctttccctcccaactcccctgctctaggccactgcctctggggtggggcgccgagaaggaggccctggggacctacccccggctcttctgagccaagtgagttcccagctggcagcca

SEQ ID NO: 333859 - DNA, 577 bp, Homo sapiens
  chr10:8075971-8076548
  hyper
ccacgctcttggagtaggaccaggatgggatcgccctgggcacgtggtatcccctccgcctgcggggtcacgacagcctaggcgacggacagtcccgggcttagggagggaggctgatcccgggagctctcaggagtccttccacctgccacctaggagcccagttcgcatctctacagcgccacacatctaggccagcccagctccggtcccagtcggtctctgcggagccccagccagctccgcgtcttggtcctggcttgcgggtggcacacagacaagcgaccggggtggcccggagaggtcgtgcccctggctgcgagacgacgcgacagcagggcgctccgggggccgcagcggcgtcgaaggcggtccctgggggcggggctctggcacgagggggaccctcccgggtcaagttcacagaggcggaggggcctgggctgcgccccagagccccagggggtcctctgctcccataaaaaacaaagacgggggcggcggagggtgtggaaggaaagaaattgaaaagggagtgcgggcgactgagggaagctggaggggaaataggggcctc

SEQ ID NO: 333860 - DNA, 1161 bp, Homo sapiens
  chr10:8085011-8086172
  hyper
cgagaaaagcaagtgcccgcgtcagcagaaaaggaacgaggagcgaggccgccagatcgacgggaaacaggcggagagagggtcgtcggcgctcagggccggggtggcccgggggacggaggagagataggagagcccgccctgggtctcagagggtgctgttgcgtgctgcaggttctaagggaaaagggctttcccctggcaggagagccaaaggcggggaagggagaaggaggggcgggagaatgaggaccagaagccggagaagggaggctggaggaagacgcaagtggcccctccgacctagtggacggcgagttgaggtacagttaatgcccgggccaaggagacaactgtcgccgccttggtgacggatgccccctccctgggcccccgccctagtccccatggggggagcagcgcgccagaagggagtaggcgttgttgggaccctctgggggtctggaatgccagcgacacttctcttcccagccgcaggggccttcctgggacaggccaggtagaccccacccccccgaccccgttcgtcagggcaacaggttgggtgcaagctgtcaagagatggccttctccctgggtcctcaaaacgcgccaagaacgtggctctgccacttggtggcggaaggcgggaggcacagggcaggaaggtggaggaggggctgcattcgtgacgacgggggagcagagagggaaggacttagggactccccagagggcagacagacctggccagcttggcaaatcataaatccctctccctggaccctcggcctaaacctacccccagggtgtgcagcggaggcgcacaggggttggctgacgggctggggtgcgcctgggtggaggctggtttggggttctggcgtctggaggcaggccatggaaccagaggagagggcaggagggcccaccgcgcagagctgcggcccggctcctagagtggcgcccccagcctgggcatcgcgctcaactgctctctgaaccccatgtccacgagggttcgccctcaaaccacctccacctctgtccacaccccagttctcccgactccagggaccaagtgcctcggcctccccgccacgaaatggccacccccaagccctttgccccatgaaaatagcaacttcttcctacccaacc

SEQ ID NO: 333861 - DNA, 1329 bp, Homo sapiens
  chr10:8091808-8093137
  hyper
cgggtgacagaaatggggacccggggctaaggaggaaggaggccagttttcacggcccggtcctccggcttctctcctttgaacaggcgctggggacctccgcggcggccacagctggacgcgcgccgcgaaaggcgcggcggtcccgcgggcgcccggcgtgggctagagaggccggccctggcctggctcaggtcgccctcgccccgctttcatcttgccccagtcgccctttacaattcccacaccgaaggcaaagcaagcaaggaaagaagccggcgcctccccaagcggaccctcccttccgcgcagcctcggccactcttccagagcgccccggtgcgtactgcggcgggcgcagggaatcgaattaaacgtctctgggcggttattgtctttctctaattgctccaacaatggcctctattaaaatggagacacccaattaaaggccccgccgggccgctctcggctgccggcaaagctctggcccccggcctgcgacgtgcagaccgcggggccgcggacccggctggtgcggggtactggcgccggcctcgacacctttggcctccacttcctccccagactcacagcgacagcggccgcttcacaccgtttttattgaccgatcgcagcccagcaagattgatcgagctggaatgggaagggacttctcctcccccaggcccagctcgccagggcctcgggccgtgctgcagtttctggcctttggtgtcgctccccgccccccagccccgcagattcccggcttcttttctgtctgcgcggccgggaccgcccaggcaggcgccggggctccggggctccggggggagggactcggcggctcggctcggctccgcttctttcttctgcctgcaaatatttgctgcctcgctggaaatccgacgatttcgcgcgcgctctgcttgcaaagtctttaagtaaacacgctcaaatgaccgccccgggcggcccgaggcacgctctctccccctccgcgggattagtaactttaggacttcgaccccggggctccgctttgcctgttacccaggtcgggcagcgcgcgggcgcccggggccgcttctcccggcacctcggccccgcggagctcgcctggaagcgccggttgcctggctctggtgggtggcccggccgcgagcatctccgcgccctgggtctgtagccctagggctgagccccagaaagccgcgcctccgctctgcgccatggcctctgctttctgtacccgactgggtttccccacttccactgggacagggtctcttcgcccctgggagggcgggtgggagggacttgcac

SEQ ID NO: 333862 - DNA, 884 bp, Homo sapiens
  chr10:8093767-8094651
  hyper
cggcgaggcgggtcaggccggcgcctggcctggcccggacccccgcagcccggctctccgcctcaggccacgcgccgcagcctctccagcctcgctcccttcccccttccttccccgtgggtcccgaggccgacctcggccctccctcctcggcatccccctcccatccttttcccttccccgctgccctgtgctccgggctccggggctgggcccgtgacgtcaaacccagtgtggcgtcggcgagactggccggcgcgggccatcaaaagagcaacgtcctctctcccaattacccactgtcagtccgggaactggggcgggccggctgggaattaaatgctaaataccccctaccggctggctccattacccgggacatccagccccaggccccccacccctctctgccagcctcaaaccacccagaccaagaagggccttcgagatcttttatttttctaaaggtgggggttgcccttctccatccccggccagtccgacttggtgctcgcgattgaatttaaacgaataatccctacttccccatccaaaattagcggataggcgcccttgcaccggaaggcctcctcaccagtcttttctttttgtctttgaaataattcttagcctcagaagtcagcattttcaagacctggcatccgcagcgtttctgacgcggggacttctctcttcggctctgaggtctccgcgcgcagaacccatggcagcttttggtcttacgcgtggctgtgagctgggctcacgctgcgtggcgcatccacccctcgattgacgcgcggagaagcatttttcattttttctttcagcttgtatccttaaatcttaatcccgggcttcttagcaaaaatgcgtgtgcattc

SEQ ID NO: 333863 - DNA, 973 bp, Homo sapiens
  chr10:8095120-8096093
  hyper
cgcatgaaaggaatccttcagaacttactttcagggacggcttcttctatctcgaatttttgcatttgtagggaattttatggggtagaggagcgaagagggaacaatgtctccaattcaaataaaaccccaaattaagctctcagccccatcggtgggatagcctgcgggggaacccactccctctcctggcagcattgccctgggggcgagcagagagtggatttggagtcttcttttcccgcctgacccctgctcgcccgagcagcattttcgggccagcggctgcagccacccgggcgccgctaggggatgcagtggctcaaaggaccgagcgggcggtgcaggttggaacccgcggggcggaccaatcgcggctcggccacagcctcgcccgctgattggtccctccaggccccgcccccgctcgccccgcccctctcgctggggcgcctcggagccgcgtgccctccgccccggggtgcccattgcgcagagcgtggcctggagacccgcgagccggggaaggtcgccgtggagtcccgaccagaggccggggttggggtcggtgcagaccgagggctggtttccttgactgtgggagaaacgccgggagccggagtaagtagggctccgggcggggcgaaaggaaaagttgggtccctagagtgaagaccgagttctttctgtccgtctacactgagcgtactcggggaatgagttagagccagtctcttcctcccctccccccttctcatccctcactgttgccactcaagtcaaaagcacacattgattacaaatattaggtctggaaagggcagctgcaacagctgaagcgtgttcactctgggggcttgagagcgcagaaggctcgggaaagaggtgacaatgacaacaaaattgacgcggacgctccagtcaaaggcatctcccctttatccgatgactcaccctcttaggaagtcggccc

SEQ ID NO: 333864 - DNA, 1461 bp, Homo sapiens
  chr10:8096151-8097612
  hyper
cgcgcacgtttccccacatcgatgcgctctcccaaacaccctgcattagatcctaataatgatccatgcgtgcctattttttaaaagtctgaaaaagaaaattctgcccatcgaaatgaacttcatgaatggggcaggctggctgcaccgggacggaatcgtccacccgacccgaatgaattggcaggagccgcggccacatttaaagggccagagcgcgcgttccctcccgtccgcccccaagccccgcgggcctcgcccaccctgcccgccgcccctccgccggcggccgccctctgcggcgcccctttccggtcagtggaggggcgggaggaggggcgggggtgcgcggggcggggggagaagtcctggagcgggtttgggttgcagtttccttgtgccggggatcctgtcccctactcgccagcgccaggctcctcccccccggcgcggatgacactagaacctccttaagttgcgtcgcgccacagctgtctgcgaacactgagctgcctggcgccgtcttgatactttcagaaagaatgcattccctgtaaaaaaaaaaaaaaaatactgagagagggagagagagagagaagaagagagagagacggagggagagcgagacagagcgagcaacgcaatctgaccgagcaggtcgtacgccgccgcctcctcctcctctctgctcttcgctacccaggttggtactggtgactttttttttttttaagtttgattttttgcccccaaccacttgggaggacctaaatcaattttaaaaactcaactctcctcttttggaggttttctaggggctgagaggacggtcccgggaccggtgtccccgagggagggacttgccctccaagtcgtaacagtcagccctgggacttgccctccaagttgctcagccagccccggctcccgcgagccgggctgcagggacgtccccgagagccctgcgggctccgcggccgtgtccccgcgctcccgtgcgggtctcgggtgcgctgggcgggcgggcggcgcgaggggaggttgtgccactccagcaactcaggggctcatccaggtctcccattctctcccttgcaggtgacccgaggagggactccgcctccgagcggctgaggaccccggtgcagaggagcctggctcgcagaattgcagagtcgtcgcccctttttacaacctggtcccgttttattctgccgtacccagtttttggatttttgtcttccccttcttctctttgctaaacgacccctccaagataatttttaaaaaaccttctcctttgctcacctttgcttcccagccttcccatccccccaccgaaagcaaatcattcaacgacccccgaccctccgacggcaggagccccccgacctcccaggcggaccgccctccctccccgcgcgcgggttccgggcccggcgagagggcgcgagcacagcc

SEQ ID NO: 333865 - DNA, 1366 bp, Homo sapiens
  chr10:11059422-11060788
  hyper
ctaaacctcctatatcctttcggtgatcgcccttagttcctgcccgggcaagcacaccacaccgaggagcatcgaagcgaaccctcgggctgctcgcctcccgcggctgggctctgggagcgcggctcgggtatggaagtggagcgggctttggcgcctgggtggccctaaacctactccgagcggccacggcggcctcttgccagggacccccgggcgggggagcagagccaggcggggagcgggtttgccttcgggggcccaggggaccctgagaagtctggccgtgcccgggcggtgagcgcggaggcggcccgccctgtgtccccgcggggcggagccgggttcggggccgcgctctgggccggcgggcccgcaggggttaagcggcggcgggcgccccgcgagctccgcccccgcccgccgcacctggcgctcggcagccggccgccccggcgctggatttcggaggggattggcggagcgcgaggagagaatgtgacaagtgccggctcggcggccgccgggggaggccgcgcgcacctgtccctgcccgtctcgcgccgcccgcggccgctcggacgcgcgcagagccgccccccgccgctgccgccgcgtgcgcccgcgaacatgacttctgccttcaagctggatttcctcccggacatgatggtcgagggccgcctgctcgttcctgacagaatgtgagtggcgccgcgtcccgaggccgggcgagcgggcgtcctcctcccagagtcggcggcgcgaaggggacgggcgtcgcccgcagctcccgggcgcgactcggccgcttcggatccgtcgcctccctcggccttcggaggccggcacgggacgcgggaggagggagcgggtgcggacgagcagcgccggcggtgcagggcgcggggcttcccggagggacgagcggagcgcggcgtcccggggaccgggcggggtccgcgagtccgggtgaggaccagcgggccgagcgcggcgtcccgggtccccgcggggtgagtgggggacgggcggggtccaccgaccggcgcgaggacccgcgagcagggtgagcggggcgcggcgtcccggggtccgggcggggtccatgagtccaagtgggaccggcgagccgggcgcggagtcccggggtccggtggggcgggcggggaccgggcggggtctgggggtccgggtgaggactgagcggagcgcggcgtgacggggaccgggcggggaccggcgagcgggcacggggtccgggcggggtgcgcgcgtgcgagtgtgcacgcttgtgtcatttgaaatgcggggctgacggagctctggtggccggggggaaagagctcttcttaccaaattaccc

SEQ ID NO: 333866 - DNA, 1135 bp, Homo sapiens
  chr10:11206755-11207890
  hyper
cggcctttttctccagcgtgggcagccaatcagctgcgcagagctgcatagctggaccgctttccattctgagtagcaacaacgtactaatttgatgcacacatggatgcctcgcgcactctgcaaattcatcacccgcatcttgcattagtcatctgacggactgccaagtgtttcattttctttccatgtgactttattattaccacctctctcctctcttccaaaaacctcccaaaaagggcggtggggcggggggcggggcagggagagggagagaaatccagcagacatctagctctgcctttctttcccagccacagccagggtagggctgataaggcgctgatgcgttgatggcagccttgcagagctagacctgcacttaacttgcagctgcctcccgagcctccaagatgtccacgccctgggtgacaggcggcagggcgctgccccgtgctcccccggctctgctcgacagcagcacgcagtgagagcctcgccgccgccgaggagcaactcatggtgcctccgctttgttttagttcatcaaatttctacgactcattaggcactttgccactgctcttcttcctcctccttccgcctccccgctcccccacccccactattttttcttcctgtccctcatcgtgccgccctaactctggctcccggttccgtttttgacagtaacggcacagccaacaagatgaacggagctttggatcactcagaccaaccagacccagatgccattaagatgtttgtcggacagatcccccggtcatggtcggaaaaggagctgaaagaactttttgagccttacggagccgtctaccagatcaacgtcctccgggaccggagtcagaaccctccgcagagtaaaggtacagagcgcggggcgggggtcgccaggcgtccaggtgggcgtcgcggggcactggggctgtccgagcccccagcctgcaggaggaagggcgggtaggcaggagggctggaagcagccggtgctggcggcccctgtgctccaggggctgctcccgactcctccccgcacccccgcccgcctgcccgccgggacaggttggaggcgggagagagggaccgaggcagggcgggagcgcagaggctc

SEQ ID NO: 333867 - DNA, 1950 bp, Homo sapiens
  chr10:12390701-12392651
  hyper
cgaggggactgcggggcagacgatcacttctttccactgagtctctgggaggagacagggagatgccagaaggggccaagcgtgagccagggcaaccaggccggccaggcccgccggccgctccagcccagcaccagggcgcccgcgcggctgccaaacacccccgggagttttgctcgcaaagggaccacgaggcagctgctggcgcgtcctgcgcgtacccgcccagaggctccccggcttgctcctcgcgggtctgtcccgaaactgacgtgaaaccgatttggtgcaatgcgaatgagctcccgcccgcctccgcctccatcccagccgccgccgccgcccgtcgccataacaaccggcccccaccccccccaccccacgccttgcccctcgggtcccccgggccacaggccacagcgcgggaaggcgccccgccctcggcgccccgcatccggccgccgcgcacccccgcccgcccggcgcttccgagccacgcagaggcgccccctcccgccggagacgggaaagccccggcgcccccagactgggctccgtttccagctcccggaggggctggggctctcccgcgtgcgccccgcacctgccgggggcccgtacccgccctcgccggggctccagggggcacgacggccgtggcccggcgctcttgggaggggagcgggacatccccgaaggcggcgcgctggaggcggggagcggccggggcgcacggagagggcggggagcccgcgggagggggaggagggggaggagggggaggaggcgcgaggtgggggggagcgcggcgggcggcagggagggagcgggagggaggcaagaaagtagcagaaagtgaggctggcaggcggcggcaaaggagccggcgcgcggcggcggcaggaagtctgtgcccgagaacagcagaaataagagccagggagggaccgcggccgcggcggcggcggcgagagcgaaagaggaaactgcagaggaggaagctgcgccgcagcccgagccgcccggcatccccgccgcctctgcgcccgcgccgcgcccccggcgccccctccccagcgcgcccccggccgctcctccgcgccgcgctcgtcggccatggcccgggagaacggcgagagcagctcctcctggaaaaagcaagctgaagacatcaagaagatcttcgagttcaaagagaccctcggaacgtaagtggggaccggggaggcgagggtggaggtggccgcggcaggggctgcacgggcagctccagctgccgccgccgccactaccgcggcagaaacccagcctgtcaccgcgtcctcattgtcccgttctcggcgctgcggagcccccccgagcgcgcccgacgcgtgggcctgcgacccccgggtgggcgccgttcccgggagggggagggggcagcgccgggctgtcagggagcagcccacgcgggcgcgcgacttcccacttctcctgccaccgccgccctctccgctgccttctccccacgcgtgactgtgggctgagcatggtggggatggctgtttaccggctgtgtgcgtttactcgccgtgtgcatgggcgcaccgcgttggcgagacgtggtcacgagaagatcagcctccagtcgttcccatttctgtccttacatcatgtatttctatggaattggcatctgcacgtacgaggtgtaggcaagactttgggtggccacgcgaggatggaagggaagggcttcgcagtgctcagggtcacacgtgggcagagcctcaccggagggtctgtgcatttcacgcgggctcggccgcacgcgccggggagcgcgtctccaagggagggtctgtgcgcgtcgctgcgcgggcggtgctctctccgggctgcatcgagtcccatgctgatggctgtgtctcaagaaagcagaaataatccgaagtcgatggcaggaac

SEQ ID NO: 333868 - DNA, 846 bp, Homo sapiens
  chr10:13043140-13043986
  hyper
acctcgggaggtggcgcagagagagagagaggtggcggcggcgccgccgggctcacctgaggaagaagaaataggagtagtcctggaccacggtgtgggagtggcacgagaagtagcccaggccggtgaggttgagcctggagccggcgggcacctccagcatgctgccccacgcctggtcgcacagcatctcgacctcggccgagtagaagaggcccccctggccggcgtggtactgccagggcaggtggttgtagaggccgggcgcctcggggtgcagcgccagcaccctggcgtacacgatggtctcggccagctcggcgcggcagccctcgctcaggggcctccactcggagggcagctggcaggcgcgcgcgggcgctgggggacccgccaggcagagcgcggcgagcagcagctggcgcagcatgccgggccctcccggggcgcacggggcggcggcggggagcccggggagcccgccggcccgggaagggcagccctgggcgctcggctgctcgggccgctcccgggagctgagcgcaccgctgtctccgccacggggctcggcatgcccggccctggcgcgccacgctttaaaagggtcccggggactggacgcgccgggcgcccgcctcccgccctgccccctgcggctggggcgtgggcgggggaggggcggggagtcgggcgggtcccggcgccggctggggcggggaccagggactcggagaacgcggggacgccgggacccagccctgaattggggacagtggcccagcaatctcctggcgccccacgatggacgtggtccgagcttgccaggcgtaaagcctgtttgcaaac

SEQ ID NO: 333869 - DNA, 1293 bp, Homo sapiens
  chr10:13933020-13934313
  hyper
cgtgcaccaacatttgagcagctgcctccaatatagaagcactgcatttagccaattttaaatgagcacgtactaaagggggttcccttctgttctcctccccttccgagcgtccgttttctctgcatcaaacttgctgcagccatttggaacgtaaaaagcagtccatcttagcagccccgggcaccggcgatcggctgctggcccccgccacccttgtctgaaacgccctgtcctgcacccaaaggaaagggctcccctggcactctcagaaaatggttttaaaaaaagcctacacagctctgcctaaagccatgtcctttcctatctccccgggtagattcagacagcgtgggactgaggtgcccaaggaaagtaggtgtgtgtgtgccgaggggagggttgcagaagaaagcacagtatgtgccccacgtgggatttgcatttaaaaactgtaacatacgcgaaataaacgactccaggcccccagtaaagaagcagcggcgcgtcccttttccccggcccagcgtgaaaacacggaaggcgaagggctgccgtcagtcgcctccctgccaccgcgaccgggaaacaaagacacattaccttttattttttgcgcttccaagggatccgaggaacttctggctgcaagcggctggtaccccggaacgggcgtcccattcgcccgggcgaaggcccttggcctactaggcggccttggcgcccgcagctggcgagcccccgccccgtccccgccgccgcccccgccgcgggccctcggcgtcagcccatagcccgctcgcgcctctcgcgccgagcctggcccggcgccagtgagccccgccgccggcccgcccctcgcccgcgcccggcccgccgcatggtgcgcccagcgcgccccgagccagtccccggcgcgctgctaggtcgggtgctaggcggccaccgcgcgccaccgccgccgccaccgcccgccgcccgatcctggacaacaatgcgcgcccccgcccccccagaaagccagggacgcccccagtcgccgccagagctggctcggcttcccagcccctctccgtggcacccgcaggcgagacaaagttcgctcccggtgaggctgcgcgcgtccaaagcgtgcgggatgcccagcacggaggtccccaagcgggggacccctggctcccccacaaaacccacccaaagccaccgctcgaggccctctcctaccctgagagcccggagacagcagctcccttggctgaaggcacagctcttacccctcgatctagtccaatt

SEQ ID NO: 333870 - DNA, 71 bp, Homo sapiens; identical to SEQ ID NO: 223767
  chr10:14646262-14646333
  hyper

SEQ ID NO: 333871 - DNA, 86 bp, Homo sapiens
  chr10:14646654-14646740
  hyper
gggaaagtgggaaggcggccgcgtgggtcacagccacaaagctccggggcgctcactctccttttttctcactccctcgttccctc

SEQ ID NO: 333872 - DNA, 1331 bp, Homo sapiens
  chr10:15760997-15762328
  hyper
gtggagggcatgaacgtatttatgatgaggaccgactgtcaaacttgatttcctcttggaaacgggggtccgcaacctggtttgcaagaatgcaaacggtcctgcttctctaggtggagctctgtgggtacagtgagatgagagaagggggtggggtaggaggaagccaaggacagagcccagctgctggtagccgacagctcttgcgcccagacgcaatggttacagactctgcataaacagacctcgctgtggtggcggttttaactggcttgggtcttctgggtcctgttctctcctttgtaggatgcgtgcgtcttggtacctggaacacccaggacttgcgtgttctatgcaagtggcatgtctctagctcaaaattcacaaggcacatctagcatggcaggggagagaaggggctggtggcggggagagggacgggaccccgggcaggcggcaggacggggatcccaggctgcggggggactccgcggcagagccgctgggacctgacccgggagcgccttcgtccccgcgcgcacctccccgggtcgggcgacttacgtgcgggcgtcgggtatgtggaagtccacggcgtagccgaagtagctgcccttggggccgctgtacactgtgagcttttccacgtccaggttgaacgcctgacaggcgggggaccacagcaacatccccagcgcggccgcggcgcagcagaggggcgcgatcagcggcgcctggcttccccggggaccgcggctggccccgggcgacatctccctccgccccggtgggtggctgctacccaggagcgcgagccgaggacccctgcggggcaaggggggctggtggaatctggcggtccccagctgcccgtgtcccgggtcggtgcgctcggcgcacccgtggtgacagtgcccggcgtctgctcccacccgcccgcccgcccagccggctcggggggctggcccaggggctctagccctcctccggccgcgggcagggaccagctctctcgcggcgcctcctcgcggctggtctagagccagggactcccgggcggcccagctggtggctggagcgctgggtgcctcttcgggctgcccggatttctattgcagtcccatctcaaggacaatcagtttcgtctctgtcacctcaagctatttattgctttagaagcaatgccccaggtggagcgagagcttgctccagttgtgtcaaaggcgcagcttggatggagaatgtgaaaaccaaccccaccaccaggaggggcaaagcaattatctcttcatcacctctgcagcctgacctcagcgttcacggctttgcac

SEQ ID NO: 333873 - DNA, 1711 bp, Homo sapiens; identical to SEQ ID NO: 234601
  chr10:16562191-16563902
  hyper

SEQ ID NO: 333874 - DNA, 2530 bp, Homo sapiens
  chr10:17270086-17272616
  hyper
cggacgtcgagtttcctctttcacccagaattttcagatcttgtttaaaaagttgggtgtggtttcatggggggagggggaagagcgagaggagaccagagggacgggggcggggactctgcaagaaaaaccttcccggtgcaatcgtgatctgggaggcccacgtatggcgcctctccaaaggctgcagaagtttcttgctaacaaaaagtccgcacattcgagcaaagacaggctttagcgagttattaaaaacttaggggcgctcttgtcccccacagggcccgaccgcacacagcaaggcgatggcccagctgtaagttggtagcactgagaactagcagcgcgcgcggagcccgctgagacttgaatcaatctggtctaacggtttcccctaaaccgctaggagccctcaatcggcgggacagcagggcgcggtgagtcaccgccggtgactaagcgaccccacccctctccctcgggctttcctctgccaccgccgtctcgcaactcccgccgtccgaagctggactgagcccgttaggtccctcgacagaacctcccctccccccaacatctctccgccaaggcaagtcgatggacagaggcgcgggccggagcagcccccctttccaagcgggcggcgcgcgaggctgcggcgaggcctgagccctgcgttcctgcgctgtgcgcgcccccaccccgcgttccaatctcaggcgctctttgtttctttctccgcgacttcagatctgagggattccttactctttcctcttcccgctcctttgcccgcgggtctccccgcctgaccgcagccccgagaccgccgcgcacctcctcccacgcccctttggcgtggtgccaccggacccctctggttcagtcccaggcggacccccccctcaccgcgcgaccccgcctttttcagcaccccagggtgagcccagctcagactatcatccggaaagcccccaaaagtcccagcccagcgctgaagtaacgggaccatgcccagtcccaggccccggagcaggaaggctcgagggcgcccccaccccacccgcccaccctccccgcttctcgctaggtccctattggctggcgcgctccgcggctgggatggcagtgggaggggaccctctttcctaacggggttataaaaacagcgccctcggcggggtccagtcctctgccactctcgctccgaggtccccgcgccagagacgcagccgcgctcccaccacccacacccaccgcgccctcgttcgcctcttctccgggagccagtccgcgccaccgccgccgcccaggccatcgccaccctccgcagccatgtccaccaggtccgtgtcctcgtcctcctaccgcaggatgttcggcggcccgggcaccgcgagccggccgagctccagccggagctacgtgactacgtccacccgcacctacagcctgggcagcgcgctgcgccccagcaccagccgcagcctctacgcctcgtccccgggcggcgtgtatgccacgcgctcctctgccgtgcgcctgcggagcagcgtgcccggggtgcggctcctgcaggactcggtggacttctcgctggccgacgccatcaacaccgagttcaagaacacccgcaccaacgagaaggtggagctgcaggagctgaatgaccgcttcgccaactacatcgacaaggtgcgcttcctggagcagcagaataagatcctgctggccgagctcgagcagctcaagggccaaggcaagtcgcgcctgggggacctctacgaggaggagatgcgggagctgcgccggcaggtggaccagctaaccaacgacaaagcccgcgtcgaggtggagcgcgacaacctggccgaggacatcatgcgcctccgggagaagtaaggctgcgcccatgcaagtagctgggcctcgggagggggctggagggagaggggaacgcccccccggcccccgcgagagctgccacgcccttggggatgtggccggggggaggcctgccagggagacagcggagagcggggctgtggctgtggtggcgcagccccgcccagaacccagaccttgcagttcgcatttcctcctctgtccccacacattgcccaaggacgctccgtttcaagttacagatttcttaaaactaccactttgtgtgcagttgaaggcccttgggcacaatgagagccagtcctccaaactttcagaaagtttcctgccccttctggcaggctgccaatcaccgggcgggagaaggaaggaggggaaggcggtggagggagcgagacaaagggatggtccctcgggggcggggatggcggggctgtcctgtaggtctgtgcggccaccgtgattgcccctctgcgcggtgcccgaagtcccgctgaaacctgccgagggcagcaggtctgaaagctgcaggcgctagttgcgcggaggtggcgcagctgctctggaggcgcagagcgaatacgtggtgtttgggtgtggccgccccgcccctggcggtttcctc

SEQ ID NO: 333875 - DNA, 1697 bp, Homo sapiens
  chr10:17495133-17496830
  hyper
cgcaaaacaaacctgaatcttaacaccggtgccctttaaagcatagaaaagaaaaagcaaaccaaccaaatccctccataaagacaggctgagctgcttctctccaaaggtggcggggtcgggggcgggggtgctttcaacacaccattgtcgagaggaaaactcagcacccgtttttcaaatgcagctgctggaggatcccccttgattcaaagaccattcacatccaggcttagagggttgagggagtgtgaagggtgcccccccccaaccccgcgccctcttcaaacacacgcacactcttacactcactcgcgccgtcccagcctgcctactcccaacgagtccaagccggtgcagccgcgccccatgcccggctcgcagctcccgagccccagtccgcccgcgctgggcgccgctgtacctgttagtggcgcgcggtaccgcggtcgccgggctccggagcgtcctcagcgctgcgggggtgccgtgggtggcctccctgctttcctccaccagaatcctgcacagccggggagaaaacttaagttgctacaccccgccgggagctgttggctgaaaggctgggagtcgcgctccttgcctggcagggagatctcgcactccccggctcccaggccaggtccccagccccagagttggaagagccttagggcgggaaggaagagacagcaaggaccagaatggggagcatgagatcctgatgcggaacccgacggcaggtcccgctccacagctgcctcgcccacagcgatgcgcgctagagcccccgcagccctgaccggtccctctgctccccagccgccgtccaccggtcggagggtcgcctccctgcgaccccctcccccactccactctcaggccgtcgccgcccgtgggctgctccccgccgcggccaaaagtctccgcgcccgaggggaagcgatgggcggcttgggggtccgggggcgccaggcggggcgcgcggcgcggggcgcggccggcgggtgggtgggttacctggcgcggccgggcgcgtctgccgggcaccagagcaggcgcagcagcagcagcagcagcaggctggcgagcagggcgagcagtgcgccccccggccgcatcctgagccacaggcgccgccgccaccgctgctgccggggcgaagcacagcccgggcggccccgactcgcggctcccgccgccgccgccaccgccgccgtggccgcagccccgcgcacccacagcgttcacaggcggcagcgaggggcgcccgcagcccacccggcagagtctccgcggcgggcggagaagaagccgcgttcgggctcgccccgggctcccggccccggcccgcggagcgccgcgatcggctggcagatgacgattcgccgagctcgccgcctgtcctcccggaggcgctcggagctgctgcgggctccggtcgccgctgccactgctgctgccgccgccgccgcgcggggtcacctgaaggttggggcgcggaagctcaactccgtgctgattgggctccaagttttctgcgccctcgcctcgtcccgagtgcccgcgaatcccccggacgcccacgcagaccacccagccacaccacaactctgcctgcggagagaggagaggagaaaaaggggccgcttcaaaaactttcaaaactgtgcagtcgcttggctggatcctcccac

SEQ ID NO: 333876 - DNA, 1263 bp, Homo sapiens
  chr10:18429033-18430296
  hyper
cgtcgtccttcccctccaaagttaagagatctgctctaagggttcctgaggggtggtctggggccatgggaacaggatcaaggccccctgagcgccgggcctggcttctgtggcttcgcaaacttttcagcctgtgtgccacggcgacgcgcagcggctgagtcggagcccacgcggcgcgcgcctcccgcgaggaacttttcggcttgtaggctgcttgtcactctcgctttccgacgcgcctccccctggctcgcgctcccggagttccctcccctcctggcgaggacctttcccggcgcccgcggctccgatccccgccgcgctgcgcccgctctcccggccccggctgccccgctgagggctcccctctcccaggcaccgcagccgcgcccccgcgtcccgcctcccgagcggctcgcttcgcccgatgccccggccccgtcccgcgcactgagcgcctggcagcagggcgccgagtcccggggcgctgcggggcgctgcgccgagaacggccgggcctgagccctgggcggcccccagagccgatcagagcgcggggaggcgggggcgaggaggaggggacccgccgccgggggctggctgcttcgctccgagccgacttttcgccaatggtccaaagggacatgtccaagtcgcctcccacagcggcggcggcggtggcgcaggagatccagatggaactgctagagaacgtggctcccgcgggggcgctcggagccgccgcacaggtagcgagagcgcggcgccttctccttcctttgtgagccgccgggcagggcaccgacctcgggttctcccggcgcctccactgcagggatctctagcctcgcacctcctcccctcgtcgcctgcccaccctctgctcctctcctggcgccggggaccctgcccctttgcgccttttcctggctctgcctcggcttccatttttctctgcttccgaaaagccagtggggaagggcgggggagacctgccagtcctcccagacttctcccgggttgctccagctggccctcctcgccccttcccgggagaggcacatggagagacatgaatcaggggagtggactggacctgctgaagatcgtgagtccgggtgggcgggagggggcccgcttcccgcagcgctttctacgatgccgactctcctggccacgctccgagccggggtgggcgtgggtgtgaggatgatggggtgcaggtgggcaggaggggagcgaatatgggggtgccctgcc

SEQ ID NO: 333877 - DNA, 1469 bp, Homo sapiens
  chr10:20104635-20106104
  hyper
cgaaggggcgagctgtggttaaccctttcgtgcccagggagaccccgccagggtcggggcggggcgcgatcgccccccgcagtcgggcgcgaaggcggcccgggagccaggtgggtgtggggcgcagttggcggagctgcccagggcgtgcgagcaggctgcgaggatggcgccccggcggcgcggaggtaccgccccgcgctcccccgatagctccccggcctgtcccctctccccgcgctctggggcagccggctgcctggggcgcacggggctggagtggccctctccctccccttcgctaggctcccccggcttaatctgttggccgcgactcctcagccagccccgaggaaagtgcagccattggacaggtctgtgcgggctgccggtttcagggaggaaggtgggagaagcctggaggagcgaaggggagggcggagggaggagggaggagggtgcggcggcagatctggcaaattgcgagctgccttccctcctcaaagtgtggagaaggagcgcgggggagcgtggcgacggcagcgcctcctccgccaccaaactcctggggctccgcgggggcttggggccacctcctcctgagcccggaggaaccctctcccgataggttccagcgtgactccctcccactccacccttttcctttcttcttcctcttttttttttttttttttaaacacatttttttcctggcttcggacctcagactgctgcagccctaaccttcccagggctcagctctttggagctgcccattcctccggctgcgagaaaggacgcgcgccctgcgtcgggcgaagaaaagaagcaaaacttgtcgggagggtttcgtcatcaacctccttcccgcaaacctaaacctcctgccggggccatccctagacagaggaaagttcctgcagagccgaccagccctagtggatctggggcaggcagcggcgctggctgtggaattagatctgttttgaacccagtggagcgcatcgctggggctcggaagtcaccgtccgcgggcaccgggttggcgctgcccgagtggaaccgacagtttgcgagcctcggctgcaagtggcctctcctccccgcggttgttgttcagtgtcgggtgagggctgcgagtgtggcaagttgcaaagagagcctcagaggtccgaagagcgctgcgctcctactcgcgttcgcttcttcctcttctcggttccctactgtgaaatcgcagcgacatttacaaaggcctccgggtcctaccgagaccgatccgcagcgtttggcccggtcgtgcctattgcatcgggagcccccgagcaccggcgaaggactggcgggtggggtagggaggtggcggcggcggcatggcgaggttcccgaaggccgacctggccgctgcaggagttatgttactttgccacttcttcacggaccagtttcagttcgccgatgggaaaccc

SEQ ID NO: 333878 - DNA, 766 bp, Homo sapiens
  chr10:20106155-20106921
  hyper
cgcagctgaagacctctctggcactctcgtgctccctaccctctccccccaacatcacctatctgcccttgggaaacttattgcagttgcttttcggctaaacttaggcttcccaaatggggaaagagggttatcaagagaaggacgccggggactaggggttttcttgaggctttcgggcttacttcacctgggcggcagggggtggtactgtctccccaaagtagcccagggagggcttcagtgtgagagcaaagcttcttccgtggatacatctcctaggacctggcatctccaggctgtgtgctctccggctcctcctccttcctcgctgctggttaaactaagcgtgtgtggtatggggtgggtgggggacgttgtgaaagccagggattgcaggtctcccctctgcacgagaaaattccctgtggcagcaccttccttcccctggcgatccccactagctccgtctagtgacctgggccaagcgggcgctggaaggggggcggggtaaatgcggccggcgcagaggtggggagcaggtgggaaaggtggaggcgggctcgcctctggagacctacccctgctcccattgtcctccgcctgccagcttcacagacaggcctgaacgcgcagagagttccttggagtgccctgattttgtccccgagagggcccccaacctccgcatcctcttagtggctgtcctggcaggtgcgcgtcctgcggggagttgcgccccgggggctatcgccgagcgggagct

SEQ ID NO: 333879 - DNA, 993 bp, Homo sapiens
  chr10:21462298-21463291
  hyper
cgcgggcggatctgtggggcggggggcgggggtattgtggaacacgagtggaggtggagggggcgcggctcgccgaagtgcccccctgggtgcccagcctggtccctccggggtccggggctgcgcaccgccgtgcgccctccgcagaggctctgccgatgtcgcaccgccccgcaccgcgacaaaagcccttcccggttccaacatcacaatcgccaagcgtggtctctgacactcccgctggcgtcttcgttcgcgcgccctccccccgtgccaaggcacacgcacacgcaccgacccactcattgctttccatcccaggtgccaaaacttctcgaagcaggtgcagcccctcgcccggcaggtccaggctggcccggcgccccctcgctcaccttatccaggcagttgactttctcggtgggatacacgacttttccgcaacgggcgcactgggggttcatgatcgcggttcccgggggcggcggcggcggcggctgctggctcccaggagccgctgtgacatcccccggcgagccccgcaccgcctcctggcaggcgggagggctgcgggcggcgggcgccgggtagggagtcggcgccgggccacgggtgagtgcacggggagggcgacggggcctggcgcctggggccggccgcgctctcgggctcgcaggcgctgggtctcggctccggctccggctccgcgccgctggctctgcgtcgctcgcactccaggtacgggtgactcacacagtcactcgcgcccgcccctcgcgctcactcgctcccccgcctcgccgccgccgccgcgcaggccaaacccaccggcgcgcccggaccgaagtggcagggaacgtgcacgtcgggcaccctgggagggagggcgcagcgggggagggggcgggcagagacccggaaagctccgcagaccgccgtgggtgcgactgtgcggcctggggagtgagcctcgcgccaccgccgctgcaggcc

SEQ ID NO: 333880 - DNA, 872 bp, Homo sapiens
  chr10:21815648-21816520
  hyper
cgtaagataaaacctctgatttgctgcgtgctgccgggcacattctctgccctctcgtccgaaggacgagtttaaaatggagagtttaaaataatagcatttacaggaggaaataaagagcgaggagatggttctttggccggttttaagacatacatgctttttttttcttttaatacaagatgtcttaagggttaaaagcgttctagggtttgctgtatttccttctagatttggggtttcctgaggaaatcttttccggagggaaatagcaaatcaacattaagatggaagcgagacttctcagccacttttggaaatgaagggggaaattgtaaaaatacattcagaaaagggcgcgaaggcggcggctgaggggaagaagctggagtcttgggaggaagcgcagtgggttggaatcgggggaaggagggcccgctaggtccgggcggggaagaaggcgtgcgggcggcggggcgtgcgccgggccgggcagctggaggaaggcgcggcgggactggcgagcgcgaagaggcaggcggggaaggcctcggggggcgggggccgggcgcggggccggcgcgccggaggaagcgggacctggctcctcgcgcccgccgggccgcccccattgttctgccctagcaccgctgttagccgagcacgtcctgaccgagggaggggccccgcgggccaacccgacccccgtcggcgcctccccgggctcctgagctccggccgggtcgggtcgggccggcgcggcaagttttgatggtcagactcagccagcgaggggttcccagctgaagacctcggaggaaggagcctttacagcgtgctgcgaaattgaaggaagccgggcgagcctgcaa

SEQ ID NO: 333881 - DNA, 599 bp, Homo sapiens
  chr10:22517909-22518508
  hyper
cgcaaacggagatgtttacgctgacagggaacagacaaaagggcggccatgcttcaacaaaatgtaggagttttcagtttgcagcttgaacttgacactgttgaaatacatgcatttcggtggccccgttacatttcacgcgtcacgaagccgagcaagaccagcccgggccgccttccccgtgtacgcgcgggcctccggggacgcgcagagctggagcggcgggcgcgcgcggcaaacgggcccgcgcggcctctgcgcgtccccgctccagcaccctggcgaggcctagaccgccgtgaagaccccggggaaggagtggccgcgctcacctgcagccgggagaggacagcgggggagaggaggccgctctgcaccggccgaaagcgaagggctcgccggctggccgcgtagtgtaagggtcggtggtttctttgcttggtccctggaaatccaccccttcttatcccggaggcctgaactcgatttctgcaaaacttcccgcgaccagctcataaaaggagagcgcgtccctgggtgggctcgaaccaccaacctttcggttaacagccgaacgcgctaaccgattgcgccacaga

SEQ ID NO: 333882 - DNA, 1813 bp, Homo sapiens
  chr10:22540645-22542458
  hyper
cgccacagcaacgaatcactgcaaaagcaaggttctaacttaaaacaaaaagagaaagtattcgcttctgcggagaacccgagcctcctcctgggcgggcgacgctcggctgatgggaccgggccgcgcaagcctcggatgcagccgggtggggggcaccaggcgctaggcgaaggagcgcaggaccaaaggagatgcttggctcctaagataacacctttaaaaagaagaagaagaaagaaagaaaaacaaacaaacaaactcgatacttagcctcacgatccttgccaccccctccctgctccgccacccacacacaaaataaagtgagccgggcgggggagtgcgcgccctgaaagggaacaagaagcaaggcgcctgtgacacaaaatggagaaagaggaaccgggagtggaaaggaagaaggaaaaccgagtaaaggaggttattcataagaacaggaaaggggccgaggggtagagaacacccgaaggaaagcgcaggaggccctcgtgagagggcaagggggaaaagatcgacgaagtaagagcgaaaagaggaaaggaaagaaagactttctagatgcggagtctccattttcagcagcgccatattcgcttttcctctcgccgcttttggctgggttttgtgtgcggcggtggacaggcgccagcacatttctgcagcttcagcagctctgctcagacacctggggagggccgcagggcccgggcgggggacgcgcgctcttggcccaggcccgggcgcggccccctccccggcctggcggttcctgcgcagcgccagccccgcgctcctctaggctgcaaagggggcctccgactcgggcccggcccggaggggacacctcactcggggccccgcggcagcccccaggggacgcgggccctctagtttcgcccacggtgtggctgggcatgcgtgccaaggggatgcgtaaccgagaaccgaaaaagacgaacttaaccttcggggaggaggagagggcgcacgctgcgggtaccggggcttgggggcgctcctggaggtgacggggtcacctccacctgcgcggggccactctctgggagccggcgatcgatgcccgccgcggcgcctggcccaggcccccaggcctctcgcggctcccggaaaaacgtccgaggtcggggctcggccgggagccccaagcgggtcccctggcctcgggacgccagtccgggaggcggccggaactccggttttcgcggttctcagcgatattaggcgcggccagtgtctgaaagctcctcggggttacgtcctggggcgactggaggcggctcacgactcagaaagtcggggcttctcgccccggatccccaccgctggcgtctgtcgaatccccacctcggtcctcgggtagaggcgcaagcgcgccccaagaccattctcttcgcgcccacccccgttattcttcactttcacttgacatcgttcttcactcaaggttaggtcctcgctagtgccagagaagcccctgggtccccagtgccctcagccccgcagcgtagggagcagccggcccgggagataaggaggccacagccatggaggccccaggcccggagtccccgcgccgtcgggttttgagccgcgcggctggccaggaccgccggctccttctctgtcccggtcctccgctcgcagccccgcagaggtgacggtacctggaggctggaagcgacggtttcctcgggccggtggagggaaacatgtcagggtcacagcgaaggaaaccgagacccacaggggtccccgggcgtccgggacg

SEQ ID NO: 333883 - DNA, 2085 bp, Homo sapiens
  chr10:22624050-22626135
  hyper
tcaagatctgggcaaaggctcgcgtctcgggacgcgaagtcgacgccaaaatgggtccccggacaaggcgaccctgggagtgccggcgcccccggccgggcagaggagcgggtgggccgaggctgggacatcgcctccgaaagctgccgggacgcggcggcttcctgcagagcctgcgcctgccggatccccagaacacagaagcttctcggacatgggagctccccgtgcgccctaaaaccaggagaggaagggacgacttgggaaaagggactggggaaacagcggagaagtgaaagcggcctaaaatgggcgacggcgggcgagtcctctttatcagtgcagcaggctgccggagccgccatttggtggcggatctcggtagttcagtagcacgttgtgctgaacgtcacaactggcttgtctacgtggcatcgtcatttcttaaccgcggttttacgaaatgcaaatttccccctggccttcctcctccgcggccgtcgacccccctcggcgctccgggtggacggctccggggcgcggctcgtccctcgggtggtgcagcccccgcggcccgagacccggggagggccgggggtactttctgcgaggcgccttccccgcggcttctgcccgcgccaaagcctggtggaatccagcgcagacctaaagcacgcttgacaccccgatttttcgagactaggacgactctctgagccagcagctttcctctccctctcggggagaatctcatttccttggggtggtgagggtgacgggcactgtcttttggccccgcgtgtccgttccccggtctcccgcctcacccctctgcgaggtgaggaggggaaacggcgagcttaggcctggcgggaaggagcctacccgacgagagggctccgcggggagggtcggttggaatcccgccctagcgcctcctgctctgcccggtccccaccggggacggggaatgccagtcatttctgttgagtgctagcagggccggtgtcaccacctcgggtggccgaggcttcgaggttttcatgaaaagcccccgaagcgtgaggcgcccgcccagtggagaacaaagggccgagggccgaaggcgaggcgaggcagcgcgcgcggctcccttggctcgacctagctgggagtcgggggcgcgggcagggctcactcccggcctagaaactggagcccgccacccccgccccgcaggcgaccgcagggatcccattcttggagcccgagctgccatgttgccttcgcggaggccgccagtcacttgacgcttccgagacagcgaagcccccaacctgagagcccttcggccgtctttgccgcacagctgcagtcaaggcccggagggactgcgggacgcgggcgggagcgagagccctgtgggctgccaagccggcgcggccgcgccgcggcagccgcttcccttgccaccttcgttccaggggctgcggggctgcgcgctcggcagaggctcggttgccagtagcaaccacacgacggcgatttgcagccagggccgccgccgcagccgctggtacctctgcctcctcctacacctcgggctcgagcatttgaaaccctgggggttgccttcggtgacatctcccgcccccacctccagtcctcagtctccaaaatcctcagctctgctcaaaagccagcgcccccggctgggccctgcccccaccgcagacaataggagcggctgggagcgcacagggcggcgcgcgccgcgagcagcgggcacctgagcccccaaatccgggcgcgtcgctgagtctcagccccaggtgccctcttcgcggagttgatcagcaattctttttcagtggccaattagaaagcttttcttgacatcagaaataagggtggtgccaaagaaagaagtcaaacgcccactccctttctaataacatcgacacaaagaagagctcatggttgcgtctgcgcttggtaacagtggctttcctctgggttagagccacaggcacaagcacccgctgctatctttcttcttcgcctaccatgaatattttgcatgaaatccagaatgtaaccatttgc

SEQ ID NO: 333884 - DNA, 592 bp, Homo sapiens
  chr10:22634092-22634684
  hyper
ccaggctcccttggcgcgtggggctctcccggcgcttggtcccgacccgcgccgcagtcaggataccacggcaatctggggtcgctttgtaaggagctccgacctccgggcagtgcagggatactcgacggcgcgcgatgtcccggcggctccgcgagcctggcgcgctgagagccccagcagtccgagtcctcgagctcgggcgtcttcgcgccgccgccccgctcagtgcgcccaggcaccgcggccgtgacgtcacgcccgggactggccgttgcagcaagacggccgcgttccggttccggtaggttgcccgggagacgcgggtacacagagaagcggctcccgtcggaggccgagtcgtcgccacgatcgcccccttggtggactcgcaggccgagcggcttccccgcagagctcgaggagggcagacggcggcgggggcgccatgagtcagaggcaggtgctgcaaggtagggccgaggcgggcaggtgccctaactagctggcgccgaggagacccgggtgcggtgggctccaccgactctctctcccgcagtgttcgagcaataccagaaggccaggacccagt

SEQ ID NO: 333885 - DNA, 59 bp, Homo sapiens
  chr10:22634714-22634773
  hyper
gaccccaaaacatcgagacgctgcagaacgcgggtgagcccggagcccgaacccccgtc

SEQ ID NO: 333886 - DNA, 1255 bp, Homo sapiens
  chr10:22764688-22765943
  hyper
gagtcctcctcatttatgggcgtcggcgctaagcagctctggaaacgggcagacccagctgtgcagcgatgtccagtgtcgccgcatctgccccgcggggtgcagcatgagtcttcctttgtggcgtgcggctccatcggaacgcgcgttgcgacgacaaattccttttttcccccccgcagttaacagttctggggcagaggctggtggagaggtccagagcccactcagaccgagatgaagatgaggaaaagcatgagcaggaagaggctggcggctgcggcggccacagggaagagctcggtgcgcggcgcagcctcccgcgaccgcgactcctgggctgcgtcgaggagccgcgttgccataggaaccgtagcggcgccccagtgaaaccctgcgttcggacaggagaagctaaccgcggccgcccactcccacccgcgcttcctccccgcccccaccggccgtgcgcgaaaagcagagatccgagaaccgcgtgcggtacaaacggcaaaagcttcgcgcgcattttccgggagttgagcgcgcggccgcaggccgggaacctaccgctctcaggctcccagcccgggcgctacgaccctgtgggcgccgcctgtgcagcccctccttccagcccgctcgggcgcatcccccaggccgggccagcgacgcgggcaccgggagcccctcccgccggtccgggctttggcccacacccggggaccgcggagtgggaaaggaaccaaagcgcggcgcctggccgaccgcggacgaaattcgaggccggagggcgttttcttttttgcaaaattgccccaaagccagggccgcatgtacctactgtctcctttgccccacatgctccaagaaaataagacacattctaccccgagtcctaattattgggccatttccttaacgcgcggtctgtccccgtgggcagaaacatactgcgagatgcagtttgggtaattaacaaagagacgagacctaactgggcttccgaaatgctggatactgcggccgggtcgccccgcattcgggcatcgcgcggttcccggccttcgggacgttccggcccggccggactttgaccgctggcgtaattaggagaaacgcagaaggcggacgctccccaatttccccatcgagccttctcctcccgagtctgcgaagcccctggctcaggagacaccggctccgcgcctgggcctgcaaatccgcttccagcgagcgcaggccctgtcgctcc

SEQ ID NO: 333887 - DNA, 626 bp, Homo sapiens
  chr10:23001888-23002514
  hyper
aaaaaccagcatggttttctgtcatttccattacgctgaaaaggacatacagacatccatcgaaatcaaaagcagggaaagcgaacttacacttttccccagatgctaagtgactgcagtggctaaggtcatggtcaaaattcacagctcgtttaaactttcctggctgagccaacagctccgatcatgtttcctgatcctatcgaagtggattaaaactgcaggagtttctcgctgtcagatcagcaggaggctatttcagaccctcgaaccgcagtccgcatagcccgcagcggcgcatcctccaatccccgactgtgcgtgacgctaacctttccacgcgttctccagcctttcccacaccccccacagcgggtgcggccaactcgggaccccctccgcccgcgcccgccgggacccccgcctgctgtccccgccccggccgcccttccgcagtcggtgacttctgcctgactccccaaagtggggggaggcgacgaagggaggaagactccccgccaagggctctccagcccgcacagcggcagggcgatgcgggagaagcgcagggatgccgcccgacgccagagccatatttacatcggctgctgctttgccaaaaagcc

SEQ ID NO: 333888 - DNA, 276 bp, Homo sapiens
  chr10:23216840-23217116
  hyper
cgcggacgcacttggctcctcccgcactggccgctgccctcggcgggacaatgggcgccctagcagccccgagcgttcccagggcgcaggcgcggcgcggcgtggcgtcgcctagcaacgaggcacaacaagggactgggggttcgtctgctgggtttgcggagcagctagctactcggcgggatctcccggcaggtaaaggtaaccccgtggggtggggaggcccaaggcagaggcctgaggaaaacctgggaaaggagaaggtgccacgtgggc

SEQ ID NO: 333889 - DNA, 1193 bp, Homo sapiens
  chr10:23461904-23463097
  hyper
agacagtaaaaaatgtgtctcgtccaaacgcaccccctctccaagcccattgtgaagtcagtcgccaacaaaggggacgtgtgaatattcaacaccgactctttcacttgttttttccggaatccctgagtcgactcaccccctctcctttttttttttttttaaatgggcgaatacctgtttaagttttaaaagcacatggaaattgcccgcgagcgaccatataatttgatttgccaggcaatctgcagagcgatcgcacgtcatttataatgttcattgagcattttgcctaattgtgtctgtctctgaaagggcagcgcaccccctcccgaccgctagcagcacaagtggcgacattcccatggagcggccgcgccgcagcttgccgcattcagcgcggacggcctggccgcgcgcttccccgcccggacgaccgggcgcgcctgacactaatagctcgcggctcaggtacgagcgggcgccgcatttgactcaattcaattcacaaccggccgcgcttgcaggtgtcgccttttgaaaccgccattcaggcggccgctgttcacttctcgctgcgccgcgggttctgtagaagcgcaagaatggggctgattattccggtgcccacatgccgcccccacacgcccccacccccgtccggcgcaagacttcccttggccaaaagaggcgtttaattagttctggggccgcggagagccagcgtggccgacaaagcccggctccccaggtaacccgggttccctgcggacccgggagggggcgcgcggggccggagcaccggccttgggctgcgcgctccctccggcgacactgccgtccccctggcctccggcccggtcccccgcaggccaaaggctcatctgccgggcttgggtggcccgggccagcgccgcctgcggtccccgagtgcggctggctctaaggccggcgccctctccccggctttcagtgctcagagccaggccagcgggaaagaaggcagcatggtccgcaaaagacaggtggcagtggcagtcttgcatgatacttgtccttcttccctgttccccattttggggaaacactggaaacacttttctctttatgcgcattcgcgtctcagcaccgagtgctccaagccctgcgcgcagcgccgggcttggaaggcggcgaatggctgcctagccgcc

SEQ ID NO: 333890 - DNA, 969 bp, Homo sapiens
  chr10:23480189-23481158
  hyper
cgagaaagaaaaaaacaagtcattcagggatggtccctgtggccagtcggaaaggtgagagactcgggctttgaaaacgattcacattctgccctttaacttcaatgccttccctccggactgcgccggagcagacgattcaatggactccttttgtatccagtttattgctcagaatccctagggtctagatttgctctcagaagaaacgcgccccgctgagctgctctgggggctgcccctcccgtctccccattcctttctccgggccggggagggcaggggaggcagccactgagccgatgtcgctggggacccgcaccaggcaccacagccaggctccagagcggagtcccataggtgcgctcccagcccccgtgttgcgtctggaacgcagtgggagtgggcccggatcaccttccaatgacacccgcatatactctgcaaactgtgcaaaagcccttgaaaagtccagagatgggacagaagcccccagcagaacccaggccggagccccgcgcacctcggataagggggtggcggaatgcacccacctggtccctgagggcagcacccttagattgcccaggctgccgcggaggaggacgatcgccgcgcgggctccgctctcgccgtctgggccaccggcgcgcacccctaggaacttctctggccgcgtgtagacgcggcgcgcggctgccccagtcccagggcggaaggagccggcgctgctcagcgcgcgcgggtacgcagcgggcaccgcgggacgcaggtgcccctggagccgcacgcggggcaggtacagaatccagtatgcagaggcagaggagagggaagagagcggtgcgaggagccccgggccgcgcgaccccgccttttcctcgccccaggagctcccaaagggagcaaaacgccccccacccccgcccaccgccgcgcctccgggccccctcgccgccggcacaccgc

SEQ ID NO: 333891 - DNA, 1000 bp, Homo sapiens
  chr10:23481173-23482173
  hyper
cgcgatgggtccctggcacgcgcctatggatgttgttataagaatcctcgcgtgccggccctcagctccaggaagtccgccacagccctccccagcgcagcgcgagcgcgggccagagcgcagcggccgcgggcactccagggaggcccgggggcgggcagcccggcggccgcctagctgcccccagccagggccccgggagggaggggctcggacgggccttagaaactcaccaagaactaacacgcgcagcccggcagtcccgctgcccactgcggcggcgagcatggacgcggtgttgctggagcacttccccgggggcctagacgcctttccttcttcgtacttcgacgaggacgacttcttcaccgaccagtcttcacgggaccccctggaggacggcgatgagctgctggcggacgagcaggccgaggtggagttccttagccaccagctccacgagtactgctaccgcgacggggcgtgcctgctgctgcagcccgcgcccccggccgccccgctagcgctcgccccgccgtcctcggggggcctcggtgagccagacgacggcggcggcggcggctactgctgcgagacgggggcgcccccaggcggcttcccctactcgcccggctcgccgccctcgtgcctggcctacccgtgcgccggggcggcagtactgtctcccggggcgcggctgcgcggcctgagcggagcggcggctgcggcggcgcggcgccggcggcgggtgcgctccgaggcggagctgcagcagctgcggcaggcggccaacgtgcgcgagcggcggcgcatgcagtccatcaacgacgccttcgaggggctgcgctcgcacatccccacgctgccctacgagaagcgcctctccaaggtggacacgctgcgcctggccatcggctacatcaacttcctcagcgagctcgtgcaggccgacctgcccttgcgcggcggtggcgcgggcggctgcggggggccgggcggc

SEQ ID NO: 333892 - DNA, 843 bp, Homo sapiens
  chr10:23487783-23488626
  hyper
gcgggggaagggctcggctgtaatgaagcgcctctaaggcggaggtgctgccgtggaggctgaggcggcggcggagcgcgctgctgcgtttgtgcgcaagtgactctcctgtgccacacacaaaaggcctccctcttcccaccttctgccgcctttcagccctccggctcctgccgagcccgctcctgggactctgggggggatcctggctgcatccccagggcagcctgacctttgggacatccgccgctgccagggcaaacctcgccaaactttccccaaactccgcaggccggggagggaccctggccggaggcgcgcatgcgccccgcccgctgctccgcgttcccagggttccggagagccggggtggagtcggacgagtgtccccggaggcccgcctagcccttgctcccaggggcattcgggactcctgtgctgcctgtcttcgcttgaggctggaagtggctgcccgacgccttgctctccgcagttctgctatctttgcgcatggaagtctccaagaggggctccaggaagcagcgagcagggaggggagcgaacggccaaaaggagatccggggatgggaccccaggcttcttcggaggaggcccggggcaactacgccccgcggccgggagggaagccctcgggcggccgcctgtagagggccccgtggcccggggcgcaggttgtggcgagctggtttttgcctctgggccgaggcgccagcgctagcagcgacagcagcggggggcgcaggtttctagccagtccccactttcggacctctgggggtctgcccttgcttctcggggagtcttggcccttgactgatcccc

SEQ ID NO: 333893 - DNA, 781 bp, Homo sapiens
  chr10:23488658-23489439
  hyper
cggcacctgttccaaacaacctgttgcgctgacatcgctttggagaggcgccggcgctttgctggtggaggcgggttgtgtggaggccccaagccttcaggaaatagtttagggttccgttgtggtgagaggcaccccctccccgcttcctgtggcatgtggggtgtttcacctctgcctgtgtcccaggaacccaaggcgtcctgggcacctctgcacctcgcccactctagggacttctcatgtagagctcggcagtttgggtggattagacaaagatgaggattagagacacaccgccggctaattaaatgggctcttctcctctcctcgtcccctccccgcaacccgcagccagataggactcttcggttccctacccccactcctaggccctatgtaagtgcggatggagaaagctagttacattagcccttctgtcttagaggtaccggcacctcggggcattctcgctcttaaagatgcgttttctgaattatttctagttttacaatttctcttcggtgactgcacaggatcccttctagctcttttcctgttggagtcgctggacgtctcccaaacagctagttagtcgcctatctctggagcgcaggccttcggaattggattcagggtatgagtctagctaggggatgtttctagaagttttataaaatccatttgggcaagcgttggcattcggattttaaaaatatagacgtgcactggcattgggcaactcaaaaaaaaatgtgtctcctggcgcttgtcagtgaca

SEQ ID NO: 333894 - DNA, 1303 bp, Homo sapiens
  chr10:23982857-23984160
  hyper
gcttggagttgtcacccctacgactgacctcagacccaggacccaagggcggggccctcttgcatctggaatccagcctcggccttgacccctttcgcttgttcggagtgctttcgcccagcttctggcggaggttcacgcagggaggggactcaggtggaaaaggctggcccctttgatctctttgcaggaacttagtagacaggggccccgggctggagatttgcttcgagtaggctagaggcgcccttggcgcaccgaagctggctgccttgctggaacctgccgcgggggtggaggttgaaaggactctgagctcttcttccccaagccgaactccctcctacaggagcgtggaaaccaactctcccacaccgtctatcccactcttcccccctaaacctctagcgcagctttttaaaggcatcctgtgcagcctccaactttggggaaagagaatgcccaactcccgctctccaactacccgtactgccttcttccttttcctgcggtcgcctccaaactctgcttccctggtatccccgccccgacctggaagcgagcgcccccggctgctcgcggcagcccctcggcgcccgtttgcagggagcgagctctggctcctcacaggatccagacgcggttcccatccgtccccagccctgcagggcacacgcgcgcgtgcacacgcacgcgcttacactccagctcacactcgcgcgtcctcactccctgcaccccaccctccgcgccgctcctccgcggggtggggggtggtgggggtgacgtcaggactgcagtccagaagagagcggctggagagggctgcgcgcttctcgccaagcaagcgggaggcgcactggggccgccgccgttcccgcgctcctccctctcctctgcacccactgtcacgctacccgcccgcgggggagcctcgagagcctccaggtgaattgaaagtcgtttccgggggaggacggagagggtgctgcagtcctggcatgccctgaaactgcaagtcgggcagaaacgacccggcggaggagcagggcgcgcagcgccctgcgcagcatccccgggctgccagaagaggccaccactcggctggcagccgcgagcggcggccgaacctcggccccagactcgggcccccggcacgctcgcccgggagataccccttccccctcttgcgcatttcgcagctgcgctggtgtggggcatgagagcgaggtggctccaggtctccgcggagcagctgccagtgggagagcgaggagaggcgagggggcggcagcctcggccc

SEQ ID NO: 333895 - DNA, 794 bp, Homo sapiens
  chr10:23984183-23984977
  hyper
cgtcggttgccccgccgctcccccagcgcgagtgggaggcacatctcccctccttggataaggaaaccgaggggagacttacaagggagccttgcgcgggagagcaagtgagcgtttcgagagagggcaaggacccccccaggagggccaggccgggaggggtcccggtgcggtgatggggtgccaaaaggagaagacccccaactgggaggagggactggagaggaaccggaccccggggatctcagaaagggaaggatgtggggagagtgaaggtggaggcagtcacacctatcctggtgaccttggcgtgcccccctggagtggcgagccaggggcttatataggtgcgactaggatgttgcctcgtttttcactcggggctgcgaagagggcattgctctttctgatggctggaagacaggggcaaggagagagagaaccggccccgagacgggctggagggtggggacactggggagtttggagctgggggttcggagtgggaggtttgggtcttctgagacgctccagactctccggaggcggcagaggtcgaggcaggaggcgaatgtgacgcttagggtcgctacggttgatgttgggcgcctttggaagctggtcattaattcttgtcatcgggaggtttcgcggagggcgacagcgcccgggagcagggtgacccccacagcggccggccttccggctggctgccctccccgctcgccgctctccccgcgccgctgcgggtcctccgagaccccggactgtcctgagctgcttcgagggcgggc

SEQ ID NO: 333896 - DNA, 189 bp, Homo sapiens; identical to SEQ ID NO: 234645
  chr10:24497858-24498047
  hyper

SEQ ID NO: 333897 - DNA, 730 bp, Homo sapiens
  chr10:25241260-25241990
  hyper
gggactcagagtttcgtcagattgggggcggggagaggaggcccgggtccgaggatggaagcgatccccgccgggagggagaacaaagcggtggccctctctctcccccgacgcacggcaagcatttaatctacaagcagggtgccagggagggaggggagcgggccgagccccaaaatagggagtttgcatttaccacgacgcctcgcccgtagtctggcgcctcctcgctgctcccggccatgtttctcccggggaacgcgggaagggaagacggcgcgggaaggagcagggagggcgaaggctgcgtgggggatgggacgtggggatggggacggggacggggacggggacggggacggggacgggtccgccccgccccgggcccgccggcgggaagcagcggcctgacgcggatccatggccccggcgctgcgccccctcccctggctaggccgcgggggcgcggggagcagctgccaagccgctaccgctccccctgagcgcgggccccggacgcgtcccttgcggccgccgctgtcgccgccgccccctgccggatggtcgcgtgcagcccccggccccgccgccaagccccgcggggactctggagcaggaagcccgcggcaggaagagaacgtgtcccccaggcccctgattcccagatccaccgtcccagccctcgggctaacaatctccttgactcctccctgccagatttcatgcacgc

SEQ ID NO: 333898 - DNA, 982 bp, Homo sapiens
  chr10:25463760-25464742
  hyper
cggccttcgctactccggacagacgaacgtcttaaaggacgtcttcgctcctcgggagtcgcggctgcgctcgcggtgcgggtctgggcgcgcgccccgcgcctccgggcgaagcggtcgaggaggagccagtgccgggaggcgggaacgacctgcggcgggtgagactatggagcagcgtcttcggcggccgcggcggcagcagcagcagcagcttctgaacgcgcctcaatgagagcggcggtggcggcagccgggccgagagacggactcgggctgactccagccgctgggagcgcgaggccatgtaacccgctcggctccaggctgcgaggtgcgtaatccccagccggcccctcgcgcagcgggcacggccagcgctgccacaggtgacttgatttctgcgacggtagcttagccacccggggccaatctcgaaacattcttattttcaagtcctttggactgggtgccatctggagaagggggaagactcctcgaaaaagtctgactgttgagaaactgacgatccaaatttaaaaagtgattcccccccctcccgttccctcctcttctctctgggaggcagatgggagccatggcttaccccttactcctctgcctcctgcttgctcagctgggattgggagctgttggcgccagccgcgacccccaaggacggccggattcccctcgagagaggaccccgaaggggaagccgcacgcccagcagccgggtcgagcctctgcctcggactcctcggctccctggagccgctccaccgatggcaccatcttggcgcagaaactcgccgaggaggtgcccatggacgtggcctcttacctctacaccggggactcccaccagctgaagcgagccaactgctccggccgctacgagttggcgggcctgccggggaagtggccagccctggccagcgcgcacccctccttgcaccgggcgctggacacactgacacac

SEQ ID NO: 333899 - DNA, 905 bp, Homo sapiens
  chr10:25464759-25465664
  hyper
cgtgatgctgcagagcaataagtcgcgggagcagaacttgcaggacgacctggattggtaccaggcgctggtgtggagccttctggagggcgagcccagcatctcccgggcggccatcaccttcagcaccgattcgctgtccgcaccggccccacaggtcttcctccaggccacgcgcgaggagagccgcatcctgctccaagacctgtcctcctccgcaccccacctggccaacgccactctggagaccgagtggttccacggcctccggcgcaagtggaggccccacttacaccgccgcggccccaatcaggggccccggggcctgggccacagctggcggcgcaaggacgggctcggcggggacaagagccacttcaagtggtctccgccttatctggagtgcgagaacgggagttacaagcccgggtggctggttactctttcctctgccatctacgggttgcagcctaacctggtcccggaattcaggtagggagggccggggggcaggggggaaggcaaaagcgaagctttccttccggtcttgtgggtgggtgcacgtgtgaggaaggaacccttggctgtgacgcgaacgcttctcaccctcagagtagagacccgggctgagggacaccccacgcgggcgcgggtgcttgggggcaagaagcgccccacgcccgtcagcttccggcgctcggcgaaagccattcattctctcggaccagtttccccgcactgggcgagggacaggcagcccttggcaggacggagacacccccgctgctctgtgcttccctccaattgtccggagagcagggaggggcgttccccaccggggggcgatgcgacaacttggcgagcgccgggtgtgtccgcggagtggcaagcctcagatgagaggc

SEQ ID NO: 333900 - DNA, 1133 bp, Homo sapiens
  chr10:26222950-26224083
  hyper
cggagtcccgggaagcccctcggcagccagccaagggccctgcgaggatgtggatggcgcggatggcgcggcctccacctgcgggcagtggagagagcggcgagaggaagaatattccccgcgagccgggataaggggccccttcggctcggttgacccaggtcagatcctcccgccgaccttcggcccgccctctacaggcggcccagttcttcccctgctcggctgcccctgcccgcccctcgagggagcgcccgtagccagcgcccccgtaaagaaataaggaggcgcccggcttcccgcccaggtacgtgtcgggacagcgcaggggactggcttggggcggcggtgggtagcggcgcccgcgcggcgctggaaacggccccgcttccttggaccccggggcttgcagggcgggcccggggctctctgagcgcgaggctgccgcgaccgcccgcccgcccaggtcagatccggaggacctgtgtgtttgtcggggcctggggtgagagaggggactcgaggggagaagtagagcgggaaaccaagagggggaatgtgaggcttgaacgagctggatgggagagctcgaggggaggagagggatgaacttgagggggaaacgggggcgggggtgaactcgagggggagccaggaggagggaacgggaagggtgaacctgaggggtggacttgagggaagatcttgtgggtgaacccgaggagggaacgcgaggggatagtgaggggggatctcgaggagggaacgtgaggaatgaacttgaggagggaacgggaggggtgaacgtgaagtggaaacaggaggagggaacgggaagggtggcgtaaggggtgaaggaagatctttaggggtgaacttgggaaggaaacgtaaggggaggacctcgaagagtaacgaggggcgagaactgagggggccctgcagggagactggagggaggaggcgccgagtctggcgggtgtcgcctcggagacctgtggcgcgcgcgggctttgcggcgccgcccacaggtggcgctgggtcggcccgtccctgagggaactgcgttccgggtgatttctcagaacaagcaggtcggtggagctgggctccctgcaaccccaaatgcatcc

SEQ ID NO: 333901 - DNA, 459 bp, Homo sapiens
  chr10:26500689-26501148
  hyper
ggacccgcctaactcggggtaggtggggacgcgctgctcactgtggtgaggttgacacttgggccctgggtttcacttgcaggtgctgggcggcggagagccccgagaaggaggaggagagagagccagcagccaacccctacgacttcaggaggctcctgcgcaaaacctcccagcgccggcgcctcgtccagcagtcctaaccgttcaacgaggcagtcaccgccgtcggaaggcgctggagcctgcggggcagcaggggccaagcaggcactctggggctggcaccagcaggcactgaagctgcggccctgatctccgcagaggctgcctgctgcgctcggccctcaagtgcccgggccggccttcgtgctccgaaacaagagacctgggagccctcgggaaacctcccccgacgctctctctcggaactcccgcaccctcctttctcaccagccc

SEQ ID NO: 333902 - DNA, 2398 bp, Homo sapiens
  chr10:26503630-26506028
  hyper
cggagttgttattgtggtgacctagagtgtcagagccaggagagcaagaaagaggagccaaactgagccctgagttttcgaccacccgggctcccacagcctggaacagacttcacctagcacgctcagtgccagccttcggcaggacgctatcaacgcccgactggtttcctgctctcatcctggcgcctgggcccagttgccatagtgtggatcccatgactcctcagggaacccctggactcaggcacgcgagaagaagacagcgctttgtggagagaattgaccagggacagttatgctcgagcacacaggacttgggcctgtatgcgtccagcatgggccccaggatgtcccttctaagcgagggtcgaggggtgctcgcccagacgggatccccgggtctctgctttgttagcagctttggtggctggttcaggaggtcagagaaataaaacgacttgtgaacacaatggaaatgacaggcgctctggccaggcgcggggaaggcagccgcctcgggaagccgacctcagccctttcctctctctccctccctccgtctcccccagagccccggagctccgaggtgcacttgaagttcatctccactgccaggagaacgcagcgcaaactgtcaaagggctcccaatccttagggcgtcctccctgtctgcaatagctttttgtagaaaggaaatcatcagaacgattctgactttctcctcctttctttattagaaaaagagaaaccgcctcctaatacgcctcagagagaaccaatctcgcgcttccgggtcacccgctaccgcgaagattctctgggggcgagggggggcattggtttgaagccccttaaaacgagggccctgcaggcgatgccttctttcctactcggatttgtaaagccgagattgcttagttggaaaccctgttctcccctcccaggcgcacacagatcccccttacacgcaagcagcgggcgcttccacgcctccgcgggccaaggtcaccaaatgccctgattccatcccccacccgccatcaatcctgccgactctggccgctctgcctcattctcttccaagaagtttccattcgttttatttttttttccccagcccgaggtcctcagtagactccagcgtggattttaattgcctcaatcagcagtcattctccccagccgtcactcagagcctggacggtgggtcccgcgatctagcccttggctacgcaggaacggtgcgcccccgggtacggcgcggttcagcaggcaggcgtcaggttctaccaaggcgctgaaatgagcccatcagcgggtaggagcccttcccccgccgtcccctccccaggctcgtgaacggcgcctgatgcccgcccggggcgcgagctctcgaggtcgcagtgacctcagcacctgcttggaggaaaacggcgcgggaaccccgcttccttcccctcagctggagccagacctcaaacaaaaccccaatcgatgcacacagaaaactcctctgggccacgcttcccgcctcgccgaggtctccccagtctgcccctcgctgacgctggcgcgcagcggctgtggcagcacccgggacagcggccgcccgcacttcccgcctctggctcgcccgaggacgcgctggcacgcctcccaccccctcactctgactccagctggcgtgcatggtctgcctcgcatcctcacgactcagctccctccctctctcgtgtttttttcctccgccgccccctcattcatccccactgggctccctttccctcaaatgctctggggctctccgcgctttcctgagtccgggctccgaggacccttaggtagtcccggtctcttttaaagctccccggcttccaaagggttgccacgtccctaaaccctgtctccagctcgcatacacacacgcacagacacgcacgttttctgttcctgcgtgacacccgccctcgccgctcggccccgccggtccccgcgcggtgccctcctcccgccacacgggcacgcacgcgcgcgcagggccaagcccgaggcagctcgcccgcagctcgcactcgcaggcgacctgctccagtctccaaagccgatggcatctccgggctctggcttttggtctttcgggtcggaagatggctctggggattccgagaatcccggcacaggtaggaaggagaacgggggcctgcggcgggcgagttttgcggtggtctggggtttgcggaactacggagaagacgaaggaggtttttccacctgcaacaggaaacttcttcgggcgcttctccctgcttttgggctaagtccttgacggcccaagagctcaagacctctacagcctcttgtaccctgggaagacgcccaaatagtctcaggccc

SEQ ID NO: 333903 - DNA, 970 bp, Homo sapiens
  chr10:26506062-26507032
  hyper
cgcggtgtctcggggacatggaattccgtggtcctggggcgctgctaagatccgggtgtctggaccctggggtgggacggagtgaccgtgaagatagaaaaaaaaaatgggaaaggtgagagatttctttatctagaaagacagtctgcgaaaaaatggatagcttcagtgtttaggaaaactcgtccaaggtaggcagggagaggaatttgcctgagccgattggcacctggaagggcagcggtgtgggcttctcctcgggaaacagataaaggaaatgagggctggcccgggccgccagcctcccgcttgccttctgcacctgccggcctcaccgagtcctgagcggcccccaggaggaaggcggcccctcctaggaccccggactgattgattttcacatagaacgaaatttcacacgtccgtctgttgttctctttctgcctcgctgtctgcctgcctattcttccttgcagcgcgagcctggtgccaagtggctcagaagttcacgggcggcatcggaaacaaactgtgcggtgagtgcccagggaccggggcggccaaggtcggcccgcggggtccaagcagtcttctcacctccgcatcccagtcagcggagtcggggtttcctggctgcgggtaggcgggagcgagggagccgggcccggcggaggattgacgaggcccgcgttcggtgtccttacccagccctgctctacggagacgccgagaagccggcggagagcggcgggagccaacccccgcgggccgccgcccggaaggccgcctgcgcctgcgaccagaagccctgcagctgctccaaagtggatgtcaactacgcgtttctccatgcaacaggtaaagactcagcggggagccccggggcgcccctgcccctctctctgccccgcccaccgcggccggtgcgggtccggcgctgagagccggacaggggcgtcgaggtggcagc

SEQ ID NO: 333904 - DNA, 1187 bp, Homo sapiens
  chr10:26726986-26728173
  hyper
cggccaactgagcgtggttaaacgtggggagggaggagggtgaggttaccaacctgatggttgagaaagggcctccgcccagcgcgcccttcctccacccccacccgagagacagctgaactccggccgggacgcgcgtgttgccagtccagccctgcaccgcgtcccctgagggcgggctgcaggcggccgggaagccttgcacaaccggcccaaaagaggaagcccagaaagtgctgaagtaaacactttgggagaccgttgcaacataaagcggcctctcagtctttggtggaaccatcactaggccccaatcccttagtccctcttgcgtcgaggctgcaaaatggttccattcgccaggagacgctcctgagagaagggcgcgcgcggcacaggtagggggaggcgcaacgtttcccagaattaaaataaaataaaataaaataaaataaaaatcccttcaaggtggttgtgtagtaggggtgggatgggggagagaaaatcaggcgcagactcgatgagttggagaaagcagcccctaactcggagtcctttacgcatatgtttgtctgtcccactgtctctaaccaggggccttccttgcacctcggagcaaagcagctcggatagcgccacacgtctgcgcgctgcgtgggaagggcagggctgacagcacttcctccccggggcagcgacctggagcccgggtgcggcagtctgcaccgcgcgtcgctttcccggccggagtctcgccgccttcccgcgccccgcagcgccccgcagagcagtcgaggtaagtggcgctcccagtcccgggagccctgggagcgccagcacgggcccctcggggctgtcaggaacccgtttgtcaagcccgtcgggtccgacgccgggggcagctccaggatctggcctcgtgaacgcgtgcccccaggcgtggccctcgagcgcagcgggtccccagggtcccctccgctgatctccactctggacccggctcgcgagggtgggggtgtgagggtttggggttcgggtttgctttttcccgagctattgcaacagatttgacagatttcctgcccaggaaattgctgcaaggtcaaacggggaactgctatgaacccttgcacgtccagcaggtcagcaggtcagcaggtcagcaggtccgggagccccagtctccc

SEQ ID NO: 333905 - DNA, 32 bp, Homo sapiens
  chr10:28030467-28030499
  hyper
cgacgcgtttgcccgcccggacgctccacgcc

SEQ ID NO: 333906 - DNA, 2897 bp, Homo sapiens
  chr10:28030732-28033629
  hyper
gcgtatctgggcagcggggctaactgctacccttccctcacccgctggcgccgcaccctcgagtggccctggcctggcaggcctggcagggtatgcggctggctctcgaaacttccctcggggatctcttgtctgctcccagaggctttccgtcgcttgtggtcaggggaaaggtcgccgactggacatagggaataaagcaaaggagcattgccgccccggctctctttaagctatttcctttgatcttttaggaaaagggggaaactttctaaaggagttggtggtttgtggaggaaagctgcagaacccaaaaacaccgtcgggccgtttcccgactaagggagggttaaaagtacggcaagctctgtcccatcatgtaaggtaaaaagacctcaggaaaagcacattcaaagggggaggaggcagaggcagccaggagcctggagcgtggcctggggcgctgcgctccctcacgggtccgggaggtgtcgcgcgcggccgccagcgagcccagccgctccccgaggcttgcgcgcctgcgccggagcctcctgggtttctgcctctttaaacactttgaaatgcaattccacccgaaacgactggtagtaacattttgacgaaaccgaatctctgttttactaagcagcgacgccgcagaacaagcagctgatgcaatcgttcaggtggaggcggctaggacggccgcccctccccggcggggcgcccggggagccgccggatcgggccaggcagagcctgccctccactcaccggcagtctgagcagctggcccacccgcaagctaccgccccccccagcatacccctcaccccgctaaactcaaacccggccccgcaggcccggggcctccccctccgggttcgccgcgggcccagccgagccgcgctcacgcccgggactccctggcgggaggcgaccttcccgactccttgggccaggcgagccgcggggctctggcgaggggctcgagtgaccgaagagaagtccgcggagcctgagcctggactccccgactgctcggcttcgcctgtttctctgcaccgagctcagtcctttttcctcgccctcagccgcgcaccggcacccacagtccggagaggggcaaataacccccaactccgaggtccaggcagcggagggccgaggggcagctcctggcgcccttagtctccaccaagctctttggagctgccccgacgaattgatccctcatgttttaagataggagccccttaacatgagaatgcgcgagccctggaggggcagacctgcactcccagggaactccgggccctttcccgtccacccgcccgcgttgccacgggaccccgtcacagctcaccacccccacccctccgggccgcaggcgggcagggcccccaggggagtgcgcatacccggtcctccggtgtctcaggccgaggttgtccttgaggggcgggccgtcgggaatgcccacctcggggcgggcgtgaggactgtccaggacaccgctgtagggccggccaccccgctcccgctccgaggcgcctccgtcctcaaacagcaccgcaccgctgagcttgttgaagacgatggtgttcatggtgtcggttggtagggacgcgcggcgcggccgcagagcctcggggctgggccgccgggagctccgcagcggggctcggcttctaggagaggaaggtgcatctcgttacttactggctgagagtgctcagacccctgcaggttcagggccttgaacttggccgggtcgccgggctgcggagccgaggggaggagcggcgccgccgcaactggcagggaccctgcggctctccccagttggctacacgcccccgcccctgcaggttccccggacaggtacctgccctcttccttgcctgggcgatcgatccccccaatcccttcactccccagaactacaaccgggaatcattcacccgcagaggcaaaggaaacgaattcccaaacgagcctctgggtttcagtttgaatctgggagaggcatactccggactgcggagcgcgaccggcgtgaggccgcgcgtggttcttcaatcacagcagaagactaaagcctctaggaaccccaactcggggcgtcaggaggggttggatggaagggaagatttggggtaatgtgccaaccgtatccacaagaccccccagctcatgagtcccaggccataccgggatttgggggattttcgtgttttctagatcgtggatggtttggttgaaacccccgcatcttctgtccgccaaggtcccccggggtgaggttgggttcaaggacaggaaaaagttaagtggcgtcaggacgaaagcaccacttctcccccttctctcccagaatcttcctatcatcccccaacgcgccccgggaagtgcatggtcctaaggtccaaggcgccaggacccaggtccccagagccctcaatcagtgccattctcttccgcagcgcgggtgtcagccgcgagctcgtagcccctcgacacccgcctctctctggggtctccggggaccctttcagaggctgtaaaggtgtcagaagcccaaggcaggaggcagcttggtcggcgcacctcccgggccactgctgccactgtcggggagagccagcagctcacctctggggtcgcggaggccctgagcctctgcctgccgcgcaccggcgtcaggagcaagtccgcgcggccgcggagccgcagagttacagccccaaggcgcgcggcggacttcgcccgccccatctcctcgcctcgcgcctcgggacagctcccgtttcctccgagcggcctcagcttcgctgccagcgccccctttgcccgtccagccgcggcatgggctgctactccactaacacacg

SEQ ID NO: 333907 - DNA, 683 bp, Homo sapiens
  chr10:28033689-28034372
  hyper
gcgcccacactcgccaacgcccccgccccgcccttcggccaccgcagcagaggccacgcgtgacatttaggaccacgcgtgaccaccgcgatcaaacgacggctacggtctgtgttcgtagggaagtgaagtcagacctctgctggatgtcgtgtgtcccctaggactgcgtcctcccgcgcagacaggtacgtgcctggggtgtgcacatagcctcggtgataagtgtcaaagagaattttcgtgcttgcagcccctgttctacagtcaagactcgcgttggtgttttcttttaaaatcatgcccttagggatgtgtgttcatgctgctttatttgtacaagacacccttccccggcccggccttctccgagccaccccagcgcgtcctcctagatgcgacgacgtgtttttcctagcgaagtcatcacgaggttagccacctcggacacttccccggcagccccaagcccacgcagagatcgcagacacagacacccggcgcgctgtaggtctgcaggcagcaggctcagaggcaagcgatggcaaaggtccgagcgctgtcctgtcgcaaggggtccgggggcgtgtgaaccacacttgctgaccctcccaggactcccgcgcgcggccacccgcgcctcttctcaaatcacttaccccgattcactccagactgtggcc

SEQ ID NO: 333908 - DNA, 839 bp, Homo sapiens
  chr10:28034906-28035745
  hyper
cgtccgcgcccgcccggccgcgggggctgctgttaacccctagcagaggagccgctgccggggagccccgggcccgccgagtcctccggagccgggcgcggctcccagatccgccggccttgcagtcgtggagcagacggggcttttcccttcgcactttaggagagaaattggagaagctgccgggagcgctcggctccggctccagaagctgagaggctgcggtgcaaatcccgtgtcttagctggcccgattgccggaaatttcactgcgcgtggctaggcgggagaggccactgtgacgcgccctgtattttcctctcgattagctggagggaagttagagctccgttttgcacctacagccctggagcgtattgcgggaagtgctagtgcccaggagcctcttttctgatgtcactgggcttctggggtcctagttgtctcagtcaaagccaggcacacattcacctccggggcaagggctggtgaggctgccctcgccgctgggtatagggatgggggaaagcaaggatgggatgagttcagcccaggtggccaacccgcggtggcccaagtgcagaagaggaagcgcgcccaaagccaaggatctgcacgcagcaaaggagatggaacttagaagaatcacaagctgggacacagggcaaagagagagaatggctaccagattctctgattgatgatactttgcttcctaacattaccgcaaatataagtagcgaaagcggcggtttaggtgcaactgcaagctcagagcttctggcagcccagaagatccccaaggtgccaacacgaagctgcctgcgctctcgccgaagg

SEQ ID NO: 333909 - DNA, 273 bp, Homo sapiens
  chr10:28968999-28969272
  hyper
cgttcagagagagggggaagaataaaggtaagggtgggaagaggtttgtaaaacagcagatcccggtgtttaatttcagagtggaggtttcggatcttcagacgggaaactggaagaggcgtgtgcattagtttagtttactcgctgtggcatgtgacagcgaccagggtccactaggtggatattgtattagtgagaacttgaagacccagattatttcaacgagaaactgatattaaagcctccaatcttgccctgcgacaaaatgtgaac

SEQ ID NO: 333910 - DNA, 577 bp, Homo sapiens
  chr10:29011000-29011577
  hyper
cgtggggctgtctccctgtaatgagaaccaccgctgagagctgtttagacaaacgggctcagcgctccggagccgcgcgggcctccaaatgcaagggtttgttctgctggggcagcgtctgtcgcgaaagcagcggcggggaggaagcgcagagctgtgttttgaattaatgggttcagcttcatgttgagcacaagtgggaggctattttagagaaaccttcccaggccagccgtcactgatgtggcaaactcagcctctgggcagaccggctggaaatagaaacgtctccgcttcacgatggcgcacgcccggacgtccccttccgagagcgggtcccctttgtcccccgaggccccgccgccctgtgtcacgtccccacctcgctctgggtccactgatctcttgatgcacgcgtcccatcagcagcagccgaaagagggtgctcgggcgggagtgaaatccctgtgaaatgtgatcaagaacacaaaatgctgaggcagctccagctaacatcagcgctcagtctccccgcccaggtgggatcctccaagcgcctcaacgcaccgcccatccc

SEQ ID NO: 333911 - DNA, 2153 bp, Homo sapiens
  chr10:30024003-30026156
  hyper
cgccttctggagctccactcggggtgccagggactgctggctgtcacccggggactaaaccactcccttcggggagcccgcacgcgcgcagaaacgtgggcagctggggtggcctggcgcaccacgcatcgggttcaaacccgcgcgggccctgcggaggcgccggtctgggaccccgggctggggcgcgggagccaccgcagctccggccacttgcggctggtgtcgggaaaggaaccgggcgatgtcgtagttctgatcactggcgcgccactccccgggccacccgcctccccgccatgctctcagcgtaacgggcagccgcgctaacttcccgaaactccgcggagagaaaccctgccccggcccgctcctccccgaggcgcgctccggggacggaagtgggtgggagccgcggccgcgccgcgcctttgttacggctcggggaccccgcgggccgagcgcagcgccccgtcgcagcggcccgggcacccgccggcctccacccccgggaggcgcccccgttcccgcttcggtccccggcagggcctcccgcagccagagcgagactgacccgcgcctcccgccccggagcagagcgcagcggcgcgtcctggcgtctgccggccccggctccgcgcgcccctcggccaccgcgcggagggactttgctcacctacccggctcttccacacctcccggtggcaggatcgccgcttcccgccgacagcggctcggcggccccgacttctcagcagcgccgcggccacgccccgcctcgttcccaccgcgcggggagcgggtccccgctcgggatgattcacttcgctccttacctggaggctcgcgcgtccccaccccttgcgacccgcgcggcggccgggagctggcgccctctgctgggccaccaggcgggagcaccctcggactgggcaaggatcgggcggagagggtggggacacagaggggggccaagcacaagcacccctgcctctctcaacgcgggcaccccttcccaaaacaggggccagtgcgcggggaccacgctgggacgactctcgggggaagcaccagagctgtccccacgccccaggacacgaactcgcgcccggagccgaccccctccacggccagcgggtccagccgcgtcctcggaggtggcccaaggaaaccgcgatgaatcggcataagcacgtcctatcttaaaacaccggaaaggcagattttactttgtttggaaactaagtttgtgtcctgtgtctcagtagctctcagggtggtggcagtcacgcccccccggtcccagggctgggaagatgcttgggctagcccccgctgcagccccggagatgcggggctttaggatcccaggggctggaggccagggccgccctatcgctctcccggccgggggtgtggctgtccaactcgctctgtcgcccgagtgaactcttccagcaggttggcctctcaggctgtcccctgaggacctgagcgaaactctggaggggaccaggaagaagggagagaggacatctccgagaccttcccgggggtgcgcccacactcacgcgcccacactcgcgtccccaccttcccccccgtctcacctccgcgcgctcctgcagagcccgactgcgcccgccctcctcgcccacctgccgggcccgggccgggggtgcacactagcgcggggccttggtggtgcggcaccgtcccctgcccaagctggctctcgaggaggtgtgggccccgggaaagtcggccagggccactgtcgccgtcgccgccggagcagagccagtggcgagctcgtcagggcggaccgggcgcctccgtccccgagagccggcgcgcgagtcccggccagcgggcaggcgcccggtattaattgtagggcccccgggtgtcggccgccaggcgctctgagtggctcggaccgcgcgccaggccggcggggccggcgccacccaccccctcggcgcgcgcccggcccagggacgcgcccacgcgcacgcgcccagcggctcagggctccctggctctcaccggctctgctgcccggaggcagccgcttaccctggagccctgagaggcccctttgagtctccagaccttccagggataaataaaatctggcgacctgtgccaac

SEQ ID NO: 333912 - DNA, 801 bp, Homo sapiens
  chr10:30347908-30348709
  hyper
gggaactgggacctcggggacccagcgcggcggctgtcagctctggggtgaggtccgcgagatctgggcgcgagggcgcgggaggggttggtggacacaggctggggagggcgacttcgagaggggagtgagtgaccccggccccccaggccctccgcgcgccgaggggcgacgcgagcgctaacgccagccgcggcccgcggtgcccgccccgggacccccgcgctccgagcggggcacctgaggggaggggacgcccctcccgggctggcaggcgccctccaccccgaggctgccgggctaggcaccgcgcggggggcccaggcggggctgcgactgggggtgcagacatcccccaccgccagggtggctggaaccggagcgacgtcccagctggagaagttggggggagtgcgggaggctgcgggtgaggcccgcgaagcgccgtgggagcggccctaatggacggtgggagccaggagggttagacgccgggacttaccgagcggctccctcatgccgcctcgcgccgccaccgccgccgctccggccggccggggaccagcgcgacccgccccgcctgcagccgccgaggccgagcatgcccggagaaccgccgtccgccccgcccaccgcccgggcccgccccgcccaccgcccggggctgcctcctctgcgctgagggcggtatccaggccacgagcttcctaggcttttggggtccgcctgcgtgggtcgcgcagaaggcacaagtgagctgaccaccattccctcttttcttgtcacttgggtttgggccac

SEQ ID NO: 333913 - DNA, 140 bp, Homo sapiens
  chr10:30509077-30509217
  hyper
cgctcttcccgggcagccccatgttccagggagccaaagcttgcagcgtgagagggtctctttttggaacaaaggtcggtgagtgaagtcaagtccaggcttggttttgagagatcacatgtcagttgcacaaacaggac

SEQ ID NO: 333914 - DNA, 583 bp, Homo sapiens
  chr10:31422648-31423231
  hyper
ggggagaagggcctcgtgggccagcgcagcttgctcctctgcagacccagaagcatttgtgcgtcccgggcgtggcaggcccggcgcccactccgccctcccgcccctcccccgcgccacgtcacccgggtcacgtgagtgaccaggctcctcaccccaacccccctccctactcccgccagactcagctgctctccccgggagctggggagccgggggcgggcagccgcgtctgtcctgcccctcctcgccccctcccccgcagcctgaggagggcgttaagcaaggggcttcggagaaattagaaccagcgttctaaattaaggggagcagatgtccttgttttgctcgcgaggcctgggtggcctgctgttcagacagaaatcgttgaggcgctgaccttccgggactgctgtcaatctccgcgtgcagatggccagcccggagcctcgccgctcccctgcattggaaatgcggcagccgggggtgccggcagcttgagagaaaagtctgcgtggagggggggtgggggggatgaggggaggcccggggagacagagggcaggagaaaaaggccggcccc

SEQ ID NO: 333915 - DNA, 157 bp, Homo sapiens
  chr10:31607149-31607306
  hyper
cggcgatgaccgctcatttaggaaggaattcatggcctgtggataccttagctctgagtcctgccacctaggatcccacggttctacgcgaggaagagggcggggagcgcggaccgggtgtgggaggccgaggtgacagcaggtgagggccgggtgc

SEQ ID NO: 333916 - DNA, 2139 bp, Homo sapiens
  chr10:31607954-31610093
  hyper
cggttgccgcaaaccgcccggtccctagcaacaaggttccggccgtagagcgagagcctctaggtgtaaggaaggtgatgtcgtaaagccgggagtgtcgtaaaccaggtgcggtggggaggggggaggggtggaggcggaggggtgggggggaagggggagggagggggaggaggtgactcgagcatttagacacaagcgagaggatcatggcggatggccccaggtgtaagcgcagaaagcaggcgaacccgcggcgcaataacggtgagtggcggaggggaccggggagcggcggagtcagggggagctgggcagccggggcgcccccgggggtgaggggggcgagccgggctgggggcagccggggcagggacggcaaagtggagtgggaaagtagaaagtagtgctctctgcccccctccgctgccgccgctgccggagccgcgccgcggccgctcgctctccctgaaccgttatgtctcttacctggtctctctccgcctagcggctcccgccgcccctgccgcctccctggaccgttagccggcgccgacgccgccgcatccccggcgcagggcgggcggccgggacgcactggccacttttctggtcccgggtggagcggctgttgcttctttccgcacttttccccactcttgtgcccttcggcgcctccctctccccctcctcctggccccctcagcgcgattctccctcagcgcccaggcccccgggagccgcggaacaaacttgtgcccggcgctgaccgtgcaaagtggcttccgcgcgccgcggccccggccggcgccgtcgctgtcgctcgggccccgcgactcgggccgggctgtgggcgcgcggcaggcgggctgcggcggcggcgggacggggcggccgcgggttgcgtggggtttgtgcgcgcgtgtgcgcgggcgccggctgtgcgcgccgcgggcggacagggttcggccggcggcggtaaagttgggacccgcgggccgggcgcgctcgcgtaacggggattagaggcgcgggggcgcgggtccctaagcgcccctcctccctggcgcctcccgctgcccggcccagagccccggcctggggactccgcggcgagccccgcgagtggggtccacgtttggcggggcgcggcggggcggcgcggggaacaaggcaggaaaggtacccacttaacgccgccgggagccgcgcggatgggggcgagctgggcggcgggtgtgtttgcggagttgttacctgggcttagagaccgggaagcaccacagacagatccccctcccggggcagacgaggtctctgcgccgggatgggccggtgtgcgtgcgcctcgcgcttttctctttcggtttttggggaagttgttacctgggccggacgcacggagcgctgaagccggataatggggcttggatggcgctctgggtctcgggtggaaggagggtgggggagggggcggacggaccgacggacgcgcggggctgctacttgcaccgcagctgcagtgtttattgatttgtgctgctgtgccaagggaaacacacacccctctgcctggcgtgagagttaaaaaaaaagagagacagcccgagggatcgagacctgaacatgtggtggtggttgcacagtcgccttttccagtttggagagacgttgtaagttgattgtatttctggttatctcggggcgatgctatgctttctctccctctcgtgcagcagcgaaatgtctgctgattgttattgtctggacagttcctgtggcgagaggggcgagacttgtccgcccgggggcggcgggagcgcagggagagcagcccccgcctgcgccgccccggtacctgtttgtataataatgggcggcaacggccctgccgccggccgcagcccaggctatataaggaattacacgtacatttcggaccgaggggctcgctttggttcctgcgttatttttaaaacgacttttaagagaggggcaataaatgcgtctataatgggaccgctgcagcgtcgagaaaacgaggaaatacgtgtttaggagaaaactctctcgtgctcccccagccccaccccccgcgcctgggctccctttctccctcccctctgggatgcgaaacgc

SEQ ID NO: 333917 - DNA, 777 bp, Homo sapiens
  chr10:33623029-33623806
  hyper
cgtcaggagggagcccaaagacctgaaatcctcctgctctaaaccgcctgatctcatttcttcttctctcctcccagataaaagtttccttcgcccgggagtcggttgttcccggctgatcccgggaagccccgcctgagccccggtccggggcgggcagctgggagccggggcgccgctgtcacccgcgcctctgcctgtcacttaccgttgcgaaaagcgccggccggggcgaggacgagggcgagcacggcgcagaggagcggcagccccctctccattctcccttctccgggtccgcaggcagacgcgggagaacgaggacgtggggggaaatgcagcaaagaggagaatctaagcgatccgaagagccccaactccgcctagagctgtacaatcctcagcccgtcttggagaaaagaaagcagcgaggcaatgcctggatccgagaggaacgcttctctttttgtgtctcaagtcgcctgcatcctgtcatttagctccggcttcctctcccttttcccacacttgttcctcttccaggagccactgcccgggccatgtctcaaaaaaaaaaaaaaaaaaaaaaaaggccgggggggggctgtgggtgggagggggaggagggaggtagggcaacacacaccaaagccaatttccaggaagaaaaaaaaaaaatccggcttgtttctggacccgttggagccgcggagctggcgcccaggggaggtccgggtgtctgcgggaaggaggggaacgagcaatgaaaagatgagc

SEQ ID NO: 333918 - DNA, 1472 bp, Homo sapiens
  chr10:33623838-33625310
  hyper
cgcctcccctcctgcggcctccccccactccggagcccttccctcgcttcctcccgcccctctccccgcttgggctcgcctgtaattgcctgacaggagactgggaggaacaactttccctccgagtgctctccccgtccgtctgtctgtctttcccagagaccctgcagggatctccgcgggaaggaaggcgctgggagtctgcgccccggtcgcgtgggtgcgggcgtcggaggaaggggcgcggaggtcagtgccagccgcagggtctggccagcccacctcgcgtgctcgctctgcacccctagagggagagctgggcagctcctgcaggcgcagatcccgccgccgcgcagtgcggagcgcccgggaggtggcggctgcttctcgcaacttcaaatcccggggcccgcgccctcggcggcgaggaacgcagggtcaccccctgccactcctcatcgcgccatcctgagacctgtggcggggagcagcggggcacccctggacgcccctgcccagagctggagggcgaggaggggaaagccgggctggagtgggagccgcaccgcgaagccgggcgaggggcagcagtgtcgctgtggtgtgaagcgaagacagaccgcctgggcgggcgaggccgggctgcagccccacgcggcctccctggcccgcatcagggcgcgcggctgggtgccctctgcgcgccgcggaggcttcattgtttcccgagatttggtgcccgttcctctggggcagagggaacaccggagggtgggaggtgctgcgccttccaagcaggggggcaatcgccgcccgaccccgcccaaccttgtctgggagcccaggtgctagggaggggtgtggaaatcaggggtcgggcggcccccgtttctctgtgcatcccgagggagggaaagagtggcgggggaggggtgctcttcgctgcgccctctcagtgtccgctcccggccacagacaacgtgcacgccggccctggagctcctgccacccccacttcccacagcggctcgtgcccccagcccgctggatgccccccaggcccgtccccgagggttttccgagaagtgctgcaggaagcgtttgtagatgcgaaaagcaaggacatttctgggaagaaacaggttgcggtcaccgatcaggccccggagaagggtcagtgcccacggggcacctcccagggagtttgtgggtaaggtgaaaaggtcacacgcctcctggggattggcgtctacacacacagccaaagtacagcctgattcctacctggcacaaatagctggccaaagggaggtaggaatgctggcaaggagactctggtcaaaggttttggcggaagaaaaaggggcgggcagggagaaagcccaaggcgcgcgggccccaggccaggactgcgcgctcgcgactcgggctgggagcagtgacgtgcgcccctcggggtgcaggccgttccc

SEQ ID NO: 333919 - DNA, 794 bp, Homo sapiens
  chr10:33625332-33626126
  hyper
cggagcccgcactcgccactctcttgccccgggtcaagcctgtcttctcctccccacgcgcctcgggattcccagtcgccaagttggaaactcggcccccccgagcgcctctttcctctgccagtttcctccttcttctcagctgtcggacccctgggaggcgcggggtgggaagtgggcaccgaagggctgggagttaaatgcctaagttgagcggaaggagcactgtcgaagccatgggcagccctgcgcccgggcaggcgggcaggcgggaggcgaggcgggggcgccgaccgcgcccagcgcagaccccgggggagtgagcgccgcagaggcagcctgggctctcggctactacccgcgcgcggtcgccgcctccccaggtgcagccccgccagtcccagcccccggctgcgccgggcgagcggcatcatcagatttagggtgacccggagcgacctcggtccaggctcggagggagaggcgcctctcaggacctggcaggttgacagggaaggggaaccgggagggagcggcggccggggcggcctggagtctcggaggcccgcctgcgtcctggggggacccgacctccgcgctcgctccggagcgcccgtttggatagctctgagcctcggcggggtgagcgagggggcacacgagggagacttgagctgtgttgtttttagaaaactgccgccaatctctcttcccctttccctgctgagtgtgcattttccagcctagacccgccaggccagcaaataaagccaccggatcgtgcactccggagc

SEQ ID NO: 333920 - DNA, 1781 bp, Homo sapiens
  chr10:35102985-35104766
  hyper
cggccccgcagcccagccacatggaaccagcccgggataggtaggagctgaggtcctcgcaggaaaacttttcattccgcgactcttccaaggttgtgctttccagagcccagcaagtgggatcagctcagtaaatgctcgcaagcgagtgccaagtgccagcggtggccctcccgggaacgcctccccgaccccaagccggcgactccccaaaccctgcagcccccggacgcgacgggccgcccctgccggcccctaccagcaggggacatggaggaaaagccccccgccgctgttccgcccccgcccgagtaagggagaggaggcagaaggctcgcaacccgcctctgtcggaagggcagtcacgaaactctcctcacaccaaaagttcccagtccccggcctgtgcccccggggcctgggagccgggaaaggcctggggctggatttcccggcctgcgccccccgcgcgctggctcggggcttggctgggtctgcagactccggggaggcgcccagggccggcctatgcgccgctgcccggctcgccccgcgctaccgaggccggagctcccgggcggagggtgagggcgggggccgcgggacccggctgggtgtcccagaggctgcgccccggcccgcgcagagaactttggcgcccgcagtccggggcggggggcgcccgcgaggcccgaccggccgcactttccctttccccgcctccctgcgcctctcctcccccttccaggaagcgccatattgatcccggcgccgtccccgccgccgccccctccccgcccgcgcccccggcccctcaccttggcgatggccttccggtagcgggtcaccgcctgctggatgaggctgaaaactttcatgtggccgtccccgcacggcacgaccacccgggtccgtccgaagcacacggtcactttcatgccgccgccgccgcgggcgggcccgcgcccctcgccgagcgcagccggagcagccgaggccgggaccgaggacgctgggcgcggaggagccgctggggactcgggcgcgcgggcggctaggggcgcgggcaggcggcggcgacgccggggggccgctcagctcgcatgcccggcccggccgccctcgcctcgcctcgcttcgcccggggcttgcctcgcctctccccgccgcggcgcccgcagcctccggccacctgttcggcgtcgcggcgcgctcgccggcggctgcccggggctgtgtggcgctggcgctcgctcggggccgctgggggaggggacggcgggaggggaggggaggggaggggaggggagggggaggagcagggcagggcacacaacaccgcgcacatgcggcagggggaggcgcggccggctacccgcgcggggcggagcgcaggaccgcagctcgcgcccccgccaccgccctcgggggccgacctccttccctccttccctccctccctccctccctccgggggcgcgggacccctcgccccagtgccagcacgggcaggcggccgtctgcccccaccagccctggcccaggcgccccccagcccccttcaccccgcccgcccagcaccctgcagggctgcgtcgcccctcctcggggacgccccttccacgcctccagaagtctccacggagccccccttcccctttctttgtcacttttaatcccattcctcgaactggagggttttgggtgcaggcgctcccggggaaagcagtttgtgctcagtgcggtgagtcccctcctcaccgccccggaggctccagccc

SEQ ID NO: 333921 - DNA, 1230 bp, Homo sapiens
  chr10:35929169-35930399
  hyper
gcacagcgcggggccggtggtctcgtagcgcacgtgctgctccaccgcgcccagctcctcgtactcgccgcgcccgcccgggccgcccgcgcccgcgcccgccgcgcccgcgcccgccgccgcgccgcccgcgcccccagcgccccccgcgcccggcgcgccaccgctgcacgccaccttctcgtggcccgccaccaggcgcactaggtagcccaccgacacgaagaggtagcaggccgagaggaagataatgggccgctccgggtacttgaagcgctccatgtcgataaggaaggtggagacggtggcgaaggtggacacgaagcagagcaccgaccacaggccgatccagaagacggtgaaggcgcgctcgtcctggctgaaaaaggggttgtggcagggcagcgcgcagttagcgatctggcctgtcttgacgcggttgtagagcgggtggcgctcgctggacacgctcaccataggcgcgcggcactggcacccgggctcgcagggagccgcgccgccgccagggggccgcgccttcccgccaccgccgccgccgcgagctgggggcgccgccgcgtccccgccgccaccgcccctgccgccgccgcggtgcgggggcctggcccccggcgggcggccgtggccgctgcccgaaggcggctgctcgccgggcggcggcggcggcaggcggcgcggcgggctgggcgcggcggtggttaggtcggtgcggttgtagtccatgcacagcgtgtcagggttgccttgctcgggcagccggtcgcagcgcatgcggtcgggccaggcgaagccgtactggcgcatgagcggcgcgcagccggccttggcgcgctcgcacaccgagcggcagggcggcagcggcttcttgtagtcctctaggcagatgggcgtgtacatgctgcacaggaagaacttgagatcgggcgagcactggatctccaccagcggccagaactggtgcacctccaggcccgcctcgtcttgcgtgtcgtggttgaactgattgggcatgtaggtgtagttgtagccgatgcccttacacagcggcacggtgatctcttggcatgccagctccttggccgaggcggccgcagcgccgctagagcgctgcagcagcgccaaggcggccagcagcgaggtcacttccaacaggtaaccccactccatgctgtgcgcctcggcccggtgccctcgccctccaggcggcgc

SEQ ID NO: 333922 - DNA, 1842 bp, Homo sapiens
  chr10:43248638-43250480
  hyper
gagcccacctcctgcgccccgcccaacctcgggtccccaggcccagcctctgacacgccgctcccagcgcggccacgccacagctccgggctgcgctcccccaggcaaaggcgccgccggcgcgtccagcgcggcctcctcctccaggcggcgcttgtgagtcaatggaaaagtccttggcgaactgagcagccgcctagtatatctctgaagcctcctgcggagacttcacggcttgtcccaggagcttctacaacagcctggcattgagagtagagttgtaatattttccgccagtttttcccagcccggccccgaagcgtctgatcttaaagtccacgtatcagactccggggggcgtccctgcaagagcgccaggtccccgacacccaccagggaatgaatctgcgcccaggtccccgacacccgccagggaatgaatctccgtcccaggagaagggcgtggcgaggggagaagcaacaaccacaggacccgtgacagtggccaagccttagaggccccgcatgcctgccaggcgcccgagcccacgcagtccaggtttccccatccgggcgggaaccagctgtttcccctgcacgggcgagggcgctggggtcacctccgccgacgccaggcgtgagctccagaacccgctcccaaccgcccggtcccgtgagcgcggggagcctggctctcgcctgacaataaagaaatcatcacggacagaaggaaagaggagcgaggctgggaagggagcggctttaatccggggtccgcccccttcaattctccagcgcagcggccccgaaagtggggtggggacggggattgaggctgagctcgcttcttccttgttttccgggtctcgcgcctctgaagcgaactgggcctggaggggtgctggggatcgagggagcggcgttggtgggtgaccgagggaaaggtggggccagcccctgggcaccggtcggaggaggattacgaggcggagccgctgcctgcccgcgcctcacccgcttggtccacccaatagctccgctgtagactcgcggcggcaggagcggcgggccagatggtgattacaacccggggcgctatccctttggaacctgacccccaactccgctcagtaaccggatttccggaagccgcgacctcgaagcccccagcgtttctccaccgacggcggggccggggctcctggaagcctcggagccgcagctccagcctgcagcgcacgccttggcccccagggagcagagaggcagagtacccccctgcatccggagcatagcaagcatgccccaggctgaggacctgcgacttggtgggacttcggtgcccgcccctccgccactacagggagcagaggcggctctggaagtcggtttagtgcggagaccgcgaccggaggagcgcagaacgctcctcccagcgtcctgggctccgcaggcacaatttttaaaccagaggcgaaatccgagtcccgccgccctccggggagggagcgtggccgcctagccgagccccttctctggctccgcccgcttttgcgccgcgaggccgcctggtgagttccagggccctgtggtcccccagccgccggcgctctcgggtgtcttttggccgcggcaggaacggagctgggcgctcagacggcgccggggtcgtttctgtgcccccgcccggtggccggagccgcagccttgccccttccccactggggcagcgcctgcctttctcgcggccggaccgcgccggagtcccaggccccaggcagcccgggccgcagctgtcatggagaagcccggcgcgtacttggggtgcccggcaggagcccc

SEQ ID NO: 333923 - DNA, 357 bp, Homo sapiens
  chr10:43571939-43572296
  hyper
cgcctcctgcctccggccccagcagaggccgcgctcccactgcgcctctcgcctctgagaaatggcgcagcaagcgctccgcggagagcctggaggcggggcgcccttctctgagtccgcggggtcgcaccccgagccagtcggccagacctgcatcccgcgtagcatccctgccctctctgtgcagcggaaagggcaaaaggcagggactgcaagcgggcgcgcaccgggtaggaagagcggctctgcgtaggtgcgcggacccgggctcctgggttccatccccgccgcgcacctcggggtccgcacccggctcctgccgggcccttttcggccgcaccccgctcccgcaccccg

SEQ ID NO: 333924 - DNA, 728 bp, Homo sapiens
  chr10:43572559-43573287
  hyper
cggaacgtgcgtcgcgcccccagtgtccgtcgcgtccgccgcgccccgggcggggatggggcggccagactgagcgccgcacccgccatccagacccgccggccctagccgcagtccctccagccgtggccccagcgcgcacgggcgatggcgaaggcgacgtccggtgccgcggggctgcgtctgctgttgctgctgctgctgccgctgctaggcaaaggtgagttctgccggccgccggctcccgcaggggccagggcgaagttggcgccgagcagcggagcgggcgcgttcagaagcgcctttctgtttgccgtgggcagcgggctgtgcggtcgccggccacccggcctcggctgggagcgcagtggctgcggcgggcggcgggcgaagggcaggacgcctcgggccgggcgcctcgggccggggctgggcgggtctcgggcgggagcggagcgcgggccgggccgcgggggtcggtgctcagaaccctagccatagccgcaggtctcaatctggccgcgccctgcgccaaagccgcgtcctggagcaaacgggacagccgtttcggggccgacctggcggacgggtcagggagccccgaaagcccgcgattcgtgcggagagttctgtttcggcaggagacggctccgtcctggtttccttttcccgctcagcgtccgtgcgttcctcccccagctctgccgtcctggccagccgagggattc

SEQ ID NO: 333925 - DNA, 427 bp, Homo sapiens
  chr10:43600291-43600718
  hyper
cgcggcggtgtgcgccccgctctgaccgcagagcccccttcccgaggaaagcggctggcccggtcccggctggtgatcacgcggggcccctgtctgcttggtgcgcaggtgagggtctgcccttccgctgcgccccggacagcctggaggtgagcacgcgctgggccctggaccgcgagcagcgggagaagtacgagctggtggccgtgtgcaccgtgcacgccggcgcgcgcgaggaggtggtgatggtgcccttcccggtgaccgtgtacgacgaggacgactcggcgcccaccttccccgcgggcgtcgacaccgccagcgccgtggtggagttcaagcggaaggaggtgcttgtccgcgcgtgctgtggtctacccagtgtctgtctccggccacagttcgtttctcggtcggtttagtgtcc

SEQ ID NO: 333926 - DNA, 541 bp, Homo sapiens
  chr10:43697752-43698293
  hyper
cgtctgccccctgtggttgaaagggcgacagcgctgaaaggggtgtgaccccgaggggaggcgacgcgctcccgcgccctagtccacaggcatgcacgaccccacccagcacagggcctagggcatggggactggccctcttggctgaaacgactccgaccctctcggaagatgcccgcgcggcctctgcccccggggagaggggactgtgcccgatgctcaggcgccgcgcccccatcctccaatcccccagaacgcaccacaggccaagcccctcctgcgccagccaagactccgcgccagcccacaccagccccactcagaccgctggaccccgcccccggcccccgcaccacccagcccgcaactctgcagctttcttcgcccacgccgcacagcctccaaaccagcggattccgcccacgttgccagcctaggccccccaccacccgctcccaccacgcccctaacccggacccaacccacagctccagcccagacctcaccccagcctggtgtggcgtcacgccccaactcagac

SEQ ID NO: 333927 - DNA, 133 bp, Homo sapiens
  chr10:43725410-43725543
  hyper
cgggcgcgcgcctggcgctaggtgtgggggcgccgtaggtgccggggtgtgaggctggacggggcgtccgggatcggccgtgccgggggtcggtgctggcgcgcggggccggcgagggggcgcagcgtgggtc

SEQ ID NO: 333928 - DNA, 650 bp, Homo sapiens
  chr10:43761675-43762325
  hyper
cgttcctggggccggcaaggcctggggcaaagagagcgtggtccttcaaatgacccttgcccagcagggagagggagacacctggcatggccctggacctctcccccaaatgcagagctcaagccccaattcctcgccaaacagcaagggcgtgagataccacggcggggcccagaatgcagaagagcaaatggaaacttccaactgcgcagccctgagctcctccgattccccagcccccacccccacgccaggccccgggcagcgaacctgcccgcagtgcccacgcccgcccgccgcgtgcgctcctgccacgcccggcccggcccggcccggcccgccaggtgccctgaaggggcggagggtgcagggggtcctggcgccgtccagcccggggcggagttctcagcaactccgcgcgccgggatcccggccgccctccccgcgcgcgtcccccgccccgcgcccggagcccgcgccccggccccacgacggccgcgccgggagggaccccgggcccgcgcacgccgcgccctgcccgcgccggcgaccggagggcacggccccaggcgcgggcgggggccccgaggcactgagggtccgcggccgctgcctacctcggtccgggccagcgtcgctcccgcgccgcc

SEQ ID NO: 333929 - DNA, 233 bp, Homo sapiens
  chr10:43818322-43818555
  hyper
cggtttaccgtcaccatggcaacagcgcgtcctgggctggggcggggccagactgccagtgcctttgtggcgcattaggagctaagccagtgattggccatctgggcgcggggcgggctgagtcagttggagggggcggggctgaggctccggtgaacgccgtaggcccgggctgggccgagggagatgatggatgccgcttcttgccactccccgggggcaccacagagagc

SEQ ID NO: 333930 - DNA, 286 bp, Homo sapiens
  chr10:43857618-43857904
  hyper
gaccgccaccatcacgacatagcgcagcacatatgggtaaacaaatggactgagactcaagcaaagaagtaacccgagacgcgcgttacacggaaaacgactgcgcaagcgcggtagagcaggggcttgcaggtgagtgggagcagccaatccacgcgaagggggtcgggaccacttccgcggaggaaagccccgcccacacctcctgggccctcgcctcactggcggtttctcccgcgagccagcctcatagacattccttggtgctgattggctggcggccagc

SEQ ID NO: 333931 - DNA, 1067 bp, Homo sapiens
  chr10:43892074-43893141
  hyper
cgcaaggtgggaggcccgggcgcgcggtaaacgtgttttggcgggaagcagcgccgaggccccgagacaaggtgacggcgacgttcccgcggcctgctcacggcactccagcagcctcggaccgcccggcccggcaggaaggtcggccccagggcctgcgcgggctcgggcgggagcttccgggcggggggcggagcgagcggcgcagcggggagagtgggggcagggacgggagggttcccggagggaagggcgcctcgcgggagggggaggggaggggaggggaggggagggggcccctggcgggcttccggggccctgagggcgagagcgagggcgacggcaaggtggggtgggggctgctccccggcccgccaagctagcgctgcctaggcgggagctcggggacccgcgggccgagcgcggctgaagggagggaagggaagaggcgctcgtaggtctgcgtccgtctccgagcgaccggggcggcggaaagggacctggggggggcggccgggactggagtggcggggccggggcgcccgcgcggcggctcaccacgccagggactggcccgtcggccccgaggaggcgcggggtccggagtccgggaagcggaggcctcgtgatccaagaccggcagccggacgtgggtcacggggtgcagaggaggaagtgccattgccgggcccgccaagatgtcaccaatgggaaacgcgtgcctgcaggtgcggccccgtggcccgcgcgctgggcccaggcaggaagtgggggaaggagagagtcagggcggcgggaagacatttctccgagttctcccgaagggagccaggcgcgagcgcgacctggggaaagtccagagtgccagccacggggaagggcgggcagtgcagagtggaagagaagccagcaagttagacacagcccctctctgggaggccgcctctaaaatggaactagcggacgtaccttggtttgtacatttgaccatggacacacgtaaagattttgaaaaaaaatctttgaaaaaaaatttttttaacgcaattcctaaacttttaactaac

SEQ ID NO: 333932 - DNA, 996 bp, Homo sapiens
  chr10:44185124-44186120
  hyper
cggcgaggtccactgggccagaccctggcccgaggtggccccggagctgtgagcgggaggaagagggaagggcggagtctggagccctcacgccttccgccttgtgcgcggtgcaggctgccgagagcccggccgggcaagcctttccgccgtggtcagtgactcgtttgcacaaggactttttagggaagagagaagccaggccttcgctgtgggcctagcccctcaaaccgcaagctctcccccttggggtcctcgtcgtgaacgcccttctcgtctcccgccgggctcactctttcgcattttgctgcgaaagtttactggaaataggtccattcactggtcgattcagagggacactagaaacgcgatgcccatatctaacacatcctggccttttgaagagggataaaaaataatacccactagagccccgtgcctccggagagtggggcttcgcatttgcgcgtccgaggcccggcagggagagcttctgggtcctgggggcgcgcacatccggcgcgcgctgtgtcggggagcggcgctctgggctgggccggcagagggcgctgcggggcggccgtggaacaagcaggggagagcgtcaggggacccagcacagcctgcctgctgcgccctgctgccggccgcgccctcctccgtgctgcgttctcctgctcgacgctgcgtcctcatccaacactggcaccgcgcgctccttccagggtcggaggcccacagacccctcacgttcgcttctgtcaggagtagcggcagaatttcgataatttatgtctttgatggagactgggaaggtagcctggccgctgcgcaggagagctgcgcggggtccaggaggggagcgcggagtgggagcagtcgactcgggctgcgcagtgcgtgtcggctgtcacgggacaccggtgaggaccctgcacccagagtcgggggtccaggctgttgctggaacaggaggcagctcggtgtccacggttc

SEQ ID NO: 333933 - DNA, 365 bp, Homo sapiens
  chr10:44806416-44806781
  hyper
ccggctggtccagtgcactccggcgcggccccggcacccgtgggcaccgccatgtccttcgctcagctccgccgcggctacctgcggggtctgcgcggctgcggtggccaggtgaggacgtctctgcccttgcgcggcctgcgctgtatgcttcctgcctggcccgcgcttcccctgcctgcatcacccgctgcccgcgcggctcggagcgcgccctctgctggaccggccacggccggcgggcggctgcctccaggctccaccacaggagggggagcacgcgccctgctgaccgcacgcccacgtgatatcgccttctgccatcgcagaaagcagcggttcagcctctctgcctgcacacttgc

SEQ ID NO: 333934 - DNA, 1345 bp, Homo sapiens
  chr10:44879650-44880995
  hyper
cgtgtgaggctcggagggtccctgggcctctctcaggtgaacccgagaagagacaggaagacagcggctggacgcgcgcccaggtccgcgtcgctgcggaccgcggagctgtgcagaagcgcggcctggcgggtggcacaagcccgacagctgcgccgcgcagcccgcccgcgcctggccaagagccccgcgagggtgtggggagaggatcggcttcgcagggagcggaggctgcgcggctgcatcggacctcacagcctcaagtcgcggcatgaggcgaactttgcaaagcgcgctctcgccatgcaccgcccgacctccagcactgtgcgcagcaggacctcggagcccattcgcctgtggaaaccgagcccgcagcgggaaggcagtgggtggagggtgggcaggcaggggtctggggtccgcggctccccaccctcgcgccttcccgcgccagtcccgaacgctctcttggggcgttcctgcccagttgtcccggctgacctcgctctgcagccagcttgaggtcaggcggtcgctctctgcaggtcacaaaccctcggcgcaaaagtagggctttgaacgcgacaccgcaccagagcgcccagctaagcgagctgcctccacccccactgtgtcgggcggcgcaaactgcgggcgcaggcagaggagccgcggctctgcgccgggcgggagccgaagcccagagcctcgccagggcctccccgccgagcgcacttaccgtcgctgaggcagagcgcggtcagcacgaggaccagcacgaccacgaccttggcgttcatggcgcgggcgggcgggcgggcgggcggacgagcgcgggtcgggggccggacgccgagcgggcaatgcggctgacggagagtgaaagtgcggcggtgggaggcgcgcgccgggcgctttagaggggagagccaggcggggcggggcggggcgcgcggtgaggggcgggcccggagccgagtgctggccgtggccggggtctctgacgcgcgactccctcggcggcaccccccacccatccccttcgcccctcctccgctccctctgtgctcccgaggcgcagtgcgctccggcctttgaccttctcaggctccgctgggccccgcaccgctggcccggtctgcagtgaggtccgcagcctgagcgacgccggctggagggccgcttattgtccctgtgacagggccccactggagagactgaggaccttaggcgtaaagtggggcgcgcgtggaaagctgcgggacggggcctttcgatggcgggaactgaatgagaaccaatgaaaagcaaacaagttagtcccgggcggagggcctgctgg

SEQ ID NO: 333935 - DNA, 290 bp, Homo sapiens
  chr10:44882100-44882390
  hyper
cgtcgggcgtccccaggcctttgctgggctgggccggggagcctggccgctcaccggccgcagcgctggggctccggcgccctctggtggcggcgcctccctccccgctcccagagctctggccagctccattcctgcgcagctgatgaaacccgggagggcgaaggggtccgcgggaaatctacacccgggtggaggggcgccctggagctcggagatccgaccctgcgggagccgcgcgcagcctcgcttgcccttaaatctggccaaagcaaacgccatcgcctctc

SEQ ID NO: 333936 - DNA, 791 bp, Homo sapiens
  chr10:49731746-49732537
  hyper
cgtcccggccgtggacttggcggacctgcagccggcgccgcggccagccccgggccctggagggcggaccctcccctccgctctacccactcccgcccaggggccggaccccacccccactcccacatggggaccgaggagccccaggatgcgcccccgcgccccgagtgaaggggagcctccccttccaaagttaggagactcagaggagcagcagccgcacctgagccctttccaaagctgaggcaggtgcgggcggccctggacaccccgtggcgagtccccgaggcggggctggcagcctctggcggcggccgcagggagcggggcgcacgtgcgcgccggagttacctttgggcgctcgcaggtgtcccctccagtccttgcagcagcacagccccatggcagccgcccgcggccccgccgctcggctcctctccccgcctgccgcctgcgccccggggcggcgcggccgaggtccggcccacgggcagtgcccagctgggcgcagggtgcgcgggaccgccggcccgcggctcccgggccctcacactccaccgcggccccgcgcagcgggcatgccggcctccgggcagaccctgctaatcaataggagaacgcgcagatcgcgaccgccgcgccactgcccgcttttatctccgcgcgccggggcggccccgcgctgctccctgccctcgccggcgccctccccacggcccgttactctcccggggtgccgggccgcgcgctctcccaggagccgccagggggcgccacggagccggggctgc

SEQ ID NO: 333937 - DNA, 575 bp, Homo sapiens
  chr10:50323163-50323738
  hyper
cgctcctgctgcatctcccctcggggcctgccgctgggaagatctcggctgctgcgagagtacccagccccaggcgaggtcgggacggggaccgcgctcacgggaggcgtcctctgaaccttggggaggcgccgctgcgcccgccagaccctcggcgagcccaccggagcgcgctggcgacagtgacagcgccgccccccgcccgcgcccggaggtggcagggcctccccaccaggcccggagccccggcctccccggcgcggccgcccggcccccacccttcccgctcccgcctggccccgccgcgcttacccggagccggagcccgcgccagcagcgcggccgccgccagtgccagcagccgcatctccccgccgccgcccggcgctgtgacgcgggagagcgccgccgcctggcccggccgccgccagcccgccccgggcccgcgctcgcgcccgcccccggcccgccccttgggccgcctgccacgcggggccggggctgctgggtcccgaggcccgcaccgggcgcgggagccgccgcgcgatcggttcgctccaggatctgtggcgtct

SEQ ID NO: 333938 - DNA, 1349 bp, Homo sapiens
  chr10:50605507-50606856
  hyper
cggggcgccatttccgccagggccaccgactccgagagtccaggcagccggcccgggaggagcggctagcaggtcccgaaggcgggtgaggtggcaggcaggggccggcagggcagccgagggcctttcctacgtcatgccaagagggctgggagcccctagagctgatcctcccttagcccaggtcaagagactggctcgcgcgcgctgtctctctccctgtctccctcagagggcccctgctctctggagctcttgacaagagcccgaggctcctcttgccgcctaggtctgccgaaagtcccctcgggttccctcctgccctaggcagcagttccctgcctgtgcgctttgggaacccggtggccgtgaagtgaggtgcggacagcttctgggccgcctcggccaagatgctcaggcgcacctgggggtgtgtgcgggaaccctcagcggcagcagcccagcccggggtgcagtgttggccccagaaaccaatgaggtccaaacgccagtctcagttccccatccctgacatcgaccgaggcaagttcctattaaggcccagagatgaccccgggacgagacaggctcatccggcgcggatgagacaggctcagacctgcgcggtctgaggacggcgcgctcgccgagcaacccggcaggtcagaaccctggacagcggcgccggtttccgcacccccacccacccccggctgctgcggagaaagaagccgtaccgggggcccagccggggcccctcgctgctcaggggtgggatccgcccggccggaccccaggcgtccggggaccgaccccaatcctctcccagtccaaacctgcgaaagttactccggacatgcgctcagcgctggcaacagagacaaaactcccttctccgcagtaccacgcgccgctcctacccggccgctgcagccggaaaccatctcgcggcccccgaggagagtccggccgcctcactgactagataaccagccgagctccctcaacacacccacctcgcgggggctctaagccggcttgggaccctcggcctcgcctcgcccggcgctcctctcccggagccgctaggctgggctccttcccgttggcaaaacagcgagtaaacaaacaaccaaacaaccttagaaacgaaaggctgcaccaaactttgatgacgccagccccctttttttccgaatgtctcgacacccgggagaaggtgactaataggtgttcgctacggtccccctccccctaaaaaagggcgttagtaacgaaaaggttatttttccttaatttttgtgcggtaaaatgtattttccaattaaccaaattcgccgatctgtctc

SEQ ID NO: 333939 - DNA, 489 bp, Homo sapiens
  chr10:50815014-50815503
  hyper
cgttttctcctacaggattggacaggaagttctctgttgcctgcaagttatgctcagatagaggagtccggaaaggaatttaccaagcgttcaagtgaagaggaagccagaggggcggggcctccgtgggaggcttcttggttgcggtggggccggggccagcaccctggacagctcccggcggctggcggggagaagaggctttgccaggtcccatctcggctcagaccctcccgtagccttttgctgcaggggcctgacgcctccttgcaaccccggcactcccgtatttggagccacgatggattgggggggcgttgccctctgatctgaaagttagagaatgagggagtttagtgtctttggagcctccttagggagccagcccaggaccttcctcctcccatgggtcttgatctgctcctcacccctacactgccagcgtgcggccaccttggagatggagcagcaggagcacgacgccgtgcc

SEQ ID NO: 333940 - DNA, 1493 bp, Homo sapiens
  chr10:50817510-50819003
  hyper
cggcggcggggagagaagaggcggagctgggggaccagaccgctaaaggagaaagggggattccaggcaaggggaatgtggccaggcagtgcgggagggcggcagcggccaggctaatattcgcgaccccgactggggcgcggcaacttctgccctcagtccccacaagctcccggccgcgattcgcggccgagaaattctgcggaggggccggtgggtcagagccaggccaggcagttgctgagccttcccctcccctcctggcgggagtgtgtgtgcaaggggccagggggcggagtcggagaaagggttgggggtgtccgtgtccagcgctcctccggacgcggctccacaatccagctgcgagaacagatggacgcagcggcggctcacctcgggggcttcctgctcgctgtgcgccgaggtccaggctgaagcggagatcgcaagcctctggctcccgcctctcccaaggggcctcgaggaaccggctgccgcgcccccttccccaagaggagaagagcgggcgctgaccccgcgagtcctagaaccgcgggcggggggcaggcagggggcggggggcagagggccagctaccggcgcggaacgcccatcccaggggctggttcaagacttccacaccgagagcccttcctgggcctccagccctggagcatctggagagcggacccctgcccggccacgccccgcccccggcccccgccccgccgacgtcgcattagcatgagcgacgtaagtggcccgggcaccactcgggggctgggactcgccgcgtcacagccccgagtggaagggaaaaaaaaagaggaggcggcggaggaggcaagagccgacgcgaggggaggggagcgcagcggcggggctaacgggcgggcaagcgggcgggcggcaacagcatgtccctcggccagcgcgggcggcctcttagcgcggcgggggctgctctgggcgcgccccgggcgaagtgcgcccagtctccggccccggcccctcggcgcgcccgacttcccggccgcccctgagcccagcagccgcgggtcccgggatcggctaagagtagctgcaacgcctcgccggacggagtcctttcctttcccgggacgctgggccatgagctccgcggccacctgaggcacaggggagtctgctcggccaggacagcctccccgaagtcccgtgccctcgcctctgcactgcgggacgccagcgctcggccctggcggaggcgtcctcggaagagcatcggggtgggggcatggaatccgcggaacctgcgggccaggcccgggcggcggccaccaagctgtcggaggctgtgggcgcggcgctgcaggagccccggcggcagaggcgcctggtgcttgttatcgtgtgcgtggcgctgttactggacaacatgctgtacatggtcatcgtgcccatagtgcccgactacatcgcccacatgcgcgggggcggcgagggccccaccc

SEQ ID NO: 333941 - DNA, 200 bp, Homo sapiens
  chr10:50821487-50821687
  hyper
cgttcgcgcaacactccatgtcccgaagaccgtagtctgatgatcgaggcagagtcttcccatcatagcgtgaagaggcggctggtcagggtcgcctgtgtgttagctgcgcctgtgagggtctgctctgctgttgtgcgcatgtctgtcctcgatctgcgagtcgggctgtgtgtgcctgggcggagtctgcctttgtc

SEQ ID NO: 333942 - DNA, 923 bp, Homo sapiens
  chr10:50969681-50970604
  hyper
cggttcggcgaatgcgtactgcagcctgctgtggcctcgggattaccccgtccccctcccacatctcccggggggcggaagaagcgcatcccatgcaagcagcgacctcaggccatgccgccctctctcaggcctcagttttctcatctgtaatcggagaccgcggttaaaaccgtctattaggctccttggtagtccgaagctgcctatgggtcccgccaggtgcacagcgctgaccctccccatcccccgcacagccctcgcagctccgggccctcccctggccacggaaggcgcggggcagtctgaagtcctcgggctggagaaacccaccgcgagcacccgctcctctgcgcaggaccctggactagccgggtggtacgcgcgcgatgggctgggggtcccgggggaggccacggccagccaaggtcagagccaaggtcacagtctgttcctcctccccctccccccggcggggccagactcagggctgcgggcagcggcgccccaggacccaggagagaggagctgtggggccggtccccaggacggcaggagaagcagcggcgcagggaccgggagggggcgggccgccgcgctcaccgggcgggcgggccgggtccgcgctgcagcgaggtccggaggctgcaggtcagggggctgcgcggaaggggtgcgcgcgcgccgtgccaattacctgggtcacgtgacgcagccgcccacgggcgcgcgcccctgagactccgcgcgtcgtgacgtctccatggatgccccgccccgctcctggcgctgtccacggtgctggcggcccaggcccgaggtcgcccacggccgaaggggggactcctctctgagaccgcagaacggggctgaggccctgaaccccgtgtgctcgtcctaaaactaggacgaatgtaccagac

SEQ ID NO: 333943 - DNA, 738 bp, Homo sapiens
  chr10:52177724-52178462
  hyper
cgccgtagtagaattggcactgattgcggtattttaatcggttcacaccgtctgttagtgtattctaatgaaccacagcatctccggagcaacacttacggtctctcgtccccggaggcagtgtctcctggaaagttcctggggcaccaagtttgcgcgcggctcctcgcgctcagggtgcgcgcagccagccctggcgcgggcggaaaggcgagcgcgctgagcggcgcgcagaccccgggcgcggctcttgctgggcgcccgcgccttgatcggtcccggcggtcccgttcccctgcttgccgggccctggtgctaggacagcggcgctgcggagcccggcgtctggagctggcgggcggccggatgcgccgatcctctcccggggggtcaactgcgagctagacgcccagccggacctcagaggctccaagagcggggttggcgggtgtggcccggcagcagagggtttttggaatgcagggtgtggccctctaccacggcaaaaaagaaatgagtcagcccgttcagtcctaaccaataagcatgttcagtgtcggttaaggcggaactttcctttcttgatttataccaagcttagaagcctttcacagccttttctttacgcctttgacaacttcgacacaacttctagaaaagggtaggttgcctttgaaaacgcttgggaaacaaggattaatcttacgaaagatacttcagtggatgtacattagtttc

SEQ ID NO: 333944 - DNA, 877 bp, Homo sapiens
  chr10:54072982-54073859
  hyper
ctagaaagggtattgcgtggtcccgtgcaaggtaagacttgggagcaaaccctgcattcggaagcgttgcgatgtgatatactaatgaggaagtcaggcgctaagccctaagggtttcttatttctccacattagcccaccactgagaagggagaaccggggaaaggcgactgacctggcacgttggaccctgtccgctttggtcccggccactttgatctcacgcgtctgcctaatcaagttcatctaccgccgcgattgccctgattcaaagaacaacattaaatggtttgattatcggatggtcatttccctcttccctccacccctgatctaatttctaaacgccagtctctcgcctccctctctaaacttcccatcaaaagagaattagctcttcttccttcttaccctcgtttgatgtgcaaatttccttctctttgcacatttttctcgcagtggcggggggaggtgggggaggagggcaactgaaggacctcaaagccggggatctaactcagatctgcaaactgcgactctaaagggttaatgagcaacttgcacccgccacctggccctctcagaggcgtcttgctagagccattgaattacagaccggtttgtatttaatactgaatatgacttgtgtgcacagtcagcgagtattggcataaaggagaggggcaaaaagtgcttttgcagagcctatcacccctcggctctgtaaagtatttcagatccggataattcaacccttactgccaggcaagggcacccaagttcccagagttcctgctgccgcctgcatttattaaagtcgtctgctataacgctcgctggtagccttcaccccgaaggtgagccgggccagccgagc

SEQ ID NO: 333945 - DNA, 95 bp, Homo sapiens
  chr10:60026209-60026304
  hyper
cgtgacttcaggcacgtcattcttaaccagggttggccttagtcacctcgtctaaaaatgtcagtattagcaacctaaacccgaatcgttttacc

SEQ ID NO: 333946 - DNA, 80 bp, Homo sapiens
  chr10:60272053-60272133
  hyper
cgagccacgtccatggcgatgcctgcgaaagacgggcatgatttcttctccaagccttctttttcctcttcctcacgttc

SEQ ID NO: 333947 - DNA, 1244 bp, Homo sapiens
  chr10:60272365-60273609
  hyper
ggatactccatgtgcgttcaggagtgtgtgtgtttgaggagctatgaaagtgcatgtatggaaaggatttatacgtgtaagtgcagaaagtggcagtgtgtacgtggtgtgtgtgtgcgcgcgcgagtgtgtgagcgccaggggccgcccgcccgccgcggctccccgtgggctggccgggccaatgagcgcgcggctgtaggggcggcgggcggggagggggcgccgagccctgcggatggaggcgcgggcagcgcggcgcgctcattccgcgcgggcgttgctggcggggggcggcgcagccactggacccggaccggggccgcgacccggggtggcgggtggcgtgggcggcgcccggggctgggatgcgccgggggctcagtggcggcggcggcgttggcggtggcgtcggcggctgcagggggacgagctagcgccgcggcgctgggagccagttgagcccggccggcgagcggaggcggcagcgcaggcagagcggcggcggcagcgggagcccgagcgctgcgcgcccaccatggccgcccagggagagcccggctacctggcggcgcagtcggaccccggctccaacagcgagcgcagcaccgactccccagtgcccggctccgaggacgacttggtcgccggggcgaccctgcacagcccggagtggagcgaggagcgcttccgcgtggacaggaagaaacttgaggccatgttacaaggtaggcatccctcgtgttctcggactctccgactgagcctctaactccttttcggacatccccaccgcgcgctccggcgcccgctactccagcctacggccggccggtttagctccaggcccgctcccccgcggagccggaggacacccagggactggagacttcgcgggactccccacccttccacgcctctcagatttccaggcgctgggggccctgtgcgaacttgactggcttcagaaaagccgaaggccgagtttgtactggcgcgcccaagttgcgttctggactttggagatgccaactttagcccggacacctgggctgtgccatccggaccactcgggccgcacagagtatgcgtgaccctccccattccctggcagcctcgagttctgtctctctccgtctgtttcactctctccccttgtcagtatccacttcctccagctgaggggccttgtctcactattgggaaacgctctgcagatgtcaaggcttaagacaggagctccc

SEQ ID NO: 333948 - DNA, 1210 bp, Homo sapiens
  chr10:60935879-60937089
  hyper
tgtccggccgagcccgcagggtgcgggcagcgagtatcctgggaccttcaggggaggaggtggctcccacaccccaataccgtacagagagtccgaagagtccgggcccttatttttccaattcttggtaaacaacaaacatgctcgccctcgcctccccgtgcagacgcctcagggccaactcgggcttcgccaggcaccgagagcagacagaagacgccaaatggctatcaccaggagagagggcgaggcagccgcgcggcgtatagcgctcgcccttcccgcgcgctcggtcgcccgacgcctcacgcgcgaggttgccttggcagtggctggagggcaggtgggggcgcgtgcgcgcagaagggcgggggagggaccaccgcgcgccagcaggtgggcgcgttctcccgcgcgcgtgcgcgcgtcgaagccctatacatcacgttccccgagagcagcgtcccctccccgccgggagcgcgcgcctcccatcctcgcgccgggtcctgctcggtctctcagagccgcacactccgcggagctcctgccacagccgtcgccttcgcggcggctctccagccccgcgcctcagcctcggcgccgcatcaccgcgtcccaggcctccttccctccctctgccactccccctccctttcccgctcttcttgcccacccggccggcagagagagcctggatacgaagcaggcgggcttcagagtgggttggaaaaatggaggtgccgcgcctggatcatgccctcaacagccccaccagcccctgtgaggaggtgatcaaaaacctcagcctggaggccattcagctgtgcgaccgggacggtaagagcggccgggaccgcgaggaaagggacagagttcgcgccgaggcgccggggccactctggctccgccgacgccgctcgccagggcggcagggtcttttgttgtcccctctgtgcaaataaatgcagatgtgggttaccctccgcccaccgccctcccctcaccccagaaacaaaaggaccccggggctcgcgccttggcgcggaaagtagccgtccacaaccgtggcgcccttcgccgccttcgcccgcctggcccggacgagggcgacgttcccgctcgcggctcctgccccgacgaggcgtttccgatctttgccgcagtccggatttcctgggtctctgggcactgaaggggaaatgccctc

SEQ ID NO: 333949 - DNA, 166 bp, Homo sapiens; identical to SEQ ID NO: 234758
  chr10:61469829-61469995
  hyper

SEQ ID NO: 333950 - DNA, 255 bp, Homo sapiens
  chr10:62492589-62492844
  hyper
cgtgtccttaggaaaggttcagcctggcacggagttggaggggcgagccaagagcagagaagccccaagacgagagaccgaggtgagggcgtcctgagcccggggcccgcttttctttttccagacgaatgtttccaagcagaagccccaagtcctcgggcccccctctctcctggggatgctccagcactgggaccgagttcgagctctcgcctctgtcccgggccgcaacttccaggcgcaactggactccca

SEQ ID NO: 333951 - DNA, 422 bp, Homo sapiens
  chr10:62761026-62761448
  hyper
cgcgtccccatgagcctgcggatgtggggactgcgggtgggcagagagaccccccataatcccgcccaccctggcgcggctcctcccgggcgcgctcccgccccgccacgccccgcgacgcccgcgctacctggggacgctggaagctcccgcggcggctctgggtcccgccgggcggccgaggctggcgcgggctttgtaaagccgccgggacagcgccgaccccgccccgccccgccgaccccgccctctcccacctcggccgcctcccccgcctgcatcccgggccacagtccccgttccgccacctcgctcccggcccggcagccgccgccctgcggggcggggaccacgggtccctccacatcctcgcggcctgccggacagtcctgcgggcggggccccaacgcctaggcggtccc

SEQ ID NO: 333952 - DNA, 902 bp, Homo sapiens
  chr10:63212437-63213339
  hyper
cgagccttcccagtgttgcactgggaccctagggtggccctggggtgcccaagagatgcgcaagcatctcgcgccttccaagcgatcagcgaggaaaaacggggtccaaattcgagtagaatctgcgggttgcgggaagatggcctgcgagtgcggtgggggacaataccctagggccccgtgcgccctcgctttcccggggcactctcaccatttgtagcctctgccgcgcttgaacttgagggtgagcgcagtctccaggaagagcaagaggttgagcagcgcaagcagccagtaccgcggctccttcttcacctcggtcactcgccagaccccgaccagcgagtgcagcaggaacagcaaccgagtggccagggcgttaaggaagaccagtccctccatgctggccggagcactctgcctacgtccccttgcctgcgcccccaggaccctgccgggcgtgcccggagcccaccggtgagcaggaatatgacaagcactgagacctgctgctgcttgtggtcccttctcaccctcagcgcccgatgccggtagaactggtgcgcggctcgcccctcccccaaacttcctgagaactcttcaaagaggggtgagtccaaacccagcttttccagactgctgggttttccagggagtctggggctgcgctgccctgtctccagggcgttattctccagcgctgcccatccccctcccaatctcggggccagtctccatccctgtccggtatccccgcccccgggcctctgtgaggttcccaagaacttccccatcacgagggggcggaaagaggagggaggaggactgaaggtcaaggtgcagcacagccagaaaggcggaggaggagagcatctctggcagctccgccttacttttccacc

SEQ ID NO: 333953 - DNA, 219 bp, Homo sapiens
  chr10:63656701-63656920
  hyper
cgagttccctgtgtctctcttggctccggctccaagttcatgagaaatctgtccccatacccatccttctgaagcttccagcctttaccacctggacctgggctggagtcccacccccaccacagctcttgagacaggcgacgaatagacccaaatttgagatgtagctcaacctttgaccactagaggtctcctggaaagcaatgacccgtataaccc

SEQ ID NO: 333954 - DNA, 616 bp, Homo sapiens
  chr10:64133789-64134405
  hyper
cgccgcgactgcgaggctgacacgcgtctttccttccctcccccggggaatgatcccagcatctctcgcagtgatgtcagtgtaatcctgagtcggatcgggctcccggctgggtggcgggggggcagatgatgctcccgccagctgggcagagcaagggtgttccccgcggaggtggcagccctgggccgcggcgttccggaacccccgcacccacggcgcggtgccccacggtgcccgcgagcgccgcccccgctggctagccgcgcctcgctccgccctggacgccgccggtcccggcgcggaggtgcggcggggagtgggagccggcccggctcagtctgatttacggctctgctgaaaaccgcttcgctcccgcagcatcagcaccggaggcggcggctgcagcagcagcagcaacaagtcgggtaagaggcggccgccggccatctgcgcccgcggctcggcggaggggacctgccggggtggccggggctggggagggggtccccgagcccgcagcatggcggggagttgggagagccggcttcccggcccccaccagcaggaactcatgtgcacacgaatccactctggcacccgtgggctggcacgc

SEQ ID NO: 333955 - DNA, 1120 bp, Homo sapiens
  chr10:64574692-64575812
  hyper
gaagggggtgggtgatttcccggctgctccccatccccggcgccttgtgcctttttctccctccctctcccgctgcgcttcagccgagggctgctggagcgaatgggggatgtagaggaaggagtccgtaggtttccgtgccctcccaatcttctccgcctttcccgacagccgcgcgtccccgcctcagcccaaggccagtggcccggcctcgaggaaggcgcgggggccgcgagagacgactttccacagcatcgccaaggaaaccggcgtcgccggtgcccccgcgggcctccctcggcagtccgggggctgcttcccgccgttgcgcgccctcctccaccacccactcgctgcctccgccggccggagcccccgccttactaaccccctcaacttcgcgggcggcgggcaggtgggggcgcgcctccaggccgcaagaagggagcgctccgagattttcccggggtcggctctgcccaggagggagctaccgacgctttcccctggcgcttctccgccgctcggctctccaggcgcgcagctctccccgagagccccgaactttaccgtcactttgcccctgccccgggagaggggaggtcgaagtgctgccggccagagggcctacgcaagcctcgaaacccggggggacgcctcttccacccccatccctgcgctcgcccggggctgggcgcgccggggcgcacgcacgccggtttgctggcgacctggcgcatctgcccgcgcgccctggtctcagctgtcgcaggttcctcctgcacccacttccagtcttcaaagccagtgcagtcagcaccgtccacctggagccccaatcctctcctgcgattcccgcacacccactgcaccccatccaccacctccgggccgcgcaggtccgggcctgcgaagacacgcggcttacctccggccactccgttcatctggtcaaaggggcctcccagttcggcattgggaaagatggtcaccgacgtggcggcgaggtcctccaccgggtagatgttgtcagacagctggtgcacaaaaccactgagagttactgggattttgtctacggccttggcggtcatcatttgctcctcgcacaacctggaga

SEQ ID NO: 333956 - DNA, 470 bp, Homo sapiens
  chr10:64578291-64578761
  hyper
cgttcttaccacgtgcgccagcccactccgcctgcgctctggcgggtcccgcggcccccgcgctgaccatgggcaagacgacgcctcggaagggagtccgactcgcatctcgggccctgagtccgaaagaacgggggaaagccgaattatgcaaatgcggatccctgcgatggggctcgggttacggcccccgccggccccttaggtgaggcacccaccggcagcaagcgcgggcgaggcgactgctcgcgcttcgctcctctctgcgcacgtgggcggaccggcaggcgggcgagttgcccgggccgccccgcgactggcgctgctgccaaacccgccggcggtcgccgcgcgccaccccgagggggagctcctggacgcccgagtgcccggccagcagggcgcggagggcaggaccggggctgggggcggggcggggtgcctgagcgagggaaaaccgcgaggtcttc

SEQ ID NO: 333957 - DNA, 42 bp, Homo sapiens
  chr10:68685841-68685883
  hyper
cgtgtgcgcggtacggggctctcctgccttctgggctccaac

SEQ ID NO: 333958 - DNA, 152 bp, Homo sapiens
  chr10:69834339-69834491
  hyper
gtctttccctgaacgtgcacccagatcagctcatggggactgggaaagagaaatcatctgcacacacccaacctcgcagccaagcagacgactaccgcaaccggccgctcgcaacagcttcagaggccggcggccgaggcttggcagtgcgc

SEQ ID NO: 333959 - DNA, 52 bp, Homo sapiens
  chr10:70320036-70320088
  hyper
cgcgttttgtctctcgctcaactgtgcagggtccagcgaaggcagagcccca

SEQ ID NO: 333960 - DNA, 1236 bp, Homo sapiens
  chr10:71078140-71079376
  hyper
cgagccctcatttccgaggaatgggaccgccttcgtgcccccggggctgccagtccctagactagccctaggggcttctcgtcccggcggagccgggcggtgcctcctgcctgcgcctcgcacctccccgcctggcacggcccacccgggcacggcgccgccacgcgtgaaggcccgcatcggctccctacgtgggggacgtgcaggatgatgcggggtcgggggggatttcgctgcgtcgcccgccccctttccggcgcaggagggagcggccgccgcgtccccgctccccggccgggacgccaccgccgggcgttgcagaggcgcgccgcaaccaatgggcgtggaggaggtgggtcggctggcggctgtcaccctccaggggacgggagcgcggagaccgggagcgcgcgagctgtcgccgcgccccgggccgagggggaggagccgggggaggaggaggaggaggagccgccgagcagccgccggaggaccacggctcgccagggctgcggaggaccgaccgtccccacgcctgccgccccgcgaccccgaccgccagcatgatcgccgcgcagctcctggcctattacttcacggagctgaaggatgaccaggtcaaaaaggtgagcccccgcccgcgccgccgctggtcctggccgcagccttgcgttccggcatccgctcgccgcctccgctgcctccatcctccggcgcccggccttctccgggccagcatcgagttggactgcagggcgcaaggaaagccttcgccttcgattctaccggcattgtcagtgtctctgtgtgtgtgcgtttttgggaggggggcaatcgggcggaagacccccgagaccgggctgcctgctgcagtgtccttgaaacgggccctggatgtcagataggcccccgggctgtgcggggaggtggccggtgggcccttccgcagggcctgttcgggagggtccgagcgccgtgggaggaggtgtgatcatggagatgctggggaggtgatcgagcagcaggcgggggtgctggctggaggccaggcctcccatatttggggttcctggcggagggtgtcgggtgccccggagaagctgtcgccgggctctcccagttgtttgagctgctcgttaatctgaggacgaggtgacccgcccggcttcccggaacggggaggggcggcgaggccaccggaaactttgctcataggcctcgtgtctggagcggcac

SEQ ID NO: 333961 - DNA, 145 bp, Homo sapiens
  chr10:71267698-71267843
  hyper
cggagttgcccacaggtccacctaccgcgctccctgcagccctcagtgtgcctaatggctgccgcgcaacgcatgcagagcgtggtgtcggtcgacccctgctggagatgccgggacttgcgtgcgtcagtccactcaaaccttc

SEQ ID NO: 333962 - DNA, 891 bp, Homo sapiens
  chr10:71332340-71333231
  hyper
cgccggcggctccagcgcgtacaagctgtggtccgctatgcgcagcgtttgagtcagcgcccagatgtagttgtgggcgaagcgcagcgtctcgatcttggtgagcttcgcgtcgtctgggaaggtgggcaggacaccgcgcagggcgtccagtgccgagttgaggttgtgcattcgattgcgctcgcggtcgttggccttctttcgccgactccgtcgctgcttgctcagtgccaactcgctcttaggccggctgcgtcccccgcgccgtgcccggagcttcctcggggcccctcggcagcctccctcttccgcctctgcgcagttcccccgtgtgcgagtggggctgggcggggcggacgtggggcaggtcacttcgtcttccgaggctctggggaaggaccgctccgtctcacgggtcacttggacagtgggcgcacccgagggttgaggcgtcatcctacggcggggtcagagggaagggtaagtttgagtccgtcactgggcgcagtccgcgattccgaggctaggtgggaaaaaacaaaaacagccatcctcccagcccccgctgggtcagaggatccctctttcccctgcccgtccctcggaggcctccaaatattacctttctaccggcgcaaaagaatagagagcgatgagcagcgagggccgtggggagctcagcgggcttctggtcgccaagttcagctgagctgcaggcgcccccgcctgggagttgccccagccccaaaggagaaaagaagagagaatggggtccgaggcctctgtcacgctctctctcgaggcgcggcggtgagaccgcagggatttcctgagcagcaagtcgtgtgccccttggcacgctttatctgcttcgcccgggccaggagc

SEQ ID NO: 333963 - DNA, 387 bp, Homo sapiens
  chr10:71389862-71390249
  hyper
cgccccatctccccgacccccagcaccccgcgccgcccccaaccctgggccgggcaggtgcaattcctcaggcggcctacagagggcgatgtgcgccgccactgggccgcgcccctccggcgcgcgcttcctgtgaggtcaggtgggaggaaaccgcctggagccgccgggagtggacgccgccgaggcccggagtcgcgcctgcaggtgagtcgccgcgccggggagggagcgcatccctcgctgcagcccgggccgggacttggagccggtgtcgggctccagaggctggggctggcggccggggcagcgtccctcccgcccccggcccggaatgtcaggtgcgccgcgggccgggcgcgcgggtggcccaccgggcgggggcgc

SEQ ID NO: 333964 - DNA, 1472 bp, Homo sapiens
  chr10:71812318-71813790
  hyper
cgcgaccatagcgcgtttgtgcccagttctggggaaagcctcatgttagcgagtggccctcggctcgtctcgcagatcggccaagtacgcggaggccgcgcggtttcaccattaatactcctgaaggacaatagctcatcaagccccaccgaaagccccggacccgtcgcggagcctgggctggcgggggatgaggctgagcaactcctcctagaggtggttatgtggagaaggagcaatcccttctccctcctcctcctccccccgctactatccgcggcccagagaactgccgcttgccgccattgacacgcacagatagaacccaaagaaaggcaaagagtcctgcccggcaccggcgccgcgtgggccaaacctgcgcccgtggaggggcgcgcagagggcaccgggcgccgggagcaggcggcgcagcaccaggtgagcccgccatggcgatggcattattgtttagggtgctccggggtctggaaacaaaacgcgccgccggggcagtgcaggggccggagagaaccacctctgcctctcccccgagcccctgcgggcgcaccctcgatagccgacccaccctctgcaaaaacaaattcttaaatccagctgcccaacttgcttccttgggcgataaagggggggctgctaaagaagtggtcaaattcctgcggccagcgaggggccgggggcgtcgagggtactgagaggggaaggaggagggatgcgaggttcagcagcgggccccaggcgaggctggacccggaggaagcggaggtctcctgggaatgcggagtttcgggcgcaggagcgggaggacggaggcgcccggccgccgatgggcacggggcgatgggtggggggctgcgcagggcccgagggagcccggggagggccgctcgggggcctctgaaggtgcccgggcagggcgccggcggctccaggctgacaatggagggggcgcggagcagccgggcggaggttagggacccgagtccgggggcgggccgcgccggggaaggtcaggtcggggacgccgggtggcggggcgagggctgggggttgctgcgcggacacccgggcgccgcgggcgggcgtgcgccccggggccggcgcggaagagggcgcgaggccgggcactccccttcggttccctttccggggcgcccggtgccgacgcgcgctgcgctttcaccgggaaatggcggcccggccgtggctcgcctgggcagtctggctcccgctttgcgcgggaaaaaataataataataaaaatatcgaaaaagggaataaaagtaaactggctgcggcgcaggaaagggctctgccgggcgccggacgccgtgcgtatcgctcgcggggcgcggcggttggggaccagccctgcctcccccggctcccagcctccagccccggcgcacctcagccccagcccggccagccccccggatcgcccgtgggtgtcc

SEQ ID NO: 333965 - DNA, 641 bp, Homo sapiens
  chr10:71892160-71892801
  hyper
tgttccctcttccccggttcgcccttcccggcctaagcccatcttccttaggaaaacttagcagggatttaggggccaaaccaggagggtggagttttctttgccctcggccaggagcacatctccctgttgcgttttttgggggagacagagaggggcgggcctgagtcgagtatccctctcctcgcagcgccacaactgcgcgcaccgacctccccacgccagacgcggcgtgagccaggcctctaatccgctcgcccctcttccgggtcccggtcccgcccggggcgcccggggtctcgagagcccgcctggcggcgcgatctcacctgtcggccgcgcccgcgcgctctcgctccggctcccgctcccgctcccgctcccgcttggtcgtcttcccgagttactgacccgaggcgctcccgggcggggcgtgactcagcactcgtgctggtccccgaccccgcggcaacgccccggccaggccccggaaacggtcctggcacgctggggctggtctccgaacggcccgccggactaaccttgaccctgagcgaacggccttgaactttgaaacaaatgctcccatggccagatgtcgcctctccggctcctgccagcacccgcgccccagtcctgcc

SEQ ID NO: 333966 - DNA, 312 bp, Homo sapiens
  chr10:72015069-72015381
  hyper
ggggaaggcgtagacggtgaccaggtgcagctgcggcgcgctgagctgcccgtagtcgatgagcagcagcagcgcccagagcggcagccaggacagcgtgaagaacagcgccaccatgaccagcatgtgcaccacgcgcgctctgcgccgcgatgctcgcgggtccgcagcctcctcgcccccgggggccgggcccggggcctggcagagcttgcgcgcgatgcgggcgtacatgaccacgatgagcgccagcggcgccaggtagatgtgcgagaagagcacagtggtgtagaccctgcgcatgcccttctc

SEQ ID NO: 333967 - DNA, 626 bp, Homo sapiens
  chr10:72238261-72238887
  hyper
cgcactagcgacgagggaagaggaactggcttcccgggcagtctcccccgccccaaacttttcctcctcgcggagggtgggcgggcggagggaggaagcgcagccggggaacgtggcgcccgcgttcctcccgcccgggggctgcggctgggctgagtgtgtctttaaatctgagccccccgcccctcgcggtggggccgggactcgcggtccgggcgggggcgggcgcggtgattggcggccgggtcgggtccgcccctcggcgttgggtagcggggcgctggggagcagcgcggcgcgcacgggccggggcgcgcaggtcccgtcgccggtgagcacgggctccctctcgcgtggcctcgccgggtccgcctggcctgcccacctccggagccacctctgcccccgcatgggctggcgaagttgggaggagcgagctggagccagagcgcgcgccgggcgcgccccgtcgctgcctgactcggcgcccgcagttcgggcgcagcacgccggccgcaggagcacggatgccccccggagccgcgggctggcaggtaccgaagtgtcctgccctggggctggcgaggggagggcaaatctggaatcccccgggcaccccccagccc

SEQ ID NO: 333968 - DNA, 235 bp, Homo sapiens; identical to SEQ ID NO: 234813
  chr10:73156240-73156475
  hyper

SEQ ID NO: 333969 - DNA, 839 bp, Homo sapiens
  chr10:73156698-73157537
  hyper
ggcggctcgggagagagggacgcgggctgcaggcgcgatgcttggctagaggacgcgtccgacggcggccggacgctgaggtggtcggggctagtcagcccggcctgggcatggagcgcggggtggcagagcctctggacgtttggggcgcgcccagtccgagcccccggcgcgcctgaagttgcgagcggcgagcggcgagcggcgagcggcccgcggagacccaggagctgccggcacgccgcggatgagccttcgcgccggcgggaagacgcggcggtggccagggccagagcaggcggcccgcgggggccgatccggcggagagcagagcccgaggcgaggcgaggcgcggcgccgctgcacacacgcacacggtacccggagccacgcaccgcctcttccctcctcgcttccctctccttcccctcgccgttcgcccgccgcgcggcggggaagttggtggtgaccgcggctgccgaaccacttgttcccagcgcggccatcgcccgtggcgggcgctcgcggcatccttcggtcccaggcccctggccctagcctcgcgccccgctccgagctccccgacgcgcggcaactttgattcctgggaactcgaattccattcgcgttggccttgggaggacaggcatcccatcccccatccccggtcctgggaccgcgaacatttgggggctttgctctcggcgctacggagagggtccaggtctggggtggagagattttcgagagtggagcgcgttgggatccaatcccctccccttctgagccctgggtccccatttggacagtggggatggggtggggcgcacccctactgc

SEQ ID NO: 333970 - DNA, 1250 bp, Homo sapiens
  chr10:73846837-73848087
  hyper
ggcgtcgcctctggcgcatccgggcccatcccccacagcacccccaacgatctcggggtccagccacaccctccgcccgccctgcctcacccctgcttccccagcccccaacccggcccggccgagaggaaggagccagccccgccgggccgccgcctgcgacttcccctctgatccacaggtgccggtaaacaaaagtgccgcagctacccccccgcccccaccccgcggagttcggcccaaggttacgccggggttcgggcggcgcccgccgggggcccccaaacccagcttctggactctccccggcttctcaagcccaccgggccgggagccttcctctggctccgagctgctcccctcgctccaggctggattcccccctgaaatgttggtccgggaaaaccagcctgggtcctcgcgcgcccttctgcacggggaccccagcccacccccgtacggacacgccttccaccatctcgcctagaaggctgctgggaccccagacccagagccccggtcacactcccgtcccatgctgtccccctcccgcaaagcccacggtgggaacagagggcaccgcgcgagccgatgccaccctcactgccggccccacccagacctgccggtgctgcagtgccccgtatgtgcagcctgcagcatcccagcggctggggcaggcccgggggcggctcgcacaacgcagctggggaccgggtcggggtccagcggcagccggggtccgggtccccccggccccgcaccccttcccactcccggcccgcaggggagaccccggagcgcgcgaccccggagcgtcgggcaggtgtggagctgggggtcccggggctggggggtcccagggccgccggcccgggccgcagggacaggggaggggcgctgggctgtgacccccagtactgtttactttccgtgtaattagccggccaggctgcggagcctcgggctgcgacgtgcggcggccgctcccgcagaccccggagctcaatccccgaacccgcaaccccgggtctctgccttggcagccctgcggactcacgtctcggaagcggttccagtgcttgatcttgccgctgtactgcgagatggacgacagccattgctcgtcctccatgaaattgccgggggtctcgccctccttgagccccttggcgtcgccttcggccagggctgccgcggccaggagcagcagcggcagcaccagccgcccgcagcccggggcgcgcatc

SEQ ID NO: 333971 - DNA, 377 bp, Homo sapiens
  chr10:74020611-74020988
  hyper
cgccggggccccaaatgctgagctcagcatctctgtggcctggctgccctcctcccgggcagtgggaggagcctccttcctcccgagggtgggcggggccagggccagccccgccctcctccccgttccccctctccctccatccccctcccgttcctcagtcgcacgttctccaagtcacgtcccccgcttcccctagtagggggtcgacggagattggacccttcccccagtcagctgctctgcatctgtcacctcggcggcagcgctcccttgaggtcgcacctccgctgtggagggaggcgagagcgagctgagtggggggtcttcccttcccccatcccgctggccccagacaagccaccgcagaccgcggc

SEQ ID NO: 333972 - DNA, 589 bp, Homo sapiens
  chr10:74057413-74058002
  hyper
cgccgctcccctccctccttcccgctcccccgggcaggaaggctcgcgtgcgcgaggccacagcgcaagcgggtgcagagcaggattcgaacagggttccatgcaactccgtgcccagggtcctaccaccgcctgagctcagcggtcttcagccagcggggcccttccacccccttccttaatagttttcctcctccgcctcctgcacggcctccgcctccgcctgaccgtcctcggaaacctcccagccgcagcccggccctccccagcggcctgagtggcctcctcccgcggcgccccccagctccgcacctccccagccccgcccgaggcgcgcccagcgagcgtgaccccgacccagggccacggctgcgcccgtaggatcgcgggcgcgcgggtctccatgagggactgggagagatgcgtcacccgctaatccctcaactgggtcgcacccggtctgccttggttggtcccttctgatggcggaggcgggacctcgacttggtggccaatgaggagcctcgtgggggtgctctcggctgccatggcaacggaggggccgcccgcttccccgcggggcgaggcc

SEQ ID NO: 333973 - DNA, 650 bp, Homo sapiens
  chr10:74079281-74079931
  hyper
cgtttgtccgctcagaccagacggggcaaagggcagccatcaaaggtgtctgggacgagcccggcggggtaatgggccgctagggactcagtctggcccgggtctcagccggggcagaaggcagccgggcgagggccgcgggtggggggcagggggccggggacaagcagccccgcccaggccggcgcgctgtgtgcacaacgtgcagggctgcgaaagcggatgcggcctgatggggcaatcgctggcaacgcgccgcgggttgtcagcgggcgctggggggtgggagcccggcgccggcgggccctgcctccagcattggccccgcccccagttccgcagtcgtggctgggtttcggggagggcgcccggtgcggggggcgcccagggcctgcgcacacgggtaggcccgcgtgcccaagcccccttgcagcccaggcgccctggctcattatccatcccggccactggcgttcggttccgctcctgtcgcaccaccccctcactgctctgacagataccaggagctggtgccaacccgcagacacacctgggcagccccacgtgggtatcgcacgcgcaggggcacatctgccctgccgggtttggagagcagttgcaagtcagcccctggaatgtggtcccgtgcc

SEQ ID NO: 333974 - DNA, 423 bp, Homo sapiens
  chr10:75407371-75407794
  hyper
cgaggctcagagcatcttcttcaggaccagattctgcacccccggcccgaggcttttcatccaggttctgtaccagcgatagcagctcggggttgggcgagttcttcgtctcctcctttcccggccggaacatctgcttccgggtcccccggcgccgggcctcctgcaggatacccgtgcgggcagctggcacagagatgcgctgctcgcgagcgctggggggctcaggagcccctgggcctggggcaggcgcctctgggcgcgcagagggtcgcaaaggcgcagataggaagatagaagcggtggaggtcatggcagctgcgctaggaggagcggggggctctggagctccacctggggtgacaggccgactaggggctgggatgtacagggagctggtggctgtcacagggcccgaggagc

SEQ ID NO: 333975 - DNA, 148 bp, Homo sapiens
  chr10:75670652-75670800
  hyper
cggccaggtgcatgggaggaagcacggagaatttacaagcctctcgattcctcagtccagacgctgttgggtcccctccgctggagatcgcgcttcccccaaatctttgtgagcgttgcggaagcacgcggggtccgggtcgctgagc

SEQ ID NO: 333976 - DNA, 4230 bp, Homo sapiens
  chr10:77159582-77163812
  hyper
cgccgccgcagctaatccggccgtgtgccagccccgtgggtcccccttcggccgaggcgcccccggtgcccttgccaccgccgcccacgtcggtgtctttcttgtcgtccttgccctccggggcacccccggccgaggacagcatacctcccggcgagcaggccgaggcgctggagctcgggctgcctgtcctgggcgtgaatggctggcaggtggcgctcggtacccggaatcccgacttctccgacgaaacacccccgccgccgcccccgccaccgccaccgcctccaccgccgcctcccggctccttcttatccgagccgggtttggagtacggcttgaaactcgacttgtcctccacgccgatgtcgctcagcttcagggggcccgatttggtgtccttgtcgcccgcagcaccgccgccggcaccgcccgcgccgcccccgttggaggcaaccgaggagagtttggaggagggcgaggggtcgggcttcccgatctgcgaacatgtttgcgccaacagcgccagcgggctcttcttggcatcgagctgcggggtcagacgatggggggggagcgtcacacagagaaagaagtggaaaccctttagaatcctggcttctggggttcaaatgcctctccgcaacagcccacgaagatcctcccagccccaaggcgcaattctaggcggcaccccctcttcaacacccactcacaaacattctcgccgttgggaaaggcagcagattgctccccccgcccaaccaccacccccagcagcatctttcctgccctctctgagcgctaactagatttttaaagagcaaaatgttttggttttcggttcctagacccagaactgtaccccctccccacaaacactccttaattcttcagagtaagggctcgggcggctggcgcctcagaggctgtgtgcacacactggcttctgcggatacgaaggacggcgactttggaaccgtatttcagacctccgcctgccttcggtgccgagtgaaggggcctgggtcggggtaggggctttcatatcgaaaggagaaacaagtattggcagccttgctccctagcatgcacgccccattccacttcctcccccttttccgccctagttttgaggtacggaagcagtagcctcttcccccattcgggagctgaatcactccgacccccccacctccgcccagatcccgagaaaaagaaagccctagggtggcagccagggtagtggtcccagtgcgatccagagagagggtccttacctcgatggggctgaccggcgtggaaggcaggggctgcaggtactcggggtgcaaaatgtggccagttcgtgccgtcagcatcttcagcaccttgattggcaggcggttggcctggcgcagggggtcagaggggggcacggcgtgcacaaaaggcttggtgctgccggccggggacgagcctgggccggggccggagctatttccagagagcgcgctggtccaggcagggtctgcaccgccgcctccgcctccgccgccgccgccgccgctgtgcttactgcttcttagggcagaaagcgagggcgctgtgctcatgacccacccgcgcgcatgggagcagcgggggggagggctccgggaggcgcggggcgggctcggggctgcgcgctcgccccgggagcaggagcagcgggaggaggaggagctggcgcggcggccacgggcgcccagcgcgccttctcggcgcctggagccagacgcgagtaatcctgggtggcccgcagcggagccgtggccgggctagaggagccggctggactgcgggagtgccgggcggctcgcggtgtccgcctcgggctgctcccctgcgctgcgttctcgcggccccgcgccggcgctgcgctctgcgatgcgagccgctgcgtgtccagccggggctctggcgaggaaactcacttcaaaagcagctgcaccaagggggagattaaagcctttgccgccttccaatcaaatgggagcccgaggtgattggagggtcaaggggatgtgacgcgtcccgcgccgccgccgccgccgctgccaggactctcagtgccggttttaatgggcagctccctcttcgccgcccccctgtgtgtcccctccctcgatttcgctgggaggacgagatggacatttattctacgtttgccatccgccgcctccctcttttttcctcctcgtcgttcttcctttccccagctcgaaaataaactgaaaccttcttttgaaggggggtgcgcgtgaggaacagactgcggggggtgtccagaaggagcaccggtgggagtgtggacaccggccggactgtcaactccaggggcgaagggaacctgcacacccagtgttttttccttcgcagtaatcgagatcccgcgcggcgcagcgcagccaccagggtaagaaggcaaggtggggagccggagctggaagaagcccgcccgcccgctctaatttcctcagattccgcggcggagaaaccagaagctagatgggcagtcgcagcggcggcggctcaacaccgcgaggagcgctgggctctccgcccttcccggccacgtgacgcccggggacgcgtagattggggcagcagcgggggtcacatgtttcctctgtttcaccctcagtctgtcccccaaccccccattcttactctcccaccctgttttcctccctcccccccttctttgggcatctccacccctccatcaattgtcaatgttcctcgaccgcaatcaatcagttatttgtcagctcttgtcaatcctcccgtgatttatgtcagcttttgttgctgattacaaggcgggtgcgacttgaagggaaaaagagagagggagagagagacggagaggaaggaggagattgagagggaactggaggaggggaaaagaggagcggcctcctgggatgggggtggggtgggggctctaagaaaaagaatgaaagaggcgcacggtgtcaggaaaatgaatagcgagagtaaagtgcgcaggtgcgcccagggcgccgagaggggcgcgcaggcctggagtgtgcgcctgccctctcggtgtcggagagacgcccttccacctctgggagcctcggtctgttggggtcgcggagttcgggcgcggctccgggtacccgagaccagcggcggcaacttctaacacgggagatttcccgccaccccaccccgccgccgcgagtcctcgcggggcgtgttgcgtgcggaggtcaggctgccaccctctgtagttccctaaccccaaactcggagacttctaagagccacaccaccaaggaacttctagtcctggaggtcaatggtggggcaaacctcgcctcaattctttgaccccctcgggtcgtaagcagggctaagaggctgcgaagaagaggcctggccatgggtgtatgggggaagaaacatctcaggctcactcatgccccctccccgaccttctcccacctgccgccatccccgcaggctggggagccagggtaactcggggctgctctctcgaatttattggaacgccgagtcggaatgagctgcgctaggagagccgagggaaggagcgagagagggagggggcggctgcctgtgggaacgcgggttcttccagggaagcggagcgggactgccgcgttcccctcgatttgcaccgtcactcgggttgtttgggaagaaaaggggaggcgctgtgcgtgccaccgggtacctggacctggatgcccagtgtgtatgcatgcctgtggcgctgcgtgagttatcggggctctgatagcgtccggagcgggttcgagggtctcctccaggaactcgcagaaattagagggggtggggaggaggacacacccccttcctcggaacgacttagaagactttgaatctcccctcctccgcttttccgccccggctcttcttttgttgtcaagtccttttgataaatggtggggctgggagctctgggagtcgggagccagtctgtgcccgcgtggggggcgggggccgagcctggagacccggtttcgaccggcgcgcacctggggctgagccgggtgcgcgcgggggtcgggtctggaactgcccttggtatgctcgccctctcctcttggcccatctcactcccctcccccacctgactcccctccccggcttctttctctgtctcccactccgcacgggtaccgagaactttcc

SEQ ID NO: 333977 - DNA, 794 bp, Homo sapiens
  chr10:77168785-77169579
  hyper
cgcgctcgggaggggaggctgtcaaaacccagtcatcgcggggactggatgggggacaattctccgacgccgcggcctggacccgcccccacccaaccggcgcaccacctcccaggcaccacggagcctgcgcaagctgcggggccgtaaaggaaccggcccccaatctccggggcttcagtcccgcccctctctccccccagtgccctgcagcgctcccagggtccgtgtctgccctccccaagcccccactgtcaatacaatccctgttaaaaaaaaaaaatctttttagagccaggcacgtgccgtcggcctctcccctgcccgcctggcccaggaggcgcccacacctgcgccctcacttgccgagacttttacctgtgcagtccccggcggcgcctgcagccgcgcaggtaaccgagaaatggaagggagggctggggagtgagaaggacagagagcaccgcccgacacaaccagacgcgcggacccggggcctcctctctggaccggtgctggggccctggtagaaccagctccgggagccgaaattgagccatgaagagtgggccgagggaggggcgaggggaacgggcctcaggagggaggggcgggcccggcggcacttccgttgggggtggggctgcgggctgccgcgccggtcccgcccctccgccgcgcgggcccgcccgctccaggccaggctccgcccccaccgactcggagctggatctcaggccacggcgcccccccagtcgcgcccccaaccccggaggcctcgggctgaaccgggt

SEQ ID NO: 333978 - DNA, 706 bp, Homo sapiens
  chr10:77190985-77191691
  hyper
cgttcagccaagaggcccctcctcgctgcagttgaggtccattatgtaacccagcttgcgaaatgcaggaaaggcccggctggctacagcccggctaacggctcagaaagggcgcccctgataggaatacccccacctcaggcgtggcccagacaaacgcgataaagctgtgggcatggagttttgggcattgggacatccgggggagggaggggcgcgggcagtcggggtcaggccgccgtcggggcgcggggcgctgcgggccacctgttgcagcgggcggccagggctcacctgcgcggagaccgggccgaggggcggcggcggcgagcggcggagctgaggtccccgaggctagcccgcgcctccggcttccgccgggtcagctgactgcccagtgcggaactgtgcgcccgccgcgctcccctgccgcgctccccgctgctgccgccgcgcccccgcgctccgtcccgcgcgcccgcagcgtcctggccgccatggccgggctcgtggtgcgtggaactcaagtaagtcccggccagccccgcctccgcccggggcgcagtccgcgtggggagggacagcggggcacagaggctccccagggcctagacacccctgtccccgcctcagggggctgcgtctgcagggggtgagcttcaggtgctcaggctcgccctagtggggctaggacagacctcgtttc

SEQ ID NO: 333979 - DNA, 724 bp, Homo sapiens
  chr10:79396547-79397271
  hyper
cgaactcatctccccaacaggttcctaaagtatgggcggatgtgctccctctcgcccaccgccaggagccgagccccggcaggtgagcggtgcaaaacacgcacccagctgcccccagcttcctccgtccccgctgagttggctgtccccaccccgcaccacggcacccgagcctgtgagtccccgaccccggccccagccgcagccgccaacaaccctacaataaacaagaggacaggattgagcgtccgcgtcccggagcgcactggctgggggcaactcctcacccccggcgcgccgcccgctgccccgatccgagagcaccgggagagccgagggaagggaaggcggcgaggggaaggcaggcggggatggagggaggcacggcgcggcgcggagcgaggaggtgggctgcaggggacgccgagaagcggtggggctggcgcagagggcgggcgcccggggcgcgcgttaccttcgtcttgcccccgcagtggcagcacacggtccacaggtacttgagcgtccgccagagcaagatgatgaagaggcccccgaagaaagtcaccatggaggaggccaggaaagcccaccacatgcgttggccccggctgtcgcacggcacctccatggtcaccgggatgatgagcgcatccatcttgggctcgtggaccgaggacgaggaggaagaggaggaggaagaagaagaagaggaagaggagga

SEQ ID NO: 333980 - DNA, 1041 bp, Homo sapiens
  chr10:79397389-79398430
  hyper
ccatttgccatagctagcaacgggcagccggcgcaggggctcgggggagctcctcccgccgccagcgccaccccaaacacccatcaacagccatattgctgctactgctgccgccgccgccgccgccgcggagcgcgggaggggggcggggaggcgcctgggctcggggcgctgtgcgcgacctggcggggtgcgccgagatatatacagcgagccgccgccgcccgcccgggggggagggggatggagtgcgcgggcagctccccctccccggcccgcgccccgctcgccccgggctgcgctggccccgagcgccgagagccagggggcgccgcgggccgcccgcgcccggggtctgcgccgcccccgggcccgccccggctccgcgcgcggtcccgggtgtcctcggcgccgcgccgcccgccgtgcgccacgggtgtgcgctgcgctcggccggtgacccccttccccgagcgcctcccgcgcggctaacgagccgctctccgcttattaggtggtaactcgttaataatggataatcggccccctccgcccgggcgcccctgcgccagccctcctcccccggctgcgctcggctccggctcgccgcgccagtgcgcgcccggccgcggcaggttcaccgcgtccggccgccggcccgtggccgcctgctagcccatgttctcgggaccccctagtcctgtcgccacgccgctgagcccctcggcctccgctcgctcttcctccttgccgcctccgactcctcctcgtccccgtcctcgccgcccaagcctcttcggcgcgcgccccgcgctccccgcagccgccagcagcagcagctgcagcaactggagcgggcgcggactcaggacgacccaggcgggaggggaggaggctcgccgcgctggctcgcctgggctccgggctgggcaggggtgggcagggcccctcggcagcggcccggcaagcgcccctgacccccagggcgcaaggtagagcgcccccagcccaggcgcggggccaggcgcctctctccaaggt

SEQ ID NO: 333981 - DNA, 137 bp, Homo sapiens
  chr10:81002952-81003089
  hyper
cgcccgcagggtccgcgagcgcggcgcagagcgcgggccgtgggaagtttctccggcgcgccccgtgcgcccccgccccccgcgcgcccccggcccatccccgtccctggagagctgtcgcttgcgcccgggcgcgc

SEQ ID NO: 333982 - DNA, 545 bp, Homo sapiens
  chr10:82116595-82117140
  hyper
cgcggtgggcagcgaagggggaacgcgcagcagagaggagagggcgtgcaggagtaggagcaggcggcagagtagagggggcgcggcagagtagagggggcgcggcagagtggagggggcgtgcaggagtaggagcccgccgcagagtagagggggcgcggcagagaggagggggcgtgcaggcgcggggcgcccggcagagagaaggggtcgtgcggaagggggcgcgcgccaggggagggggccagagaggagggggcgttcaggagtcgggcctgcggcagagatgaggcggtgtgcaggagggagagcgcgcacgagggggcaacgggcagagaggagagggaatgaaagaaggggagcgtggcagagagaagcgggcgcgctccagggggcggggtccagggaggagggggagcgtaggatcggggcgggaggcagagaggagcgggcacgcgggacgggcgtgtgctcgtgaggggtcgaggaaaggcgtatgtggaggcgcgcggggtgggtgagccgaggagacttgctacacagaa

SEQ ID NO: 333983 - DNA, 746 bp, Homo sapiens
  chr10:83633800-83634546
  hyper
aaggtggccttccatccagccgcaccgccatccggcaggggagggcacaggcaccctcccacccgcatccgcccccgccccctcgcccagcagcgtcagtctctgaccccactggatccgtacaggagacgactcacaatcggtcggaagctgcttttgcccccccaccccaccgcaaacgggggtttgcttggatcatttatctatcttgtgtgcattaagaaaccagcattagctgctagtgggaggcgctactctgcccgaatcccagcccgccgcggcgattctgcacacacacacgcaccagcctggcagccagagcccgtctggagacgccctcagcccggggtctgcgttccccgggacccccgacgcagtctcccgcttccgtcccccacgctcaaccgggcagggcgccggggcgtgatttccgatcctctgcctgcttgttgggtccctcggaggcgggtcagaccgcacccgccgcgggcgcccggtgcgcccccagcccctggctcgcggcggcgacagcggcgctgttcgctggagtttgactctccggcggcggcggcagcggcgcgcagcagcgaacggctggagcaaggcgagccgggccgctagccctccgcgctgcgctgggattggtctctccagaagagtgctggccgagggttggctgcgggccggctgaagaacaggtgcacctcaccgcccgggctcgcggagcagccgccgaagatcgcggc

SEQ ID NO: 333984 - DNA, 1388 bp, Homo sapiens
  chr10:83635064-83636452
  hyper
cgggggggcgaaggtgaagaccggctcctaggatgagtgaaggggcggccgctgcctcgccacctggtgccgcttcggcagccgccgcctcggccgaggagggcaccgcggcggctgcggcggcggcagcggcgggcgggggcccggacggcggcggcgaaggggcggccgagcccccccgggagttacgctgtagcgactgcatcgtgtggaaccggcagcagacgtggctgtgcgtggtacctctgttcatcggcttcatcggcctggggctcagcctcatgcttctcaaatggatcgtggtgggctccgtcaaggagtacgtgcccaccgacctagtggactccaaggggatgggccaggaccccttcttcctctccaagcccagctctttccccaaggccatggagaccaccaccactaccacttccaccacgtcccccgccaccccctccgccgggggtgccgcctcctccaggacgcccaaccggattagcactcgcctgaccaccatcacgcgggcgcccactcgcttccccgggcaccgggtgcccatccgggccagcccgcgctccaccacagcacggaacactgcggcccctgcgacggtcccgtccaccacggccccgttcttcagtagcagcacgctgggctcccgacccccggtgccaggaactccaagtacccaggcaatgccctcctggcctactgcggcatacgctacctcctcctaccttcacgattctactccctcctggaccctgtctccctttcaggatgctgcctcctcttcttcctcttcttcctcctccgctaccaccaccacaccagaaactagcaccagccccaaatttcgtaagtaaacactgtgtctcaactatgatttactactgagtttcccttctgccctcctgctgtctttttccctcgccgcctgttttctagcaagccccctcccccatcccaggtttggggcagagtgagagctgattaaaactggccaccagcggggaagaaggtgccagcctgctctggttctgggggggtgggggcgtgtaggaacgggagggagattgtcaggctccactggccccactttagcgggtcccaagtgagaacagatctcccaactcccttcaaagggttaacgcgagtgcgatccctcctcactgcagacctgctggcgagctgccggatcccgctccagtagagggccagggagggagagagggccttcccgaaggcactgagccccttctccgcccgccggtaggaaggaaagaaagcaaagcacatgcaaattgaccgacgataaaccacaaaaggaagttatgtccttgtgtggggtgacgagttgatggagataatggtagaatgttgctgaggac

SEQ ID NO: 333985 - DNA, 910 bp, Homo sapiens
  chr10:85954199-85955109
  hyper
cgccggcaaagggggcgtggcgggcggggagtcctcttgtcacgccctcctgcccccgcccgcggctgggagcctgtcgctccgctctgcgccgctaattggtctcgtcaggcggccggcaggagcagatccgagccgtgtcatcctcttagcgccctcacgccacccgccgctcccgccccgtgccccctcccgccgcggctgcagtcgccgctacccccattgtggtctctgccctccccgcgggcccagggcatgctccgtgcccctgcgcccggtctcggcggcggcaggcgacactccgcgccggcggagacatgaggcgctgccggtgggccgccctggccctggggctgctgcgcctctgcttgggtgagtggccgctgggccgcgctggccgcgtggatggcgagggagatgggcgctggcgtcacccaggtggccagagggacatggtcctggaccacttccagagtgggactcgggctggtggacgggagcggagaagtccttccatcttcctggcccattcggtagtggggagtggggtagcggagtagtggggagctccggggcgcttctccagagctggcatcctagggccccagggtttggcgcccggacccccgctgctctccgcttgctgggaaccagagctgtaggcttggtggcagctccgatgctgcgtggggcaggagatagtgccctgactcgcggcttgaccttggctgggctggggcactgcccctctccgagcgcgggtgcaatctgcccattgatgaaggaggggttggattgctacctgggttctaagcgcccacatgctacgtgtccctgacaagcccgagcccaccgggggcggagtgggggtcaggggcatcctctgggcggcgccccagtggggtccctc

SEQ ID NO: 333986 - DNA, 471 bp, Homo sapiens
  chr10:88126045-88126516
  hyper
cggcccggcctccagccgcgcttaccgatgtggatgatggagtcggcccgcaccgacacgcactggcatatccaggggagaagccacagcgtcagcgcttccatgtcccccgggcgcgcggctcatccacccgggcccggggcgaggccgagggcagcgcgaagcggggaggcgctggtcccggtgcagtcccgggccgctccccgggagagccgagcccgcccgtgcgtcttcccccgcgcgcccgcccctgcgccctgcgcccgccccagcccagcccagcccagcccagcgcggtcgggctcccgctccggctccggtggcggctgcggcggtgctggcagcttgagcccaggccggcgcggcgggggcggcccgcggctgtggcagcggcgcttcccgcggctagagcggcttcgggggaggctgaggcggtggcggcggcggccgggccggcgtggcggctctggg

SEQ ID NO: 333987 - DNA, 581 bp, Homo sapiens; identical to SEQ ID NO: 234874
  chr10:88126745-88127326
  hyper

SEQ ID NO: 333988 - DNA, 342 bp, Homo sapiens
  chr10:88149266-88149608
  hyper
cgccgcatagtaaagcggcagagaacttgcatcaggcgtctctgaccaccgagcctgcgaagacctagctgattacgaccaggaaacaggaggggacatggcccaaggtgggcggggccagtgctgggaagccccgccccgcccccgatcctgtgctcccaggtctgggcgttaggattctctcagtcccggagccacgccggctgaccgcagggctcggggagcgcggctgggccccttttcccgggtccgggaagcgccgggccacgccgggtccgctggagagactgagggccagggtcgccgctgccgccgggaggcgacagagccagctgggcgcac

SEQ ID NO: 333989 - DNA, 247 bp, Homo sapiens
  chr10:88731062-88731309
  hyper
cgctgccgcccggcggggtcccgccccgccactccccggggaggggcttcggggcacggggccgtgcacgtgagaacgaagcacggttgtggggggggcatgcacgtgcgcgctcgcgtgcgggagacccctcccttccacaccacttcctttcgggacaaaccggtaacctccggccctggaaggttttgtctagtgggttccggatggactggtgttcccagcacccccccggcacgtgtccacg

SEQ ID NO: 333990 - DNA, 1496 bp, Homo sapiens
  chr10:89621342-89622838
  hyper
cgaatcagctctctcacggtgacaggtcagcccaatcggggctgtaaacagacttgacaggtttgttctgggctgacggccattgactaggttctcagaccagataagtcacttggctgagtccacagtaggtggggcgcgctcaccagctcaggggtagtgactggacgtttgttgcaacatcggagaatgcacgctctgggctgcagcaggagataccctcaagcacagaaccaaaagggttcaccctaagcggcagggcatcagcgatggagaggcccgagagccctagcgcccagctccttttcccacgtttgggaaggcgcagaataggtcgatgtagagcaaggagtgagtctcaggtctcagtcctttggcttgctcttagggtagcaggcgaggagtggcaccagtttggggactctctccccgcgttctgtaagaatcggcggcagccagcaggcggggaggcgggggcacgtgtttggatgtgggtgcttgtgtaaccagttccccaagcgccagccccgacagcgctccttcgggaggctggtccgagcccctgtttccgccgcggcgcaggaagggttggggttccgctgcctgcaccaggcaagagcaccccgagcaaaggaagaagacgacttgcctccggagctatcactggggagtgggaatttggaaagttccccaactagggacacacgtgacctccttcggaaagtagttccgactgtggcccgtgtatccttccacctccttttgaaccctcctaggtctcctcgccccgcccactcgctgggctgcagcttcctaccgttccgtactttccactcaacccggtaaccccaaacgtgcacggtccggccggggcgcgcggagcctggccccgggcgatccatcctgccgggttttcacggcggccaagggggggcggggctaggtggtctctgagaaccgagcttgactccgacgccgcgaaccgacctggagcccgaggggaaagatgctcgactctcttgggggcaccggagcgggcgcaggagaggcctgcggggtgcgtcccactcacagggatcctctttcagttcatttagataggtgccctttgggcccttgaaattcaacggctatgtgttcacgttcagcacgctcggctgagagctttcatttttagggcaaacgagccgagttaccggggaagcgagaggtggggcgctgcaagggagccggatgaggtgatacacgctggcgacacaatagcaggttgctctttgtgctaagactgacaccatgaggacacagatttgggggaagggggaatctctaggcaaaggctgttacagtcaaatctctgcgaacgattgtgatccgacagcggtgcaaaaggaaagagcgaatgcagtccacgccgcggaaatctaggggtagaggcaaggggggagggtattccccttgcagggaccgtccctgcatttccctctacactgagcagc

SEQ ID NO: 333991 - DNA, 643 bp, Homo sapiens
  chr10:90342577-90343220
  hyper
cgcggggtactcctgccgggcccccaccctcgcccccaccctcgccccttcttgggccttttcccgggcggcggaagtccccgatcacgtgacgaggcgcgccactcggcgcatgggccgcgctacacggccgctcagggagctgagggtatagcgttttcgccttagactttcttgggtgcaggcccacaccacctcagcagcctgcccggcagtcctcttttcccaggttttggcgtttagacaacccacctgagtcctcagccttgtcccacacagcaaggtacaagggaccggacgtctgcctcctcagcagcgcagcgcacaagcttcctgtcatcccggcgcccacgatcagcacctgcgccatggcgagagggagcagcgatccgcgctgagtctctgcggcggggccgttcggcccgggctttctggaaaggcggccgaaccggcgctagcgctctttggttccgtgctccctgggccgacctgggccctgagctttcctccggccggcctgcagggggcggaaaggaggcggccggagctgagaggcccctccgtccttgaggagcaaacctggggctgcggagaaccggggctgtctgtcttctcgctttgggggccgggcgccctgcccctc

SEQ ID NO: 333992 - DNA, 1305 bp, Homo sapiens
  chr10:90966883-90968188
  hyper
cgaagggcaggcaaaagcccacgtatgtggtgatggagaagatgaccgggaagaagggcgactgtaggagggcctcccagctcctcaggtggtcccagaggggctgcaggaacagctgcccggagctgcaaaggacctgggggtcggagcagttgtggcagctcattgcgaggctgtgcaaggcagctgaggctgctgctcgagtcccatcgacttttcacaggactcacggccccgccccgagtgatgtcagctgcctttccatccctttcccggcgatgcgaagcttgaataagctagcaacccggcagagtggcccttcattgctgtaaatgtgctcatctatagccgcatcttaccggcttttagatatgcgtgtatgcagtggcacttcgtacttttcatgtaagttctgatttttcagttgacgtacaattaacacgggacacaatgtacagatctaccgtgtggagtttctatgagtttggcaactcagttcacgtgtgtcatcacgggtctcaaactagaccgtttacattgccaccagaaagcgctcctttgcaatcaatgcagaattgtttgtgttttttaatgcatacgtataactgcatccatgtgctttcataaagacgcaagcataatcgcattttaaaaactgtttaaagctacatgcggtctgtagctcgggtgttttctgagaacccggttgcggtctatccagcggcgatcgagaaacgagccctttgcacagggaaccgctggtccccgaacgccggcggtgaccgtcagctcaggaaatcagacgggaagggtggccggatgggaacctccgccagctccagcttgtccccagagttttcctggccggcgggcagcaagctagagagaccacgcacgcaggctctccgggagaggccgcagcccggccgcgtagctaccctcggcggcgcgtcccggggcgccgggcccgcgatcggagccggaggcaccgcacagcggaaagagggctccgcggcggccaggctcagctttgccgggaaaatgctggatttaactcccagtctgcgccaatctggctaaaaagcccgttgtatctcaatttggggcgggaacacttaattcagcaaaccacctgcgttgttcgtcaagggaaagagatgtgagttcctgaagcctcccgggaggctattgaaggaccaggtgatgtcgtcactaccctacccttccccttgttggctttgcggggccaacttgcagtcgccctctgccaccggtccttgaatccactccgggcccacggagccc

SEQ ID NO: 333993 - DNA, 677 bp, Homo sapiens
  chr10:91294973-91295650
  hyper
aaactcggccgcagcgcagacccaacccagacagggcaagtgagcacgtgtctccctcccaacccaagctgcgcgccgacgcacccaagttagggtcccaggctcccggcgcgggatgggcgctagggcagcggagaatggagggtccccgtcctcctccagctccaacgacagcgccagcgccccgccgtcccgccgcccttccttgaaggatgcccgtgtcacctgagccaccgcgccctctgcacaaccgtgtcagggagagggaagagggggagccgaggaagcttcttggccagggcgctggggatccgggagcgggggccgccggcgagactgagcccgggacagcccagagctccagcgctccagcgctctgcagcccgcccagagcgcgcagaccacccccatgccccgcccgccctcctgccacacccgcccccagcccggccccgccgcctcctcacctcgccgggaccactgcagccctggcggtagcgcgcggacatgcccccggggcgcacccgccgagccgcgtccctgcgcagtggccccttcccgggccccaggctgcgcgatccgcgcttcggtggggcggggagcggactgggcggaggcgccggcgaggctggggccgggggcctagctggcaacgccgggagagggaagcgtagcgc

SEQ ID NO: 333994 - DNA, 237 bp, Homo sapiens
  chr10:91403644-91403881
  hyper
cggctttctccggtgtacattacaattacaaaccctcaactcaacctcccccttcgttgaaaaaaaaaatccacctccaatcctcattggtccacatagttccggcccacatggtatcagtgggtgtgtccctcccaaaaaaccctctcattggccgtgaagaaacagcttctaataggctgtgattttggggggtagttaaactccacgcctccagacttgcgctctccaatagac

SEQ ID NO: 333995 - DNA, 1146 bp, Homo sapiens
  chr10:92616995-92618141
  hyper
cgatgaggtcggtgacgctgacgaagggcatgaccgccacagccaccgagaggtcggccagcgccagggacacgatcaggtagttggagggctggcggagcttcttgacgaagcacacggagatcaccaccaggcagttgcccgcgatcgtcagcagcgtgatgagcgtcaggatggagccgatcacaactttctcgactctgccgtagttgatctgttccccacagccggaggcattgtccgggggcgcgtcccaggtgggcgccgggctggctgtcacctcgctcagcaggtgcggcgcccaggagcccgcgaccgggtcggcgccaccgtcggggctcaagtcgggcagcccgcgccccacttctggcagaaggaaagagcggaggtgcccgtagaggtccgggcggccgctgctgttaacgtccatcatcgcgccgccgtgtgccgctgcccatggagccggcgccccggccacgcgcctccggctgccggccccggggcttcacctcaccggttccgctccgcccggcccagccatggggcccgcgccgaccgctggggggcgcctggctctgtctcggagccccgcactccccggacccccggccgctgcgggtaacgcggcagcgcggcctcacggggactccctgcgggaggcgcttcggcccccgacggacgcctgggacgcgcggagtcgagggagctcgggctgggctccgctggcagctccacagttcgcagcagcagctcggctgcgccgagagcgcccgggcggcagcggcagaagttgcggagtgcgccccgcccctcgcgcccgccgccgccgccgccgccgccgccgctcccctgcggcagccgcgccgcgtccccgccgccgccgcctccggccgctgcccgctccctcgcgctcctgggacgggatacccgggctgggcaggcaccgccgcctctcccgcgcctccctactgtgagggggcggcgctgcacgcgcctcccgggatcccgggtcccctcgcccgggaagctgtccttgccgcatgatagatacttagaacccctccagccgaccccagcctccgcacactagtcagccacagttcagtgggggcatttttcttttgttaagaggcctaatgagccagc

SEQ ID NO: 333996 - DNA, 667 bp, Homo sapiens
  chr10:93647052-93647719
  hyper
cgcgtgaatagcggggaaggtaacgtgactgcggagctcagggccggcccgggaggggcgcgggcctggccagtgggaaggtcggacgccgaggggcgaaatcaccccaccggcatcagaccaccgcctccattcagcggaggaatgtgggcgggcagaggacgcgcggtcccctcgcccggcgttaaccctgtgcgcgccgggagcttcgcccggagcatcgcagcatcgcgcagcgcccggagcccggggccctcacagctccaccggtgcccggagcatctatctccccgcgggcggtgctgccactcgccacgttcacattcctccacgtgcacgcgtgactcttttggtgttatttttaaaaatctcactatttaatcgccatgtttaccttccccagaaccacatagtctcatcgcaattcaaataatttagaaaacattttaagataatcgtggagcccacgaagccagtgcaacgtaggtggcttcccttgctggaagtcaccgcaccgaggccagaagaaggtagccagcgcccaggcaagcgcttaaaactgcagcctcctccacacctttgcacgtggggaaaccgaagcagaaccctgtctctttcacttttcttcccttcgctaagacttttttatatttgtaagtggaggcgc

SEQ ID NO: 333997 - DNA, 159 bp, Homo sapiens; identical to SEQ ID NO: 234906
  chr10:94180507-94180666
  hyper

SEQ ID NO: 333998 - DNA, 571 bp, Homo sapiens
  chr10:94448826-94449397
  hyper
cgtgcaaaaccagagagccagactgcgcacagctgcgaccctcaagagccagcagaaaagacacggagcggcccccactggattgaagactgcacagcctctgcccggcgctgtaggacccgggcctccccttgattgctgctcgcagcggcttctgccagcatcctcgcggaagtggcttgagtccgaggcctccaaatgaaaccaggtggagcggccaagagtccgcagcacctgaactccagccatccgaatcccgccgggccgcagctaagggccgccgagcagccctaggaacccagggcactgtcccgctctgagctcgggaaacggccggtgtgacagccagcgccactgttaatccagggagcgcacccaccgaggaggcgtcttaggccagcggcctctgctcccgccgagtcccgctgctccccgcctggaaacagctgctgccaccccgggcccaggcctggacggcgcccccgaatttcggcagaggtgcctcggggccgcggacagggccgctggagcccgcactccagaaggcggtcttcctcgcgcctcccccgac

SEQ ID NO: 333999 - DNA, 2110 bp, Homo sapiens
  chr10:94449625-94451735
  hyper
cgagcgcggccccaccccgcggccggcggagcctatcgccgggagcgcggagcgcggataaatgtagcgccgcggcgcgggccagcagctctgcgaggggccggagcgcggcggagccatgcagtacccgcaccccgggccggcggcgggcgccgtgggggtgccgctgtacgcgcccacgccgctgctgcaacccgcacacccgacgcccttttacatcgaggacatcctgggccgcgggcccgccgcgcccacgcccgcccccacgctgccgtcccccaactcctccttcaccagcctcgtgtccccctaccggaccccggtgtacgagcccacgccgatccatccagccttctcgcaccactccgccgccgcgctggccgctgcctacggacccggcggcttcgggggccctctgtaccccttcccgcggacggtgaacgactacacgcacgccctgctccgccacgaccccctgggtaaggcggccgggcgagggtgggggcgaggaagcgccacccggcaggtggcagcgcccgggaggccgagggggcgaagggggcaggcggtagacggctgtggcaaaagcgatggaaaagcagctgtcgggcacgcgcggggacgggaggcgcgcggccggggctgaccgcaccgtgactcagattggttttcctgcaccttgcaggcgtcggggcgcgcgggccggcggtagacctcgcggcgagggcagccgtggaccgcgcgtgttacccggggtggggctcccttagcgggagggacggggaaaggggcgtcgaggcgcccctggccggcccccgtggggcagggatcgcagccgggcccgggtggctacggggctggacctggttcaacaggcttgtgcagtgaaagagcctgaccctttccgttcatacaggaaatcttgagttctcgataggagtaaatctggtttcagaagctgttaagtgttttcctggctgcatgaagcagacccttcccccggagtagtgcacgctgctgattattttatcgacatcctcaatacagacaaattcaggaaacactcgacttctgatagccgggatccgtttttctgatattgttcatttcctctgtgtgggatgtgactttatggcagctaaaataaccagttgcttcctattttttttcgaggctgttttgcaccagtctgaagcctgacgcaagcaaaatctcgaaaaaacaatgctagctttcaaagcgttgaggtgcaggcctgcagacggacggacggaccgaccgacactactttgggagtaggaagcagcagctcctggtcgccagttaggaagggaagcagggacacatagggcatatattccagaacttcggggcttgtcccctcaatgtgcggcctaacaaataagccgcccgtggtccgcgctgtgggtgacccttggcgccttcgaggtctggagccctagggtaaataaggaaacggggcgcctctagagttttaaatgaactctgttattggaagcttcagtagggaccctgaaaacaattaacgtcttaattagcattttaatgtctccattattacggcgcgggctctagctcagccctttaccttaccttctcaccgttaacaggggagggggattgtatttttagttcatctttttatgtttttgagttgttatcctgtctgtctgattccagcctcgagggtttgatgatgcggcccgagcctggctgtggtcgcctgtcggggctggagcgggaccctcagccgggccgggcctgggggctaacgttttcacagtgcgccctgagtttccttgggttactgctgggaccgcgcaggaggaagcaaagagtttttcgagctagaccaacaggaaacacattgacggaaatgttgccatagcccatggggtggctttaactggccgcccccgcgggctgggtgtgaaatcagaggaggccgcggctcccccggccaggattggaggctcctcgcgcaacctaatgcgggtgtccgggcccgagcgcttcccgcgcagccaggccttgtcggtgcagcagccccgctcctccccaacacgcacacacccggtgttcgcaagtg

SEQ ID NO: 334000 - DNA, 314 bp, Homo sapiens
  chr10:94607767-94608081
  hyper
cgttcctaaaataaatcttactatcacatgcaattttgcttttcgtgagtgcatgttttcctttctctgactccccacgacccagagtacatcaggcccttgttaaatgtccccgtggctcttattacagattcagggtgatgatctgagtgtccaccttgctgattactacggtacccccgcgtgtggcacagggtgtggcacacacagaagacaaggagatatgttaaagcccaaaggccaggcacaagacgcccaggagggactagtcgcgagagagggcaggaggccagctgggtacccggccgccgccc

SEQ ID NO: 334001 - DNA, 931 bp, Homo sapiens
  chr10:94831380-94832311
  hyper
cgaaagcttggcgagattcctagatcaaagttcctattggcctggtaatttattgaccccccaccccccgccctgcccccctacaagatgttctttaatgatcgttcactctcacatttaatcctttcctgccggacgcccccgccggcctcgatgtacagatagattaaaacgtttttttccctgcggcaatttccagcgtgcaggccccgctcatcttgtgacccggcttgagctgaacttggcgaggtggccccgcagagttcactcggatgtcacggtccggcctgcaggggtcacaggcgggtcaggcccgaggattgggaatgggccccaggtcacgtccccattcgtcggctttgcacaccggccggaggcgctgtccagaaaggggcggacccgggatttctgagaattacctccagcgcgattggcctggcttcctgcagtggccagaggttggttcgccgtgtttacagccaccaaatcgtttgccggagactgaaaccctgcccagagcctctgaaacactgggcaggttatggggaaacgctgaccccccgaaacactccctgtggcggcgactctggcttggagagtcgctaggattgtgcgggtccctccgacctctgcagatatttcctgatacctccgggtttggggactaccgcgagaagggcaacgcatttaaactctcaggagcagagttttccacctccaagggacgccttccaaggcgtgcggcgtgcttctgccagagacagtgttcagttttaaacaaatgcaggtcattctgtttcattttcggcgccgcaggtgcgttcagcgcccaaacccaggtagcgtgtgaccctgactggtcccgagccgggaagctccggcaggtggagagcagagagagcaggtgcgcgtcccgcagcgtctgagctcc

SEQ ID NO: 334002 - DNA, 1939 bp, Homo sapiens
  chr10:94833094-94835033
  hyper
gatccttcggagacgtctggaggcctgctttatgcatctctcttggacctcagtttccccacacgtgggaggaggcagctggacgattcctgaaaggactttcccttgcttcctcatcacgtggaagagagcccacccggcacctggaaatggaaagccagtgaaggctgctttgggccggggcagcgggtgggaccgggcgggagggattccaaagagaccgccgggaaggctagagcttggaattccggctcctcggagtcctggccctcccccaccgccgcctcggagctcagcacaccttggatgggggaggcgggcagctcctagccccgcaccccaggaggcgcgctcggagggaagccgccaccgcgccgcctctgcctcggcgcggaacaaacggttaaagattttgggcagcgcctcgcggggggaggagccaggggcccaatccgcaattaaagatgaactttgggtgaactaattgtctgaccaaggtaacgtgggcagcaacctgggccgcctataaagcggcagcgccgtggggtttgaagcgctggcggcggcggcaggtggcgcgggaggtcgcggcgcgccatggggctcccggcgctgctggccagtgcgctctgcaccttcgtgctgccgctgctgctcttcctggctgcgatcaagctctgggacctgtactgcgtgagcggccgcgaccgcagttgtgccctcccattgccccccgggactatgggcttccccttctttggggaaaccttgcagatggtactgcaggtaagggagggtggggcgggacaggctgcttccccggagcccggcgcggctctgggcttctgctgaagtcggggtaggcgcccccgggaggcatgctattgcggctaggagcagggctggcgggagcgcggcgctccccggcgccccctcatgcccacttctctcctccgccttcctcccacagcggaggaagttcctgcagatgaagcgcaggaaatacggcttcatctacaagacgcatctgttcgggcggcccaccgtacgggtgatgggcgcggacaatgtgcggcgcatcttgctcggagagcaccggctggtgtcggtccactggccagcgtcggtgcgcaccattctgggatctggctgcctctctaacctgcacgactcctcgcacaagcagcgcaagaaggtgggggcaggaggcgacggctggacagggagggggaccccatttatgagcggaattccggctgatggatgctaggcgcgggctagcagcttgaggtgggctaggaccctctgccagctccaggttagctttcccagctcggagagtgccatgtgtctggcaggactgggggtgtctggaaggggacggcggtagacgagaggggcggatggaggcttttaacgctgtcccctcctcgggactcaggtgattatgcgggccttcagccgcgaggcactcgaatgctacgtgccggtgatcaccgaggaagtgggcagcagcctggagcagtggctgagctgcggcgagcgcggcctcctggtctaccccgaggtgaagcgcctcatgttccgaatcgccatgcgcatcctactgggctgcgaaccccaactggcgggcgacggggactccgagcagcagcttgtggaggccttcgaggaaatgacccgcaatctcttctcgctgcccatcgacgtgcccttcagcgggctgtaccgggtaagggcggcaaacgggctgcggactaggggcgcgggacctgggcgtctgctcaccgccgcgcgctctctgcgctcagggcatgaaggcgcggaacctcattcacgcgcgcatcgagcagaacattcgcgccaagatctgcgggctgcgggcatccgaggcgggccagggctgcaaagacgcgctgcagctgttgatcgagcactc

SEQ ID NO: 334003 - DNA, 892 bp, Homo sapiens
  chr10:95753372-95754264
  hyper
cgcccttcccggagccgggcgccccaggagcgctctctctggctcccgccagaaaggatggctcctaggggtcagggccaggggtctgggaaggggtcgcgccgccagcagccagctccgggggaggcggccgggtcctcgctccgcgcccgccttccccgcgcggcaggagccgggggcgggcccggcacaggccgctcccccgcccggccgcccgcggtggcgctagcggcctctcacccggggcgggcgagttctgggaaagcccggcccagggcgggggccccgctgccgcccgcgcagccgccgctgtccgggcagcgcgcacatctcggcgggagcggactgtgaacggcgcgggtccacacggtaacgctgggcaacgtgggcaacgcggcgggcggcgggctcgcgcggcgggaggggcagcggcggcgcgcccgggctctacctcccgggctctgcctcccgggctctgcctctcgggcacttgcctggctcctgcgcgttcctgggcatcggctctgcagctgacacacagtagcggggacacccgacgccgctagcgacaggcgcgcggacggctggtcccagagggacgctgcgcttggggacgccggcgagactcgccaggagccaagaggtgaggaagcgactctgtagctcggttcctgaggactggagaaagggaaggatgggctggttctctcccaaggcagtcgacccgcctaagggagcagcccgactccgcgtacctggcggaaaagtgtcctcgcgctcccgggggacccgaggcgggcggtcctccagggcatgcaggccgccctcgcaggggctaaaggacaccctgccagtgccttcactccagacgcctgcctcaggtcgccccttc

SEQ ID NO: 334004 - DNA, 173 bp, Homo sapiens
  chr10:97051022-97051195
  hyper
cgcacggccgcaccgcggctctcgggcccggggcgggtgctaggtgagagggaagcaggtcctgacagcgagacaaactcgcgcctcgtgctttgtaaaacgagaaatttgaagtgctgtgccaagtcagccctctgaggtcggctccgacttcccatttgctttttgtaatc

SEQ ID NO: 334005 - DNA, 850 bp, Homo sapiens
  chr10:97802913-97803763
  hyper
tgaagacttttaaacgccaaactgaggcgtcggaactttgctccgcgggcatcgaggagccatcgaaggttctcagcaggtgagtggcctaactggattggtcactgcagtgatccaccttacaatttctccggcgctctctgccgacctcagccggcgatcaggccggcttcgcagtaggtggcggctgagcgccccggcaaccgaagcgccaggccagcccaggccacgccgcgccgtgcgggatgctgaccgtacccaggcgggagccgccgcgccgccgcctggcgctgcacctgggcccggcccggccgccaattggacggctcggggcgaccccgctgtatcgcgagacgagattggcagcggcggggcctcaagtgcccccgcgctggctttgtatgcggagccgcctgccggtcctttaacaatgggcggcgcgagcgtccaggcgctgggctctagctgaggccggcgcttagcggcccactgtccgcagcatgagcggggccggcgtccgccgcacgacggcggggctggggctgtgagggccgcggttccgggtaagggagccagcgtggggccgggcggcccggcaggcctggggtaggcgtggggcagcggaccctcccggggtgaggcgcagagcctggctggcccggccttttgttcccctttctgaggccgcgcggaacgtgcgtttctcggggctcccggggaggagcaggctcccgacgtccatgcggagacccgcggccaggcagacgctcacccccgggctttgccatgggagcgtttcccctcagcggggctatgagcgtgtcacctctccccgctcctcagggagggc

SEQ ID NO: 334006 - DNA, 1068 bp, Homo sapiens
  chr10:98272415-98273483
  hyper
cgtgagcgtgagcacccctctgtccgtgctggaactgccccacactcatcagcttgctggaacatgcgcttggcccttcggaggctaacgcttcaacgactccagctcggaagccgctcccctcaggactcacgagccgatcagtggccccgaggaagcgggagctgcagcgcccgggcggcgattgcgcccgaaaggcccgtacgtcctggggcgccgcttcctggagggattagagcacctgccggcttccatctccgcccgcccagagcgaccctcaggccggtaccgctacagggaagtttccggctattcgagtcttgctcattctccctcggcgacccctttccttttgcccgctgtgacgcttttctttttaaaatctcccaagagtaaccacagatcttgggaaactttgcgcgaaacttaaaaatgctgtgaaatcggagccaggaactccatctgagcctcggagcgccgcgcccagtccagctcttctgctccggcccggagcgtctggcggtggccagtgctgcccactcgctgtcaggcggccctggcacccaccccggcccctgggcgccctctcggcctctggcacccgctctgattcgctttgggaacgcgccagctgtcgccccccggtgcgcaccgcaaacctggggccgggacatcccagcctcggagtggtttttaagcaattcctcggaggcattgtcttccgggggagccggggatctcaggggaggggaggggagacccgccccatagacggtagtgcaggcttgcccaccacctcatttgcatttcaaaggcaaacttctgcgggacttccccagcggcggcacctaccggctttgcaagggtcgtggtaatgctccagctgctgctccgtgccctcctcgccgtccagctctgagtagtctgcggtggcgtccgggcgctccccgagtcccccggcgccgcgaggcagcggcagcagcagcagcagtgacaccagggccccaagtgcagtcgcccggggcatggtggcgcggggccggctggggcagagggagttgcgtgcac

SEQ ID NO: 334007 - DNA, 758 bp, Homo sapiens
  chr10:98479728-98480486
  hyper
cccctgtgggtccacggagcccaggagacgcgtttggccctgtagaccatccacatcgcccgccctccgcttctctcaactcgcctctcgcttcagagtcggagggacaggggaagcgacgctcagacactcctagggccagaggtggagggagcgaaggagaccctgaagaagtgggagggggtcgggccaggcaggggctgaagagaatcgcgccacaggctgggacgggaaacgtgggaaagttggagtgggaagtttgcgacagggaacatagaaaagagcagaaagagggcaagatccccgcacagaggacgcaaacagaagcaagcgggggagcgcgcctcaagggatgcggggtacgagagaggggccgggagcccggggacccgcggcgcctgcctacccacctgaggctgccatgccgcggggcgccgctcacatccctggctcgctgcgtgcccggggccgggaccggggccggcggcgtcctggctcgggctggaggggcgccgggctccgcgcgggaccggccgccgctctggcgcttcctccctcagggcagcccggcctcgccacgagggcgtgtccacagagtccgccccgcctgcgggactcggcccgcggcacctgcacccgcggccgttggggaggggaagtgagaaccccatgccggccgccggccagctccccccacggccccctgctcaggggcagcgagaaggcgggggcttcgcgccacgtgcgccccactcctc

SEQ ID NO: 334008 - DNA, 246 bp, Homo sapiens
  chr10:99474283-99474529
  hyper
tccactgtcgcccgcgcccgggaaccctgacgctcagctcccgcccgacggcagcgccgccgccgcccagaatcccagcccagaatcccgaccgccgcgccggacgcgccgtctcccgggacaagcgcaggctgcgatccgaggggctgacacacactcgcagacgagccgccccgaggcgaaacctcgcggttcctcttcccttccctgctgagactaagacgtggacaggggccgcgcagatcc

SEQ ID NO: 334009 - DNA, 1078 bp, Homo sapiens
  chr10:99530903-99531981
  hyper
cgggggataattccggggacgctgggctgagctaggacagcgtgtgtgtgtgtgtgtgggcggagggggggagctgcacctcttggggggttcgcagagctgtgctaggggagctgcagggccgtcggagcgcgcggggacggcggcggcggcgctacctggaggcgcggtggcgggcaggtgcccgaactgcacggcgatgcagaggtcgttgtccagggggaacttgtggcagtgcagcatctcaggccaggggaagccgtaggcctccatgagcggcgcgcagccggcgcgcacggcctcgcacagcgagcggcacgggtagatgggccggtcgagacagacgggcgcaaagagcgagcacaggaagacctgcgtatccgagtggcagcgcttggccagcagcggcagccagctgctcgcctgctgcttcacttcggccaggctctcgtgctccagcaggttgggcagccgcatgcgcttgtagcccaccgtgtggcagagcggcaggtcggcagggatgtcaaggcactgcggcggcttggagtaggagcggccgtgcagcggctcggcctgccagccatagtagtcgtactcctcgcagcgcgccggcgcccagtgcagcgcccccagcagcagcgccagcgcggccgtccgcacgcccccccccgccgccgccgcccgcatggctgcgccctctccaggtgcgcgccgcgcagccccccgacgctcggtgcccggcggcccaggtgttccggcgtgcgcccccggccctgactctacccagccgccgccgccgccgccgcggaggtcgcccaggtgggtggcagcctgcgctgcgggcgccccgactgatcctggcgcctcccacctcggggctccagcccgggcctcgccgtgcgccccagccaatctccggccgcctggccccagctccaaggcggggaggcagtgggggcggccctcagcccctcccgcaccctgcccgagcgtcccgcccagcgccaggtcttgcgcccctctcccggctcggctcccctgccgcagccctggcctcgcccagcgtttctccccaggg

SEQ ID NO: 334010 - DNA, 1587 bp, Homo sapiens
  chr10:99789576-99791163
  hyper
cggcttgcctcaggcagcctgaagggaagaccacacctcgtccagcataaggcggctagcagctacgccgcgcgcggggctggctcccggagctctctgccacccagcgctgtgcccgggaactcggcttcccaggggaggaagagccagcccgcggggctcttccccagcctggaagcgtaggcactcggccgaggccagtggcttcccaggcccgggtctcagcctggctgactgggagactctcccgatagcccggcacatccctcctcacccgctccgccccctccaggccccagaggccccctcccctgacagctgacctccagtgcgcccccaacactttctctgccagctgctggctgtcgcccccacacatcagctcccacctctccgccacctccaacccggccgccgcctcacccccagcccgcgggggaggctccgcgcgccaatcgagtccagcgcctcccagcaagttaggagcgaagccgccgccttcgcgatcccagtcttcccgggttcccgggcggcgtccccgccacccttgcgggcggatccgggggggcgcgcagagctggagaaactttctccgccttagggtggggggcaccggtgcagatactcacgccggggtcagcgctcggagccatcctcccgctctcggccccgccgcctaggggcgtgggaagcgggcgctcgctgccgcctctgccgccggcgccgccgcctgcttgctcccagccccggtcccgggctggcctcgagcctcccgccccgacgccgcgcgctcgctttatacaactccactcgagcgcgcccggtcttatgtaaaggctggcggaggcccgcagccaatggcgcggcagctggagccgggggcccggggtggggggcgccggcgcggccaatcgcggccccgagagcccggagagccgggcgtggggagggagcgcctccccgcgctgatttaggagccgggattgcggtggcagcagccggcagccaggctggcccggcgcggcgcggcggccactggggtgggcggcggcgaaggcggcggcgagggcgggcgccccccgcgccccgccactgcgtcgcgtaaccttcaggcggcagcgaggcctggcgaggaggggagagggcgcctggctgggcgctgggggccccaggccggagggaagcgagggtccctcgggaggcagcgcagggaaggaacgcgaagggggaggggagggcggcgagccccaggaccccgcggccacccctgcgcgcaggaccgagggtggaggcgggagcggctgcactgccttcccatttccccccaggatagcgatctggcgtcgccgggccgggccaaagcggccgagcgagccgcgctgatggcgagatttcgactacggagctagagccgagccgatctttatccagcctggggacgtgtccgagcacctcccggggactgctcagtatggagagcagggctccgcgacggcccccgcaggcggggagcgggcgagcgcagctcggagatcaggcgcgcagaggcccaggcggctgcgggcagcgccgcttctaccccacccc

SEQ ID NO: 334011 - DNA, 174 bp, Homo sapiens
  chr10:99798264-99798438
  hyper
cggggcggggctgggaggagagagcaggccccagggaggccagaggtcagaggggcagacagcacgaggagtcgcaacaggctgtcgagttcccggttcctggtggagagcccggcaggctgtttgttctcggacgtgtgcaaccgctgccggcggggctgtgggcgccgcagc

SEQ ID NO: 334012 - DNA, 787 bp, Homo sapiens
  chr10:100992012-100992799
  hyper
cgaacacacagacacacgaacacacagatacacaaacacagcgggtgcttgcttccgctccccaaataaagaatggtaatcaagtttctcaccatcctcatagtttttgagatagtaatccgggcccgggcccccgcggcttttcgccgggttcctcaggttctggaactgcaggaagtcggtccttttgcccccgaagcgcagaaaggcgggcgaaagtccccgggccagggtcaccaagcgcttggagctgcagaggaagagaataagagaggaaaggttcccaggacaggacgagagcgcgtggggcacggagaagggccctcttcctactccctgagggcgacctggccggggctagaggctctgtgcctgccccagccggcagtccacgctggcccttggccgctgccctgcgccccagcccgccctcaccgcccggctctgggggctgtgcctcccgcttccagacgcccgcagcggccccctcccgcagacacccagatcctgatctcctaaaggctacagatagtgtttgttcatagagtgtttgtatggggtgggtgtacgtgctacgagcacggcgctaaagcgcagttgcccggcttctgccactgccaggaaagcgctccgggcggagacgcgctaggcgcgcctacctctggcttccgaccgttgccaaaaacttgtatgctgaaagccggcattgcctccgcagccccaggggccccacaaacctccgtgcaggaggtgaaacctgccttgtttctctcagaccaggcccggc

SEQ ID NO: 334013 - DNA, 1351 bp, Homo sapiens
  chr10:100993468-100994819
  hyper
cgtggctaccccagggtcttgtaaccagaatggtcgtttggcagaagtctccgggaccgcactccaggacaggcacagtcagggcgtcgcgtgggcctactgtggcaaaggagacgtccgcgcgaatccggtcctggggaaagggcagttccaacaacctttcatccagaagcctgcacagccaatgcgaatgcgccccgccaggacttcttccccgaaaatctgccttccagactcttttctgaggcaggaaagcattaggcgaacaggcagattttttaaaaaaagaaagaaagctggtgggggaaagggggtctgcgcagctgaaggagttcaatgaaagtgggacaagcgttgcggaaaactccgttgcaccctacattcggacgagctcatagacgcgctctgctgcacgaaagagctttcgaagaggaagctgggccgcgcggagctggctgttccgccctcgcggcaaccgcaccaacaggaaccgaaacggcctcggcaagggcagctacagcctctcagtcctccggctacctttcctccacgtggaaggagcgctccacgtggcgcctcccgctacctgccgcgtccgcagacccgacccgggccagggggacaaccccaagagctgagaggcgggcgcacctcaagaagcaaaactcgaatttcgcaaggagtgaaaaatacgaaggacgcacaacggacctggcctcggggcaaagtgggactgagagcgctgagggctcttcgaggggaacccacagctgaggctccaacttgtagggaatttttaaaaactcaacacttggattcgacattgcagaggatttatttcttattttacactgcaactctgtccctgatgggaagggatcgcagttgcctaactgccaaactgcaacaacccgggaagagtgtgagcccaattagattacaagccctagagcaaaggggatcacaaacctccgggtttgctaatctgctggtgcggagttcagatctccgaagcctccctggagtatttctaggactcttaccgcttcccttataacgctgtgaccccagcgaggattttttttttcctttaaagaaaagctaaactgtgcagttaccgcaggagatttaaggaggaggaactggcggggggaggggggcattccgtctataaaaagcgccttacaaagtcctgaagtctggaaatgacagcggaggatataaaataaaaaattttaactccgatccaacttgcccaccactcaagcctctgcttaaattcgttttctgagagtgggagagaactgacgaaacgatctttccgtggaaaattccagtttcgtgcaatccc

SEQ ID NO: 334014 - DNA, 464 bp, Homo sapiens; identical to SEQ ID NO: 234958
  chr10:100996056-100996520
  hyper

SEQ ID NO: 334015 - DNA, 1292 bp, Homo sapiens; identical to SEQ ID NO: 234959
  chr10:101088990-101090282
  hyper

SEQ ID NO: 334016 - DNA, 611 bp, Homo sapiens
  chr10:101279860-101280471
  hyper
cggggccaatcagcagccataaatcttagagaaccttcaccgttttacaagggagttcgcaggggctgcccttctccctcacgcggtctatttacaacgccgaaatctccgtgttaatggacctaggataatggtgtttactttaccgcgataaagcgctgggcttcctgggggagcggctgtaaaatgtcctggaggtagggatggaacgggcgccgtaaaagcgggcgctggaagggcgggggcaccaggttctccttcaggccggcgcccccgccctccaccctctaggccaggctgagcagcccaggcctggcgggcgagcaccgttcccacataaatcaccagcgccagagtctcgggaaaaggcgcatttttcattgctggctgcagggcgactccagaccgcgaacgagaaacagaagttgtctttagataaaccgttcaccggagcgcgcgttgtggcagcagggtccgcagagcacagggcaacctgggtctggcgctgcgcccccgccaccgatcacctcccagaggccccgcaagaaacccagatcctctcaagggctggtaccacgtcctcctgccagagaggagatagggagccaagc

SEQ ID NO: 334017 - DNA, 328 bp, Homo sapiens
  chr10:101283158-101283486
  hyper
cggggacgagggctggcagccccatactgaatagaaagcgaaggacggaggtagggagaaaggaaactgctctggggggcggaggtgggggtacacgtaggagggaaggggagggggctagaggaggctccgccccaccgtccggcagtgtttattttcaaggcagcttcccgtcaatcctgtcaccggggcacattcttttcgggggctgtgaaccaccgtcagggctctgcaggaagatttgaggagggggagggctgtcgagtagggagcaggaattcgcagagtagagagaactgcgtctgggcaggcagtccctgcgtggcgc

SEQ ID NO: 334018 - DNA, 996 bp, Homo sapiens; identical to SEQ ID NO: 234963
  chr10:101290162-101291158
  hyper

SEQ ID NO: 334019 - DNA, 1626 bp, Homo sapiens
  chr10:101292301-101293927
  hyper
cgtggatccagcgcccagtatttacccgccaggaagttttcctgccccgcgcagcagctgaaaaaaacacactcctggggcatccttccctggcgttggttcgtggacagcaagcctcccagaactggcctaggtcgggaaggtgcagccacgcgggaatcaatggttcaggaaccggatctgtgcagcctcgcccgcagcgtctcggacttcaggactctatactagtccttgtctatttctggtagagccgcaacatcccactcgcagagagcagggggcgtggcccacatgagccagaacctatagggagggaggttggggcgccagccccgcccccccaacgtgacgcaaatctcccggacagaggcttaggagcccgggccccagtccctgcagtggctgtaacaaaacccagacccccaggtcccggccaatggaggcgatttagactggagtgggaccgcgtctgtcaaaagcccgactcggcagcagcggcggagtccaggaggagagctggagccgccgcgctgcctccccgcccccgccgggatttattatttggactggacaattaagtggccctgatgatgttaccaagcccggtcacctccacccctttctcagtcaaagacattttgaatctggagcagcagcaccagcacttccatggtgcgcacttgcaggcggacttggagcaccacttccactctgcgccctgcatgctggccgccgctgaggggacgcaattttctgacggaggggaggaggacgaggaagacgagggcgagaaattgtcctatttgaactcactagccgcagcagacggccacggggattcagggctgtgtccccagggctatgtccacacggtcctgcgagactcgtgcagcgagcccaaggaacatgaagaggagcccgaggtcgtgagggaccggagccaaagtgagtagagggggaaagaaaacgcacccgcacacctggagcaatggcagagcgcacacaaacagcccacagaccttgccagcgcagctgcccatccctttaccctttggctggggccatgcctccgccctggtcaccgacagctccacaaagcgcaggtacctgcaagggagccggggtggagagacaaggacgaggtgaccctgacaactactccccccaaaagggggaaatgagggaagggaaggtggttactgctgccctgatgctgagaggcgacgtgggctcagcgcctgggtcctcataactggcagtatttttgctcttccccccgccccaaaaggctcttcccccaaaaagggcaggagcctggacctttttcgttttccctctagggtgagatgagttctcttagcccagggcagccaccccttcttctccgaaaagacagcccaagcagcctgtgtctctcgcacccgcaggggcaggaactttggtggaggccagctgggcggtttcctcccttctctgcttggagctcagcgtccttgaacccgtggcactcggtagagagagaggagatgatcggaaagtgcgtgggaacaatgtctattccgcgcgaccatagctctcacatccctaaggcgccagccttttttgaaaatccgtaacgttttgctt

SEQ ID NO: 334020 - DNA, 1215 bp, Homo sapiens
  chr10:101294530-101295745
  hyper
cgaaacgcgcctccgcctgctaagggcgttctttgggtactggggctgtctcagggtcccacagcgccaggagccacaaacgttcccaaaagtccagccatttactaccgcacgctctgcgcagccaccaaaaagggtcacggtgctccaggacaggagccgcggtgcggccgggaacagctaaggacgctgttgtttgcttcttccgcagaaagctgccagctgaagaagtctctagagacggccggagactgcaaggcggcggaggagagcgagaggccgaagccacgcagccgccggaagccccgggtcctcttctcgcaagcccaggtcttcgagctggaacgcaggttcaagcagcagcggtacctgtcggcacccgagcgcgagcacctcgccagcagcctgaagctcacatccactcaggtgaaaatctggttccagaatcgcaggtacaagtgcaagagacagcggcaggacaagtctctggagcttggcgcacacgcgcccccgccgccgccgcgccgcgtggctgtcccggtgctggtgcgggacggcaagccgtgcgtcacgcccagcgcgcaggcctacggcgcgccctacagcgtgggcgccagcgcctactcctacaacagcttccccgcctacggctatgggaactcggccgcggccgccgccgccgccgccgccgccgccgcagcagcggcggcctacagcagcagctatggctgtgcgtacccggcgggcggcggcggcggcggcggcgggacctccgcggcgaccactgccatgcagcccgcctgcagcgcggccggaggcggcccctttgtgaacgtgagcaacctaggaggcttcggcagcggcggcagcgcacagccgttgcaccagggtactgcagccggggccgcgtgcgctcagggcaccttgcagggcatccgggcctggtagggacggggcgggtcacgcggcgggcaccccagcgcagcctggcgccgcgggactgaagctcgagaagggcctgacctaaaggtcaggtcccctcgttaaaaaaatatgtacgtctagctcctcagggcttcggatcgcagctcactcgaggcctggggaaggggactcaggggcgaggaggatgactgggtccggtcgccaggactgtctctgaggcagaaacgccggctgggcgccggggaggacgatggccccgaccctggcagc

SEQ ID NO: 334021 - DNA, 334 bp, Homo sapiens
  chr10:102132983-102133317
  hyper
cgggtgagtgtttaactttcagcccagcttaagatctccgaagacacccatcgcctcgtcctgcccagtcccctccgctaaagggccggcctgcccgggcctggctggcagctgacatgaatggagaggaagcgcctccctctccacccactctcgccggggttactgccggtcacagacccgggccttcaagagctatttacacctacaacagcccaccagcgcctgaccacgccggagccaatcagcggcccccaagcttgtctgattctgtctgctccaatcaggaggcgcggtccttccagcctcttgctcctgtgaatcacaggtcggc

SEQ ID NO: 334022 - DNA, 366 bp, Homo sapiens
  chr10:102321832-102322198
  hyper
cgcaccatatttcccgcgctctcccctgggacgtgccgtccctgctgcagtcgcagcgtggcgccctcgctccacgcagggatcctgagccaatggcggaagcggagtgcgcggcgaggtcgcagttgcgtttctcgcactccccactgcggggagcccgtgggccccgcactgcagggaagctgccggcccaggtctcctgggtggcaagaagacgcctgtggtgtggaagaacctcgcccgcagcccagcacgtgtagaatccagatgtggcttctgctggagccacgtgttccggcctgagcgacgtcgcacgtggcctcctggccgcagagcccatggcgcggggggccactcttctgacgc

SEQ ID NO: 334023 - DNA, 872 bp, Homo sapiens
  chr10:102414425-102415297
  hyper
cgaggctctcagctgcgcagcgactcccctccggttcccatgttgtcgaggcatgctgggagtacaagttccgagcgcacggccaggtgaacgcgccgccgccgccgtcgccgcgcgactccccaccccccctagccccctcccgcgggtcccgactggcccaccccggcgggactggtgacgccggcgcggcctgcgcctcccggaaacccaggcagatagcccgggtggaagcggcccggccctggggtcaccatcgcccctcaccccggggttcgacggcggccctggacgtccccgggcccccgtcttcctcctgggccttctctctagtccctggcagctgggagcggccctcccgcccctgcactccttcctgtcgcgctgtggttctgccctctggttgtcgctcccctagccctcccctctttctctctgcagtgtttcttggggctgttgtctttctgtctgtcactctgcgtctcggtctctctggagtccttctgcctctgtcgccctcccccgcctcgctgtgtctccgtgcgggtgcccctgcagctccctggctcgcccggcctgcgtccgtcggtctgtctgcctctcgcggtctcctcggctcccccctccccctctctcccctctcccctctcccggcgctggcggccaccgcactgcagcgcggcaccagcagtctatgacaaaaacattatccttctgctgctaaacaatccaataaacctctccacagggagaaagttaacctcttgtctcttcggctgatgccttcccgcccacgtgactgctgccacagtaaattcaaatcattagtctcctcaccccatcaaaaaacttctattagtaatggagacctc

SEQ ID NO: 334024 - DNA, 364 bp, Homo sapiens
  chr10:102430697-102431061
  hyper
cgccgggggcacggctgcgagataaccattagcgcagccgccgataaagcggggaggctgcatttccaaaggctccgcggccattacgggaaagttagtgtgaaacatgttaaattatccccaaagtggagggagcgggggaggcggcgggggagcgggcgcccgagagagccacgagacccgccgcctccgccggggccgggtgactgcgccgtgcccgacacgccgacgtccaccagggggcggccgcgtgcggcccgagcctcggtctgcgggtccggaggatgggctggcggcccgagccttcctcgcacctgcgggcgcggacccacccgaggccgccggctccggctccggctccctg

SEQ ID NO: 334025 - DNA, 846 bp, Homo sapiens
  chr10:102473078-102473924
  hyper
cgccatagccggaaataccactgttggatccaccttctgcgccccaggcctccccagcctccgtacccaggaggcagccagcttagcagggtaggcatgtgggtggcccaccagctcctggaatggagcgtactccgtttctggggaggttccccgcgtcctgcctggagtctagaagggagcggggaagtgaccagcactagattagaggcgggaactccggatgagaaagagacgagggggccaggatcccagggctggcagcgacaggaaggatgggaagaggtccgcaggcccgacgggtgcgggccagcctggccgcgcagggggagctgggagctgggtgggcggggtggggcggacgccaccaggcgtggcgcggggaacagagcagaatgaaatgcagatgcaaaacgtgctcataagagtttcctctctctccccatctgccaaagccgagattttaatctttaatccatgagcaatcagcgagcagcggcgaatggcacattacagatgttttactgtcgcgggcgctcgcagctttcgcgctcggcacaggcgcgccgggcgcccccgctccgcccgccccctcttctccccctctggttcttcttcctctcccctccccaggtccccgtttaacactatccccctcacctgcacgctcctggcccgcagcggaggtgggactggggagcagggcctgggactccgctggtgggggtacacgcaggggcactggcgggggcggggggcgacggcactcagaattgcgctgaggcaaattccccgccaggtccagattggggggcgcgaggacaggagcatcgagtgcccggatag

SEQ ID NO: 334026 - DNA, 410 bp, Homo sapiens
  chr10:102475189-102475599
  hyper
cgtggagaagggcagagacagagaccaacgaagtggggtcgggtagaaagaggcggatataaaggcaggccagagagagtgaatggccgcgtcagccgcaaagaggcccagacagatggacgcaggcaggaagacggacaggagagagagagagacaacgtgcgcccgaggctgaagagctgggtcaagaagagattcggcttccgggagcaggggcgtccgggagggactgcccagggcgccccgctgcccgaagcccagccccgccccagccgccgccggcgccgtctgtcggcagccgccctgggcctaggccgcagggtccacaggcggccctgacaggcggcggcggcggtgagggaagccggagcgagaggcagcggagccgcgtgtgtgtttttattattatt

SEQ ID NO: 334027 - DNA, 72 bp, Homo sapiens; identical to SEQ ID NO: 234986
  chr10:102475882-102475954
  hyper

SEQ ID NO: 334028 - DNA, 738 bp, Homo sapiens
  chr10:102483802-102484540
  hyper
gcgctcgggcgctccgagctgcgcggctccccggggagaccgcagacactttgcggagatgttactccggagttggagacgatgataaatatgataatttgtataaaatctgaatgggtcttgttttcagggagaatgccttggatgatgaatgggcccggctttcagatagatggctgataaaaagtgtattggattgttgagagcgattttaattctcattctgtacctgcagatgccgcggccgccgcgcccggcctcctcctccctcctgcccactgcgcggggcggacgccggcccggccggcctcggcggctcaggaggcttctgaaatgactctaattacagagttattaattttaagaggagggtgagcggggggtttatgattattaatcgagcgcccgagctcggcgggcggggcttggcgggccgcgggctagcggcgctcggagtgcggaggacgcgcggggccccggggcggctccaagcccggcgggctccgcggcggcggcgaccaggctcgcttcccacttgggctgcgggcggcatggtccctctgcgcccatccggctctcctcacccctgccagtctccgacccggccgtccaacgtccctccctggccggctcgcctgcgcagccgagcatcaggctccgcgccggggtaggcgagcaggtccccagccccaggcccgcagctgtaggccggtgaggaacagctctgctagagaaagc

SEQ ID NO: 334029 - DNA, 1368 bp, Homo sapiens
  chr10:102489761-102491129
  hyper
cggcgcgccccgcgccctgaagttcaacttggaatccaggtccgcgcgggaccccgcctagcgccccaagcgcacaggctgagcgccccgccctggcctcctgggcctgcggcctcagcgcgagagccctggcccccttcccgccgcgggtcgcggtcgggaaagcgcgccctgcaagggggttttgtagataaacaaaagcgtttgctcttctggttttcttttattttctttattcgcctgtcccttccttcttaatctccctcttcgctcttgtttctttaacttatttcccttcctcattttccctttcttttcgttcgcttttccttgtcactctccttcttgttctcttctgtctctttctgtatctccctcttccattttggccccttctctgcctctgggtttccctttcccgggcccctcactcttcctgggctaggattgcgccgtctccctgcatcatttttcctggctccgctgcctctttctcactttttcgttctcccggcggccaccgtctggcgggcttgggtccggctcccccgccgccgcagtgatttattcgcttcacccggcggaatcaggtgctgaaccgagccccggaacgagagaacagatttctcccaggaaaggttttgtgaactaaacgatgctaattacggggtgggggatgcgtcgcccgggaaggggaggcgcgcggggccgagcgcggcctgggaggggagagaccggggctggccgaggccctcccggggcgcctcccctgcacctctcgccctggctttcgcctttccctgggaactttcccgtctgagttaactattaaccaccggcgagaggcaattttcttcggaatttcagcgatttccttttcgcagtggactcagattagcacgcaaacagtgagatgctcggcttgagtctacgcgcgggcgaagatgcctctgtcgcctcaaacagtgtccttcgcgacggcggaaaactacagcccgcccccgctcccgtgcctgctcaggaagccgtgaccaagccagtgcccgccggtgcccggagtgaaggtggaaaaagccgagtgctcctgctcgggggcggggttgagagggggagattaatccgggcaagccaaggggaccttagacttgcagccagggccgccacccgaggagcccgcatgcagggacgcgcctgaaggcttagtcaaacccggggaaatgccctcccccgcctgcagaatccccacgccgtctcttacttcctccctctttgccactggcgagcttacacgtgcacacacacacacccctctctgtctgtgaccgcaacaaactttgtgaaacttgaaccgctgggtgcaaagttcac

SEQ ID NO: 334030 - DNA, 587 bp, Homo sapiens; identical to SEQ ID NO: 234990
  chr10:102497179-102497766
  hyper

SEQ ID NO: 334031 - DNA, 191 bp, Homo sapiens; identical to SEQ ID NO: 234992
  chr10:102498740-102498931
  hyper

SEQ ID NO: 334032 - DNA, 814 bp, Homo sapiens
  chr10:102501611-102502425
  hyper
cgcgctgtggggagcatttcctggggagatgcatttaatttcggaatttctaatcccctccctcagaccccggtcctagctcccctagccgctccccgggaagtggaaggaggaaggcaggtcccggccacgggggaggggcgcggctgggatgctcccgcggccccctccgtctcaccaaggctcagccgccttcccaagctactggaggccgggcgcctgggccccgggtcagggccctgcaggaggaggagaggcaaccacgcttctgccttttctcgcctgggcagaaaacgctgggccagggaactggaaaccggaaaacaggagaaagggtttctggaaggcagcgggagcgggtggcagcggggcagcgggcagtggactaggtctacaccggcacttcacttttgcacaacatgcccagaaacgcatttgagagccctggagtcgcgcttggcttggcttggggcgccggtgcgtgggtacactcgaggtgcggggtgcctatccgccaccccgacacctacacccagacagagcaggcgcggcccagccagaaaaccaggccggcagtagctcggcctggagggcggaggcaaggttgggggccgccaggcgcctgggcaagcctggcagggaagggagccgagaaggcaaaggagccgagatccacaaggaagatttattgggcagatcagatgcacagaggcggctaatgaagcaaatcccgagatgggtatcagagcaactccccaaaagtttatttgcctttaaatttccgcagggaggcgggctccttgtttgaagtgta

SEQ ID NO: 334033 - DNA, 1052 bp, Homo sapiens
  chr10:102507766-102508818
  hyper
cggtggactggtgggtgagacaccgcagcccgagtcggtgctggcggccgtggcgcattccaggcccgactcagcgccgactcgctgcagtcccccagccctggactcccgccgtgtccccttcccatccccaccccttagactggggctgaggggccgggccctgagcccggggaggctgaattattcatctttaatctgcccgcagctgccgccttttcataccggtaacgcgagttctcccggggcctaaattattgatggtcggggtttggagggaggggagggtgagaagtggggctagagatagggagattaacggggtgggcaagggggtaaaagaaggggcttcagtctctcccagcaacgcgatcagaggtctttccccagggtttcaccgagcttgctctaggtaccccccgagaaagggaggggagagaaatgaggggggcacagatgtccccgctttctccgaaactcgcgtgaggctagcggggcaggggctgcagcttgccagtccgggccgacccgactcggccgctagaagtctctgcgcttggattgctcagtacctgcggctacgggttgatcgctctgggtgcaggatttctagactgctgtaggccagggagaatggggcacaggaagcaccctcaggcctggcacccagtggccgcctcggttccgagatcgggagcccgcgctggagccgggttggaaaccccgtgcccttctcttggccgaaagagcaaaagcccgagccgctcggtttcctgggggggctgccgaggtctgaggggtcaaagggactcgagtcgggtttgggtcggctacacagggcgccccgagagttattaactcgccagcgaggcctatgccgtgccacctgggcgagacggtgggccccaaccaggctctgcgaggcgcggcaggcaggcgagcccaagcagccggcattctctgcctgctgcctggagccgctctgcctccctgtctctgagcgcagcagaccccgggcccctgcctcatccgccttccttgctctacttcag

SEQ ID NO: 334034 - DNA, 4633 bp, Homo sapiens
  chr10:102585768-102590401
  hyper
agagctcgtggtgtcgaggggggagtcgttaaacagaatctagtgctgatgaggaaattacacttgtttcattagcgatggggaaggagatagctcagttcctcttggtcacagttgagctcagaagctcattatcctgctgcacgcatgctttccctcctcgtcaataaacaggctttccagtggctgcatcccccacccccaccccagctccctctcagagaggggccccttctcctctacttaacccgcggttagggatcactgtaaacagtctggggtcatcacacaggagaaagggcgagggggaaacctggaggcctggcctttctcccgcagagggagggaggtagcttccgacgacggctcccaacccacgggccctccgctcaccgctagcggaccagcgggcagtccacctgcgccgcctccatcccctgccgcgtagcccacgcatccaacctcttgagggaaaggcgggagggcggtgtctcccaaaagagctcccacctcttgtgttggcactgcacattgatgccattcttaggactttctgggagaaaaatgtcccgaaggcctttcttcgccaccgccccccactcccatttccacccattaggggccatgcctcctagaaccggagtggcatctataaaggccctggcccccagcgcgacagggtggacgcgccccaatacaaacccttcgtgggtggccgcgagcgcctccgctgggaagccctgggcgggcaccggcccacaggtcccgcccgtgggtgtgcgagcgcgtcggtgcctcccgcctccccgggctctctccacgcggacgcggtgatcgccccacctccgcccggcccgcccgccacggccattaccctgcccgcgacacctgcgcctgagacccggcgggaggagcgggcggagaagccaccggccggactcgtggggtccgccctggcttgcaggcgtctgatccccactccccgaccctcccgcagggagcgagttctccggcaacccgtacagccacccccagtacacggcctacaacgaggcttggagattcagcaaccccgccttactaagtgagtacgccacctggctggccggcggctcagcgcggccgcgcggcttctgggcacggtcccactcccggcgacccgacctctggggacccggccgggccagggggacaggcttgttagtgcagcactgaggcccggggacccctcgaggacgcccgcacctcctgccctcccgtgccctccctggtcgctcgaaggctctgcgccgccctcgccctcggatcccctggagggtgcgcagccgggcgtcaccagatcgggtccctctcatgccccgtgaacgcaactattctccggggcaactggctccactgcccagccaaggtctcccagtccggatcccgctggaccccagccaggggaggtcttttctgtgcttttctttccttttttgttctcctgtttgtcctctcacccagcccattcttctcctgtgttaacttccaggttccccttattattatagtgccgccccccggggctccgcccctgccgctgctgccgctgcctatgaccgccactagttaccgcggggaccacatcaagcttcaggccgacagcttcggcctccacatcgtccccgtctgaccccaccccggagggagggaggaccgacgcgacgcgatgcctcccggccaccgccccagcctcaccccatcccacgacccccgcaacccttcacatcacccccctcgaaggtcggacaggacgggtggagccgtgggcgggaccctcaggcccgggcccgccgcccccagccccgcctgccgcccctccccgcctgcctggactgcgcggcgccgtgagggggattcggcccagctcgtcccggcctccaccaagccagccccgaagcccgccagccaccctgccggactcgggcgcgacctgctggcgcgcgccggatgtttctgtgacacacaatcagcgcggaccgcagcgcggcccagccccgggcacccgcctcggacgctcgggcgccaggaggcttcgctggaggggctgggccaaggagattaagaagaaaacgactttctgcaggaggaagagcccgctgccgaatccctgggaaaaattcttttcccccagtgccagccggactgccctcgccttccgggtgtgccctgtcccagaagatggaatgggggtgtgggggtccggctctaggaacgggctttgggggcgtcaggtctttccaaggttgggacccaaggatcggggggcccagcagcccgcaccgatcgagccggactctcggctcttcactgctcctcctggcctgcctagttccccagggcccggcacctcctgctgcgagacccggctctcagccctgccttgcccctacctcagcgtctcttccacctgctggcctcccagtttcccctcctgccagtccttcgcctgtcccttgacgccctgcatcctcctccctgactcgcagccccatcggacgctctcccgggaccgccgcaggaccagtttccatagactgcggactggggtcttcctccagcagttacttgatgccccctcccccgacacagactctcaatctgccggtggtaagaaccggttctgagctggcgtctgagctgctgcggggtggaagtggggggctgcccactccactcctcccatcccctcccagcctcctcctccggcaggaactgaacagaaccacaaaaagtctacatttatttaatatgatggtctttgcaaaaaggaacaaaacaacacaaaagcccaccaggctgctgctttgtggaaagacggtgtgtgtcgtgtgaaggcgaaacccggtgtacataacccctccccctccgccccgccccgcccggccccgtagagtccctgtcgcccgccggccctgcctgtagatacgccccgctgtctgtgctgtgagagtcgccgctcgctgggggggaagggggggacacagctacacgcccattaaagcacagcacgtcctgggggaggggggcattttttatgttacaaaaaaaaattacgaaagaaaagaaatctctatgcaaaatgacgaacatggtcctgtggactcctctggcctgttttgttggctctttctctgtaattccgtgttttcgctttttcctccctgcccctctctccctctgcccctctctcctctccgcttctctccccctctgtctctgtctctctccgtctctgtcgctcttgtctgtctgtctctgctctttcctcggcctctctccccagacctggcccggccgccctgtctccgcaggctagatccgaggtggcagctccagcccccgggctcgccccctcgcgggcgtgccccgcgcgccccgggcggccgaaggccgggccgccccgtcccgccccgtagttgctctttcggtagtggcgatgcgccctgcatgtctcctcacccgtggatcgtgacgactcgaaataacagaaacaaagtcaataaagtgaaaataaataaaaatccttgaacaaatccgaaaaggcttggagtcctcgcccagatctctctcccctgcgagccctttttatttgagaaggaaaaagagaaaagagaatcgtttaagggaacccggcgcccagccaggctccagtggcccgaacggggcggcgagggcggcgagggcgccgaggtccggcccatcccagtcctgtggggctggccgggcagagaccccggacccaggcccaggcctaacctgctaaatgtccccggacggttctggtctcctcggccactttcagtgcgtcggttcgttttgattctttttcttttgtgcacataagaaataaataataataataaataaagaataaaattttgtatgtcactccccatggctccaagtttgtctctccctgtctctgagatgggcctcccctccattggtcgatccccaaaagccccttcaatgatcctcccaactacactcccgctgccacctccaactcctttgccgagacccccttggcggcagctgaaccacggcgaaggccgagactagcctgccctttagtagccaccctcccccacgcaccccggccctggggacaggaagttcttactctccgaaacttcagaataactcctagttaggcgcctatactaggccaactctgtggtcctaccagtacacccgcacccagatttagggtgctggctctcagaacccgaagtctgaggccttctccacgtgggtggaggggtggtcgtctgtcctatctcctccctccgttccctatccagtgcagttgcgcgtgggcgcagcagcaattttatccccgaagtctgcaatgaaacgcgaagaccgcagacgcttgccgcaagtttcctcgctctgcgtttacttctgggcccgaagaatgccccgcagaggccctaggagctggttcatgggacttcacgcgcctccagtgtcttgcggagccccagccccagcaagcagcggctgaaattggtgcgccttgtgctgtggtctgggtgtgtcccggagagggcgcgcaggcgcctatgtctgtcgcggggcggtcggc

SEQ ID NO: 334035 - DNA, 768 bp, Homo sapiens
  chr10:102791390-102792158
  hyper
cgcagggtggggcagctggtcccaggaccggaagaatcctaagaatccttctgatgcacttgctcggatgcagaccgcgaggttcctggggtcgtctgcccctccacatctcaggggtggggctacggtctggggtgcagggctaggggttgggagcgtaaggagaccagggacacagtggagctaggggttacagagggggagcagggagagggctggggacatagaagaggcacaggcacgacaggaacggggctgtgaagtgatgcgaatgccgcgctgctacaagaggagcttgtggatactggggtaggagcccagggggacaagcaagccaaaggccattgccaaggcagccatcaagtaaacaagccaggcggtaacccgagtccctcccggcgcgccagcagaggaccgcccctccacaccgcccacctgcgcccggggctttctctctgggcacctagaccgcttgctgcagggctgggggtctgctgaggcccgccaggggactgtaaaccaagggagcagcgcccgcggctccagcccctcctccctttggctggggagggggccagaactgatccccgaggtgggattggctctgggaagcagcttagggcctggtccaggtggcccaggctgggggcatcgcctcgaatgacacccaccgccctcaggttctgccaatccccgtgcccaccgggtgggcgcggccgggaagctcctgcccctccctgctggtcggcgtcacgcgtgacgtcccgc

SEQ ID NO: 334036 - DNA, 569 bp, Homo sapiens
  chr10:102822304-102822873
  hyper
cgaacgcgctgatgccccgagtgctcgcagggcttcccgctaaccatgctgccgccgccgcggcccgcagctgccttggcgctgcctgtgctcctgctactgctggtggtgctgacgccgcccccgaccggcgcaaggccatccccaggcccagattacctgcggcgcggctggatgcggctgctagcggagggcgagggctgcgctccctgccggccagaagagtgcgccgcgccgcggggctgcctggcgggcagggtgcgcgacgcgtgcggctgctgctgggaatgcgccaacctcgagggccagctctgcgacctggaccccagtgctcacttctacgggcactgcggcgagcagcttgagtgccggctggacacaggcggcgacctgagccgcggagaggtgccggaacctctgtgtgcctgtcgttcgcagagtccgctctgcgggtccgacggtcacacctactcccagatctgccgcctgcaggaggcggcccgcgctcggcccgatgccaacctcactgtggcacacccggggccctgcgaatcgggtacgcatggccc

SEQ ID NO: 334037 - DNA, 1297 bp, Homo sapiens
  chr10:102893948-102895245
  hyper
cggacgccccccaagaagaagaagccgcgcacgtccttcacacgcctgcagatctgcgagctggagaagcgcttccaccgccagaagtacctggcctcggccgagcgcgccgccctggccaaggcgctcaaaatgaccgatgcgcaggtcaaaacctggttccagaaccggcggacaaagtggaggtgagcaagcggggcgggccggccgcccgcgagcggcgcggtctcaggcagctctcggttcattggcctctcgtggggcgcacatactttttccgctcgcggtttctgatcctttcggaggagcgagctcccgctaggcttgcggggagctggaagcaaccgaggccgatagctgggatggggctgaagagccctggctctgttttaccggaggcttcagggctttctggttggcacactctctgccggtgtagacgcggcaggtctattccgccgcttgggcaaacaggcgggttagtgcactccacgcagtccaggctccagggatctgtgagtcctggggagctttttgtttgcgcaaactcttgcttatggaatcctgctctgtcctggagactggatgcagaacagcccgcaccttgttgcagcgctccagccgggctcccggcagagggtctgtggccccagaccgcggccctgctgacggtctcctcccccagacacccggcctttgcgcagccggtccctaccctggaaggagaaaatcaatccgcgccggctgcggcggggtttcgcgggtcccactggaaggggaatcaattaggagcagatgggtgtgtgtgagaaagagaattttccttctcccatagccacaactctagttactacgcaatgggctttttgttttgttttgttttttcacatttacgctcacggacgtgaagcgtccccaacactctcgagcagcctccctctccgcgcgcactgacgctttctccggctgcaccctctggcacgctgcaccctctggcacgctgcaccctcccgcacatctggcccttgcccgccggagtttctcccctagctcaggccccatggggtagcgcgggagagtctgggcgaagtcggcggcgccgagacgggcgggccttggggcaggaggaaggaattggagtttcctctttttctgaacgaaggcgaggaatctgcctgggattccgcctacggggccacaaaggaagccatggccccacgattctaccacaacatttctgacgctgggaaaggagtgggggatgcggcctcagaccttggaacgctaaagagggagc

SEQ ID NO: 334038 - DNA, 417 bp, Homo sapiens; identical to SEQ ID NO: 235012
  chr10:102899184-102899601
  hyper

SEQ ID NO: 334039 - DNA, 683 bp, Homo sapiens; identical to SEQ ID NO: 235013
  chr10:102899842-102900525
  hyper

SEQ ID NO: 334040 - DNA, 139 bp, Homo sapiens
  chr10:102978324-102978463
  hyper
cgggagggtgtgggcaggagtctggtgtatatccggccaagaatccctttgcgacgtgtctccatgcctgggtgtgtgtgtatggacctccgtgtgtctgcgtgtgtgtgaccacgtgcggctgagaggccatgtagac

SEQ ID NO: 334041 - DNA, 316 bp, Homo sapiens
  chr10:102978757-102979073
  hyper
cggtttccagggtccccagagctgggacgccgccgggaaaccatggtcctggaggggagggagttatttgagggggtgcttgtccctgcctcgtcccttgtcaggccccgcgcggcgctaaagcgggggccgttttccctttaaatcgcggacactttgacaggggacattaaggacccggctgctcaggctgagcagatcataaaaccggacaggcaatttctgctcccgccaaatagccgggcaaactcgttctgcatctttggttttaatgcactaaactggcagctaagcagggagcgagcaaaaggggggt

SEQ ID NO: 334042 - DNA, 187 bp, Homo sapiens; identical to SEQ ID NO: 235023
  chr10:102985773-102985960
  hyper

SEQ ID NO: 334043 - DNA, 1091 bp, Homo sapiens; identical to SEQ ID NO: 235024
  chr10:102986465-102987556
  hyper

SEQ ID NO: 334044 - DNA, 752 bp, Homo sapiens
  chr10:102988184-102988936
  hyper
cgaagcgcgcagggcacagggcgcgaggcgctgggtgcaggggaacccagcagctgcgcctaccttcggctgcctgcagaacgctgacctccagccccttaaacgtcttgctggcgagctcctccagcgcgcacagcggcgaggtctgcgagagcagcgcgcggcccgccaggggcaagccgccctgcgcgtgcttgtccgcggcggccagcaggtgcgccgccccgcacagcgagtaacttctccgcacagacggcttgttgaggatgtcctcgatgctgaacggcgtcagtggcttgttggagttggcaggcggaggcaggtggtccagcgggctgcgccgccgctcctcccccggcgccgccttgccgtcctccttggaagtcatctcggccttgttcggggtcccggccggggcggctcgggccgcggggacccagcccgcgggcagctcgggcgccggacggcgcgggcaggcagcggcgggtggaaaggaggccgcactgggcagggcgcgggccgggcgcggggccgattagcgcggcggctgaggaggggagaacagcgcggggccccgggaagagggcgctgacgcgggcgccgctgctgctggggcttccagcaatccggggccggagccggggcgcgctgcgcggggctccagtttcgccaaccccggtgctatttaaaggtgtcaggtggctcggcagtggctcctggccccgggtcctggcggccgcagttggaagagc

SEQ ID NO: 334045 - DNA, 750 bp, Homo sapiens
  chr10:102989488-102990238
  hyper
cggtctctccgacccgggatgtggagcccgaaagagtggtgggaaccccagcccgggagggacgcggccgccgctcgggccaggtaggaccaggagcccgggtgggccccgctgccacccagagtggactttgcggagctgagatcaagagcccagcgcctctacctctgaccctcttgcccctcaccccactgcctgggcgacgcgcctggggagagggaatctgaagccctcctgcgctggcccgcaggaggtcagagccggctgcgcagccttgggtgggcgacgcgggaagggggtggaggaccccaggggttgggggagggggctagtcggagagctcagccttctccacgcggagaggcggaggagggaattgttggcggctctggacgcctctccccggcctgattccgaagcggccgccctacctcctccggcaatcttgctcactttcctccggcagccgctccccaggctggctggggccaccaacggcctgatgatgggcgtctgaagagtagccaggccaggtgccggggctaacggggccggctccgtgcctccctgctgcgctccgcccgggccccggccggggccccgctgccggccccgcctagcccagcgcccggcttgagtgcatggccaggccgactccagctgttccggatgcggggcgggggcccggcgggagccaggccgcggctggggctttgctctcaggaactcgcagggaggccaggcttccag

SEQ ID NO: 334046 - DNA, 1584 bp, Homo sapiens
  chr10:102995986-102997570
  hyper
cgttaatggtagtcagctccctccctttcacagaggtctcactactgtcggggggcgccgggcgcaggccgggcatggggcctgagcttaggccaggtggaaaggtggaaggacctagtggggacagacgaagagaccgaggagccgcccgcccggctaaatggacacaggaaaggcctgagtcaggcttctcataataaataaactgcacgtgaataattcagcagtcgcgcgggggccggttgcatcagcgccgccgccgccgcgcggcgcccaattccccgcggaggggagtagccaattaaggcacttgaaaagggagtcgggtggaagatcccccgcccaccagtatcctggatttacccaggtcgagttcagagagcctccccggtcccaaccccctcgggccccatgggtcagggggccgcctgctgggaagtgctacctcagctaagccgctcaggtgtcccgagactccgggcaagggaagacaggcggcgagacggagccagaataagggatgcggacgtctgacctgtggaaaacccagcatctgcagtgcccagccgcacagggaacgtgggcggcgtggttccaagcacagtgaagacgccaggctcggatctgtgctcagagccgggatccctccgggctgcttcgtcctggccaggactttccttgccctgaagtgaggcgccagggaagctgcagggccctccgccctctctgaactcccacgtacttgggcctctcccagcctttcttggacctgtggaagcaattcctgcaggaccagactcccctgtctccccgcggccccctaggtacactccgtaacttccgaaaccttatttcgtttgagcgaaacccggcccctttggctcttcccacttcccacaagtccctgggttcccgatcctgagggattgcattcatcccatctcacacccaccaacgctcaatccctccagttcctccccagccccttcacttccattaattaggtcgactcccttccttcgccgctccctcctgtccccactcagcctccctacacctatgcggcgagcctcgggccaagacctccgccctggctccgccagtcctgcgggggccggcatgcaccagacctcaaaagggatcttcacgggaattccgcatagccagatcccaagcctccagggaggccaccagccctcccccatcttcttcttcctcctccgtctcctttcctcttccctccgcctctacgtatttctttctattcgtttcttttcgtttggtgaggtgccacccgccacagccctgtcccctagggagaggcctggactaactttgccgtcctcgtggccttagcccggactgtgagtctcgagcggcttccgagaggcagctcgggtgtcttcgcagagacagatgaggtgggctggcgattccctagcctcagatggctctgccaccagccagctctgtgatcctgggtaagtctttcaacctctctgagtcttgacgttggtaaaaggcaggagatttagagaaggtgttgggagactaaatcttttcattcgtttgagaaagggagtc

SEQ ID NO: 334047 - DNA, 53 bp, Homo sapiens; identical to SEQ ID NO: 235029
  chr10:102998373-102998426
  hyper

SEQ ID NO: 334048 - DNA, 144 bp, Homo sapiens; identical to SEQ ID NO: 235030
  chr10:102998648-102998792
  hyper

SEQ ID NO: 334049 - DNA, 458 bp, Homo sapiens
  chr10:103043977-103044435
  hyper
ctcattaccctggcggagccggctgagagccgataaagccgagggggagaagggccgacatcagggtaatgggggagcagggccattgaggagctggagccgagccggggaccgctccgcgcgcagctggagcccggcgagagggccgcggaaggggggtgcgaaccggggccggaccccggggaggagccgggaggcgagcggcgaggggcactgcgcggctgggtctgccccggggtttcgcactgcgccgcgggtcgaagtaccgcgagttggccctgactgtctgcaggatgagggtgtcgaggagggttccaggccagcgtgcctgcctcgcctccagcccggggtaaggagatccacggaggcctctgcgcctaaactcaggtggccagacagagttggggcgggaggcgggtatacggaaaggacacccttcccctctatgggccccgccc

SEQ ID NO: 334050 - DNA, 1031 bp, Homo sapiens
  chr10:103535381-103536412
  hyper
gccctcagccctcccgcgccggccgcagagtcagtcccggtgcccccgaccggcgctgcccacccgggtctcacaccggcgcgcccggcccccgcctccgcgcacccctcctcacctgggcttggaggcagaggaccagcaagtgcaacagcctgtgggagacaaaagcgggcgggagagagaggcgcgggtgaggcgaggggcgcggggggcgggtggcggggcagggcggcgcggtactcacaggcagctcagcgcggagcgggggctgcccatggcgcgcggccccggggcaccgagagcccggcgggtcacgccgtcccgcgggccgccgcgggaggacgcgctgagcagggcgcgagcggagagggtgcgggtgcgggaggccggcggcgatcacgacgcggctccgcgggtcccgtggaacgtcgtgctcgccgcgccgcaccgaatcgctgtgcgccgctgccggagccggtggccgctggctgctcgggagccggagcgggcgggagggtcacgggctggcggggtgggtggggaggtgggagggcggggaggggtgggggcggggggcgccgcaccgggcgcgaggggggagcgcggggcgggcggcgggagcccgcagcccccggctgggaactggggcctggatgcagcccggggcgggggcggggcggccggggaggggcggccgacgggttcgggattgagggtctgggctaggggaggggtctggggacccgcgggaggggcgggggcggccggtctgggcgcctccccctatccccggcctgtcccctcgcgcgctccccggtcccggacgcgcggggatgggggcgcctagggctgcaaactctgcgggccgggagaccccgagcctgggcttccccgaccgcctggagcgcccgagtctggcgggtctgggtctccgcctccgggcccagccgcttccgccgccggctacgcagtggtctccgagccacctactgtgtgtcccgccgggcccctgggagcggccgctaaccatg

SEQ ID NO: 334051 - DNA, 358 bp, Homo sapiens
  chr10:103985878-103986236
  hyper
cgttttacgggagaaaaggctggggaagtgggcgggcgatggcctacgacgggacttggggcggggtgtgcgaaacgcctggcaggcgggcccttgagtatgaccaatcagaatgcggactgcgtcccaggggcggagcagaggcgtatcttggtcgagattggatagcggcggggcgcaggaaagaggtcgcgccagcccgggcaggcagctttgcaagtccgcgttatatatcgcagtggctgcgcccgggatagctggctgcgccgccgcgcacatgcctaggttcgacgccctcctccctttgcccaggagttccttctgtcccggctctgttccgtctcgccccgaggttcac

SEQ ID NO: 334052 - DNA, 875 bp, Homo sapiens
  chr10:104000943-104001818
  hyper
caggtctgcagtccgccctcccattctcgacctgttcccaaggcaccggagttcagctgccccaggtctcgttttagggattccaaggtccagcaatagctcctcggccccatgagcccctgtccttagaatggtcaaacactcacagtgcgtcctgcaacaggcagactcccagtagcggcggctgcggcggcgatctagagggcaggcaggggccaggggccgggcacccggccggagtgggggccgcccccctgctcccgggccgcctctccgctcgggcgctcctggactctcggagggagtgagcctcaccgcgtactgccacccccagccggcgcccattcactttatggcagaccagggcgcccccagcccgccgcggcgagccgcgcgcgtcaggccccgcccctttccagctgccctgctggggctccgccctttccagctgtggatctccaggccccgcctttgagggaggggtctggccggcgagacgccaagaaccccgccctctggccaatcagaagcgctcttcagcaactcggccgcgcccctccccacgtggcagagaccgcgctccggctaggacgcttaggcagagccaagtgggcgagagtagagtggtcccggtagccacgggtaaaagggatcggctggcagcgaagtgggttgggccgctaccccgaggaaagtggatcggcgccaggtgggaaggcgcacggggccgccgggtctcagcgctcagacttctctgccactcaagtttcgccgattttctccacttgtcgctgtccgtctctcctcccttttgtctctgttccaatcctcccacgtctcgcctttctttcctcttctttctcctcagccgcttc

SEQ ID NO: 334053 - DNA, 260 bp, Homo sapiens
  chr10:104221427-104221687
  hyper
gcagaaaggctctccgggggtctggaggaaagggatgcagtgggtcaaatagctccctggtggtctgggatcgagggatgcactggtcaggtcgggatccgtgccattagcataaaggcatttaaccctggtggcacttggggagctttgaaaaacaccgatgctgggcccgcccgaagagattccgatttaactgttctgggtgaggcctgggcctcggtattattgcacagctcctcaggtgattttaacgtgcaggc

SEQ ID NO: 334054 - DNA, 806 bp, Homo sapiens
  chr10:105037277-105038083
  hyper
cgcttcgccgtgttcatcgagaaggtgcatcagctggagacgcagaaccgcgcgttggaggccgagctggccgcgctgcgacagcgccacgctgagccgtcgcgcgtcggcgagctcttccagcgcgagctgcgcgacctgcgcgcgcagctggaggaggccagctcggctcgctcgcaggccctgctggagcgcgacgggctggcggaggaggtgcagcggctgcgggcgcgctgcgaggaggagagccgcggacgcgaaggcgccgagcgcgccctgaaggcgcagcagcgcgacgtggacggcgccacgctggcccgcctggacctggagaagaaggtggagtcgctgctggacgagctggccttcgtacgccaggtgcacgacgaggaggtagccgagctgctggccacgctgcaggcgtcgtcgcaggccgcggccgaggtggacgtgactgtggctaaaccagacctgacctcggctctgagggagatccgcgcccagtatgagtccctggccgctaagaacctgcagtccgcggaagaatggtacaagtccaagtttgccaacctgaacgagcaggcggcgcgcagcaccgaggccatccgggccagccgcgaggagatccacgagtatcggcgccagctgcaggcgcgcaccatcgagatcgagggcctgcgcggggccaacgagtccttggagaggcagatcctggagctggaggagcggcacagtgccgaggtagctggctaccaggtaagggccggggctgggcgtggggaggggtgccctgccctcttccgcgc

SEQ ID NO: 334055 - DNA, 1173 bp, Homo sapiens
  chr10:105253254-105254427
  hyper
tccggggagctcggcgttctcgcggccctgctccccttgttttcaagtgcaagttccatgtttccgtgctgggaataaggccagccccgggtgccaccatactcgcctgatgtcttaccccgacccgcgccgccgagagcttgcggctacgggaacgcggcgcgccccggggccacatctggcctagcgggcgcgcgcgtgtcactaagacgctcattcaccggcgcagctgtcaccataacaaccggagcgagggaatcctggagactgccggggcggggggcgggggcggcggtcgcaggagggacccggcgcgggcgggaccgcggcggtcgggggacaccagctgcgtcggagcgcccagaacgccccgcgctccgccgagccccgctccacgcagacccgcgggcgggagggagccacgcacatcgccgccgcggccgtctccgcggggcggtaaccgagcctgcctcggagccgccgaacgcccacgccagcgaccctgactctatggccccgggggagcgcgccggagccgccgcgccgcccacccccagccggaaccctagcgtcccggggagcaagcggggagccccgggcgtccccggccccggcccagggccctgcttgtggcccccgctcccgccacggggcatgggaggcaggtagcccagcctgcgccaggacacccgtggcgggcggaacccgccaaggaccgcgaagtccagagaaaggaagctgaggagctgcccgcccgcccccggctgcagccccagcagggccctcccccggtggcgcgcacccgcgcgcgcacactcgcacaccgcacctcagcgcctgcccggcctcgcccccacccgcgagcgccgaacctcctggggccggatgccatgggtaacaacttctccagtatcccctcgctgccccgaggaaacccgagccgcgcgccgcggggccacccccagaacctcaaaggtaggctccccggccgagcgctgctggaggactggggcgcaggtggagggccagggaggtgtggttggggagggcgggcagacgccacctgttgtgcgtgtctggaggccggagatgcacctctggccgtggagtgggctgggggtggagggcagccggcgatgatggtgatggaggatggcgtcccgcggggtctgc

SEQ ID NO: 334056 - DNA, 258 bp, Homo sapiens
  chr10:105344360-105344618
  hyper
cggcgcgaggcggacgacgcgcgcctctcggtgagcctatgcgacctcaacgtgccgggcgcggacggcgacgaggccgcgccggccgccggctgccccatcccgcagaactcactcaactcgcagcacagccgcgcgctgccggcgcagctcgacggcgacctgcgtttccacgccctgcgcgccggcgcgcacgtccgcatcctcgacgagcagacggtggcgcgcgtggagcacgggcgcgacgagcgcgcgctc

SEQ ID NO: 334057 - DNA, 953 bp, Homo sapiens
  chr10:106097237-106098190
  hyper
cggtggctttttttttctttttctttttctttttttaagagaaagcgttttggatggggagtcccgccccgggagtcttcaccaggcggccagaatggcaaagtcacagggatggggttgagggtggggttaggggtgaaggggcagagagttatttgcagcccaagagcaagtctgcacagcgtgaggtctggcccactaatagtcccgaaagaggaagcggcggggattttatccggcctgaagcagccccataacttcactaccatgaaccgagaaaaaaaaacttcacgcctattcctcccttacaggaagggagggaaggggaaggggaaaagggggcagcaaatgagcagggcgaaccggcttttctttcttcggtagcgctctgctcagatgtgagaagtaacgggtcacctggccactaggaacaaaaatgtggtcccgctctgggctccgaggctgcgcgcgcctcgaggaggagctgcccgcagccctggctggagcgagcgcccgggacgcatcccccgacgcggcgggaacaggatgcgggaccgcgaggagacaatacgcccgcctgggcacgcgcgctttaagggaagggggtctccaaagtcagcccccacccgggaggagcaggcgcccgcgctccccacaccctcctgcgccccctctgtcggcagccatctccgacacagctcctccgagctcgcgctctccatcgcgcccttcttccttcagcacactaggctgccctgggacttacgattggcttgggtccccggtcccggtccccgccgcgggaggacggctccagcacaggctttgcgcgcaggtcgagggccgaggcgccgctgcttgcaggcggctgcggtggagcttgcggcccggcacttagaggggcgcgggcggcgatgcccccgctggctcccaccttctggcctgcagcggcc

SEQ ID NO: 334058 - DNA, 368 bp, Homo sapiens
  chr10:106113446-106113814
  hyper
cgcagaagctcctcccctttcgaattcccgctagcgcccctagagggcgtgtccgttgccaggcgacgggccgacgcgccgagcgcgggtttccgctcggggcgggcgatagagacagcgcgtcgcgcctttagcttctttcccagactccggcccagctcctgcgatctccacagcagcctctgaggccgcccccagagagcatcaggatggctgaggtcaggagtcagcgcccctctgtcgcctttcccttgacccctccccattgtccctctcctactgacgattgtcacaaacggtgattccaatatttccccccatcaacatcttattcccctgcaccctcactcactcccgcgcctttctcc

SEQ ID NO: 334059 - DNA, 708 bp, Homo sapiens
  chr10:106398567-106399275
  hyper
cgcgggaagctgcggggactggatggtgcacctccccagtgcgcataggacttgggagaccacactcctccgggctgtgtgagcctcgggtccgcccagatctcttatactgtggcacctccgcccagagcctgaagagaagagcagcaccgcgtccctcccgaaccccgagcttcggctcgggctgcagcgccgggcctcctccggcaggggcgctgggaactcgcggatggccggctctcgtccagcgcccgatcccgcgcccacctgggcctgcggcgctggaacttttcttaggaatacccgctactccctgtctttggaaacccacagatgccaggacccgcaccattctgggccggacgttgtcgctggcttggttctttggcccagcctcccccgctgctaattgccattttggcaccgggtggaaaggcaagttcaagagggcgggggctctcgggaatcgctggatgtcttcttccttggccagcttagattctcagtcgcctcttctgcctcctccatccctcttggctcttacctggcgccctttcgcctcctcttctatctccctcttccttttgcaccattctctcgccccttttctccttcatcttgtctttcctctctccccttttccctctattttctccttcattccttcctctcacctttctttcctctccgcgcattcccctccctctc

SEQ ID NO: 334060 - DNA, 2322 bp, Homo sapiens
  chr10:106399492-106401814
  hyper
tgtaaaccgcagctcgaggtcgtctgtgggtttagctcatttcccttcagcccacctgaagtctccttcttcctacggtcacgaaggatctcagctgcaccaagcgcgcaggctacactcctgcagtagcggattggggaccagataagcccacgcggctcccgcctgagtaccctcttaactggcggccgacactttgaaacaattgagtccgttcagaaacggactggggagagtgagggcacgacctcaaaatcctaggcagcaaaatgaggtctggatcctccctggaagaacagacatctcgactactctctcgccccacctctggccgggaggtcggggcaaggagaatccctcaaccgagaagatctggcaagtccccgatcccaccggggccttccgcctcttttccctcatcccctaggaggctttatcaggttctaaccgcttgtagtgggggccgtgggtgctcggggcgccaagaggagggggctgccgagagcggcctgcctagttctcagcattgcctctttgaccactcgcaggctcctggaaatgcaaacacagcccgtgcgtgatccgcacgcgaccaaaagccgagcgcacacctcccgcccccgccccacttgccatcgctcacactaacgtgcacacatgctcgtgcaaacgcgcacgcacggaaccgcgcgccccctcacacccagccgcgctcccggcccggctcagccaggtgcccccacgcggcagcgcccggtctgcccgccggccccctgcgaacccctcgcctcacgcccgcctgcctgcgcgcacgcacgcgcacgcacgcattccccacgcccccgcgcgggggcgcaggccttgggtggcggggtttggccgggagccggccgggccagggagcggcgagcagagtccagggtgcatcccgcgcttggcttccgtgcgcagcctccccgcgcggaggcacctggctccctctcggctctagaacgcgaacagttggcgttgagcacacaactcctcctccttctcccccgagacccctgtaccctccccgcgcgccatctcccgcccctcataacaggcccgaagagtaaacccccaaacgcgtccagaagcggctcccaactcttcgccgggagcacgttggaggctggatttcggagagactcgggattggggtctattgccggcccctcctggatccggcttgattttcatattttaagaagattttcttattacctttgattactcctttttaccaaatttctggaggagctcagtggggaggattggggggaatctgattttaagaaagaaagcaccgaaggggcaattattaattttcctcgggtttggaatcaccctctggacaagagaacgggcgagcgggagctaggagggaagagtggagaggaccggcgaggcgcgccagccggagccacctccttcccggccgccccctccccactccccctacacacacacgctcgctcgctcgccggcgcgcgcacaccccccgcgccggacccgcacctcggcgggcgccacacactcggcagcccgagccgcggtagccgcagcgggatggaggcggcgcgcacggagcgccccgcaggcaggccgggggcgccgcttgtccggacggggctcctactcttgtcgacgtgggtcctggccggcgccgagatcacttgggacgcgacaggcggtcccggacgcccggcggccccggcttcgcggccaccggcgttgtctccactctcgccgcgggcagtggccagccagtggccggaggagctggcgtcggcgcggagagccgccgtgctggggcgccgggccggaccagagctgctgccccagcagggcggcggcagaggcggtgagatgcaggtggaagccggagggacatcaccggcaggcgagcggcggggccggggcatcccagctcctgccaagcttggcggcgcgaggaggagtcgccgggcgcagcccccaatcacccaggaacgcggggacgcctgggccactgctccggccgatggttccagaggaagccgtccccttgctaagggttcccgggaggaggtgaaggcgccgcgggctggggggtcggcggctgaagacctccggctgcccagcacctccttcgcgctgaccggggactcggcccacaaccaagccatggtgcactggtcgggacacaacagcagcgtgagtacccacccggcggcgggtccgcctgtttcctgacaccgaaggggaatgggggggtgggtgggagcgagggacagatagttgctcgggggtcgaggc

SEQ ID NO: 334061 - DNA, 991 bp, Homo sapiens
  chr10:106401820-106402811
  hyper
cgcctcgacttttcgagataacaggtttgtccgattccccccacgcccccaacaggttaacggagtttgttgttagacgctgtgtgtgtttgtttactggagaccctaggcttcggccgccgggaggggagtggaggaaggggcttcttaaagatgagtgggggagggatctgtgctcactttctccaatacttggcttggagggtcagttttcctgtttgcggggtgcttgaattcttggatgagaaaaagggctgacttggggcgggagccgctgaacagaccgattcctgcggctgccgggctccccctacccccaccccacccccaccccccctcccgtcacgcgaaagggaacccggaaggccattcggactcccagcctcctgctcgcctcggggtcgctgctatccgctccaggcgcgcagtcctccagcccaagagggaggctcggccaagtcggcccccagccttggccttcaggtaaccccggttcctccttcaaagtccagggagcggccctggaaagccgtagcagaggccgtaaaaaaaagtttaaagcgtgaagcgaaattccacacccatccagcgctcatgccacaccgctcgccctcacgcacgcacaggcacacggaagtcgctcagcagaaaactctcgacttcaccattgcgtcctgcgccacaaacggctccctgagcggagttgggtgcctgagcttcctgcacacctctccacccgcttttccccgccaccgggttctcctggacaaggatgtaccgagaggtggcgtcgttgagcccggtctggcctactccggcattccgaactgggcgcccgactgagcatcgcgcctgcctggcagctgcagcggcccgcagcgcgtgcccggaggggctccccctacctcgccggcacccagcgctgtgcagccaagcaaagaaaaggcgggggacaggttcccaccatctccccgacttccctccctcccgc

SEQ ID NO: 334062 - DNA, 832 bp, Homo sapiens
  chr10:108924131-108924963
  hyper
cgaggccgagcgtggagcggagctggggtgcggcgaggggcagcaggagccgccgccgcagacgcccggggcgcagaggatcaagagccccgcgccggcgaggagcgcgctcagccgggcttgggagccgccgccggcgccaacttttcccatcgcgggagcgaagagcagcggagagaggggtcccagaacgaaggtggcggcacgagctctgcgctggcggctgtggggggccggcgctcaggaccccaactccatccaagttgcgccgcggtgggggcgggcggaggcggcgccgggcaggtggcggccgcttgcccgggctgggcttgtgccgagcgcgggtccggacggagcgagccgccgccgcgcgggggtggagctgagctgaagtcactggcggagcgggcgcgggcgctggcgggcgacgcgggagggagggcaggcgctgccgggactccgggcgccgcgtcccgcggccgagctgcgctgcgcaccgggtctccgggcgctggaggcgccgccggcgacctcccctcggcctcgcaggcgctgccgccgcctctccccgccgcccactctgcgcccccgcggccgcgggtcccggcgctgagtccgcgcaccctgcccgcgggggcggtcgaccccgggctcccggagcagtcgatgtgtcgggagcttcctattcctgctttattgtttctatgagtctatgttgctgtttccttttttctccgtctttctggtcttttctagttgaggagatagggatgggtgggcttctgctccttccctctcttatgcttcctgagttggcatcttgaccttaccc

SEQ ID NO: 334063 - DNA, 340 bp, Homo sapiens
  chr10:110226004-110226344
  hyper
cacttttcccaccgcgggggcggagaacagcagagaggggtcccagaccgaaggtggcagcgcgtggctctgcgctggcggctgtggggggcaggcgctcaggaccccaattccctccaagttgggccgcggtgggggcgggtggaggtggcgccgggcagctggcggccgctcgctggggctgggtttgtgccgagcgcgagtctggaaggagcgagccgcagccgcgcgggggtggagccgaactgaagtcactggctgagcaggcacgggcgctggcgggcacgcgggaaggagggcggccgatgccaggtctccgggcgctggaggcgccgccggc

SEQ ID NO: 334064 - DNA, 738 bp, Homo sapiens
  chr10:110671608-110672346
  hyper
cgcttcagctactccgttaggaggcgggcagttttgtctgtgtcttactccttccgtccagggcattccgcagactcctgctcccttcttcctctccacttgctctcaatagagggcgcgctgggcgaagtaggggcgtggcaggagccccgctccgcggatccaggttgaaattcctccctcctggaatccgaccgtgagcatttctgagcggtggtgaggaggaggccaccaagacacctccctcccgctgtgcaaaggaacgcaggagcccggcgcaggtggtgggcttaccgcgcgcacgcctggctggagaggtgacgccgctgtctgccaacctttcccagcttttcccacgattggagccaagagaggtccccggggatctcagttgggcaattgtaagggaaggagctcaggacactgacttcaagatgaagggggaggtcagcgaagacagttctagggtgggcggcggccgctgacagagcaggagccacagccaccggggcttggagataggagcaagtcgcaggcggagggggctgcgggctggctgcctgggcagcacaggacttgagggagctgcggggactcctggagtctcatcaggccttccagtcgctgtggggaccccggctgcgcgcggatcgcctgcgccactgtccccactgacccgcccgccgggtttgccaattaccagcgccacctggtcccgcacccaaccccacattttct

SEQ ID NO: 334065 - DNA, 823 bp, Homo sapiens
  chr10:111216360-111217183
  hyper
cgcctgtcggagcaaatgtgacgctgattggcttcagctccccagctgcaaatgggtagctttgccggggtttctctcttgagctccaggcactctcaaggatccggttcatgtcttcgccctggcccgcttggtatagggggcgcacaggaagaggccaagaagtggaaagaacctcatctcgatgtcccaagtgacaaagcccccggggctcggggctttggtacagaggagcagcagaagccgccgccgcagacgcccggatgcggaggacccagagcgctgcgcagctgaggagcacctggggagccaccgccggcgccaacttttgccatcccgggagccatagcggcagagagggggtcccggacccgaggtggcagcgaggggctctgctttggcagctgtcggggctggagctcaggaccccaactccagccaagtcgggccgcggcggggcaggcgtaggctgcgcaggcaggggtggccgcgggtgctgagccagtcgccgccgcgcaggcgggcgctggagtctcagctacctggcgcgaccgccagcagcacccagcgcggggccgggagctgctgggggcccaggctccgctctccccaccgctctgcaccgctgccggctgcggacagacccgatgcgccaccaccaccgcagttgccacgacccccatggaatcgctggcgcctccgctccggttctctaacccggcgcactctgggatcccaaagcttgccgtgggttggaggcttcctactctttgtgcgttgaggctttgacctgacccagagcgcagcttatgccctggcttgg

SEQ ID NO: 334066 - DNA, 737 bp, Homo sapiens
  chr10:111767130-111767867
  hyper
cggggggcgtgcggaggttgaacctttgcagtggcctcctacagccccagcagccagcgtgggcggccgaggctgactcaaagcggcggctcagcctcgggagtaggagtagggggctcgctcatttagggcgggagacatttccgaggcgcccctcctccccttcgcggtcgggtttctatcggggtcgtttccccctctggccctccggggacgccgcggattcgagctgcacagtcagaagaggacgttgaaaaggcgccaggcagccgccccgaaccaggccctcccggctgccgggcctgcaggcccccaccgctgcggcttcacggacttagagcttgagggcgcggagggggctgcgggggcgggaccaggactcccgaggggcgctcggggcggggccagagagagctcggggctgccagaggcgaggtcttgaggaggcggggccgggaggcttcggagcccaagaggcggggccagaggcgtagggggctgcgaggggcggaccttgggggcgtgaccggggggggcgcttggggacctaggggcggggcgttagggggcgggaccaagggacgctcgaggggcgctcggctagtcccgccagagcgcgagccgccagcccgtaacggtcgccagtgtgaggggcgggagggaaagaagaggggtttaaattagattttttaaaacacagagcaagcgccagaggcgtcggcatcccaggtgtcgcc

SEQ ID NO: 334067 - DNA, 1429 bp, Homo sapiens
  chr10:112257163-112258592
  hyper
cgaggcaaatctccgacgtcctctccttacacgcgcagacctcggtagcgacgggaatccgttccggactcctctggggccctggccggctccctcggccctgctcagcgcggcgcgggcgggttctcagcccacgtccgtgaagctgaaggccggatcgtgcggcgccgccccgccccccacggcgcttcctcctcggtccgcaccgcgagggtcaccgcggccccggagcgcctgggacactcgaccggcagccgcgggtgatgcgcgagtgagtccctcagcgaagcgcggaagagagaacgaagaggcgccttccacttcctctcgctctaacgccggcacccgccccgcgcgtccctcgcccccgctgccccgccccctgcagggcgtggccacggcccgaggggcggggaaacacccatatttggccttatatgggcagccgcgtcacggacggcactcattcacataaaacgctgcgcggccggcggaatccccggcttctagggcggcgagcggccgggctggctatcgagcgagcggggcgggaacgcggagttgcgccgccgctcgggcgccgggctccgtcgcggccgcagccccgcgggtcgccctcccgtgcctcgcccgcggacaccctggccgtggacaccctggccgtgggcacccgcggggcgcgcggcgcggggccgctggccggcggcggcggcggcatgaaggtcacgtcgctcgacgggcgccagctgcgcaagatgctccgcaaggaggcggcggcgcgctgcgtggtgctcgactgccggccctatctggccttcgctgcctcgaacgtgcgcggctcgctcaacgtcaacctcaactcggtggtgctgcggcgggcccggggcggcgcggtgtcggcgcgctacgtgctgcccgacgaggcggcgcgcgcgcggctcctgcaggagggcggcggcggcgtcgcggccgtggtggtgctggaccagggcagccgccactggcagaagctgcgagaggagagcgccgcgcgtgtcgtcctcacctcgctactcgcttgcctacccgccggcccgcgggtctacttcctcaaaggtgagcgctcggggtccctgccacgctcgcccctccggcgcccccgggtcccctccctgcgccggggcgccctcctacaccctgggaccgggagagtcaccacctgcaggagtctgcaccctgtggcttgttgtgcgcttgggagggcactgcaaatgtcagcactcagagctccccctcttccccacccgcgttcctcgaaagcgcccggcagcgggtctgcccggtggtctgggtggagttggttatgctgcgggggctgctgctgtttagcagtttgggggccgtcggctcgtgccgggcacgagccccctttccagacgcgagcttcgcc

SEQ ID NO: 334068 - DNA, 1291 bp, Homo sapiens
  chr10:112402953-112404244
  hyper
cgcaaggcacgcttttctctacttcccggggacgctggcctcaggacttagaactcctgtatgccggacagccggtaaggtctactgggcggccgctttctctggtctttctctgctccgtagacatttctgtgtcaggtgcctcgcatattcgcacccacgcgccagggcattaagccgaaccttgcttggtggctctcagccttgaaaggccgcaggatgtccgcgtccacagctgtgaaccggtgagtgcaggtggacgggcgcacgcgggcgccagggtaattaacagggcttcagagggcgtgacggtgaccgtacgttgtcggcgaactctcttttcatcctttacatttccacggagatttggccaataaataacaagaataaaatgtacgcatggttttgtctttgcgctcgtggggtcgtggcggggtcttttaagtgaagagaaaaagaaaccagaaacccacggtggccccaccggctgcttccggggacacctgaaatcagcagctggaactgacaatttggagagccccggggatggtcatctgagacctgggttacaatacaagtctgacctcggggcgagtccaggctttcttcccctcagggtcgggtgcctcaagagccagtggcgctggccgggctccagccgcgagcagatgccaggcccggcacactttgcacgggcgatgcgcgcggacgtcccgggcgcgctcggtccgcccggcttggcaggagctgcgagaggccgcgcgcaccgtccccagggacagccggaggactcagggctcccgggtggagcgagagcgcggcggccgaccgcgggctgcgtgtgtcgccttcctcacgcggtatgctgcgccgtggaacgctgggctacggaccctgagggtgcactgtggcgggtggcgtacgccgcgctccctccccgcttcctgcgcccagggtcggcgggcagagttcctgggtccagcttggcgctgagcagcccccggccgcagagcagctcccgccggtcgggagacgccccctggcccccgcccccgcgtggccggccgggacgagctggagcagcgggaggaggcggcgccgccaggactgcctcctccccgcccctcgcgtctcctccccgcgccaccgggaaggacaaggggactgggcacggggaccccggccagtgagcgcccgtggcccgggaccgcccctcccttgagctctctcgccgcgatcccgggcgggtctcgccccgcatggtgctggcagcagccatgagccaggacgc

SEQ ID NO: 334069 - DNA, 590 bp, Homo sapiens
  chr10:112431835-112432425
  hyper
cgatgacggctctcggaggctcctggttttgatgtctggcattgcttttacccggtgggcttcagggagccgtccctgccgcgctttgcgtttctccgcgcacttggacagggttctgccacgagggaggcgatgcctggcgccgcgggtgggggcagtggtgagacttcggcccctggtggccggagaggtcgcagcacttgtcagtttatggctccctcggctttccccttcttaatccgctttctgctgagctctccgaataattcaaccctcgtgtttgaaaactagaagcctgagaggtctcagcgagacagtcaaaggggaggctcccctcgccgagtgtcacccgggaccctgcgtccccgctctgcagagaccttctctccgggctgctgccgtcctccctcgcccggcggagcttccgtgatcgtcagccaaagcccccggggcggtgcgccgcaggcggtcttcccgggtgttcgcggaagctgcgcgctcgcgcccccacggttctccagcgacccctgaagatgcttccgtccgcggataggggacgtttcagacctggggtgggcacagcggtcccc

SEQ ID NO: 334070 - DNA, 457 bp, Homo sapiens
  chr10:114135846-114136303
  hyper
cggcccttaggggctgaggtgaaaggctttgacacggagccagggtagctttggcagcttctcccctcctggtcagaacacttccactttcagttgtgaaaaaaaaaattaaaaccaggaagtgaagtccccgagcacgttagaaagcctgacatggcctgactcgggacagctcagagcagggcagaactggggacactctgggccggccttctgcctgcatggacgctctgaagccaccctgtctctggaggaaccacgagcgagggaagaaggacagggactcgtgtggcaggaagaactcagagccgggaagcccccattcactagaagcactgagagatgcggccccctcgcagggtaaggggaccatcgagggggtgttattcagcaagggggtcttgtgagggtgtgacagaggccaagggggcatcctgacccccgactttctttaagc

SEQ ID NO: 334071 - DNA, 654 bp, Homo sapiens
  chr10:114708972-114709626
  hyper
cggggatttcatttcagacccccttcgagaaacactgtagcccaactgatcccaggggttggtgaactttcagttttattttccctgacggtgttaacgcccaaacttttcacctcctaagtcaaaaaggactttgactctagctcatttcctactacctccaacgtcagttaaaaaaaaaaaaaaaaaagcaaaacaccactctacatttaaaagaatcatatatttttccttaaggatacttttaatgtttctgacatttagcatttgttttttgcataaaaagtcgttttggcatatccatcctagtgggacttaacatttcatgaaatgattcactactaataaacaaaaaagggaggagggaggcctcatgggttaatagtttctttcattgtagatgaccaggaactttgaccagccccttcacttccccaagctctctgaaagtggagggttgatctttccttttgaccacttttgtcgcatcccgtctaagggtggctgatttcactgctgaattaaccaccaagcacccccccaccccctcccccagccaccactttctcaaatactacccttccttttccccctcccttaagacttatttctaatatttctaaagtgcactgttttgggcctctccccatcccc

SEQ ID NO: 334072 - DNA, 942 bp, Homo sapiens
  chr10:114711931-114712873
  hyper
cgcgcagagcccggggccctggagaggctccttggctttctcttttgggcgactatgtatttagctttctagtggagattgctggctctcggccctccttcccccttcccctggaaggtcacacttcccagattggtcccaccgcaaacttgggggctctgaggcgtccttttctttggcaacccgcagggccgcgagcgccctgggcgccgtggcgggctccgctgcccggcgcactggctgcgggctctcccgggccgcgcagggcagcagggctgagtggggcggggaggcccctgcggcccggattcttggtttgtgtgcagccggaatggactcctccaagcggacttgtgtatttctagggaattttggcgccttgggatgtatggcggggtcggcgctcgccagcttccgtgtaggcccgtcgtgggccccaggggggccagagaccagggtgtgcgggctcaaggaggtgcgggggccgagggaggctggggcgcctctccttcaagggagtgggccgccgatcgccggccacccaactttgggggccccagggcagcgcggggtgccgggctcggggggcgcttcctgcagggtcggtcccgcgcccaaccctgacatttgttaatacggctcatcccctcccccaccggcctgtgccccctgccctcaccctgaaccccctcctcctcatccctccctccctcttctaagaagcctggattacgaatccctggacgcaagacgcatttgtgcccggcttcccggtattgtcattttacaccttctccagtttggtcccctaccccttatttacacacacgacttttgttttttctttttcggtaactctagatagcaatttgaaataatgcacccactgttcagcagccatggattcggtgctaatggccgagggcttgccggacgggagtc

SEQ ID NO: 334073 - DNA, 602 bp, Homo sapiens
  chr10:115998990-115999592
  hyper
cgtggaggagtcagctgacggcacagtgttcgcggctgcaccgctcggaggctgggtgacccgcgtagaagtgaagtacttttttatttgcagacctgggccgatgccgctttaaaaaacgcgaggggctctatgcacctccctggcggtagttcctccgacctcagccgggtcgggtcgtgccgccctctcccaggagagacaaacaggtgtcccacgtggcagccgcgccccgggcgcccctcctgtgatcccgtagcgccccctggcccgagccgcgcccgggtctgtgagtagagccgcccgggcaccgagcgctggtcgccgctctccttccggtgagtcccagccccgagttggctctggcgcccgggtacccgccagtgccggctgccgatgaccgattcacgctcccggtactggggccccctctgcccagccacccctacccagagcacccgggctgcgcggccccgccgagggtgcgggctttgttcgcattgtctgcgcgcacctgagcgcggccttcctggcacggcggcgtcgggggaagagcgcacctggcgcgcgcctccctcgtggccactcgcggtccgtcccgg

SEQ ID NO: 334074 - DNA, 997 bp, Homo sapiens
  chr10:116163447-116164444
  hyper
cgtccggcgcacccgggacggcccgcccaccggggtttggcggagatcctggcccccgccaaacccaaagctcgcccagctgcgcactgagctaagccctcgggtccggacgcctccaggagctccacctgccgggcactccattcggcccccgaccctcgcatccctcctttcttggtgtgggggagcaaagaagggcttggagagaaacgatgacccgaacggcaggacgtttggggaggccccacctagcccggggagggtctgcgcgcccactccactgcccaagcgctttgccgggagcaggaagcccctagcccggcgggcgcccgggagaaaggactcaacagcccgaccctttgcccccagcagctcagcacggttcccaccttcttcggggcttcctcggccccaggcatctttcctgtgcggcgggactgagggtggagtggggtgccgggctcaccctctctcctgcaacaggtgagaagccccgccacgccccccactgacgaccccctccttccgcgcccgggaggatcaaagggctcgggccgcagcagccacctaggagcccacccgcccagtccgcggcgccgctgtcgccccctcttaggcccaggtccgggctgggtgggggcagtgggctctgcttatcccgagtcctggcaagacgagtcctagccctgccctccgcgtcgctgggcgaaagggagtgggtgtgcgccgcgcgaggaacccgcgccctcacctttgtaccgctccatcggggccacggagtgcgctcctcgcggctcggcttctgcgctgctctcccggcgctcggctcagcgcccaggccgccgcgctggcccctccccgtgaggtcacgctcgcggccggacctcctggcggggccgccgcgcccagggtcctcggacctggcccccgccagggctcgcccccagcgcccctgtcccagcgcccctgtcccagcgccggagaactccggcccgcc

SEQ ID NO: 334075 - DNA, 916 bp, Homo sapiens
  chr10:116527415-116528331
  hyper
cgtgctgcctcaagccctggatttcttccatagccgagctgcaaaatggtaactagaaaggaggaaaaaatacctcttcctccctcctggccagcccttccacagctcccggcagggcagccagcgcgagcccatcccccacgcctcccagcccagacgcgcggcgggcacaggtgagcggggcgccgactttggcccttaggctcgcccacatccggggatcaaggtcaagggcgagggcttccttcccctgcccccggcccccggcagccccgagcccggggatccgctgccaaagtttcaggccgggctggggccggcgcggctgtcgcagcccccccgccctcccgcacctgttcggcccgccggggtcagtggacggtgcccacctggtccccactcacctctggcggacatggtgcaggcagcgggagccggagctggaaggcgttggacagccccgcagggcgcggggaagaaggcagccccggagcgcccgcccggccccggccccctccggctcccggtgcggggacgccgcccgcaggacacctggccgcccgctccgcgcagcaaggccgacgggcggggacgcagcggccgcagggacccgccgggcgcggcagcgctgacacccgcggccgcgctgggcggggcgcgcctcccccgccccgagccgccggggcccacccgggtccagcagccgctctgccgcggcgccgggcggggctctgtccccgaggaacgagggtctgcgtcctcccctctccccgcccgtcttcttaataagaagaaaaataacgtgggtgctccgaatggctctccagctctctggtcccagagagagaaagcaagaaagggccgttcgttccttcccctaagtgatgcccttgacaggagagcgaagaccacggtc

SEQ ID NO: 334076 - DNA, 976 bp, Homo sapiens
  chr10:116852626-116853602
  hyper
cggcggacgggaaggacttcttttctgctgaagctgcgaagcctgtgtcgatctctcattcgtggggctcccggggcgcggggtgcgggtggggccggggtgcccgcaccggccggggggaagggcacgcgggccacacctggggggcctgtctccagtcagcgcgcgggccaggcggggtgggcgcgcgcgcgtgggggagtccccggtccctgtcaggggcggggcgagaccaaggcgccgggcctgtggggaggagtgtaggcgcgcgcgagggcggggggcggccccacgcatcgtgggctcccggcgctgccgctgcggccggctcgaggcaccggagacagaatggctgccggggcgcccttgaccgccgggcgggcgaggcggggctgaccgccgcctccttgatcgcccccttccacgttgggcgcgcccacttcggggcgcccgctcggcccccgccctcctgggcgcgcggcgctcggagccgaggcagttggcgcgggccgcgggcgaggcggggccgcgcgcggggtcccctcctcctcccggtcaggtcccctcaggagcgccgggcgcagtctgcgcctcccgctccccgcctccggccgggtccgggacgccgcggctgtggggtcggcccgctaaggacaaggtcgggagactgggtggcgatgcccgagtgcgactggaggcagccgagcggaggcgacggcggttgggatctgtccctcctgaccggggagcgggactcggacgggcgccggtgaggaggaggagaagcggcggcggagaggttttctgcggccggaattcccttcaacagcatccctgtcggcgcccgcgagcgcagtctcgccgggcaggggcgccggggaagatggagactgggggccgggcccgcactggtaccccgcagccagcggccccgggggtgtggagggctcggccggcgggcggcggcggcgggggc

SEQ ID NO: 334077 - DNA, 1473 bp, Homo sapiens
  chr10:118030891-118032364
  hyper
cgctgcccaccgcgcacgtcggccctccgccccggggcatcctggcctgagcaacgacccgggctcccgggccacccccggctccagccacccgctccgcccggctgaaactcaggcgctttccgaggagaagtgcggcggcggactgggcaccgggcgcgcgctgggcgcggggcaggccagccatggtcagcggtccgccgggcggagagtgcccagaagctactcgggaaaaacttttctcttccaagtttgctctcccggccccaatgctccccaactccacctgcccgccgcggctccgcgagctcccagagactctctgggggtgcagggccctgggctggagggcttcttagtcccccgccaagttgggtcattaaaaaccacaggaaatcaaaaccaagcccgaaaagcttcaggcagcgccgcgccgccaccgcctccctaacccggggattcgcgatcccattccccaaaaagacacttcttccttccacatccaccacacccgcgccccaattttggtgcggagggcggggtgggctgctgcaagcgaccctaggaaagactcagagggtaagaaagcccgcggcgggcctcgacttacccaagagcggcagcgcgaagtacagggtcgccaggaacatggtgccggcgcggggctggtccccgcccccccaaaaaaatcccgagccgccgctgggtcttgccgagggagctcagcgtgcagcgatccccggacagctgtgctgctctggccgcccaaagttcagctccatccagtgaaagaggaaactccgggtctggcagcagccaccgccgccggcgactcagctccgggatggcgagggcgggaggcggttccgcttttaggggttcaggtccgacccaacctggaagggagggcgcgctttgagatgagagcggagagcgccggagactccccccacagaaccctctcccctcccccgttcccgcctttggggaatttccaacaccggggtgaggacccacccccacccaggtcggggtgcatgtgcgtgttttccaggggccgctgacacggggatggaggtgagggctggagaggtctgaagagggttcctaaagtccaagggggtgtctgttgggttcaacccgagacgctgaacgcaagcaaataaataaataaacggtactttccgagcgtcgcgagcggagcctgcagctgcctggagtccgagccctcggtggcggcggcggcagctccctagccagccctggcgccgaaagagccccttctcccgggaagttggcctccccctcctcgcgtcagccagcgagctcgctcagccgccggccctccccactccgatcgccaatccctagccccagtcgccgccctccttctccccgggactcgtctccctccagaggccgccaagccagggggaaccgatgtcccgactggggctgaaacccggttcctgc

SEQ ID NO: 334078 - DNA, 757 bp, Homo sapiens
  chr10:118032380-118033137
  hyper
cgccgcgcgtcctcggctccctcctgggcgtccgctcctctcacactctcgcccggtgcccaggactcgggcgcttccgcaccccagcccagggcgagcgcgccggcccgcagtcccggcgtgccccggcaggtgcagcccggcgccacgagcgccccccgggccctaaagttgggagacgccagcaaaaagaaaggggtggccggaggaggggggaagaaggagtggggaagagggacgggaagcggcaatgggttcccaaacagaacgaaaaaaactccaaatgccaccaacctggactcaaccgaccgcgtccagctgcggcgaggagccagtttgtttatttacttatttattctttcagggcaatggtgtccccgccccctccttccctttccgggctcactttatctgcgctaggaaaagaaaaaaaagaaaaaaaaatagatgcggtaatcttcgagagctcgaagggccgagttgggccaggacgatttccgagcagagccctcggctcggatgctcgttagggatgttagtggttattggaagcggcgcggagaatggcgtgttccgaggccagatttcttctggccagaggaccctcggcctgctcctgttcccgccgctccgcagctccagctccctcctaagctcgcccgccaggcagccgcagctgcacacgcccgcttgcggtgggacccgcggccggacccgtactcgcgcacaggacacgcagtgttctgcagccggccgc

SEQ ID NO: 334079 - DNA, 769 bp, Homo sapiens; identical to SEQ ID NO: 235129
  chr10:118608585-118609354
  hyper

SEQ ID NO: 334080 - DNA, 389 bp, Homo sapiens; identical to SEQ ID NO: 235133
  chr10:118890981-118891370
  hyper

SEQ ID NO: 334081 - DNA, 1659 bp, Homo sapiens; identical to SEQ ID NO: 235134
  chr10:118891580-118893239
  hyper

SEQ ID NO: 334082 - DNA, 979 bp, Homo sapiens
  chr10:118893507-118894486
  hyper
aacacttaaaatcagtccagcgcttttttctcggccccttctttattgttggtccgggagtaaggctcgaaggccgaggagctcagatatcgggcggagagttcttgcaaattcccagctagcgaaccagccattgttaacggggcggaggacaggcggctggcgacggagccgagcagcgagggcaccggcaggctgaagaggctgtggcccgcggccggggcgcctgcgtgcaatccccccggcccggcgggcccgggacctggagcaccgcccacagccggcgggtgcggggatgcagcgcccgctgggcccggggcggcggcggcggctgcggcggccgagcctgcagcggcgcccgcgcccagggccggcaagctgggcccgcgcagcgctgagccgagagcgcccgtggcgcaaggcggcagcagcgcaggcaggccgggcggcgacaacaggcggccctgctccagcagccgtagcacgctgcacgtggccgcggtctccgacaccaccgagcgtagctccgagtccttgccctggtccttcttctgcttggtgcgccggttctggaaccagaccttcacctgcgcgccggggtgcggggagagttggagagaggggcagggaagaccagcgtcaaaggaagcgagctcccggggcgcgcggctccggggctctccccaagtcccagccctatccgcagccccacccagcagccggaggggtccgggccggggcgctgctgggggagctggcgccgccacgagggggacacagctgctccaccgggctgcgcttccgggtcagggaagcaggcccaggcaggcgccgcttacacagaacaaagtaataaaatgcccacggcaggaactcgaaggaagaccggaaagggtttcactggcttccgcgctaccccgcagcggtgtttggggctcacagatgtgtgaatcagtgcagtcccaaagccggaatttcc

SEQ ID NO: 334083 - DNA, 1348 bp, Homo sapiens
  chr10:118896284-118897632
  hyper
cggggtgcggagcgcgaccacaaccaggtagcaaagacactgtgtggagggcaaggggcctaactccataccgctgaccgaaggagggaccacactttgtctttttgtagagtcctccagacaggggagagaaaaaaatccaatcaattccacataggcggacgtttcttccggcctgggggggcctcggctgagccttccgggtcccctgtagcctgagggtacccttgtcgccccgcccgggtcctgcgggccccagctctgggcttgccgaccagaccgtgatccagacgtccccacccccaccctcgagtctccttccctccggagtccgcgcggcggaaggaggagggactgagtcggggccggccgggcccggagatctgctgctggctggggcggcgccgggccggggcccggcctcgcagcctccgccgccggggctaagtgcacgccgcgccatccgagagcggcagagcagagcaccaaagcggcaaccgcggctccgtaaccaagcccagctgcctctcccggcggcagcggtcgggcaccgatcgcggccgtggggtcctcggcccagtgcactaactggcagggccgtagcccgcgatcggcagctgttctccggggctcgcgttcccccttgggtgcgctcagccctccagagcgcgggagtcccctggccggctcccggcaggtcgtccggcccttggagcgcgcacacctcctcccggagttttctgctcctttcccgggtcggaggccgcagcccgatgcccggccgcacccgcgcagcccctcatctccccccgcagcccggtcagcggggcccctccgggcgtggagggccgaggcccctggagagcgcaccggagagtcccaggcgcttgtccccagccggactcggggcggggagggccaacaactttctcccaagtcccagccggcactccttcccaccggcctgtgtcggcggcagcgcgcagctccggccccggagtcgaccccaaagaacgcgcctggcagccctgcccatccctacctcggaccaggatccggcggcagtaatccgggtccgctgcggaattggatttacttttgttacaatcctcagcagcgcccgacgctgagaaggcgccctgcggctccttgaggaaggcggctgggaggttcccctccgcgcccttgctctcccgactctccttgtgcgcgttcttcgagacccgggcagcctcggcgtccgagtggcatcgaacgtccattttgtctggtttcccgaacataggcaagaacaacaacaaaaacagaaaggaaaaaaaaagcaaaaaaaaaaaaaaggggggggggc

SEQ ID NO: 334084 - DNA, 657 bp, Homo sapiens
  chr10:118899685-118900342
  hyper
cggcgggttggtgaggcgggtgggagcagagacgggtaagaggggtaagggactttgcggccaccctgttctgaagatgtagagtgggattgtgttaaaatccggcgaactctcctgttacctcccgcaacgctcaaaagcccagactggcgccttgaggcaccgagggctttgctcccatgcggccaagccgtcgggggtgcagccgccgggtcttgactcccactaccgcgtcgcgggtgcgggtccctgggattcgggtcctcctgatgggggtccctgcagcagatggggcattcacttccctgcagagctcggcccgagggagctcctgggcctccttgggcagggaggggtgcgaccgaattccctggcacaccggcccttccttgccccctaccctggaggggttggaggggtcggaccctcggactacgcgagatcgggtgcgcaggaggattctaggccttcctcagccctttaggagccctgcaggcggcggaagtcccaaaccgcagccttggcccaaatgggacccagatggctctgggtccccggcccggccgcacccctctgtacggcctccttctgtcggtgaaggccgcagcggcctgggaaacccatgcggacacctgcggcgcccggtcaaagacctgg

SEQ ID NO: 334085 - DNA, 744 bp, Homo sapiens
  chr10:118927281-118928025
  hyper
cgggaaggaagccctcctccccttctcctgtggcttagctcagcgatcagggaggagccagttaagaagtcacagtcgaagccatgactgctgtgtcccggggaggcagtggaaggcgaggagcacggagcggggataccgccggacaacccctccccgccgccccgtcggcgtcctcgctgcgcaggggctcccttgctgccccaatctaaaaggaagccgtcgcggcccagggcacggtaactaaaaggccgtcggggagggagacgggaatgagtgggcttggacttgaggtttccgagccagctgctccctagagccgttcctgagctcgtcagccagcacgtatttaatgaatggccactgggtgctaggccttgcacgcaaccctttcgtcctcccccggggctgagccgagggtgacccaacactagtcggaacgagcctggagacatggcgccggggctgcgctctgcaggcctggcctggtcgctctccacgcacccctctctctgtagctgccgccccgcccggctctgcctgtgggcgccccctggcggcaggaagccgagcgcgcaccacgccctcggggctccatccccactcaccccggcgcctctagccgctccacccgcacccccagttcgcgctgcggcggccagcctcttccccgacggccgaccgaatgtccctcagagctttccgtgaccggccagggcgcgtggctgtccggagcccctccac

SEQ ID NO: 334086 - DNA, 835 bp, Homo sapiens
  chr10:119000780-119001615
  hyper
cgggcccgggggaggcagggaggcagggaggcccccagagctacgcgggcggggctgcggggaccccggggcagccggggcgcagggcgcagggcgcaaggtgcacggggccgagcgtgcagtttgggaggtggcacagttgggggcggcggggatcagggcagcgtcctgggggttctaggttgggtctccagattgggtccccgacggcgctcgcgggcgctctttccagggagcgcgggctctcgtggggacgcgctcgaggcaggtgagccgaggctggggcgcccgggggtgtccccggatgccggtgcgcgcggctccctgacccgcccttccgcggcctgggggacgggagaatggggggtccacggccgccttgggtcctcaccgcgcaccgcgcccgcagcggagccccggagccatggccctgagcgagctggcgctggtccgctggctgcaggagagccgccgctcgcggaagctcatcctgttcatcgtgttcctggcgctgctgctggacaacatgctgctcactgtcgtgggtacgtgcggacagggcacccctgccccggcaccccagccccagcgccccttccccggcactccacttacccctgcgcggtcccggagctccgccaaggcccgggaaagttggagaactcgctttgcaaaaaagacatcccctccaggctgccgcgccggggctaggaggagccgcgttgtgtggcttcgctttcctgatgctcgggtcaaaaactgtgacatccgataagacccagaacttatgtttccccctgataatttcccgcatcctcttgcctgctttcactgc

SEQ ID NO: 334087 - DNA, 542 bp, Homo sapiens
  chr10:119293016-119293558
  hyper
cgtgtcctctgaaatagcccaggtaccgatctgctccttgtcgccgagcaccagctcagtacaaggcgctggaggggaaggagggaagcacatcagcgtctcctcatagtgatgcagccaccccagccctcaccctatcccagttccccacgcgcccacgtgcctttggggtggatgaaaagatctcaaacgaccagctcctcattggggtaaaggagtgaagagattatctctgatagaggtcaaactccaattgggaggagggcaccaattctgtaaatgacacccgagggcacactcaccaggttcactgcaagccctgagcgttttgcgtttggtgccccgagtgtaagcctaagtattctgtctccgacacgtaaaacaacttaaagtgccattttccaacggaggcatttagaggcaatttgaaaattgaaacgaatctttatatgcaagactggaacgttccagaggccctttaaagctgcggttagaaaggcagttagggaactcaatgatgggctggaaggagacgattgaac

SEQ ID NO: 334088 - DNA, 1459 bp, Homo sapiens
  chr10:119293799-119295258
  hyper
cgagaaggggaacctcaacatcaagtgtctggcagatgggagtgtgtgttaagcgagggctgttttcgttgggaacgcacagcacagctcccttcctcagagccacctccagacccctcggccctcccacgacccccagttcccgggtccgaggttctgggcgccagcggcggccaccgcgccgcgcgagcagcttttattcgcactctctttaactcgccctttctggttctcttcccttcgagcgccctgcagcggagtgttagacaagccctgttgtctgtgggctctcacctcagagtcaatattatctcagatgggcacaatagactggaatgaaaagctaatattgaatcaatgctgtccctgtccgcgccgctgcgatgccaccctttgttgcgcacgccgcccccggcaagctgctggcggccggggctaagcggagggcggccgcggtcgggcctctccgggtccacgccaggggtgggaggacacttcgggcccagcgtagaggaggcctccgaggcccaagcgggcttcggctgctgcgagtccccagaggctccctcgggcctcactcgcggtgtctcctccagacgccaggggcaggccacgaagccgagggctccgcgtggccgtgggagaagcggggtgcacggagccttcccgcgcccagacgccgaggggatgcaaacaggggagccgggcctggtatggccaacctccaggatcgaggggccccagaatgtgcgtgtggccgggggcgggggcagctgcgggggccagaactagagtattccttcgctctcccctgggggccgggcccccacgagttgcagcagagcccgtctgtaattagggcctcctggtccggcaaagctgcggctgctcccagagagagttggggtcttctcagggcccgcgatgggggagtggtcgtggtcagacccccgtgagccccttcggaaggtcccagtccctgtccattcttctgtcccgcagctctctccgcgcaggcggggcagagccggggaagaagacgctggacgaggggtcttggggccgcctcgctggctgcggttggaagcacccgttttcccgcccgcccgcgcaggcgctgctctgtggccaccagcagaggtttcccggccgctgtgagtcgcccacgcgagcgacgtggggatacggggcgcacggagtctcagctgccgccacgcagcgcttgccctgcccgagcttcggctcactggcagcggcgaggccaccgaccaccctccgccttccagtcctaaactcggggctggagaccgcaggagctaaaccaggaagaagaaagagggcagggcctgaggccgggaagagcggcccgggggtcaacggtgagcgggtgcatacgaggcaagagccagagtgacattaagtggggccgcccgggcaaaccttgcgcgtgcaccccggc

SEQ ID NO: 334089 - DNA, 707 bp, Homo sapiens
  chr10:119296209-119296916
  hyper
cggtcctaggctttcatttgaaggcagctgagggagaaagaaactgcaaacccctttggttctgtttccttgctttcaataatgaatcgagacagcgtgtgtgtggtgagggagtgacgagtttcaacgtgatgaaggagataaaacccgacggtggggtcctgccagtggctccatgcgtcactgaaacattgggtctcaaaacggatagatctccggagacgcagaggttcgcgcggatgtccagaggaggacagcgcccctgcagccacccgcggagcccagggccagggtcaaaaccctgccgcaagggctcggagctccaagcagttatgctgagggcgccggtcccaggccgccttgctatgacacgggtttccagtgaagcccaagcggattccacggccccacatcaccggaggagccaggctgccccgggatggatggggtccgcgcgctccgagaggaatgggctagtcaatgtgcgctgctaggagtgtgtggtaatcaatcgccacccctgccaaaaccaaggaccccctgtgtcgggcgtcttcagccagccgcgagggggcgcggatctgagagagtcgcaccccgggaccccagctcttcctactccaccccaggcagggcccgcgcaggccgtccaaggcctgttctctgaaccacctgggttgggccgcgaaatatgggacctcaggcat

SEQ ID NO: 334090 - DNA, 463 bp, Homo sapiens; identical to SEQ ID NO: 235147
  chr10:119297139-119297602
  hyper

SEQ ID NO: 334091 - DNA, 751 bp, Homo sapiens
  chr10:119300904-119301655
  hyper
cgccagcagcctggggatgtgatcataattatgccgccgcgcgagccaatggggacgagggaactcggtcctaaaatcatcccaaaaccgaaggcgagctcgaaaatgcggacacggcccgggaccggagatgcgatccgtagtcgttagttgcactgggtttgcacagcaaccaccacccccccaccaaccccgggacaacagatggcataataataataatagaaataataataataaaataatatcatctataataataataacattgaccacactgacaaaaataattacgacggaaccttaatagtacagtagcaccatatcgggctctcccctgaccttggactgccggtcccagatattccagaaggaattgttttggggaaggaggtgagcaccctcccagacagaaaacgctagagaccgtggggcgagagagggagagagttggaagcccactgctccggcggggtcggcagctcccggtctcaactcgcaaacgaacgagccgggtcaagaatcgcgaacgcaccgaccctgggacctcgaggctaagcgtggttgatggggtgggaggaccccgtacccctcactccaggatccctcctggcctaggaaaccgctgggagttttgctaagtgtggggattggtataaccgaacggcgcctttagcccgggaaccagcccctgcccgcttaccctcgcggtgctcttggggcgatcccagttctcccgacgcggggccgc

SEQ ID NO: 334092 - DNA, 1371 bp, Homo sapiens
  chr10:119302490-119303861
  hyper
cgcctgcaaattcttctggaaggattttcccccctctcttcaggttgggcgcgtttggtgcaagattctcgggatcctcggctttgcctctccctctccctcccccctcctttcctttttcctttcctttcctttctttcttcctttccttccccccacccccacccccaccccaaacaaacgagtccccaattctcgtccgtcctcgccgcgggcagcgggcggcggaggcagcgtgcggcggtcgccaggagctgggagcccagggcgcccgctcctcggcgcagcatgttccagccggcgcccaagcgctgcttcaccatcgagtcgctggtggccaaggacagtcccctgcccgcctcgcgctccgaggaccccatccgtcccgcggcactcagctacgctaactccagccccataaatccgttcctcaacggcttccactcggccgccgccgccgccgccggtaggggcgtctactccaacccggacttggtgttcgccgaggcggtctcgcacccgcccaaccccgccgtgccagtgcacccggtgccgccgccgcacgccctggccgcccaccccctaccctcctcgcactcgccacaccccctattcgcctcgcagcagcgggatccgtccaccttctacccctggctcatccaccgctaccgatatctgggtcatcgcttccaaggtacgtgccacgtcgcggaactgcagcgcgccgctcccgccgcatccttcactgcccccggcctgctccgggtgggcgcttggcaaggcctgggcggaggttcctccggctcgcgggccagcgcgccctgttgggaaactaggcggcgcggggccgggcgtggtgtcgatccccagtctccgaagctacgactggtttggagtgatggcctgcgggccgcttgaccctttgggaaggggtgcgaacggagaagttgtcccccagtgcgctcgaatcagagcaggctgggctgtgcgtgcccggcgccgcggagcccagagcccgcgggatccccaggctcctggtaccctcggcaatgcccccaaccgtcctggctccgaggggcgcggacaggactcggccgccaggcttgctttcgactgcgttcgaccctgttcaccacccactttgcgccccttcagtccagacccgcggcttcttagtcttccaccctcttctggaggcgagaggatcctcgcgccccgggagaaaagtatgggatttgttttttctttcctgcttttcggaggcctggggaggggcgggaacccgtgcgggaggaaagctccagggcttggcgctctcgccgcgacctgcttaattggggcgccgagcagccacagcgggaaggcaggttc

SEQ ID NO: 334093 - DNA, 698 bp, Homo sapiens
  chr10:119494306-119495004
  hyper
cgactctccccgggtcccccaccccagccaagagggaacctgccaatcaggctgcgccaccaccaggctaggaagcctagggtcgccgatgttccaggatggaatgttctggtgtcaccgtgcgggggggtggggggtgtcacagagctgggaactcgctcagagccagggtctctgctggggtcagcgtctgtacgctaaagccagggcgcaaagtgcgtgggcactgcggacactagaggcttatggcgctggaaatacaaggccgagttgccggcgcaaagagttccccgggcgggttggtgatgcggcgcgctttgataacaggttaatccggccaacattcgctccgcgagagagccatcggagggctccgggagactgcggcgccacggagggagaggcggcgagaggcccctctgcgagcaccctctgggcgcagtgcggtgggctatgctctgcgcagccccgggcgcgcctgggttctcagagcccaagacctgagccgctccgagcgcagggcgccagttctctttcagaagcgggagaagttcaggtgggacaggagacacgggggtgaggagatctttgagagggccggccgggaaagtgggggtcgcctgtggctgagagggccgcatgccgaaggtcccgaccccaggctcacgacaggcagcctggcacgcaggaaggggctt

SEQ ID NO: 334094 - DNA, 1305 bp, Homo sapiens
  chr10:121301366-121302671
  hyper
acccaaaggcctgcacaggtcgtagctattgtgatgagcaaaagggtggaaggaccggaatcaagggcacggctccaccttcaccgtggggtctttggcctatcaagttgcccgagatcgtggctcaggctggcccaaagtgacggccaaggcgaatccttcgtaacgtcagaacttcgctggctcggaccgcagaagtgcccttctccatcctggggttccgccaccctcgcgatcccaccttttggctcctcgcggcagaagcgaaggcccccgacgccccaggcccaggggcccagtcggatgcccgggtccagccgtgctcccccgggcgctcggcatccttccacccacgcccgcagcggaggcggagagcgtcacggagggagaagcccgcgcgccgttccgctttcggaatctggagccccatgtcacctccaaagtttggagatttggggcgctcctttttctcccagaccatcactaaaaagaaaactgcggctgttcctctttcagccaaacttcctccccggggctcccggaggagctctgcgctcccgtcgcggctgggaccgcgaaggtgcggtacccagcggggagaggtggtgcggtcggccggggctccagtctgggaggtaccaccgagccgcgcccgagcacaagagggagggcaggaggccgggcgggcgaaacggcgccccgaccccgagcccgcgggcccccgaagccgcttacctgacggcggccgcttcctgctcagccggctcacggcgcggttgaacatcgccgcgggcgcccgaggaggaagaaggagcagcccggcggcgcggcggctgagccggaggaaggcgaggaggaggaggagggcgaggaggaggaggaggagggcaaggaggaggagcgggctcagcaccgccccggagctctaggtccccgcccgccgccctcctcctagccaggcgccgcgtggcgcgctcagtgcgccctgcccgcccccgctggtgaggactcgcggttccgctccggggtgcccgggcggggcagggcagggcagccccgggtgacccccgatcgcccagagtgtgccccgcgcctgggataaggtgcactggcccagagggagcccgcgccgccgggaacttagtagccccgcggaggcggttagcgcgtcccggggtccctggccctcgcctgagatgccgccccggcccgccccgcccagcttcaagctcccgggcccatcgcggtctcccgccttctccctgtagccccggagaaactggcacggcgccgcgggcgcaccgc

SEQ ID NO: 334095 - DNA, 872 bp, Homo sapiens
  chr10:122216127-122216999
  hyper
cgaagcccgcgagtgatctctggggaacttcctagaaaaaagaaagaatttcaggttcgaacggtgtagggagggccgaacacgggagcaaggttggccagggctgccctgagccctggagaatccccagagcgatcgtccactacatgcccacgtgcgtgcgtgtgccagggagcgagagcccggacagcgggagtcggaggcaggaccaggagctgcagaggggccgcgggcagagccccagcgagcgcgctgccctggcgcggagcccaggggccgcccactggcgggggaggcggggagcgcgcagggaggcggcggcggcggtggggcttccccgggcttcccctccccggtccgcgggtgcccggcgcgggcccaggaggcggaggcggctcctggggagagggatccgggagtccctgaggcggccccggctccgcactaggaggcggggtccgcagtatcgccagcggccggcgcggcttcccggagccccggagcccgaggcgcgaggtttaggctgagccctccccggcgcctgcccccgcccggcgcccgcctccgcccccgcccgcggcctggagcgcgcctccctcgcctcccagggtctggcgagccggcgccggccgagctgcgggagccgcggagagcaccagctgacgccgcgggagctgctccggccgcaccatgcgggagctggccattgagatcggggtgcgagccctgctcttcggagtcttcgtgtaagtagtggcgcaccgcgggcagggcgcactgacgcgggggaacaaccgaccaagcctctctgtgccctaacttagtttgcgcagccgcttcccactggggcctgggttcgaggtcccttcccc

SEQ ID NO: 334096 - DNA, 388 bp, Homo sapiens
  chr10:122708510-122708898
  hyper
cgcagtggtcccgcccatcgccgcctctacagggagggagccgcggccccgagctggccacgcgatggcgctgtgcacccggccgcggagcccctgcacgtccggctcccgctcgcgctctcggctcgagctccggactccaggctcggagcaggggttcgggctacggttcccggctccgagggaccgcggggctctctgcctgggaaggaagcttgcgggcctcctcgggcctcgctgcagcccagctaggttaatcaatcagcagccgctcagtcacccatcccttccgcatcagttgcgtggggctggggatcatgcctagggcgggaggcgtgggagcgcagggcgccccgggtccggatccggctacaggggcgaacagagc

SEQ ID NO: 334097 - DNA, 403 bp, Homo sapiens
  chr10:122738987-122739390
  hyper
cctgccaggaggtgcggatgctgccggcgcctggaccgcgcgttgagcagtgcaggtgaacagctcgcctaacgcacaagccacgcccacaccctttctacacgctttctcgttcacttctcattgcaactccttccgccgcgtggacaggttcagcactctcggagtcgatgtcattattcgccatcgacgcgaacctcggcaaagagacgggtcttaccggtctccgaatgttctcaggccctaagcgcgcagccccgcacccgggtgcagccggcgcggtcccacgtgtccctaccgcgagccgctccccgcgtccctgctgccgccgcgcgcttaactctgcctgcccgcccgccccgccccgcccggccgttcctgcgcagccctgggtcggcctcgc

SEQ ID NO: 334098 - DNA, 1320 bp, Homo sapiens
  chr10:123356997-123358317
  hyper
cggccccaccccagcggccccctcccgaaaaaggggtctccgcagggcctggatggtacggaagttcccaggacacacggatggggcacctcggagatgaccccgggaaccggcctgcggggctgtgccacgggcaggcgaaccttccgcccgtctgctctggggtcggagaaacgcgcccagtcagcgggaatgcgcccgccagggtttgacagggaggggggcgtcaacgccagaagcagatgtcagcatctggatgggggtagcagaggcagaacttccagaacgccggccgtcagcacgcacccacctcccccatcacctatgcagccacagagggaggacacggagcgtcctccacaatgctagtccttccgcgccccccgcccggaggacggtgcacccggcgtcccgggctcccgtggcgcccacgtccccggctggcgaagctccccgaggcgtcttgcgcggcgattaccttgaatggcaacgctcctccgcgacctgtgttgtccccgcgccccgcgtgggtcgggatggagaaagcgacgagcccggggttgcggggagcaactccaaacgcagaagagtggtccttgggtcttcgccggcgccaagcctcccgggcttcacgcgtaccccaggctgcggaggagcgcgggcatgacgcccgcgggctgccctcggatttggggaacgagaggaagaaaggactcaggcttggcgttgcctccaccaaactttgctcgcgagttgcgaaggctcagagcgcgcaggcaagctgcggcctcggggcccccggggctcgcggccggcccccgccagcccggagagcagtcgccgcgccgggccaggtacgccgcatgcagccccgcggcgcccgagctttgtggcggccgcgcgcgctccctcgcccgctccgcacccgccgcccgcccgctcggctctccaccgcgctctcctccagccgccgcccgcgccgccgccgccgcccccgcctcctcgcggcgggtcacgcccccactgaaacccgagccgtttcctggacggcggcgccctctctgccaatcagcgccgcgcgcccgggccgccccgagtcccgcgcggctcccgacgcctccgagcagccggagacaccggcccgggaggcgagggctcggccgcgatgcggccgtagggatgcagcgacagcctccgaataaggcctggtcccgcgccccgcgccacctcctccctcctccccgggcgagcgaggctggccaacggctcgctgagcgactgcgttacgttgttttatgtcaagttagaaaacaaatgacc

SEQ ID NO: 334099 - DNA, 933 bp, Homo sapiens
  chr10:123922645-123923578
  hyper
gctgcctccaggacccggggcctgaaggaggcagaagccggcggtggaaaagggcgcacgtctctcccagcgtcgctcccgctgcccgctgcccactgcagcctatttacctgttcctccagccatccccttagtcctgggccgggagagaccatttcctccttcctggagggatgagccaacagggctgagccccctactctctcggtggtcagcccgcccgaccaccacgcccctcctttctagggccccagctcccgggccgcggctcgtttgcatttcaaagctacacaatgcgggcggtcccggcgaggcgggaggggccggggcagagggagggtcttcgcctccccacccccagccccgtttccggagcccgcgatggagctttgtgaagatgcaggcgttggggctgctcggcgatgatgacatcatcgtgtcacacacaggagccggctgccggggggtttaagagaagagcctttcggaccacaccggcgctcacgctcatacccgcacgccccgggcagagccgcgcacgccggccacactcgggcgcgcgccggccacactcgcgcgcacacatacgcggcgctcgccccccggcccccggctcgggccgcgagtcgcagctccctgccgccgctcccgccgccacggatgcccgcagctgctcccctctgcagtgcagcaaccccggccgccggccggctcgccccggctcccggctgcaggaatcgcgccaggacgctggccccgctcgcggctagcttgcacgccagggcacagcgaggatgggagggtcgcagtccctgcagccagccccagccagcgacctgaacctggaggcttccgaggcaatgtaagtgctccgcccgggccgccccgagtctcccggggaggaggagaggatgcccgggctttgttagtgtc

SEQ ID NO: 334100 - DNA, 924 bp, Homo sapiens
  chr10:124133665-124134589
  hyper
tgctgaaagaatttcgactaacccttctttaagtctctcttaccctcctgtactattaacaccattgtaagtaggcagtggagctacatttgcagggagagagaagagcgaaaaattggcgcgcagagctgtaaagcgtttttctccaggtcacaccgcagcctgtaaatttgtgacacttggaccgattatgggacagcttgcaaacaaattatctgcaaactaacgaagcctatttttaaagatccctgttcctcgcagctctaggcgatgacatcagagaacccggagttctacctccgagccaagcccagtggtggtcaaaaactacgaataccaggaagcaccgcggcgcggcggcccagagctccgcgcgcaggcctccccggcgcgccgaggccgccgccgctggaaccaggaagacgccagaaactcggcccgccacgccgcagggacccgcgcggggcctgccgggactcgtagtctctgcgggctgggagcgcccgctccggaatctcagccgccgtctgagggctgaggcagcgtggggacgcgtgcgcagtgcgcgggctggccgtcgcggacgccgctccgggcagccgagcctctgtgggagccggggccgcggcggcgcgggtgctccgggccgaggccgcggtaaagtttagcttgaagaacgcggccgcgctggagcaggggtggtggacggggccaggcgcgaggtggcggcggctgcggggctgccgggctgctggagcgcggttcccgctgtggcgagcggggaggcgtccgcagaggggcggtgggtgctggtgagtgcggagccggcgccccctctgcgcacgtccgcgccacgcgccacagcacctggaggccgccgggccggctcacctgccctggcttggggcagcgggagggggcggc

SEQ ID NO: 334101 - DNA, 1366 bp, Homo sapiens
  chr10:124220873-124222239
  hyper
cgctgccccgcccgcgccccgccagcaccgccgtgcccgggcgcgcccgccctgccccctccgcgggcggtcccggtccagccgcccgccctccctcccgccatccggccagcccccatcccgggcgccgtgcccgtccccaaggcggctcgtcaccgctgcgaggccaatgggctgggccgcgcggccgcgcgcactcgcacccgctgcccccgaggccctcctgcactctccccggcgccgctctccggccctcgccctgtccgccgccaccgccgccgccgccagagtcgccatgcagatcccgcgcgccgctcttctcccgctgctgctgctgctgctggcggcgcccgcctcggcgcagctgtcccgggccggccgctcggcgcctttggccgccgggtgcccagaccgctgcgagccggcgcgctgcccgccgcagccggagcactgcgagggcggccgggcccgggacgcgtgcggctgctgcgaggtgtgcggcgcgcccgagggcgccgcgtgcggcctgcaggagggcccgtgcggcgaggggctgcagtgcgtggtgcccttcggggtgccagcctcggccacggtgcggcggcgcgcgcaggccggcctctgtgtgtgcgccagcagcgagccggtgtgcggcagcgacgccaacacctacgccaacctgtgccagctgcgcgccgccagccgccgctccgagaggctgcaccggccgccggtcatcgtcctgcagcgcggagcctgcggccaaggtactccgccgcgctcctgggcagctccccactctctccatcccagctcggacctgcttctgcgggactggtgggcaggttgaggggcagcgaagcgttgtggggtggccagggcaactctcggggacaggcaggtgggccccggggtggcggatttccgcgggctgcctcggaaccgagcttcgcgcccagcccggggccggttctgcgcccagacgatgccagtacgcccggcctgcactctggggctcgagacgccgggcgaccggccatggagtgccctgagggcaaccacacagcgcggggaccccaggacaaataagaggaatgggggcataaaggaaggagagaagttcaggactgggaattggcgcctcgcagagcggcttcaggaccacaagaagtcatttcggttgctttttcttctatttacgtcctccgtcccctttaaaattcactgctttgatcacgggaccgctcagtgaaaactgtatgtaactcttttggaaaggaacagtgtttgccggcccgccccggagtttctccaaaaagtctaccccgagcagggaacggtttggcaccgctctcgtttcggcggc

SEQ ID NO: 334102 - DNA, 624 bp, Homo sapiens
  chr10:124639064-124639688
  hyper
cgtcgaaaaaccgccgtggtgcccgcgcacagtgcaccgcgcctgcgcatggtctccaaaggctgagcgagggcctgccagtgcgcatgctccgctctttagcgcttcctgagcaaagtttgaacgcctctcgagtccagttggcttatgcgcatgcgtttctctggtgcaggttctcaccaaatccagaagcggcgggcatttgaaatgatgtaagccgggagtcgctctgcctgcccgtttctgcgctgcactggccgacacttaagcactggaagagaggcctggcaggaggcggcgcagtggacacgcggtccgaggacgggggcctcacccgccgccccacgcttgcctcttcctgggatgccgcaggcggggccctaactcacagcctcctcacccgggctcgtgtctgcgcccgcgacttcgactgggaggagcttctggcgccacctgcgccacggtgcgccgggccgccggcgaccgggtcgctgcgctcggcgactgccgcgctcctcggggaacgtgagggtctgagtccgggatccaggagagcagttggtgtcgggtctctgcgggggagcggggctgcgaggtggaggcgaggaccggggtgggcggagg
